United States Patent Application Publication US 2026/0258423 A1 - sequence listing, part 34

SEQ ID NO: 167803 - DNA, 46709983 bp, Homo sapiens (residues 45,041,779-46,709,983 of 46,709,983)
  source 1..46709983: mol_type = genomic DNA
cctgcctttgccccaccattctgatgttttgttcgatgtggacgttttgcattcacttagattctgcaaaatcttgcgttaaaatatgacttatcttgattcctgaatttttccatgccttttgtacctgaggggactgtcacactcacctaagccctcaccaggccctagtgggtcagaaggcgggagtacagtatctctgtgtgtgtgtgcatatgtgtagtgtgtggtgtgcttgtgtgtgtttatgtggcatgttgtatgtatgtgtggtgtgcatgtgtctgtgggtgtgtgtgtgcgtttgtcatatgggtgtgtacgtggtgtgtgtgtgtgctgtggggacgtatggtgtgtgtgtaacgtgtgtggtttatatgtgtgtgatttatatatgtgtgtatgtgtgtaatgtgtgtggtttatacgtgtgtgatttacgtatgtgtggggtgtgtggtttatatgtgtgtgtatgatgtgtgtagtttatatatgtgtgtatgtgtgtgatgtgtgtggtttatatgtgtgtgtggtgtgtatgcgtgatgtgtgtatgtagtgtgtgtaatgtgtgtgtagtgtgtgtggggtgtgtgtgtagtgtgtgttgtgtgtgtgtggtgtatgtgtgtggtgtgtgtgtgtgatgtgtgtgtaatgtgtgtggtgtatgtgtgtggtgtgtgtgtgatgtgtgtatgtagtgtgtaatgtgtgtgtagtgtgtgggggggtgtgtagtgtgtgttgtgtgtgtggtgtgtgtgtggtgtgtgtgtgagatgtgtgtgtgtactgtgtgtaatgtgtgtgtagtgtgtgtgtggtgtgtgtgtggtgtgtctgtagtgtgtgttgtgtgtgtgtggtgtgtgtgtggtgtgtgtgtggtgtgtctgtagtgtgtgttgtgtgtgtgtggtgtgtgtgtggtggctacagcctggctgaaggttggagtgtgagaaggcggtgtaggagaagccatgtgagttctgcctgcttccgcattgccctcagcgcagggtcctggccttgggagtcccagcacagtccctctgggtgtggagacaaacgggtgggcttgcttggctccaggtatctgccggccctccccatcccaccccccagggctacagagtggggacaacctgtgggtgctccccgaggctgcccaagggcagcctggaggaggggaaggccccgctccaggtggccacaaacgcaggtctgaggctcttgcacaaaccccacagcgcacacaggtaacacatcacggcatgcacgagtcacacaaacacggccgcaatgctgggcactgcagggcggggcatgccgatggggctgcactgggtgggtgtgaagcatcaggcctgggctggcggctgtggctgtgctgtgggacatcgctttcttgggggatgcatgttgagagtgtgagagggagtgtcctgatgtctgcaccttactttaagtggctcggcaaaaaaacctaaagcgcatgtgtgtgtgtgtttatagacagagagcaaaatatacaaaggtgtttaaaatgggtgaatctgggtgcagggcacacagctgttcattgtactatttgctcaactttcctgtgagcttgaaatttttcaaagtagaaaatttagttttaagaaatccataaacgaggctatatttttatttatgtgattctaataccctaattttaaaaaagaaaagaaagtttccattcccgactgaaaaatacctgtggatgaagaggcatgaagacacccccttcctccagggcccgatgtgagcggggcgggcaggatgtcctctctccctctgagacctgggggaacagggcgggcaggacgtcccttctcccttcgagacctgggggaacggggcgggcaggacgtcccttctcccttcgagacctgggggaacggggcgggcaggacgtcccttctccctccgagacctgggggcccagctgcatggcttctcagctgcgctttctgtccaggacctgggcacctttgtgtttcctccaacagaacactttggactggccaggagtctgggaggcaggtttccaagagcagggacaacatggacttcagcaaagtccagcggcccccaggcggcatcaatacccaaccccctacacccaagcacatccgtcaatggtcagaaaaccaaaagacaagcagaaaccaggacggccgcccgaagaacggggtgccctgggccaccactctaataaccagctacaaggaacggaggcccggagatggtgcaaaacatcttgaagagactacaagaataaaaacaacctgccatcccataattctatgcctatccttccagaaataaagctattttcagatcaaagaaaatggacagaatttgttcacagtagagcttcatgacgtaaaatgctagggaaactgcaggctgaagggagaagacgccgagcaggagatgggccttctgggaggatggaagagcagtgagaacaccaagaggtgggggaggttagcataacagacaattttcctcctcgtcccaagccttttgaaaataaaaatgataacattgcactgaagtgctgtttacacgtgtcgatacagtacacacagtgcagtaggcagaggggtgaattggcttataggcaggccaaggtctcacgttttccaaaagtggcacgatattggctctgcgtagaccatggggtgaagtgtgcgtgcagtgaaacctggagtgaccctgaccgctgatacaagcaatggtgtggacgctgcttgcagacacgccgagcacccaagagtgcattcggggtgattccatttatatgatgtttcaaacaggaaacgttcatctaaggtgaaatattcagaacagtggtttcttctgggcataggattgactggggagtgacgtgagggacctttctagggagataataatgtcccatgtcatgaaagggtttgtgagttatagcatgtgtccatttgtcaaaatggtacagctgattgagaagaatgaacttgaagactgacactccccggcttcaaggctgactataaagctacagtaatcaagacagtgtggtactggggggaagaagagacaaacgggtgaatggacagaatagagagcccagaaatagacttgcatatatgtagccaatcgatgtttgccaaaggagcaaaggcaaaaaaatggggcaaagacagagggtgctggaacacctggacatccacaggcagaaaagcgagtgcagacacacaccctgcaccttcacaaaaattaacccaaaatggatcacagacctacatgtaaaatgaaaactgtaaaactcctataaggtaacacaggaaaaaaatcaagatcacccaggatttggtggtgatttgtaaaaatacaacaccaaaggctgacccatgaaagaaatcatagatcagcagaatattaaagttaaaaacttttgctctctgaagacactgtccagagaatgagaagacaagccacagactgggaccaaataactgcaaaagagatatctgttaaaggaccgttatccaaaatacacaaagaactctctgagccctgcagtaagaaaaggaacagcccaattacagaaacaggcaaaagacctgaaagatgcctcatcaaagaagacacacagatggcaaataagccatgaagagatgctcaccattatacatcattagggaaatgcaaattaaacaacaatagataccactacacacctattagaatggccaaaacacggccaccaacaccaccaaatgctggccagggtgtggagcaacaggaacgctcatcattgctgctggaaatggtgcagccactttgcaagaccgtttggcagcttcttatgaaactaaacactctcttaccataggatccagcaatcacactccttggcatttacccagatgagctgaacacgtatgtcgacactaacatttatagcagctttatttatagttgccaaaacttggaagcaagcaagatattcttcagtgggtgactgggtaaactggggcacatccagactatggaacattattcagcactaaaaagaaatgagctctcaagccatgtgtcttattctgttcaggctgctataacaaaacaaaataaaccggatagcttataaacaaccaaactctacttctcacagttccagaggttgggaagtccaagaccaaggtcctggaagatttggtgtctgtccagggcccaactcttggttggtagacaggaccttcttgctgtgtcctgacatagtgggagaagcaaggcagctctctgggctggcttttgtaagcgcactgctttcatgcatgagggcgtagtcctcatgatctcatcacctctccaaagaccccacctcctaatactaccacctcaggggttaggatttcaacatatgaattttgggagcacacaaactttcagtccctagcaccatgaaaagacacagaaaaacctgaaatgcatattactaagtaaaagaagccaatcagaaaaggcttcataccatgtgattccaactatatgatattctggaaaaggcaaaatgatggaaacaatagaaagatcagtggtttccaggggctgaggggagggagggatgaacaggaagagcatagagggtctttagggctgtgaaactcttctgtgtgatactataattgtgggtccatgccactgcacatctgtcaaaatgtatgaaatatacaacaccaagagtgaaccttaatgtaaactgtgccctctgggtgatagtgacatgtcaacataggctcatcagttgcaacaaacgtccccctctgcagggggtgttggtagtggggaaggctacatgtgtggggtcagggagtgcatgggaactctgtaccttctgctcaattttgctgcaaaaccaaaactgctctaaaaaatctattttcaaaattgtacagctaagatttgtgcatgtcaatgtatataaatctgcataaaagacaaagtaataattgagtgaggggtgaggagtaagtaaaggcatagattatgcaacagtgcctgggcatggtggctcacacttgtaatcccagcatgttggggggctgaggcggcaggctgcctgaggtcaggagttcaagaacagcctggccaacatggtggaaccctttctctactaaaaacacaaaaattagccaggtgtggtgacgtgtgcctgtaatcccagctactcgggaggctgaggcaggagaattacttgaatccgggaggcagaggttgtggtgagccaagatcctgccactgcactccagcctgggtgatacaggagactctatctcaaaaacaaacaaacaaaaaaatgcaagagtggaggaatgtgactaagcatggtggctgggcggtggatacatgcaagtgtcatgtgtatttctgtgtactcgtatattttgatatctttcataacaaagacctttctttataaaagcaattgaagagaaaatgctcaaaagggaagaccatcaaaagagattaaatatgtgcatgactgaatatcatgtcagttgtaaagagaaaagccagtctggctcagatttctttacaatgacaatggtactagagggtcgtggagcatcctaggagatccttagtgaaagacagtgtgaacaccagtattataaccagctaaactgtcacagacatggaaggcaactgacaaacatttcagacatgcaaaactcagtgacattattcctatgggatagaggataaactgtagccaactaagaaatgaattttaaaacattattggaagcactagcagtaagttttgaatctaactataggactaaggctagaataaatgtgtctggaagaatttataagaatgtaaagtgataaatttctgagcatagagaaatcataaagctaaccacggtttggagtgaaaggcagaaagtaggtggggagaagctgggtgcggtggctcacgcctgtaatcccagcactttgggaggctgaggcgagcagattacctgaggtcaggagttcaagaccagcctggccaacgtggcgaaaccacagctctattaaaaagtacaaaaattagctgggcgtggtggtgggcacctgtaatcccagctactcaggaggctgaggcaggagaatcgcttgaacccaggaggcagaggttgcagtgagctgagaccgtgctactgcgctccagcctggggaacgagggcaaaactccatctcaaaaggaaagaaagtaggtggggaggaaaagggtgctgacttcctcatctttacagccagggctaagagatattatttaaaattggtgaagcaagttaacttcacagtgacaggtaagaactaagaagggtgagggtgactgaggagcggcggaggctgggttcccatatcactcccccagctccgctcacgatggggctcagtaaataggagaataaaacagcatcaaactcagaaaacgatcgtttaaattttgtaaccaaaataaacatatccaaagttgttctcaaaatagtaggtatttgttttacacaaaacgtgatgacagtaagaaatattgccagtatagacatcatcccttccaggctggtctttttaattttgtatccaaaagctacagtggtaagacagggtagccagaaaccatagcaaaaagccacttccatttagtgattgcataatcatattatcagaagagctcagtaaaatagaattttagagttgcttttatgtcttcgttaaaaatgtttcttaggccaatgtgaggttgagtggtcaacttaagatttttctgtggaatacatttcaacattttttaagtcctaagtctgagaaactggctgtctgctacacgaaaaccaagatgcgatgttctcagatctggttgtggtctccaggcactccactatctaaagaaagtaaccccctaaaatatcccatctctagaccatatattcatttgctgagaagtcatttgcaagggaatttccatattcaatagccgcagtttaaaaacttatttggggttttccatactaaacatatattgggtgaaaagtattatcaactaataaagtaattatcatgcttgcaagctaaatttaccaccttctgattaggatttcgcatctaatgtccttcaaagcaactcagatgagggggatgctttcttcttccttcgaatcctctccagttctagatgttaaggaccatgaggcagatggttcccctacctcgcccccatccagtccgtttctaggaagtatcatgaccaactgggcaggatttggacacgttctgcagagaatgccagacaccagcccatctggtgaacattagtctgcagacttcttggtcaaggtaatgttcgcattgtttgggcacaaaatgaaaacacagcatttgatttcacaagaacttagaaaaataagcatggtcagagcaagttgtacgaggatcaaaacatttaaaaaatagaaaaaacacattggaagaaaaagaggaaattttgtttaaaaaaattaaaagccattcaaagatacaccatgtcggctacaaaagatctctttggaaaataaatctttaattcaactttttttttttacattatttacattaattttggttgaaaagaaccacgtagatcaatacttttcagtcatttgtgagtctaaagttatgtttctctgtatgctcataaaataattatactacctacatttgtcattgaaagaaaagatggttgataaatgccagatttgtgggtctcagaatttccttgtttccagatttctaaggcagttaaagtgacctgctgtgtccataggagagcacctctcgtgaatgtatgccttatgtctttgccaaattcaaccttttcttactcatttttattctaggaaacattctcaagtgtcaaaatagtcaactgttaactatgaacacaggtcgatgctgctctctgctttcgacacgtgtcccttctcttgttcctgggcacgccttgatccatccaggctctgctgcagctgggtgggccctggctgggctccagccagtggaccgtgagcaggaggaatgctccccctgcttccagagaggctcacagcctctccccgcctgggccagggagcagccccggtgacctcaaattcacctgtgaaggaagatggcgaaggctccctcagcctgggccccttggtgccacatggggagagactccccccacccaaacctcccatgtcccaagctccgcttcaccacccaggccctgcttgtcctgctctcaccaaaaatgaacacacttctcttacacttgggccgtgacacatgttcgtatctatctgtcataacggtggcctccctaaaccactcagtaagttacaggacttcctttcattcctgtatcctgaaatttcactaacatttctgccttttctgttcacctcatgatactcacttctgttttgtaaccagaactactttagaaaggcccttcccagacgcggaattcttgtatggtttttgttcccaacaccatgtcattcgagttgttttcgcagcagcgatggatttatgtggctttgctaagcctcagctcatacttgccatgttttgtatccatcttgggatctggacaagaatctggaaagggggcgtctgtgccagagttcccatctgacctactgctgtggttccagaacattccgtccccaggatgtcccagcccatggcaggtgctcagcgggggcttgtgtgaccagctcagactccagttcgatgtactcagaggctcctccagtgcaggagctggcgaggccccctcctcagggacattctgctttgctcttcagcagagctcggcaggggacggggcgggagccaggctgcagacccagctcccagtgggcagaggtcgaggaaatggcacacagactgctcacactgttttacactttgctataggttactcatattcattgtagaaaaatataaacaagaaaaataagcaaaaagaagaaaaagcccctcgtagaaacatcacacaggtgatgactcatgcctgtacctacgtggacagaccaaactacgcacgcacgttgtgctgtgcacatctgaccccgtgacacgcgaggcactgtgcacgtttttttcatgtaacaattatatcattagcagttcttaaggtcaggaagtgaagagctggatcattttaatactgcgtagaatgccatggtttgaataaacacgtcattgagtaatactgtagtgttggccatttaggttgtccagatctcagctattataaaaaggctgtgaatctatctgggggcgtatcccttattatctccacaggataaattttaagacattgcacacatttttaagatttctgacaggcatcgtcagggcatcctgcgggagtgagtgaccggccccacgtcctccagcgtcccccaccccgggcatagctttctttttagtatttgctaatccaataatgaaacatggcatcttgttatctttttaaatttgcagttttatttgtgatgttaatctctggctcttgaaccagtcaaggtgttaaccctttgtgcgctgcatatgcctttggtttgtagcttgcttgttgttactgttttgtttctgttggtttttcttcttgttctgattccttcctgtaccctcaggaatgacgtgagggtacctgggactctgactgtgacatgctttccacacgcatctctgtaaacattgggtccttactctggacattgtgtgagatgaagcccccacggtagggccggagggagcacgagagcgatcgtcagaagccaagccgacttgggggagaccagctaccctctgcatgtgaggggcagtgggcctgtggctcgagtgtgcctgctggtgcagcagggacaggctggaaccaccagtgtggcccccgaccgctgcgtggccatgggaggggcaccacctcttggctcacagacctgctcgcccatgagtgcagctgtgaccgtgccagcctcctggggttgctgaggatcaaatgagaacatgcaggtagagtgcttacagcagcgcctggcatgcagtgagcccaattcaaatgcttctgtggtagaatttgatcttaattttataaagccctctggttgtttcattacctacaatcacaggttaatagtttataagtgcttcttaaaattttccaagtcatggggtccaaacaggccacactagacacagctggcacctgagagcgtccctggggtttatgttctgagaagccgctgctcccaggcgaggcctgcaccggggattgtgagtggaacaggagccgggcattcagagaggccctgaggacttggccaccaccagccgtggcaggaaatggttggcaaggacagtgtcctaagaaaggaaaacctagaaggaaaattggaccctccagagactgcccattcgatgaagaaatgtccttcagacgccagcttggccctgcagccagcacaggaacagaccggagcctgaagcagccgccatgtaaccagatagggctgtgtccaggaactccagtgcaaccgtggcccttggctgaggtaagcacaggcatctttaaaagccattaggttgcaccgggcacagtggctcacgtctgtaatcccagcactttgggaggctgaggcgggaggatcacttgagcctgggagtttgagaccagcctgggcaacatagtgagatcccatctctaaaaaaaaaaaaatagctgggcgtggtagcatatgtctgtagtcctagctggtcaggaggctgaggtgggaggatcgcttgagcccagaagttggaggctgcagtgaaccatgatggcaccattgcactccagcctcggtgacagagcgagaccctgtctcttaaaaataaacatgagctccactcacacagagctggcaggaatgagttctgctttcatcagggtcctcaggggaccctcaattgaattcaggtcctcaactggatgtggcccaccacaacggggagggtcatcttgctttcctcagtctgccaatttgaatgctaatctcttccaaaaacaccctcacggaaatacccaaagtgatgtttgaccaaatatctaggcaccctctggccctgtccaggtgatacatgaaagtaaccatcacaacaccgagccacctacaggactcctccacctcgctggctaacaggcacccccaacgtagtcagaaacagacatccgctctccctcccaagctcatcagaggacaggacagacctgctggccatcacacaggcgggtccttggaccatctctgggcctttctcccatgcccccacgccagtctagcatcacgttttgctggttctatctgcgtgaacacgctgtgcgctgaaaaattcaaggtgaggatcagtgggtatcaacttgctaccactttccaaaaacagaagattgctcacagctgcagttttgcacataggtttacatgagaaagtaaccaggcaggaggagcttgggggagggacactggacactgtatgtttctttatactttttgatgtttgagccaactataacctattcagaatttctaaacagataagcccacaatccaaatgtttggagtaggcatttcctaagaaatgccccccactctctaaggagtttctgcactgaaaactggccagcgggcaccctggggcctgagggaggtgctgagaaggggcatgaggttgggctggtgaccacacagacagggtcctccccaggctgaattttcagatgcttagcgctctggcctcccttccacagtctgccctggccaggtcggagccatgtggtcagtgaaagaggctccaggggatcagcctgcagctgacggacaccaagtgaaactctggggccagcctctgggtcaggctgtgacatttccacctggtggcacatgcctggtctccttaccacagactcctaggatggcagctctgtggctcaagtcagagaggcagacggccccaagaaaataaggtggcctgggctgggtacagggaggagagggtgatgggctgggcaggtacactgggcagtgcatgggagcgcggagagcagcagccactagagagctgggtgggaacaggggtcagggagctgggtgggagcaggggttggggcagggccttgcagggcttgtttctgcccagcttgtaaacagtactgaatgccacacctaggaggtggaaatcatgctggagagagctcacccttcggactcagcacattcacccacttagtcaactagcactcctttgtgctacacttgcccccagacgttgccagccagatctcctcctgttggaatgaattttcaccttttttccctctgtcttcagagctatttggatgagaatttgcgacgggctgccccaggggccatttagtgggcggtcatctaagctggaagccagcctcagtccaggagatgtcaggtcctatactgagcccgtcaggccatgctctgctctaaggcagagaaggacattaccctagtatccatggggacatggggaggccaaggagagcctgtatcctcggtttttggaactctctgggtctgaggagattgttcacagtagagaataaggaactaagacaatctgaacaggagacttgcttccagccaaggtggagtaacaggaaccatgtttaccttctgcttgaaaaaccaaacaaatcaaaagagaaaaaccacatgaaacaagaggtgtcaagataccagcatcagacaacgagggacagctctgcccgagccacaggagacggacggggcgccctgagctgccccagccgaccatctggagtgtcaaaggcggcggagcagggaggggaagcctaggaagtccattcataggccgaccttgagctcctaagaaaacgaccttctggaacacagggccccactcccgctgggagggaaacagccatggccccaggattttgcccccactgcgttgccttttatgagtagaacataacacactctcagaaatgaagccgtgtgagcctcctcgacacaccggctgacacagcgcccgcaggctgagtgcttggcagcagcgtggaactcggccctggcgtgtcggagctcagggtggccctgcgggagggtctgagacttcatgtaatgtggccaggggagaactggagcccaccttcccacttcatgtaatgtggccaggggagagctggagcacacagcggggcactgtgagcccgggcgccacgccgcagcctgcgggttctgctgagggtgcagtccacgcaggaggcttcgggatggacaattccaagaacagacttgctaggtagtccggcagggaagcaccagcctccaaaggccaccacaggcctcccttccacacccacgcagtcagctggcgccggggagtgcacggaaggaccacgccggcaaggaaagcgcagctctgagcccccgcgccttcaggcccacccggaactctcaggaactctcaggactgctcctgagaatgcccctcccaaccacagcaggtgactgtcatgggcgtccggagcctctcaaagatccaggaggaggcgtgatgtggagggaccggccagtgtggcggggcccgcagcgccagaaaaggcagctgccgcagagttgaagagctcatcttaagaagagtcccagagcaccgcatgttctcactcataggtgggaattgaacaatgagaacacatggacacaggaaggggaacatcacacaccggggactgttgtggggtggggggagggaggagggatagcattaggagatatacctagtgctaaatgacgagttaatgggtgcagcgcaccagcatggcacatgtatacatatgtaactaacctgcacgttgtgcacatgtaccctagaacttaaagtataatgataaaaaaaaaaaaaaaagaagagtcccagagcatagaggcctgacttcaggttacaagcgcaaggacggggccagacactgccacgctccgcaggcgcagccagcaacccgtgttacgggtgcagcggtcaccacgccgcagccgttcaggtccctccctcccttaaccagatgctgtcagcctgtggcttctgttggttttattgaacaagagccacggtgggagggaagatgattttgtttagcctccactttctgcagagcggctgggagtctgagaacatcagggtagccaggcgtgatgagcatgtatggtacacggtcatgttggtctgtgctcccacaaactgagaggtcttttaaggaaatccctccccaatccggagttgagtcatctggcttccatctctgggctccttaaataaccagaatctcaaattagccatgagaaagaaacacacaaaaacatctctttatgataaaaagggagacaaaaccccaaagctgacacgtgggacagagactgctccgtttgtcaccattcctctctcttcctgcaccttccagcgtcttgtattcgtggaaggagagaatgagctggaacagaaggagaagatgtaggccactcgccggcggcggagtgacgccgccgccactccagagatcccgaaataaagacggtttttccgcaaaacatttgctcgtaggagatgcaaatgagagatatttttaggaaatattaatgcactgagctctaatttgcagactgcgatttacttcatcccctcccctagccagagccatctgagcgcttggctccttcctggaaaaattccgctctggaataatgacttggtttcctcacaggaagaatgcatgcatactgtcaagaggcaaacaatacccaaagttacaaaaaagaaagcaacaacaaaccacgaatgtcactgccagactccttgcccagaaacgcccctcattcatgttgggtgagtctgggccctgtgcaagacatggacagaacacgcaagctgatcgttgaggagatgcaaagtttaggattttccttgaatttaacagaagaaaaagaaatggagtaaaactgaaggactgctaaacttcacataaatgaatcttatcccaagaaacacttatccctcaaggatagccaggaacccctgaaaaagaaagcctagttccgccgcctgtacccctttcctgacagcctcagccctgctgacagtacggcgtcctccagcgggtcgtgccggacagacagacacagggtggacaggaagcccagaaggaggcccgtgcacctgggaggtcagcatgagataaagggggtgcctcaaacctctggagcacaagtggactctgaataacagggtaaggggcacgccggataggcttggagaaaagatgagaggtctgcctcacgccacacacaaaaatacacttccagtggcttgggaacccacatgtgaaacgggagctcagacaagtcctggaagaggacatgagtgcattcttctgtcatctgggtgcagggatagactctctaaccatgactcaaagaaaagaaaagattggtaaatatgggcataaaaaaggaaaaatatattgcacagccaaaagaaaacaccacaaagacaactgaaaaactaggagaaaatatttgcaacataagccacagatgaaggaccaatgtccttttttcttttctttctttttttttttttgagacaaagtctcgctccatcacataaactggagtgcagtggcgcaatctcggctcactacaacctctgcctcccaggttcaagtgattctcctgcctcagcctcctgagtagctgggattacaggattacaggcgtgcgccaccacgtccggctaatttttttgtatttttagtagagacggagtttcaccatgttggtcaggctggtctcgaactcctgacctcaagcaatccacccacctcggcctcccaaagtgctgggattacaggcatgagccactgtgcccagcctcaacatccttaataaatgaagaactcgtacaaattgaggacaaaggaccataaatcagagagacaaacagaaaaaggacataaagagacagttcccccaaaagattaaaatgagccttaaacacttgaaacctgtctactcactcatccttagagaacgcaaacttcaaccaaggccaggcactacctctcatccacgagaccgcgcatccgtccgctgggctgtgggaagcaggtcccagtccctggcggggatgccactgggtacagctctcccagaggggcgttggcaacacggaacaaaatgacatgcacacttacctttgaccctgggaagatgtctccaatttccaaaacgaagacgcccgtggttgacatccttcctctgcagcactgtttgtaattgcaaaacacgagcgacaatctgagcatccacatacaggagggggttggatgagctgggggtgtccaccggtctgagaggtttttggacacacaggcaggtggacaaagcgaagttccagaaagtctagagggtgctgcccttcaggaagatggccatgaggggcagggagggggaggggtgtggggcagtggcgtggaggaaggagggtggtggggggagtggggctcagggagggggaggggtgtggaggagggggtcgcagagtggggaggggagtgggggcagggaggggaggtgtgtgggcagtgggggcagagtggggaggggtgtggaggagtggggatagggagaggggggagtgtgggggaagtggagggagggagttggagggatggtgtggagagtgaggggcagggaaggggagaggtgtgggggagtgggaggcagggagggggaagggtgtgggggatggggacatggaatggggaggggtgctggggcagtggcggctagtgaggagggggacaagggagtgagcttttaatcagggttgattagaacacagaagcttggccgggtgcggtggctcacacttgtaatctcagcactttgggaagccaagatgggcggatcacttgagatcaggagtttgagaccagcctggccaacatggtgaaaccccgtctctaccaaaaaaatccaaaaattagccaggcgtggtggtgcgaacctgtagtcccagctactcaggaggctgaggtgggagagtcactcgaacctgggaggcggaggttgcagtgagccgaaatggcgccactgtacaccagcctgggcaacagagtgagatcctgtctcaaaaaaaaaaggaaagaaaagatcatggaggattttgcaggttggtaagtggtgggagggaggcagaatcagaagtggcattcaggaccctcccatctggctgcacctgtcttcctctgctctcctccccagtccctcccctgccctcactggcccctggcccctgccatgccaggccctcccttccaggaagccctgaggcacccgagtgacaggcactggctccctgggctctcctggctggggtccacatcactttcctgcccgctgggcacaggctctcccccaggcctcttctggacctggggaatgactactggtcctgtaagaatgtcgtctccttcaggaagtcctccctgacctggccaagcagaagtcttgcctgaccacagcacctctcacgtctgtgacgaatctgccaccctgggtgattgaatggcttgtcccagctgctgtcccagccaccgggcccactgtctctccctagggtgtgacccacaccttaccattcttttttttgagatggagtctcgctctgttgcccaggctggagtgcagtggcgcgatcttggctcactgcaagctccacctcctgggttcacgccattcttctgcctcagcctcccgagtagctgggactacaggcgcccgccaccacgccaggctaatttttttttttttttgtatttttagtggagacagcatttcactgtgttagccaggatggtctcaatctcctgacctcgtgatctacccacctcggtctcccaaagtgctggaattacaggtgtgagccaccacccctggccacaccttaccattcttaatcagtttaagattagcttaagaaaacatctgaccatgaaagtgaatacagaatacatgtgtccattactaaagcaaagactgctcaccaccccaccactgttagaatttacaatctccgctgccctcttacagagggaagaatccaccccttgtgggagcagctgctactgtgaaagaagctctctgagctctcagagccgcagtttcacctgctaaacgcctggcccatcaaaagtgaatgtgaggctgtgagtgcgagatagcagccgggccccagacacctggcagggcaccaagcacgcaggcccttggcactggtgtgtgcgaggcaggtgtatgattgggagccactcaggagacccccaggaggaccccatgctcaggagggctctctgctcaggaggactctctgctctggagggctcagtgctcaggaggactcagtgctcaggaggacttgttctcaagagggttccatgctcgggaggacggtgtttgcattttgagtgctctgtagttgttatcttgatattttaacaattttattattgaatgtgtgctttgaaagagaagccctgtggggcaatggagtaatggggctcgcagccttgactcacccgaggccactccacggttctgaccctgacgcctctgcctgtgaaggcccctccttgtcttgcaggtattcccatgctcaagggagcacggcagtaaatggcacgtaaaaatcactgtgacagattgagagggcaggggagggcgatggagggaggagcacaaacagagacagactttggaaaaaaggaaagaacgtttttcatgtttcatgaagaagcagtctcattttcatttttcagtgcaccctgcaaattatgtagccagcccagctctcaagtattatacaaatatgacatatcctgccagagtttgctctttaatgaaactagagaagtcggcaggacctgaaaatcatgtacagtagcctccaccatcctcagtttcactgtctgtgatttcaactacccacagtcaattgcattttaaaattataaaccggaagggtccagaaataaaccattcacatgttttaaattgcacaccctgtgaggagcacacggaaatcttgcaccgtcctgctctgtcctgcacaggatgtgaattgtccctttgttcagcatattcacgctgtctacgctacccgctgttagtcacttagcagccctcttggcagtcagataaaagagacatggtacatatagtgttctgtacaacctgggtttctccccctgcctctgggttcccaaggtctttgaccttggagagagagttctaccattggcttccctggtttggggcttttggacttatactgagccacactaccagcaccctagtgtctctagcttgcagatggcctgtgtgggacttctcaggccccacaatcatgtgaaccaattcccctaataaatcccctctttatctatctgtctgtctgtctgtctgtctgtctgtctgtctgtctataatctatccatctatctatctgtctgtctgcagcttcaggcaccaagtaggtgtcttgaaacatattccccacagataagaggggatgactgtactatgcttagtttttgggacctctgagcttacctcctggtgtcacccttctatgtactctgccatgtgggcacagcaaatgctctctataaaactgtatcacagatcccagccaatgcaataaggcaagaagaagaaacaaatgacatacagattgaagaggaaaaagcaaatctgtgtagattcataaccaatatgattataaatgtagatgcagaaaatcccaaagaagctacaaaaaagcactagaattagtaagtgaatacagcaaggccaaagggtatacaatcaattaccagatccattgctttcctatacattagcaagaaacaactggaaaattaaaatttaaaataccactcagactagcaataaaaaacacaatatttaggaatgaatttaacggaaagtttttgtgatggttcattttaggtgtcaacttgactggattaagaaatacctagaaacttgataaagcgttattttggggtgtgtctgtgaggtgtttccagaggagattagtgtgagtctgagtggactagtgggtgagattcgccctcagtgtggacagcaccatccagttgttggggccctggagagaacagagacagagaaaaggtgaatgtatggagctccctgctggagctgggacacactcatcctctcctgcccttggacaacaaggccagcctccctagcctttggtgccagggctttcatcccctgcctctgggttcccaggcctttgaccttgaactgagacttctaccatcaggttgcctggctctggggcttttagacttggaccgagccacactcccagcaccctagggtctctagcttgcagatggcctgtagtgggactcctcaggccccacagtcatgtgaatcaattcccctaataaatcccctctcaactgtctatctacctgtctgcctgtctgtctctctgtctctccctctctccatctacccatctatccacccatcctattggttccgtttctctggagaaacctaacacagatgtgcaggacctttaccctgaaaactgcaaaacacagctgggagaaattaaagacaacctaaacaaattgtgagtgttatggtctaaatgtttctgtccccctaaaactcatatgttgaagttctgactcccaaggtgatggtttttggaggtgaggccttttgggaggtggtgtggtcataagggtggagtcctcatgatgggattaatttccttataaaagacactgtaggctgggcacagtggctcacatctgtaatcccagcactttgggaggccgaggcgggcagatcacgaggtcaggagtttgagaccagcctggccaacatagtgaaaccccgtctctactaaaaatacaaaaaattagctgggcgtgttggtgggcacctgtaatcccagctacttgggaggctgaggcaagagaatcgcttgaaccttggaggcagaggttgcagtgagccgagatcgcaccactgcactccagcccgggtaacagagcaagactccatctcaaaggaaaaaaaaaaagacactgcagagaactatctagttccttctgttacatgaggccatagcaagaaggcaccatcaattgtggaggctgaggagtcccactacaagctgtccacaagctggagagccagggatgctggcagtgttgctcagtccaagtccaaaagcccccgaaccagggaaactgatgataaaaccctcagtcaaaccaaaggcctgagaacaacaggcaaagggtataagttctgcagccagaggctggggagcctgagccttcaccagacaccttgaccttggactttccaacctccagaactgcaagaaatagatttctgttgtttataagccatccagtcaaagatgctttgttatagctaccagaatggaccaagacagagaggtataccatgatcatggattggaggattcagtactaggaagctgtccatacttcctgaaatatcaatattattctaatagaaattccagcaggctttgttgtagaaattgaccagctgatcctaaaagtttaatggaaaggcaaagaacttggaagggggcaaacaatcctgcacacagcctacaggaatgacaccagcttcttttccttaagctataggatgcaagacaatgtggtgtctgtgggaagcaaaacaaatagatcaatggaacagaataaagagtcaagaaatagacccactaagccctggtgcagtggctcacacctgtaatcccaataccttgggaggccaaggtgggaagatcacttaaacccaggagtttgacaccagcctgggcaacatagggagaccctgtctctacaaaaagtaaaaatgaaaaaattagctgggtgtggtgttgcacacctgtggtctcaagctactgcagaggctggggtgggaggattgcttgagtggggaggtggagtccccagtgagccatggttgtgccactgcactccagcctgggcaacggagtgaaaccccgtcacaaaataccgaaagaattagttgttgtaacggaggctaatatgctggtgggagtgagctcaggtgagcgcgccccttccatagtcaccccagtgtccaccgcacacatccttcaggcagtggaaggggtggaagtgcccctccccttcctcctaccctcccacccttcttcttcctctccctccccctccttctgttgtgttttacagatacatgaggggcggggcctggggcctaagcactggaatcctcatggagaggcttccctggagtccttagctgcagagtggtgggcatatctgatgcccttattcagatctacccactgcgatatgtgtgaagtgctgaagctttaataaataaaacgcaggagggcttgagaaaggctctgggtatggtgcacacaaccagctcatgctcaggggatcgggaagggggttcaccaagcgcccatggagactgcatgcacttatttaatgagcaacaaagacattaccagacagtcaaggaaaaacatgtgtttttccactttgggaaatagtcaaactttcatattccaccaaaaatagaagtggaattctagaaaacaaaaataggtgggcttatacttgtatgccattcaagcaaacccgcatagactatgactgctctcatctctctggaatgtgtgctgtgttcccaggaggtccgggaaggagccaggacaagagggagcctgggacctgttcctgggcctgaactcctgcggccaccagggtccctcctggttctcgtggggccatctggggttgcacccctccagatgtgctctccctcccctccgtcccctgaggcgttgatgaccggcgggagacccttgcccctgaaaagagactggccgaagaactgatgaatagctccatcaccaatctccacggtggcccgcacaggacggcagagacttttctcctcgaagaccctaggctgctggcaaacactgagcactgcaccgcacggtggagggtgctggggaggggcgagcctctgaacctcagtgcaggcgggaacagtgcctcacatttctgtggctgatggaatatttaatgcttagtttatactttctttttacacggtttgcttgaggcatattttgttgactcatgactttacagataacttctctgatgagactgaagcccaaggaagggaccaatgtccagtaagtgacctggtcttacatcaaccagagctgcttccatgcactcaatagaaaatgaggcccgaagcctctcatctgctaggcagggccaggccacagcagccccccatggccaggacgcagttggggaggggggccaggtcacagcagtcagcaatgccccgtacccaggccacagactcccaaccacccaggccacaggagacccccactacccccaagtcaagccacaaaagtacccccccccccatgccttaggcctcagcagggccaggtggagccctgaggtctgggcttcttcaccattttccttgtttcttccactccttgtccttgaagcaagggggtgggcaagcagagagggggatttgctagaaggatcctggggtatctcccgggctttttccaagttgggctttttccagaaatgcaaggttggtataacatttaaactttaatcaacttaattcatcatattaatgtaatgaagcagaaaaatcatactatcatctcaataaatgcagaagaaagaatgtgataaaactcagcatgcattcaggaaaagaaactcttagcaaagtggagatagaagtgagcttccttgatctcatcgggggcatctatatttaaaaatcctaccacagatctcacacttattagtgaaatattgaaagcgtcccccctgaggtcaggaaaaaaataaggatgctcaccactaacacttcttttcagcagcagctggtgaggtaagccaagaagaaagcaataaaggataaaatgatcagaaaggaaaaaatgaaaaagtcattattcacaaacaaaatgatacgtatataagaaacccaatagaatctacagataactattgaaattattaagtgaatctggaaagactgctggtacaaggtcaatacacaaagatcaactgcattctaaataaaccagaaaccagtggtcagaaaataaaaatagggaacattttaaatgatcatccaatgcaccaaatgtctgcgaataaatctaatggactatgtatgtaatatctacacagaagactagaagataatgagagcaactggagaatatttaaatcaatgtagggctaaacgtgaactggagcactcaatattgtgagaatatccgttctcgccaaattgatctatagcttcaatgaaattctaataaaaattctagcagaatattttgaggaaatttataagccaattcaaagatttaaatggaaatgcaaaataccaagtataaccaagaaaattttgaaaaacagaaaaactgcaaggtgattctacggtgtcaaaagaagactcatgagaaagcttcagtaattaggacaggaaacagcagttcaaggccagtcctcagcacctaacaaaatagttcagaaaaaagcaacaacccatgcctatatggatgctgaattcacaacaaagctactgcagcagagcagcagggagaagggaaatcatgtcagtaaatggtgctaggtcaactgggcaccaaacacagacaacagttatggactgactctgaacccctacctcacattgtacagaaaaacaattcctggtgaattgtcctctaaatttgaaaattgaaacaataaaccttccagaagataacagaagcattccttcatgaccatggagtagttgagttttctaaacaggaaacaaaaaaaccctaaccgtagaaaaaaacggtagataaattggatcacattgaaattaagaactcctgtataacaaaagactccactgtgattatggaaatgcaagacacagggtgagagaaggtatttgcaacacatatagcttgccaagagtttgggtctagaatatataaataacttctacaaataaataataaagaaaacttgtggcttcttcaccagaaaggatgtgcatgtggaaaacaagaacatgtaaagatgctcaacctcactggtcattagtgaactacagattaaagccactgtgaggaactaccaccaccctccagggtggacaaagtgtcaacaccagctgttgatgtggacaagaagcagccagaaagctcctcgcctgctggtaggagtataaaatggctcaacacgttggaaaatcagtgtcccctctggagtggacctatgtgtctcctgtgacctggtacacaacccaacagaaacatacacacgtgcgctgagaggtgtaagagaaggttcacagaggcacaggttgatggatctcatgaacacagcgtcaagtggaagaatcaagacacgaaagaatacattctgtgtgatgtcacttatgtgaagcaaaaacaggcataaccaatctgcggaggtaggagtcagggtagagcttatctttaaggcccagaggcagctgtggctatggaggggcacgccggacactccgagttggtcacgttccgctgctcgccctggtggaggtttcacagctgtgtccactttgggctaatgtgttgagatgtacatttatgatatggatactttttggtgtatgtattatatctcaaaaaagtttgaaaatacatgatgatggccacttttcacaccaccgttcatggctgctgtatccctgagtagcttgtataggtgacagtcagcccgagtccctgagattccagtttaaaactatcaactgcaagatcttgaatatatggtagttgaaagtttcctagagagaaggctttaaataaccacatgagccatctaatttgtcactaacccaactgtacttaggctcagcctccagcctccatcccctccagaacagctcctggagattcagcagagcgcggcctgcccgcgccctccctcctccccactcttgcctggcttcagttgctaattaccttttagcttctcaggaaagactgctaacataataattaagacataactcggcaaaatagaaaaaaaaatctccttttcctggctctagtccattattttagagtagtatgttaccaggagccatactgtttttgcatctgatttattttaaaaatctagtatcattcaaaagaagttggtgaagctgctaattttgtttgctttatatatttatactcatcccacaaagaatttgaggtgtttggtgtgtctctatattcgcttgctcttttaataatttttaaaaatgagtttctccttaaggatcatgtacttttttttaaatctatttttagttcatacttttgttactgttgaacagtatcatcttccaaattacacgttgtttgctgccgatatatagaaatcattttgggggtgtgtgcatgtgtgccaattttatacccaataatcttgctgaattttaattagatctaagactttggctgtagatttaaaattatctgcctacataaccatatttatgtctccctttcctctctttatacatgatcaagtgaaataatcaagacacaaaagaatacaacctgtgtgaggtattagctcactgaagcctccaacccctggcctcaagcagtccccctgccttggcctccagagaaacacgcttccgtcttttctctcctgcctcgctgggccttcccgcctcccacactcccttctctctctatgctcacctctaatgctaggctgaggctcttcgggtctggagccaggttcccttctttcctttctccattctctctttaggggatcggtgacgtcttccattttcaagggtttcaagtgtccgtctccagcacggctctcctctccggacatcagtcttttgtacgtagctatcttcccaacacagccactcagacatcctgtaggcatcgcaaacttaacgcacccaaaaggaatgcctggtttcgtccccccatcccccgtgtcatcccagagcaccatcacccgccaatatgtgcaagccaggatcctgggtaagccctgatgcttctcctccccagacccctctagtgactctatcactaagtcctgttgagtctaattccaaaagcctcttaactctttccatttccactgtcaacacctgatgaaggtcttctgcatggaagccgcaggcatgcctgagctctaggcagacaccgccgggtaagtcagagcctccgtcccctcaccggggtgctgatttgggttgtgtttctcccacccccagacagtctatgcacttcgatggcagctgctccacctcccagttccagagctaggccctacttggctaaaccagggattgcctttctctgcaaagggccagatggcaaagatctatggctctaccggccacataagcccactgcatctattcttcataagcccccacccaccccaacactttacatgtttaatgttcattcttagctgttgactggacaccactgggcccaggctcagcctgcccacctctgacttaaccacgcagcacattccctttccctggtctctacagagtgcaaagtggcctgaccaggaggactcttctgaccaatggtggcagaagcctcctctcttctctgacttcatgtgccatggaagtgctttttcctctgccacaggcactcctgctgtcaatgccttctcatcctccaaggctcaatgcagcttcctgcatttttcctctgccacaggcattcccgccgtcagtgccttctcatcctccaaggctcagtgcagcttcctgcagcttgctctgacactcctgagcggtgcagctgcagtgccctggactcctgcaaccgttcacactcctcttcattaggagcctgcatttgtacatcaccactggagcttttccacccatcgtctccctcttctggatgcagaacaggctcagacaggccaaacaacttggccagtgctgcatggcacagccaggtccgcactgactgtcacgcctctgttcctgccctggacggtgtctcaggtaacacactgcactgctccctgacaccatctccccactagaacatgaacgccctgaagcaaagacatcttcctggccacgtgttgacctatgcacgtgacactgcctacggcgctgaaaggccatcagttcgtcctctctctcctgcccctgtgtgtctaccccagttttctctcttcaggctggccagtgatggagaccatcctaattgtgctggatttgaacccttcaggcctaggcacaaagagagactcacgattgtctcaatgctagctctaagcacccagggccatcctgggagtcagaatcccgcctgaggtcctggagtgggttgtgggggggtgtgctgtgtgcctgtcacagagcacagacagactgttcctgctgtgtcactgtgggagttgggagttgtcctagagacagtggcacattgtgagctgggcaggtctcacacatggtatccaccaccatggcagctgctgactgaatggtttggcaacatctggtttttgccactccagtctcatgtcttcttattttatttttaaaatatagggcaaaaaatattatgtctcaaatcacggtatcaccgaatattggtcacctcttattagcagttttatgctcctcctgacgtttgagaaacaaggaaatcaataatccactttaggctacaatctaaaaagtacctgtgagtgtcctttctcaaatagattgggcagaattaaaacaaagcaagattgtttaaagctacatttttagttgcacacaaggactatagtcaaataggcttcaaaagcacaaaggctgtggtcagtcatcagccctaggacaccaggaccaagaccaggccacagtctcagcacagcaggttggcagctcgctctgtaattgatgagacagaaatctgagcacacggattgccctgtgtggctggaaagggaaaggaaggctgtcctggccaccgcggcccagggaggccagcacacccgtgcgcaggtcacgtgacccactgctctgatcccaccgttctagccacagtctgccaggccctgggcatgacaggaagggggttcacagatcagtggcatttacacgggtaagctttgaacactgtcttcaactgaaaggccagtgtgtgaacaggccgggcagctggaccactccgaggctggcgccttcccctcctttcgggcagttcccagaaggctcaagaccacagtttgaaatccacttaatctctcgagtcggcctgggtctatatcctaagaccgtggaaatcattttgtgccaccgtatcctgtaggcattggcaggaccagcgtaatttttagttcttctcgtgggagacagtcacagggtcatgccatttaactgcactgaagggaaaacgtgggaaatggatttttggtgctgtgtagaccacatttcatagcggttggcatctcacatgcttatgcaaagcctaactccgcaccctggggcagacagtgggagcccagctggattcctacactcaagccctccagcatcaggtttattttccaggacaccagagtgattgtttattccataattcccacaaaggagacagtaaacaacagaacagaggtggagcgggcacggaaggccaggaagtggatggtggctgccagcacttctgtggagacccagggcccccctccaggagccccggtgttcaacctccacagtgaacaggggatggatggctgagatgtcctcgaaatttttttggacttcctcaggcgaccacaggattccttctcaaagagcctgatctcagcaggcacccgaatgggcatcctggtgcttcatgctctacaacagctgggaacgccatgtcctggccccaggcgactggaaactgctttcctccccgacatcagcaccaaggggaatgttcccagtgccattcttccaagtcagggagagcgtcacaatagaaaccgtctctgtggagaggatggcacctgaagccatggaataggaagggagcatcagaggctgctggctggtcctgcagagccgcctgagaggcctgtgggagcagcagagggtcccggccttgggcgccatccgctctctgctgctctggagggagaaaaaggacaagttgaaacttgcacaagcagcctccattctggggagttcccttgtattccccacaccaacccgcacctcagcgaaggcctgtggaagacttctgcagtgacagccccgatgaaccatgcttgccgtgcccgtcccctgtgcggtgcctcacgtccactcaggccccggccatctcaccctcctggggagatggagggaagcaccatggggatttgctttttcttgctgccgacggagcccagccaccacgggagggaggcccggccagcctgcggtgggtgggtgacatgtggcccggatctgcccggggcgcctgcctgtaagtgggcccagcagacaccccatggagccgaggcaagccgtcccagctgaaccggcttaagctgcaggcccacagagtcatgagcagtgaagagaggttttcgccctctgaggtttggggtggcctgttacacagaaatacacacaacgtcctcaggcacgtatctctttaagaatgtgtcccgagaaggcgtcccaggagtcttgatttttatttagccgtccacggttgcccctttgggtgcttcgccttcagatggggtgaagggctcacttgttagctggctggccccaaagacaggcttgttttccaccaggcagtgactgaagccggcagcctgctgcataccgcgggccttcccctgacctgtccgggactgcgggctggcggctgacacctgcggagtgcttaccgcataccaggctcccaaacttccatctgtgttcgtcttttaagttttgttgttttccagagtcggagtctcagtgttgcccgggccagagcgcagcggccatttataggcgcggacctcggcctcgcacaccacagctccagctctgagacacaagcgacccgcacccccccaccgcccagccccagcctccagactggctgagatcacagtgtgcgccaccccatccctggcttgcgatggtctcttactccccactttacaagggaggaaagaggccgagggcagagtgggccgcctgaggtttggaggccagggctagtacaacctcaatttgaccctggaacctgccgcttcccccacccaggtgcgggacccacccgcttgtccacacctggctctgcccaccgcccccggctgctcctctgggctcaggtcgccgcggtcaggagctgccaagtttgcctatcaaactttatcttcgtgcagagaactgcagcctggagctggttattccggtcagtgaaaacgttgcatttctacatatgcttatcatcatctgtgtaaacatttcttggtataactgtggaacagtcagtaaatatagataaatcgaagagtaggtctattgcatatgctataaaaaaatgcttttactatcaacctaaaacaaacaaacaaacaaaaaaaatcaaacaaaaccaccatcacctaaacgttggtaactggagcagctgctagtgtcagtgcggactaaacaggagacggcgggaaccgtgtccagccagggtcctgggccgcgacctggttctcccggagtctacagtgaggatgacgggcggggagagggggccggcgggacccgcgtgtcccaggcaactccgggagagggagaagcaggggtggctcggcgggggctcggcgggggctcggcgggggctcggcgggggctcggcgggggctcggcgggggctcggcgggggcagcgcccgctgcagggaggagcgcgggggcccgggagcctgggcagcaccgcgagacgccacctccgcaaaacgcaaacgccaatcgccgggcgcctgcggtcccagctaccagggaggctgaggcggcaggatcgcgtgagctcggaggtccaccgcgctccagtctgggcgacagtgagaccccgtccccaaaacgaaggcgggcagagtctcctcagccgcgctcgggcgggcggcgccgcgacgccaggccggtcccgcgctctcgccccacgctccggagccgcccagccgcggtctctcagctccggccgcgctccagccccaacggccccgcgcccgtccgccgcaggtggtcgtgagggaggtgccacagctccggctgcccacgacagacacgggcgccccagcgcgcgcacgtccggcgtcgctgcgccgcccccgccccctcggcgtgcgcgcgcccggcgggccggcgggggcggggagggggcggagccgccggcggcggggctgaggcgctgaggcggccgtggcggcggcggcggcggcggcggcagcggcggccaagcggccaggttggcggccggggctccgggccgcgcgaggccacggccacgccgcgccgctgcgcacaaccaacgaggcagagcgccgcccggcgcgagactgcggccgaagcgtggggcgcgcgtgcggaggaccaggcgcggcgcggctgcggctgaggtgagggcggcgcggggccgcggcggctcgggcgggcgcgggctccggaccccgcggtggcggcgtttatgtaagcgccgggcagggactggtggtggggccggagctgcgggccgtcccgggagcggagggcgcccgcggagaagcgagggtgccgcggcaccgcctcgcacccaccctcctgggtcgcccgtctgctccggcgctcggctcccggaggaagctgcgcccgggcggccccgcgtcccctcccgagggcgccgagtccgcgtgggatgcgccgcgctgcgccgcggggagggcaggtgcgccgggacgaggctgcgccctggggaccgagactgcgttttggggaggggacggtgtgccctggagatcggaggctgcgctggggacgaggctgcgcccggggaccagaggctgccccgggtacaaggttgcgccggggaacgggaggctgcgttggcaacaaggctgcgcctggggacggtaggctatgtccctggggagacgctccgcccggcatgggacgctgcgccgggggacggcaggctgcgcccgggatgaggctgggcccgggcaggggaggctgccttgggaggggacgctgtgccacgggagtggagactgcgttggggacgagtctgcgccctggacggtcctgcgtgtccttccgagggcgcagtgtccgcgcgggatgctctgcgccgcgggcggcccgggccagggaagttcctgcgggtgccgggcgtctgcagcgatcgggagcaatctggggcagttgggggcccgaggtgacttttgacgtgttcacatcagaaggaaaattattgcgtggtggatgggtgcgagggaaggtgtcagattgggctgtggacgctgaaacgtgttggagtcccgatttacacgctggaaaacctaacctaaaacgtgttcctgtccaggtttctatgtcggagatctgcaccgtggtgtttagttcccagttaatatttttggtcagcaggtttgggctgttacttctgatacaggcattttacttccttcttactaaccattattgcattccgttctcgaagtataacgaaaagtggcatgatatcaaacttgtttctttaacgtttaactccataattaagatgatagaaccgtagtttttttaattgagaatacaaatatgtatttaatcctctttgtttcctcttaaattttgccgtatgttttattgcttcgaaaggtgccacccagagctgcattttccaaaacgctaggttgtcttaagagcagttgtttctaggagatagaaaagctaattgtcttttgatgaccatcttttccttggggttgagactgctgtatcctttttgcctgctgagggtttcccagaggggaaagggagaaggaagaaaggataaaagcttggctgatacagttccttcttggataagagaattaactgtctctcattgcgcggttcctccggaggacagggtccagtatgcatggacagccacaacgggggctcggtaagtatttgatgagacaggctgagctgggtgcctatatcttgcctgtggtggagaggatgaactcacacagactctgaaaggaatgcattgtctgtgagtgatgccctgttagatgtctgagggttcctaagactgggtatatcccactacatctacatcacatttgaagctgtagttggaaaggaaaaaaggaggccctcctgcagggacaggggcttaaaaataatcgatccagctctgagaaattgatgacacatgtgtctctggtgtgacgtgctcatgcagttgttactgggaggccaagggggaaggattagctatgaagtgataacatcatccacaaaaaacatcttggctcagaggctaatttcacttcctcgtgaatttatgtattgtaaaacatttgaattcttttagatttttggaataagaatttttttaacttctatttgtccagtgaatgcataaaacaaacttaatccatttgacaaatacttgtctgtggcctgttatgtgctaggccttccctgttttaggccctaggagatacagtacttaacaagataggtagagatcaaaaatgcttctggcataaagcagtacatttgtattgatagatttaaaaagataagcaagcacacagtacctacagaaaggtaaagcctcattccactccatccctgggcacttggttcaaaggctgcacccaattgtgtattgtcctagcaggagtcaaagtgtgtattgtatatgttttaatatatgacaaaccttgctatagtgcatattcttacacgtgggtacaagcaaagcctactaattagttattatcaaaatttcttagctgtaagttttacttaagaactgggttttattcccttgaatgctgtgattagctctgtgatcaaacaatataattcaaataggaggtagttaactttggaaagaaatagatgaagttacacatttaccagcctataaaaaagtttagcaaagttatcaagcttagtttgaaaccaaaaagctcagagaggtccaattttattagaaaactcaatggtggccgggcgcggtggctcacgcctgtaatcccagcactttgggaggccgaggcgggtagatcacgaggtcaggagatcgagaccatccttgctaacacggtgaaaacccgtctctactaaaaaaatataaaaaatcagccgggcatggtggtgggcgcctgtagtcccagctacttgggaggctgaggcaggaaaatggcgtgaacccaggaggcggagcttgcaatgagctgagaccgtgccattgcactccagcctgggcaacagagcgagacgccgtctaaaaaaaaaaaaagaaaagaaaaagaaaactcagtggttttctgtgtcaactttctaaaataggaatttctaaatctgtaatttggtgtgatggaaatggtgttaaaaaaaaacccatattattttgtatgttcataatatgtgaggtaggaaaagcaaatgggaaaattaaaaattgtccagtgaaatcattaagattccttccttattccttgagtgacttttctttccaagttgacagctttttatctggggtgtggacagggacagcgcagtagcccacagaggtcttcgtggcagggcttaccgcaccttccatttgcagagttttgcttcatccatagcttgacagctgttgggctagggccattaatatcaaattatcacaattttttttttttggtagtttgattagtactgcttgctgcacttttccacctgtatgcctataagatgtcctaggcgtacacaaagaaaagtgactttggttttaggtttaacgtctttgtgatggaacaggaagggggatgaaagtaactctgagataccttgtatttttattggaagtacagtgaaatggaagctctacttgcttctagtttggtgattttggaacctggttccatttcatttgcttgttcatccaacaggcattcacccatgcatcctggcccaggtactgttctaggtattggagattcaggatgagcctgatgaggagagttcctgccctcaagcggttcattttcttgggaaggaggagagcagtaaacaagcatttggtgtcctaactgcttcaaagggcaaatgaggcagggtaggtgagagaaggtcaaataggtggtgaggatggagtgagctgggctgaggtcacggcagcagcagcctctcaggcacagggaactctcgggtgaaagtccctgagcctccttgtagtatggtggtcacctcagggaggccattgctgccagagaggctgggcgagtggtaggaagtgagatgggagtggaggagagctgcatcttggagcacacaggctgtggtaaggaatttagattttaagtttgatgggaagccttaagggagcctttcttccttccttgcgaatgacatgatctgatttatctttaaaaagtaccactctggctgttgggcttacaatatgccaggctgttttaagagctttacatatattaattcatttattcttatgacagtccaaaaagtaggcattattatcattattcccatgttacaggggggaatacctaggcacagagtggttaagtgatttacccaaggtcacacaggaagtggcaatggcaggatgtacccttacctccttactgcagcttgctttttgcacctccactactgcagactggaggaggaatatcagcaaggagatcagttagacttttgtgaaagctgggtgactgtaccggcacctcagaccagggcggaagtggtgagatcagattcagcctactgaatttcagcatttgtaagatgccatcatttttaagttgcatcatcatttcttatgctgctaacaaagggaaaatgtagccaactagattgtgacacaatgctttcttgttacccagcattcatttatactcattgaaagagcttagactaagcattgacttttaaaatcatataattcatgcactttcataaaaaaggaaaatacaagtaaaataaagtaattctgaaatttcttcacatctagaatctgattcttccaactcagcttttgacttggcgttggtgccaggtatgagatagggaagtctgggaagagccagtgttgggatttgaacatgtggagcttgtgactggaaggcagcccagctcagcagctccactcaagggccagatctggaggacgagggttgggtcattgtgcagctacttcctagatgatcttgagcaagcagtctaatctctgtgcttcagttttctcatctataaattaggaagaataaaagcaacttgtcagggttgttgagttgctaatgtaaagtacctaaaatagtacctgactaacagtatttaatggggcttactttgcttattatttttatgattagttatctgagtagagaaaggtgaatatggatggaaattcaaggtcaggttcaagaagaggttggggccaaatatgtaaatttgggagtcatttgcatattgctgatctatgaggcatacagtatggatacagaggagcaggagatgaggaatggcctgggagcttttggcaagcggtccacattgggagggagggtctagcaacgccattgaaaaggactctgtttgaagaaggaagaaactagtgagagtctagtggcctggaaaccaagacaccgaggggttcttttcttcttattcttcgtgggctggagagtttcctattggctttgataagaggtggttgtgagtgaccttgataggtttggagtggtggggagaggaaacaaatagagtagaggtgggaacatcagtgtagacgactctctagaggagttctgttaaaagggaagagtcatgggatggtggctggaggggacatgggtacaggaagtttttagttgtatttttaaatgagagcgatgatagcatgttatgagctaataggaatgatccagtagagggaaacatttataatatgccaggaaagaggataatgttggagccaagtccttgagaaggtgagagggaggcaggaagagcagggatgctcagctctagaagggaggcgggacttcaggagggaggcaggacttctgcacgtgggagcctggactcagaaatattcctcaagacatgctgcccttttgaaaggaggataggaaataaatcatggttttgtcctcagtcctaaaaagttcggaatctcaccctaggactcaggatccagcttcttaccagcttgtgctgaacatgccatggggcgtacttacggaaagatacatgtggaaatggaattttttatttatttaaaaaattcacttttctctaaaagtattgttacctggaggttggcacctttattcaccaaattcagtactcagaggactagaagactcggtgcctgatttgtgcttgatttgcctagctgggaatttcagttttgcatttaagacgactccctcaccaaccctacccccagaggaaagcaggtattgttgctttgggcctgttgcatgtatatgtttatgttccactgggtcagcagcattcagtgaaacacagttgcctgttaacttggtaaaatatcttaattgcatgagttttgatttgtttttgtgattatttgattttttcaggtttggagtttcagaacacccatcttctcagtagttcagccaatgcgatgaaatgtgaagaagccttccccagcttccttgcattctctccatcatctgtgcagtggagagtagttcccactgctgtggaaacattttccctttgctcttttctctcagggcaggctttcctgagtgcctgctctgtgtgagtcatcgtgggaggatgcggtggagaaggacagggaggaggtctgtgcttctttgaactgacattctggtggagaaactaaacagatcacagaggcagacaccgtgcctcacaactacacacggacccggcttatgatggttccagtaacaatttttgacttgactgtggtacccatacagtcattctgtttttcacttttggcatagcattcaataaattgcatgcgatattaagtactttgttataaaataggctttgtattagatgattttgttcaattgtaggctaatgtgagtgttctgagcaccttttaggtaggctaggctaagctttgatgtttggtagggtaggtgtattgaatgctttttcaggttaggatgtcttcaacttgcgatgggttcataggatcggaactccaccgtcagtcaaggagcacctgtgctgtctttattggcatgaccgaggagacagggctgaggtagatggcatcaagagggtggctcctggtggaggtatgatgttctgggaaggcctctctgagtgcgatgtggtacgctgaggcccagagggaaagcatgagctcatgtcaggaggggggacaacagccttctggctagaaggatagcctgccagagagcctgcttattagagtggccaggataggaccagaaccattgtccagtcaggggctaggaggtgaggctgcagagacacaggggccaggtcctgcagactctcaagagtgcaacaggaagaatggaggcctgggttggcactgttgccatgatttagcggggcagaggtggcagaactggagaaaagagagcaggtgtgaattcttggttgtgggcaatagatcaggtcttggagacaagggaagtggagggaccaagaagggctcttggagctctttggatggtgatgatgtgatgatgccacgttccagaggatctcaggttaggagtcttcaactagagacctcattttgtattgggttctgtttgagtctgcaaagcagttgtcatctaatatgtgactagcagaatatttgtttgtatagatacctctcaacttacgatgaggttcataacttaaatatattgtcagttgaaaatgcatttaatacacctaaccttcaaaattcaaagtacactttctattaaatatgtatcactttcacaccatcataaagtaaaaaaatcataagtcagactgttgtaagccagcgtctgtctgtaccttcccacggcctacaaaatttgtaatgcattgtttgtaaaacacagacacgtgcatttaaacttttattaggtagaactggctcttcttcagggtccttgtaattaagtcagttattcctctcatgacattcttgtaggaggtctcattacccctatttatcagatcagaaaactgatgctaaggggctcagtgacttcctaggaaagctggataatgtttaacatttattaagctcttaccatgtgtcagacatggtaaagtgagtttaatctagtttaatcctcatgatgatcttaggatgttgctattaagggtcactgtcatcatccctttttactgataacactggcctggcttacctgagtagcctcctaacagatctcttcttccacttctggtctccttcagtctgttcttgaccagcagtcggatctgagcctgtacatggaagacatcacgtcattctcctgctcagagtccccctgcggccttctttcctgctgtcccttcctgccactcagagccctggctccagctgtcttggggcctatagctagccctcacttcagtgttcatgcaccattgtgtgctgcgtgccctgctcactgttctgtttatttctgccatctgtacccaccactaccttcctccccacacagcctgcctggccagaatgaaagcctcaggaaggcagggctattgctctgaatctgtcctgagggctcggagcaatgcctggtagatagacacttgtaagcctttgctgaaggagagaataactttaacttactttttctgttggtagtaagtagtagaacctgcattaagtttatctgcttctgaaaacgtatgcttttgctgcctccctacactgcccccccatcctattgtacttggtgaatcagtcatatatttatgccccatatgtctgtgttatctccagatttccacacttttctatgtagaatagaaacatttataaaacattcaaaattgttataaaaccataaagtttgacatagtaaattatctgttgaaaacagggaggccacatcctggaaaagtagctctgtcctgccagcatcattttaaccccttttggacaagatacagttgaaatgcattctctgaaataatacttataactacatcttgacagaaacaagaatatttcgaataattctgggaggattcaggaaaaggcagccaaataaaatgaaaaaatacatttgattcaactgtggaggcttaaaggaattacacatcttttttgtttttttgcgacagcgtcttgctttgttgctcaggctagagtacagtggtacaatcatagctcactgtagccacaacctcctgggttcaagcgatcctcccgcctcagtctcagcctcccaggtagctggggctacaggtggatgccaccacacccggctaatttttgtattttttgtagagacggggttttaccgtgttgcccaggctggtctcgagctcctggactcaagggatccaattgcctcggcctcccaaaatgctgggattacaggcggagccattgcacctggccaaaaaagcatctcttataagctgtttttggtgaaggagcaaacaggaaagtgtcccagaatttgggagatcaggattgtaatcccagccctgcttctgaacaggatggtgcattctcttcatgcctctgctgcaggctccttggatgtagaatgagggcagttgaattgcttgttgccgaggttctctccatttctggaagactattgtaagtcagagtcaaataatcattcattcagttgtccaataaatactcatcatagaacctatgtgtagtcctgtctaatggtaggtggtgctacgtcacttcctgccatggctgccgaggctcacgcgaggctggcacttggcagagagtcctgtcccttcttttgactcagtaactgtggaaagaggtgaggtataggaagggagggcctaggccttaggggttaagcgggcttaggaggcaggattgagagaggtggaatgatggattcagagtccaagagaaaacgtgaaactccaggggattagaattgatccctttctctgtttcctcagtcttagggggactagactgtgttagttgtcttgaattaaattgagcaggggttgtttttcacttctgtaagtccagagtttatcataagccaccagaggtaattcagtagtagttaatatttcattaaccctcacttctaaaattacaaagttagaagtggaggtctttaacatatatatcagtcaggctggagagtaagttggaaagttgcattttattcctgtgtgtttacttatggcagtgcacataagcccagttttgtttctttttctttgattagtaacagttgggcacaaggtgtccaacccacccagtgttaagtcacttagagtgagttgatttccttgaaaaaaggaatcttttcaagaatgtaaagtggcttctcgtagtcttcgtgaggctctggagtcagacacaatactgggttaccctgggaccatgtgcagtgagcccgggcttctggagtcagacacagtacctggttaccctgggatcatgtgcagtgagcctgggctgccggatgccgctggtgggccctctgccagctgctgcatccccaagccctctcttgtgtcattgttttcccttttcaggaatagtttccactagggacctgctccctcaaatttctatcatttgaggtgaggtttcgtgttggttcatctgactggccgagtgcaccctggctgtgagaacaggaaatagaattctggcttttgtcttagggatatccccaggtagagagaggagattcaaaagatgctggggagctacagacgtgacctctgacctctacatgaagaatggtggaaaacacttactacttagtgttaatctacacatttcacttggtttagacctaagcataaatagtgtgaagtcgatttaaacagaggttacagtttccagaaacttcagcgccgtggctgcagttaaacagcaatgattggactctttacgtctactccattctcgatatgaatgaaagtagtcacatcaaatgcatatttattagtcttggtcattttgaatttgagtcctttacatactatgtatgtatgtacccaggagcagagcagggttaaaagtgacatcttctaacttctactctggaattttttccctctgcactttttgttgtcacgtagtagatgttttcacccacatgcaggtgaatgagtgacatatttatcttgttacatagtgaagctttcaattctttaattttatccctctaatgaaactgtgaggaattgattctgttgacacagaaaaggctggtgtcacatgaacctaaaggacgtcattgagcatgtgcctctcacgcagaactgacatagagcctcccgtgcagctcaccttgaattctccatgcacgaatcagccataggcacgtgttatgtgtggcacaggcaagaagtgcctgatagattttagttctgtttattgctggaagcccttgctgtaggaaaaggaaggttttttcctttcctggacaatgattttgagctacggtgtagaatggaaaaggcaggctttgatttgccagacactgcttgctatgtgtgaagccgggatagggcggtgctgttggacagaagacctgccctgtgtgccttttcacactgcattgagaatttgtctagatgatttcctgggcttattgattgttgaaggaaacaatgcaaattgcaagttatgatcaaataatgctttgagtcttcacctttttagaatgctctgggaaaatacggggagaaaataaaccataggaaaggcattttgaggcggttttgttttgttttaaacagctgccatgaaatgcaccctctctaagaggacaattcagtgattttctgaatgtctgagttgtgcagacatcaccactgtctagttcttgaacactcctgtcacctcaaatgttccctgtgcttgtctgcagttgattcgcgcacccagcccagcctcaggcaaccgctcaggcagcctgcctgctgtttccacatgtgccttgcagatatttcatgggaagcagctcatgtcctgtgtcatcgtttgcatcaggctttcacttaacatgtttttcgggttcatccgtgtgttgtagaacatatcagtaatttgttccttttagtcgtattggcgtagcgtgttcgtttattccactccagcgatggactttgggttgtttctgcattctggctattatgaatcacgtgactttgaacattagcaagcatgtctgcgtgtggatgtgtattttcatttgtcataggtagattcctaggagttcgtaggagcttcgaaatggagtttaagacagaagcctttgtttgatactgataatgctagcaagggccatttatttggcttgctcttgaagtctgtctctgtgatgtgcattgtgcttcttgaattgtatgagcctactataggatgaaatatggttataatgtcgagcagaagctattagcatttcttaagctgaccacctgtgttgtgcacactattaggtcctcagcagatgagttcttaccgggtgtttgatgttttccccccacttatcagaagaggaagtcggtgaagtacggttgggcatattaaaaccacattcagcctacaacaccacagaaacacttaccctttgacccagcaattctgcttctaggaatccttccagaagatagacctccaacaatgtgaaaatacattcggaataacctaaatatccatatgcaggagagggttgagtaaactctagtacagccacacaaccacatccactgttgaggatgacctctgtgaattggtttgaggtggtttccagggcacgtggatgtgaatgaggcaagtaccaaagaacatctaaatgctgcccttgatgtgagaagaaggggatgcaggaagacacacgctccctgcacacttgtgcagaggagatacaggagggcagagccagaaacaaaagagatggtgactgcagagggccaggggacggaggaggagtgggtgccaggtcataggtggggtgcagagggcgagggggcagggaagtggagtgggtgccaggtcataggtggggtgcagtgctgctctcagtacaccttttagtgtggcccagctcttgaaaccacagcaatacttcatatactccaaagtaaaatagatggttaatatcagccaggatgtgggggacccaaaatgaaatataagcggaaaacacacatctcactgtagtacaaagcggcagggccacagcaaagggggtggaaaggaaagtgttaaccttatttgggaaaatgataatgttgactggattctgtgaggctgaagagaactgtacaaaatagtagtaaatttttttctcagtgttaatggtgagcaatgtgaaacgactttatgtgtatgtggggattgaacaaataagcagaatcgtagtggataatgagagccaggtttctcactgtcccaggaagaagttacaaatagcaaaaggaagatggcagagggaggccgtgctgttggattgggataggtgtcagtgtgactctgtggtctttaatagatgcatgtacagcacaggagtaaacataggtgtacgcgttacatgcatgggttagtgatacacctacatatgcatctcctagccttgtccgttgggaagacctagaagcaatgacctccagcaacagggagcacacctaaatatcagttgctgataaaaataagcagggctccttgcagaagatgagtctggaacctctgatgatgctggaaataaggaagtggccaaaatggatggggtgtgtcagagggcacataagcaacctggaggagccccatggccaaagcgggtcaatttgagcaaggaaatgagtaatgatagtataggtgtataatctataaaacaaagtcagtatcactactgatacttcttatattgatataagaagaaattgaaaaaataaggagaagggacatctcttcctgacagaaacattccaattaattggtgtaggagcagtgagaaaatagaaaatcgccttcaggcggcactatggaaatagttacttcaggtgagttccgcgggaggatgctgattagtgggccagagtttggagagaaacaggatatttgcctagtctcgaagtatctcttcctcaagttatttatttattaaaaagggaaaaatagtaactttagaatggaggaagccagcagacaccacgtcacctgggcgatcaagatcagcatcatctgatgagacaagttgcatcatatgccgccccacaccacatggcatgtgctctgtcagggactcctgccacaaatgcacaatcacagtctagtcatggagaaatgtcagacgctccagtagagggacgtcctgcaaaatacctcacctcatcagtgttcctcagaagtgtccaggtcatgaacactggaaacaccgaggattggtctaagcttagagacctgatgactaactgtggcctgtgattctgggcagaatcctggaacagaagccggtattggtggagaaaccaccgaaattcagatgaggtctgtggtgtagccaattgtattgtgccagtgtttattttctgatttcgatatatccttctcccagctcacaacatacaggtctgtgattgatacatacttctcctcatgctcacaacttacaaatctatgattttagaggaagctgggagaaggacataggggaattatctgtactatttttcagccttcccataagcctaaaatttcaacataaaaagttgaaaaagaaacccatggcagaatatgatgggagaatggcagaaatggcaggaccagcccctgtctctgtttcttcccatgtgaagctgtttacctggtttatcttggtctttggatttggtcgattttttttttctaaaaagaaattttaaatatagtcaaatttatcagtttttttcctttatggcttttgggttttgaatcctaagaatactttccctactacaatactcatatttttctttaatttcttctaatagttttatattttgtttttcacatttagcatattgatctatatgaaatttgtttttgtacagtttgaagttgggatattttttcaattggctaatcatttgcctttgtcattgagtagtctgccctttgcccagttatcagaaatatcacctttatcactactaaatgttttctttcaatgatatttcaaattgcttattattcttgtgtgataaagtgattggtttttgtatgttgtgtccacagcttgtcatttgtgtctcatgttttctagatggaggatccttttgggaacatgcgtcttcctttctaagctttgtacttcccctgtattaattggctaggacttctggtactgtgctgagtgtagtgtttggatcatagtgatggctagcaggctgcatctcgttgttgtctttgacgtgaatgcttccagtatttcatccttaagtgtgacattactctagttgttttgtacataccctttatcttgtctagcatgttaccttctcttcctggtttgtccaaaataatctttatcatgagtggcagtagaattttaccatatgtgcgtctgttgaaatgatcacgtggttttccctccagtctgttaatatagcaaatttcattaatagatttcctgatattaaacattcctgcattctggggaaaatcctgtttttaacacagtgcaaaattaaaattgctatttattttaataccttctattttttcaaaatgagtctctccccagccctacccctagtcttttcatttttttcatgtagtttacatgctgtagtagctacatagtggtataagtgcttaacacctggcttttggtgggaaggaggagtgggagtgtatggaaacccctgatttgtagcatttgccaatttccaagttataaatgtccctaccgtgccctatttcaagctaccgatgagctgtcaactggtttacaaaattcctgaaaatgtgacagtcttctctcatgaacaggtataagtataccagtggggcctgagtgtgcagcctggtgactctcatatctgtgtgcactcacacaaccatcactgggatcaacccggaggcttcctggtacctgtgcagctcagcactcctaccctccccaggaggaccccggttctgacctctctccacctttgttctcacttggggattgaataccttgtttattttcacgtcatccttgttttctcttctgtgcacatgcagctctacgttttccccccaagaactgccttggccacctcatttgtagatagcgaaatgcagggtttgtaatgatttttattgaaaaattgagcatctgattattattgtggcactggctttattaaacaatgtaggttctgtgataacctttcttaaatgttgggcattgctgccatgttatattcatgaagttcatcaacttcatataaactgacatttttcattcatgtgtttatgcagtcattgaataaatattttttgagcactttggataccaaaggtttagcagtgaatgaaataactcagtccctttcttcacagagcatatgttctgctatgtctttaagtcacgtgttttttctatttgaccgtccttgccaattttcccctaactcagacatccacttgtctttgcccctggtattatcttaaatcaactctaaatcaatccgatttcttccactgcttcaatgctagttgacgtttggcttaactgcttatataattatttctgcttttattgaattcttatgatgaaaaaacagaagacttgaatctgatgatttttactttagaaaggttaatgatgaaagtgttgtaatactacagtttggtgaaatggcactttttgtgttgtgtgaactgtcatcacttaatgaggagcaggagatcagcttacagttttctgctatagttctggacatcatgagaccttattccccaccagcatgatctctgtctatggctcagagggagagcaatagggatatggggtgctattcacagccttgcctgggtgactgtgtcttctggcagcttagtggctcccaggggcaggatcctggtcaccagcatcctacagcattgccacatgtttgctcatgctctggtgtcctgtggagtagagctccttgttctcctgtggaccacagtccagggagagtgggggtttccctgtaggaggaggagctggaagactccagatcgagtttaaccgtgggctaggctgcgaaatttggatgcaggccagtggacctcagaaatccatctgttcatctttctgctaaactgatttggatttctgcttttttaatcctttgcaaaattaatttgtctttaatatgaaaatcagtgttttatttttagtaagagaaaataattctattttatttatttggaacaatttaaaagaccctagagatcaacatccttcctctttcatttcctagaggagggtgtagaggagcagagtgtgtgacaggcacagtgggactgacctttgcttctgggcctggattaccatgtctggagagtgatgctttggaggaagtatgggtcacttcgctcctgggccgtcggttcagaaggtgcagccttgcccggagctgaggtccagtgctagcagcacattccctttccttgccctgagcctgcatggcagccttcttcatcaactggaatctctgttgaggatggagaaaaatctgtggtccttttgtttactgggtgactttctgacctctctctcttctcattctctctactgcattacaactgtttgatgagagagattttaaaaatgaacataaacaatttttatggaaatatctgttatctattttttttatatagttataccattggaatttactcttaccttcaggtaacagttgtgaggaccaaatcttaatcctggtaggtgacctttaaatcttagaatcaggaattcggctttagtcaaaagttaactttttccttattattgttctcctgttggatttttaaaaatggatacattctatttattggtatttacaagtcacttgactagactgatactaatagtatgacacaggaaaaacaaaaacatctttctgtaaattttgaagtaatgaacaatattagggattattccaaaacagagcagacaaggcagaggaaaaccagtcaagctctttatagcttaaatctaaccctttacctgaataataatttaaaaaactattttataaatcaagcctcccattcctgtaaaataggagtaattcattatcacacatttttgtacctttaatttttttttttcttgatggagcccaagtcttaaagatgtcaaaactagtatcatgttccattttctaaagtcgaggctatctcagtcccatttctatagccaacagggtaatctgttactaggccctgaaacccttctgatgagtctcagcttataccccaccccacccccaaatattcacacaataggcacagtgaaaaccaggaaattagtctctgaaataagcagcctccccaggaaggaagcagcatggccactgcccattctgtgcctggacctcgccccaccggcacttggcttcaggaactggactgatccaggcactttgctggggtgcactttggcttttctcaccagttcccagggcagcctcgggtaggagtctcgggtaggagagtgttggaggccctagatctggggctacagggacttttctcacaactccaggcgagggcacaccgggcttggctcttctaggtctggcgactgctcccattggcaggtttccacaggcctctgcctgacgtccttgacaagaggaagagaggacccggctttctgtgggtgccgagccctctgggccacacagctgctgttctctgacttgtgggtttttctgccgcctcttgcgtttcatgctgtgactctggaactaggtcttaccctgtttggagtgaaggttcggggtgttgggaagttctgtcctcttctctcaggaagaggccctttgactgtgtgcccggaggaggcatgggtgcatcttttctccagggggctcctcaccaggggtatggggagactgtgctgcagcctcaggaatgtcagggtgaagaggccctggaggctgatgcttccggccaagggcttcttctggattttcagataaagtcccagaacagaattactttatgttttaatttcaggcaaatgtctctcatctgcccttttaagtacattaggattgggtttttcgaccctgcacagcacatgggggctcctcagagaagtgtctgaaaaaataaaattaaataactcgctttttagcacttcgtttttactggtgatttgttagtcattgattgaggtgattgtgattgatccaattatttgtctgcccatcctgattataactttttttatttacaggattttaaaagatagtttcttgatcttaatgttatatttaatgttctctttcataagatggttttttgatgactttgtgtttaaaaagtgagggtcttttgagaaatagaatatatcaaattatttgttcagaaacattcaaaagcattttttccaactctgcaagcagttgtctgttaaagcaattagcgtgtacccaattagagctctgttcaagatccctcactgataacctctgtgaggctgttggtccgtgtctttatcaagcagtagtgtggcttcccaggtactgtcagctcattttggacccaatactagtttattgcctgaaattacctttaaactggaaaatcttcaagtaaaatttttgagagtttttgattaatcccctaggatacttttgaatgataggttttggggagatacatttggttgttttggcaccactaccatcagcctcactcacgtgctgccaggcgccccgccagatcagggaacatcctctgtacatggaagcagccccgagcactatgtctgcttgtgtttctgctctcaaggtttctacggccctgcacgtgggccctgctgaggccccagactgcttcctcacacagctgacctggtgggcttcctgtccacacagctgcccttcctgtcctcccatccaacctctcgcatcatgttgaggggagagaggggggcaaatgagacatggtccttgctttcatggaaatttctagtgatgcagatgtctgtatatcaagtactcacacaagcagatgtaaagtcataactgtgatgaaggaagaccaattgaggacctccatcagccgaggggcctggacgctcactgagaggcgaggtttgcactcagtctccttgcccaaagctggcagcctcattctgctgcccatgtgctgggcaccttctccactatcacgacttccttgacatttcagtctgttctgttcaagttttggccttccatccctctgaaatgggtcttgctagtcactaatgatctgtctcttgttaaggtcagtggcctgtatttcgtcctggtctcaatcagtgtctcaacaggactgtacagaactagccaacctcttggattccgtgggcagtgccaccctggcatccttctggctcagtcttctgtgcaggtcccccagtcaccaggagccctgcaggtgcagcctacctgcccccagcccaggctgcgctccctgcttgctctgcgtgtgatgctccggcctttgccgtgagctctgacacagtgcagcacagacctgcttgagctctggatcccctccccaggctcctgtccatcctgccccctttcagcttcctgcagtgaccattgcctggaactcaacccagtgttttttctctgccccctttttctgttagctcttcccccagtggtgtggggctgggacaggggcctcacattgtcgtccacgtttcccgaggcttctgtctctccatcccgctgtttcagggttctgcatcctgctgtttcagggttctgcatcccgctgtttcagggttctgcatcccgctgtttcagggtgcacgtttccttctcgggcttggctccttgggtcatgtctccagcctgacgttccagctgagaggtggtgaggcaggaaggggtgtctctgcatcaggaaagcgataaggagttcaggaaacccagtgtctctcattggctggaagagtattacacggctacctctggttgcccagatgcctggggcagggtctgtgctcgagaaaataaggctctgtgagtaagggtctcccacagccagatcaacaaggagctgtaggctgtaagtcctggttcctgactgagggaggcctaaaaagtggggctgttggggctttatatttagcacccactttttaccctctcaaattccagaccagttgagagagccgcacacactgtagataggcaagtggagatcagatacaggctctgttttagataaaagcaactggagaaagtggctgactggccaagcgggtttgctaatcctttatcccaaattagacaaacttcccacctagtaacgagcatggctgggggcaagccccttccacgtggcaggagaagaaaccctagcactttggtgtgggtgcgcctagcccaagaggagaggaggaccggctgggctaagcagcccatttcctccttctagatgcctccttctgcaggaaagagtgcgtgagttggattctgtccacagggaacagaagcgcaagggacaagtgccccctctgctctgaggaagggttttgcatatctcctgttggaagtctggaagctgggcagtctcgctccctgcaccagctgtgccggccctgcctgtcttcctgcaggtctgggctggctgctgtgggcctgtgtcctcaacactgccctgccctgaggctgttggagggacagccccagtgctcccccttcatcatccactctcctttccctttagtgtttctatctctggatttgtttctggtgagccttccctccagaaggaactgctcttgtccccatgtacttcctcgaggcctccctggtcgttcctaggggcgatcatactatagaaagaacccatcattgtcacccagaagtgctcctgagagatgagggaacctctggggaagccagcttgggcttcgggaggaattttctcctctctttatttttattttatttttttgagacagagtctgtctctgtcgcccaggcggtgcagtggcactgccagctctgcctcccgggttcacaccattctcctgcctcagcctcctgagtagctggaaccacaggcgcctgccaccacgcccggctaattttttgtatttttagtagagacggggtttcaccgtgttagtcaggatggtctcgatctcctgaccttgtgatccacccaccttggcctcccaaagtgctaggattacaggtgtgagccactgcgcccagcctttctcctctttttaaatgttctcaagtagcttcctcttcaagtccggtttctttttcttgttttctgctgggaactagatgtagttcccctccttcctcagcagcaccctttaggtacgagatgggtggggttggccctttccattctttaaggagagtattttccactgtgagatggtcacataccttctctttggtaacaggacaaaagagcaaatgctggaaaaactaagcttatgagctttggggaagcctggtgtgcaaatgagggaggctaacatgattttcgggctactggattggtgctcactcccaatttgaaaactagtcaggagataccgaggccctgtgtgatgtggtacaaagtataaggcgttggccatggtagagaatcatgatttttttttttttttctggaggtgggaagccattgtggttgggggcatgaactcagagttgtgccgtggaagggtccctgtggcaggagaacaggtggagagcagacgccgaggggccgctgtccaggcaggagtgatggagcatggctggtggggacttcagacacatgtgcaaggttctgaggatgcctgggtgctggccatgtggcaaggtggaaggcagtgcctatgactggacagctgggagggagcccactgtggtgatggggagggtagactagcaggtctgtttgggtatgctgacttgggggcactcaaggggagctgtcagggaggccattgggtggaagcaattccagagacaaaccgctgctccctaaaggaaaaggagagtgcctttgcctttcaacctgagctccatgtggtcctctggcccagcctgctaggcagcctcgccctgctccccactgatgtcacacaggtgtcacaaaatgaacatctgaaaccagagcttcattttcctaaatttcctagcctttctccttacagtgaacgtcaccaacacccacccagctgctggaaacctggcagtcatcctagccacctcgctttccctcaccgtcacacccagtcccctcaaacatttgtgcctgctgtccctgcgttcgcttcccacccgggtgcttgcctttccacgtctccctgctgtccagcagctggcaagtcattcctgccctgtgcttgcaggctccacggacccaccagggcatctggaatacaactgtgacttcctcctcaccccacggctgtgcttgacccggctcccatctgtctccagatcccttggagcactctcccaggtctgctgcaggcccatggcctcctcccttggaccactctccccgtctctgtctaggggctgctcacagcttcctagaagtttcttgcctgggctttgcttattcccagctggtggctttccatctgtgctcttcctctgctgacggccccttctgccccagctcattatatgaccgttgtctcccatcccgtcctgacctgcctgtttatggaggcatcctctaggttctcagtggagggtgcctggcccctggaacaaaactgttgagtttgaatcatccccaccctgcctcttcctagctgcagtgctgggcctcagtttccctatgtgcaaaatggggacactcaaacctgcctcattcccgtgaggattacatgattaggtaaagtgttcgtggcagtgtgggggatggcgagtgctaggcaggagctggaggctgttctctttgggctatttgcacacatatgctcttagcctcctttcgagcactttcctcagccttcaatcttgtgtatatttgtgtgtgtttctcttttaggagagagacttctctggcattgactggacaactgtcagagcttatccttgacctgagctcactgcctctgcctcagaattgggggtcaggttattcttagtattctaggtttataaggccagacagagtccttcttccctgtagagcagaaatgacccctaatataggagcatattgttttccctcagcagagcaaatgcttcagtagtagtgttaccagcagacagatggcgctttagaggtgacatgtgatagatgcttgggactgaaatttagccgtggatcatagcctgaatgggattttcacgcatgtcttccctctcaggatttctcttaagggttgttgattccacatttctccttgaggagggggtggtggtagggctggtgaccggggaactgtaatttcctgtgggagagcagcaatttcattattcctttaatgaagctatagttgatcatccttcagtgcctagtatacagcctgttaaattagggtcttcggattgctctgcaagcctttttaaaaaaataatttacaggctgggcgcggtgggtggctcacgcctgtaatcccagcgctttgggaggccgaggcgggtggatcacttgaggtcaggagtttgagaccagcctggccaacatggtgaaaccctatctctactaaaagtacaaaaaaaattagctgggtgtggtggcgcacacctgtgatcccagcgagcaggaggctgatacatgagaatcacttgaaccttgggaggggaccactccagcctgggtgacagagcgagactctgtctcaaaaaaataaaaaataaaaatttacaatttatgttaaaatatgtcattttaagttatgtaaatccaagcataattactgaacacaaggctcaatccaaaacatgcacagtaagcccgtgtgaagtgttcacatgctgttctgaggctggctggatctggagtttctgggagtgctctcttgggctggcacgtcttgggctgtgggggccctgaagccctcctagatgctggacattggtgtgtgtgcaacttggtggtggtgttggggttactttccagaagctactcaaggcttagtctcagtttctatctaaagatatttatatgggaagtattccaaatgtggatttataaagataacacatggatagaaatagtgtaaaacttgtgtgaactgaaccagccaagcttctagtcttccctttccaaaactttcctttttctccccccgtgttaaagatttaaaaatatatgtttaaaaaggtcacttttaacttgtaaaaattattcaacatatacagaaatttaaaaagcagcattgcaggttatgtgagattatgtatgtctgctctttggaactaggttgaaatgatagctacaaggttctttggaagaatggggatgtgtgggtgagagtggagtagacaggctgggcttactaactaggcttgcactggcccccgtcagtcactgttcccaagtcaaatactgcattgcactgaacaccagagcagcagtgcatttcctagagaactctgcaaggctacaggtggcagacttagggagcgcttgccatccctgcccttcccagctctacccagaacaaggaggcctcgcacactacctggtcatattttgacttcatgcatttaatgaaccaaactaaaggtaaatattttcttttgattcccaaggcagacttgtgggtacccaagttcctcagcccatctttaactcagtaggatgtggcatctccattgaggctcttcatggaatccctggaggtgaaacctcggtgtccggttgctccaaaccagtgctggtgggattcagttttctggacccatttctgggtgaagtcaaggaatggaggcgggcggctgtcaagcgtctctgttgctcaatggggcaggccagtcccagcggcgacttagaggtggctggctgggcgtccctacaggagaatgggccacagggccagcggggccagcaggatgagcaggcctggtttggggtatgggccgcaggcgtggagctcgatgctgggcaggggcctgctcactgacgagttgccacccgggattggggtaggggtgggcgcggtggtctcgggctctgagcggctctgcaccggcaggagcaggactggcagcagcagcagcagcgccagtgcggatcgggccgccatggccaagcgctccggctcgtcccgtagcagtgccgcggcggcggccgctgccgggagtgtctgttccgcggttacgcggggtcctctccggtcctgtccagtgaggtcctgacagctgtaccctggcccaacccctgcccacggctgttaacgatcagcctcggggagcaggtgtgccgccacgcgcgccgtagcgctccggagctggctctgcgctcacgtgctcgctgtgccctgcgcgcgggcgggccgtgtccccgcagccccgcgcctggcgctgccaagctgcccagcgggctttagcaggtgctgaaatgcccgctgccagtcgccgagtgctgggtgcagaggatctctccagacacctaggctcccttctttcgcggcacgtgggaaaaactcctgaagtgcgtgcacagagtttttgttttagaggctttgacgttatgattaagtatacctgtgatgtaacgaaaaccttttttaatgcttctcaaaagatttgctagcgtttaacatttacctcctgtactggagtttaaaggaagcgttgcttcttaagtaatcagtgatccttttgcttttggaaattgtaatgaacttcaccatcgtagagctttaatatttctttcctgaagcagaaagcatgtgaaattttctggatagtgtatacttaatacacaagcttttggagtttttgaatgctgggtatgttagcacaccagtcttgctgactattacgtgggagatgagtgctgcttaaaattgtgtaaggggtcagtagttacagtggtggacatacttttgccagacatggtttattttaaagtgaacatattttgtgcttatttatttatttgggacagggtctcactctgttactcaggctggagtgcagtggtaatcatggttcactgcagcctcaacttccaggctcaagtgatcctcccacctcagcctcctgagtagctgggactgtggggctacaggcgcactaccacacccagctaactttttttattttttgtagagacggagtcttgctgtgttgcccaggctagacttgaactcctggcgtcaagcgatcctccctcttcggcctcccaagttgctgggattacagatgtgagccaccatgcctggccaatgtgcttattttaattctaaatcagaatttctataattatcttccttaccttggtgtctgtctgttatcagcacaagggtttaaaataatttttgatttcttggaagtaattacgcaggcagttcaatgggagaaggcactttcctcagcacatttggggtgctgttgtcagaaagaaggggatggattcaagtcagcaaaaccagctgtaaccacaactatattttttaaacatgtagctgcatgttccataaaacagcatataaaaaatagagtgagcattctttattggagaaatagctgattctaggactgggcaggaaataacacaagtgccaggaatgccaaggaaatggcaaggaaatgccgagaaacaaacataaccacacccacatcaatgggtggtgtcaaagggacccaggagccaactgaaagagctcccagtggccaaagctggaacagtttctacaacaaaacaaagtagtattggattatagcccagagataaataaatatccatgagtccagactgacataaataaatgactgataaatgaggagaaaagacaaagctccttttccagcacaattccagatcatctctgcatctgctgtatctgctgtgtcttccaggaggtggagcacaacccttaccccaaggcaagggctgtgcagagcaacttccttccagagaggacagcatggaagtggggcggggggctcaacccagcaggggccaggtcagcctcacagtggtcagtcacggtgacagggtgtgcctgatacagtggagtgacagtgggccttcacctctgggggcttcatccccaaactcagtcccttcctgtaccatgagaaaaacatcagacagatcccagctgagggacagcttcctcaacagtcaaaaaccaagaagagtctgagaaactcacagccaagaggggcctagggagccatgacatctcaatgtcacgtgggatcctggacgactgaatctgacgaaagtgtggatttcagttaataacaatgtgttaattaatactggtccgttaaaccagcagtcctcaacctttttggcaccagggactggtgacaatttttccatgggccgaggtgggggctgggagaatggtttggggatgattccagcgcgttacatttattgtgcattttctttccatgattacattgtaatatataatgaaataatcatacaactcagcatcatgtagaatcagtgggagccctgagcttgttttcctgcaactagatggtcccatcgggggtaaggggagacagtggcagatcatcagacattggattcttataaggaatgtgcaacctagacccctcacatgcgcagttcacaatagggttccagtcctgtgagaatctaatgctgccactgatctgacagaatcagtgcaagaactgattctctgaagcccagttcctaacaggtcatggactgttacttgtccatggcccaggggttgggactcctgtattaaaccatgctcatgtaagatcttaataatagaaaatgggtgtggggtctgtggggcctttctgtcacatctgctcaatttttcttcaaatctaaaattgttctaaaaataacgtttactttaaaaataagtgttttttcaaaaacacttttttgtgtccttatcttctgctccaaataaataattatcctgacttttgtgtaagtggttccactagttttctttgatttcttaactctgtctgttacccttacacagtatatcctttggttttgaaaaccgagtagtcagggcacacttatcgaaccaggccccaggggtcagtgacggttgatctccaaggggttcacttttggggaggggggtccctcctggagcagtgcgttcagctagctcgtatactttttcacaagtgtgttctgttcccttcagcggggtaggcctgctaccctctccttccacttgggcttcccctttcttgtctgtctccttgtgcctggcagccttgggtatctgtgatatggctgtggttagttttggtgcagtgggatatatttatgtgctgcagtcacttctgtgaagagttaggtgctgtccgggtgctgtcagcttggattccggagttgtcctgtgcagtggaggctgtaaaggagcattgtcagggaagagaggctgttgctactgtacccatttgactggggactcctgggatagagtgagttccaagaaagagcagggaagaattgggtcagtggagacacagtgggggtcagggcatggacaggccgtgctgcagcttggagatacaaagaatgagggacgaacccagaactggaggtgtttctcaagaacagaatcttcaaaggttgagatgaaactcccatcatacttactagcaataacctctagcaaagttgaggtggtctgttttggctaaataaaatggacatagcattgctgggcccctgtgaagggctggaagcagggaaatgtcagcagtggcaagcgtgccctctggggagtagggaatttccctggcgctggcaggcagcccatgctgccgtagatgtttcctgctgtcctgggtggcctcacacagagcagctccacacctgctctttgaagttttcttggggtgcctgctggctacaaggggtctagatgtttatgacactgatataaagtctctgtgcttcccttggggaaatgctcccaagtatgaagcacccaggttctgagaacagagttggataaaaaggttgagttggagaaacttacctaacagggttaaagtggagacaaggatggcatgtgaagctttggctttacttcccaggtgatttttctgttacgcttagcatgcatcgttgctgcttcgttgttttgttttgttttgttttgttttgttttgtttttttagatggagtctggcactgtcacccaggctggagagcagtggcatgatcttggctcaccaaaacctctacctcctggggtcaagcaattctcctgcctcagcctcccaagtagctgggattacaggtgcccgccaccacacctggctaatttttgtatttttagtagagatgaggtttcaccatgttggctaggctggtcttgaactccagaccctcagatgatctgcctgccttggcctcttaaagtgctgggattataggcatgagccactgcacccggcctgcttctttgtattttaatatttgtgtattttatgattttctagagaagcattggtttcattttggcctaagtatgatacaagaggtggaaggctggtttctctgtttccttcagctgctcctgactggtcctcatctgttccttctcagatcacagttaactgaatatattttaaaagagaaaactcgtaagtgccctaaggaaataaggaattattttgaacactaaagctaaaagcattctaacattgtgttgcttttatgttctttactaaatttgcttcatgcacacacacacatatatgagtgtatttctcagtatgcagatgatttcaaggactggcttccttcgtgaaaacgtattgttggttgcaagaagataggggactggaaacatgattcgtctgtctgtagaggtgaagttccaagaagctcaccactgtccagtctttatgcttatgaacttgttgagtgagttctttttttatagtgtacccatgtctaggaattttggctgaaatcagcttctttgcttttttaggctttttgctagtgatagtgttgtctttgttctgtaaaacaactgtaaaggaataccaacaatctagtgcagaaattcttttgtaagaacaagctaccctgatgtcatgtcgtgttttaggactgtttgcttctcaacctgatgaagttgttcttagctgtttgctttgttttctcatccacagcagtattcctttctttgcctttaatgcaattgtatcttgagcaggcttgttaaatcccgtgggaggctttttttttttataggtcctttctctacttggctatgttgcctgctgagtttaaagcctttttatgatatttaacaaagccctctgtgttcagcgtgggttgtggttgtgtttaatgtttcaacctagactcgtgtattaagtacagatatcatctgtcacttaacttagccttgctctcagtgtgtttatcatcatgtctctaaggccatcctaaatacgtgacctggagagagagggggtggctaggccaaatgctgggatgcctgcactccgtttcttagccgtgagtctgtgcttggaaacccacgagaactctggggagccacaggccttggggcttttagctgtcccccttttctcttactctccggatgagtgacttgggaacttccgagcaacttaaaatatttagctcactttactttaataaaccatttttagtgctatctatgatagggtccttccagtgggaggtacacaaatttaacttaactatagttaaacaagagccagaaaggtaaagaaggtattgttgagaacaaatacggctggatgcacttttggggtgcaaatttgtctcttctctgtgtcagttgtatctccccaaagcaaggaataagtgctggagttgagtgcgtcagagcagggcttgtggcaaggcaggaagaggctgcacaaagcacagatgtgcagtttcattagtcaatatggaggaatcctgaggtacccactggctatgttgagtaaaggaaagaaaaaacaaaggcataccatgtggaaaagaagaaataaaactacctcttttgggagtatctggaaaaccctagagcagtcctgtccagtagaaatacaaaattaatatgcaaacgtcaatgttattcatatatacaaaaataatcagaagatattatggaagagacaaccccattaacaatagcaacaacgagaaaatatttaggaataaatgtaatgagaactgttcaaaagctaagtgaagaaaacaataagttgagaaagacacagaagtcgccttgagcaggtgaagacaccttgttctcggttaagatggcttggctcattaagatgtcagttgtcaggtaattttcaaatttaatgtgatgctaatatttgaaagcaaaaagactcagcttttttttcttgggctggacatgtcgattctaaaattgaaatagcatgaatacctagaaaacttagaaaagaaagagccaagaaaaggagaatagctctactagatattaaaacatactacaaaggctatatggaaaatagtgtggcaaggttgcatgaagaaccagacagaccaatggaggaaataagcccatatatagatggaaatctagtatatgataaagatagtatctcagattgttgggtcaaagatagattgttagagtcaacgttcttgggacaattggactccattttgtaaaatacatcattaggatttatagcttacaccacatgcaaaaataggctgcaagtgggtcagagaactcagtgtgaaaaaggcaactgttccaatgttagacacaaacatggttgaatattacctatgtgttgggaaaggcttttttaaaggcgtaactcaaaattcagcttcaacaaagaaaagatggatgaatttgactgcattccaaaatactgcgaccagcctgggcaacatggcaaaacctatttttacaaaaaatacaaaaataatttgggtgtggtggcacacacctgtagtcccagctacttgggaggctgaggtgggaggatcacttgagcccaggaggttaaggttgcaatgagccatgatggtgccactccagcctcggtgacagagcgagaccctgtctcaaaaaaaaagtaacaactttgcctgaccaaaaacaaaacagaaaaacacaataaggtcaaaagacaaaaataccaattgtgtgaaaacctttgtagcatatcataaatgttttaaaagttgagggagaagaaacccgaaattctaggaaaatgggaaaaaggtatgaacagacacatatgcacatatacacgtacataaacatggcccatacactttaccaagataccatttcttacagatgtgcaaataatcaaaagtctcacttgatagctatttctaataatgttgctatttctcatgtacgtgcttaattggaaatggtgtattaaataaaggtgaagaggcagttgccttttcagcttaaaagagcattaaagtttatgattgttaacttctaaatttattctcagtgtgctttgaaatagactttataacaaaagcagcactaactctccctagatttcctaggaagcaggtaccaaattcttatgcacctgcatgcacaggctgccaggatgcccccgctctactgtggattattctaggctgtttctccttccttccaaccaccacacccacatccctaaacctaggggtttaaatttaggtaacacacctagggcttgttaaatttaggtagtttccacacttcgaccttttttcttaggatggctctgtattcattatggatttcataagtcacatggctggaaggtacctgatattcttaggatggctctgtattcattatggatttcataagtcacatggctggaaggtacctgatacagattaaacacagaatttagttaggatagcattctgtctttgaaggctgtgtgattgcagcccaggccaagccaggcagaagttgggtcacttgagcagggccctgcaaacacacctgaaggaggtggcattgctaggactctacttttggggctgaatcagcagaggcaaaaggactgagtaagtccttgctgaggatggcacagctctcagctacagagctaggaccagaccaggctctggggttcatgcgggaatcaccagtctgcgctgctgcctcctcctgtatgcgtgtgtgtgtgcgcgcgtgtgcgtatatgtgtgtgcgcgcgtgtgcgtatatgtgtgtgcacgtgtgtttgcgcgcgtgtgtgcgcgcttgtgtgtatatgtgtgtgcgcgcgtgtgcgtatgtgtgtgcactgcgcgcgtgtgcgcgcttgtgcatatatgtgtgtgcacgtgtgtgcgcgcgtgtgcgtatatgtgtgtgcacgtgtgtgtccccatgagtcctgtggcaccaccgagttgtcatgaatgctttcgtttaacgagtcaggagcagtttcccattttgtaggctgtttttctgtgacctggattttaatggcttggtcaacaggtggaaaagtatccacctttccttatcagtctggaggctggttggttttttctgcgtcgcctgcgtcaccacttcctgatgtcagcgcacggggctctgcgcccccccaggactggaggctccgtgtagatggagacttttgtttttgtcccatcctcctggcatgtagaaggccctcaaatacttgttgaagaataaatggacgggctttggtattttataacctagcaatgcaccttttggttgtttccaggtttactattaaaaccaacgtcttgatgcccctctttctggatgcttttggtgatagagaagccaaatcacgctggttttaagcaaaaatcatgtatttgctcctgaaattttcctttgaaaactttctgtgtgcggttgtacgtcagtatgtggttttcagccacactgggaggcgcctttctctctctttttgtcgctatagacattagtggaaagccacaagtagcgtgggggctgcctctagtcacgcttcagctgcaagtgcggtgtgagcatctatttttacctcacagtcctcgctctgaaaaattctgaccacttttatttttaacattctgctctattagctgggtgcagggaggaaggaagctcaaattagtcagtttactttgtatttatttttacttgaccttttcacttccacattttgagaagaaaatgtgagactctttcctctgcataattttcttccttgaggagaaaccattttcagtcatgcttggaaagaggtggagataacctcagggtagcatgtttagcgttttccattcacgaaacaaaccttaaaatgttcatctgtttattctatgaaataattagtttcttatttcccacgaatttgaaaaccagtacatttctgtgccaagtaatggctgtgttttcttgaccatccggcaagtctctacctgggtgtggtgacttggggaccgcgttgtcaaagagccagtgaggcgggggtgtggagaatttgtttgccctttgtttttcacttacctttttctgcaggaattgaactaaacaattgctactgacaatgatgtattttaattcctaggaggttaaactcctcacctagaacagtttgattaataaacctaatctatttaagcatgtgtcaatccttttggaaattgtaatattcaaggacttgctagcatttatggctctttaaatatttctagttatagttgctgtcaggattcatttattttgattgggtaattagttttttaccattattttaaaaactaataaacattttaatcagatctcatggacagaaagccaagattcttgtgctgcttcctaaatgcagtgggcgcatctctgtcagtttttacctgctggaaggtactcctgagtgctgtgctgagctctgcccatctgtccatcctcttgggacactcatccctttcccattctctgctctgtgaggggatggtgctagtgagagctcaggtcgagagggctggggtgctccttcgtctctcagctcatcagcagtgacttggaagacaatcagggtctacctgtgttgttgagaagcgttacgcaagcaggaaagcgcacaagaggaaggcgcagctgagtgaagcattgcagagcccgccaggctgtgccttccacccaggccagcacacggagcgctgcagtccctgaaggcttcctcaggctcctcctgttggcgtgggtgcctgccactgacctctgtgggtgacaggtttgtcacttgagcttgtatcctgcaacctgtttgtttgggcgtgcctgtttgtttgtttttaacgttttaataaactttattttttagagcagttttatatttacagcaaaattgagggacaggtacaaagatttcccgtatgccccctgcccccacacaggcacagcctcccccattatcaacatccgtatccggagccgtgtatttgttacagttgatgaccccatgttgacacctcattacccagagttcatggtttccatgagggtgcactcttagtgttggacgttctatgggtttgtacacatttatgacgatatggatccatccttacagtatgcagaattgtttcattgcccttaaagtcctatgcttagcctattttttaactatataaatgcagtcaaaggatgtgtttttgtgtgttttcttttgttcagtattacatgtgtgatgagacttgcctgtgttgttgcctgttcgtttttactgctgtacatagtactctgctgtttgaccatatcatatattcattctgctgacgatggatagttagacggtttccagtttggggccattataagcaaaactgttctgaccatactgatacatgtgttttggtaaagaagcacaggtgttgctggggtggatgggctggctgtgagcacacgcacttcagcgtgagtgggtgatgctggcatggtgcctggttgggcactcaactgcctgctttcaccacactccccatgtggcatcaactgctttggaagtttctgtcttcttaatttttaccattctgggcaggtgtgtgtggtatttttctgtagttttgattctcatggacctgcttactagtgagattgagcttttgttacatttcatggaattctggactctctgagatgcctcccaaagtgcccagctacagcctctgtcatcagggaaggagcaggtatgggaatggtgtctctgcacacctcatgtcttgcctacatccttcttcaagaaaatactggttttccccctgaaaatgatagaaattgactcatcatttttgagtctagctcaggtgtcttttctggaattgccttttttattcggtgtaaagaggcacagggacttcatatctgctatagatgagtgaaggttgcctagacatgcacacaaggcccttggtggacttcccctatccctggggctcctcataacccttccctcttctcttccctggactttctgggctggggccagggcttggggtcgggggtgagccttcctctcggtgtgtatctctgtgtagagttgcatggtgagattcggcttctgttctaaatgcagttgggtggaaataaagcagggatggtcctgagtcacccacattcctcttggtcagtctgccctggtgtgaggagctggcagcctctgcagacctttggtcccacttcccatttgggggatgtaggcttgtgttataaaataggtgaacatgtgatttactgatttactgcttgaacagggacacttttgagagtgaaagggcctgcaattattaatgaccccaagatgacatgtgataacgaggaagttctggggagatcaggtcatgatccccagagttatgatctcaaagatggagagtgtcatagggaggatgcccctctgtgagttgtgaggggccacgtgtgtcctgtgtacacaggccctaaggggtgctggggccatgtgggtagtcataggaagatggctggagttgggaggcagaatgtttaagaagtatttcactcattgactaaacttagttgagttttatttgtctgtgaaaagggaaatctacttgccttgcttgcacgcctttcctagggatattttggggactaaaatgtgatagtgaattttaaaatattggttgaaatggccaggctcggtggctcacgcctgtaattccagcactttgggaggccgaggtgggtggatcacaaggtcaggagttcgagaccagcctggccaacatggtgaaaccccatctctactaataatacaaaaattagccaggcgtggtgttgcacacctgtagtcccagctactcgggaggctgaggcaggagaattgcttgaacacaggaggtggaggttgcagtgagctaagatcgtgccactgtactccagcctgggcgacagagcaagactctgtctcaaaaacaaaacaaaacaaaactatatatatatatgtgtgtgtgtgtatatatatatatgtgtgtgtgtgtatatatgtgtgtgtgtgtgtgtgtgtgtgtgtatatatatatatatgttgacatgtgagtttttcagtttactctgaactctctccttgtctgttttttaaagcatcctgaaagggagtgtctgtacagcgtcacctgttaacagccactaggaagctgccctgagagttggacctggccgagctctctgatacttgagcagccctgcccagaggagcctgtgcagcacatgagggttcttcagtattggtcggtgtttcgggagcccttacaatgaatgaacacagctgcagcccagtgacccctcttggacaagtgcggagatcagttttagctcagctgctttctgaatgtttcagatatttcaaactggaagtcacaagtagcttttacttttgcaagcagtctgctgttatgaatagcacgtataagaaaatttataattcagttagttaaaaatatgtttgagcacctgttaaagcaccagaattcttttataaattgaggaaagccatgccatctaacacatatgtggcattaagtgttcttttaataaatattatgcttagtagacatactctacataccaatcagaggttgccatcctaaaccaaaactacatatccagcacattctgatattaggcggtggcttacaccagggaaggcttggaggttgttttggctcctaccctttaaaaggcttaccagcttttagatggagtcatagataagacatggatagtaacagaaaggaagcatggcttatcagctgtgtcaagtcaggacacatgtatccccattcacattgctgaactcaggaagatatccaagcaccattgtgacatacttgtccacagagaccgcagataaccccagcaccctctcagagtggtgccttggtgtttttgttcataaagccttgatgctcaggcccatccgtcatcccgggcaggtgcgtagcctgtgtggtggatgccagggtcaggggagggctttgcttttgcagagtctcgaggcttaggctgaatgtgtttttaaaggtccgactatactgaaacaaacattaaaaaatattcaacatcacttaatttttattgcttaagagcttatctggctctcccattggctcagtaatttggttgctattaataacgttgttgaggttgtcatcgtcaccttaacattgtcatcatcacctccagtaatagctaacatttattgagttcttcctccatgcaggaactgtgctgagttctttttctgcattattttattcagcctttgctgcagccatctgcagcaggcactgttactaaccttctcctgccagagggaacgcttgagatgctgcagggtgacagtagcctcagagccagggggctgcattgctggatcttcaagcaggcaaactgccaactctgtgttcataatcctggtcatgggctcgcactgacctgtagagagctggatatggggaatggattggagagcttttatttgaaacaacagcaaagtggcatgatcttttgggaatacactttttcaagtcatgtatccactcacagacaggctttgtgagcctcttgctttgttaagggcccagggaagattttaaggcgaccaaacttccagtgacaaacaatatttgaaattagtctattcctttaccccagaaatgcagaaatacatggttttggatgtttgacctcattggttggtgggcatgaggaggtggtctgctttggtgccagtgaccgtctgtgagtcacagagtgagtgaatgctgagccgctgtgatgggaaagctctctgctgagttggttcagtctgggtcacagagtgagtgaatgctgggctgctgtgatgggaaagctgtctgctgaattggttcagcagtgcacctgcttcctcacggggcattagccggtcagggcgatgtctctggatcactcaacttgtccctgacagagcaaggaataagaaacccagttagattgtctgtatcatcagatgccatttacatcccagtcaaattagcagccagatcactgatttcttataggtatacatcttttgacttcagcataatctcttcccctttttctgcatccttgggttttaaaggatgtttactatgtaaatgtttaacatgtttactatttaaacttaatagttgaggtagcttttaaaatttgtgtccattaaacccaaggactcttgcagaagtcgtatggtttttcttctttcatctataatgcatgtaaggaattattcacttgctctaaagttcaaatgtgtgagtttctggtgctgttacataacacgtggtattgtgggtcaaggggagttagtgtctcacctaaaatctggggccatgatgtcaccacattaaatagtagggatgcttgctcatcttttaagggtatttcttccccctgcaaagcaaaatgctgaagagatacatatttgttaattaactgatttcaccctcgtcatccatcctctttccataaggaactgtatgttgcattcttgctgagtgcagactaagtcctttgtgcaaggttgggtcatcctggggtgaaaaggtaagtgctttcggggatgctgattaaggtggtatctgctgtgcctctctcagtgtccccagggcgaaattcctcaggttacagtggcaggaacagctgcttgagctcatttttgtcttctgaacaggatcagtcttggaattggccttttctccatcttcagccccagggtggggctggcctgggtagggcctgcgcctgtgcttgctgcgcagcagcacccctgcgtgccttcccttgcctcggctgctaagtctttggagaaaactctacattgccaagcttcttctgaaagatttaattttttatttagaaacagtatgcttattacagactgtgcagactttgcagaaatgcaaaactaggaagagacatattagtccctttgcatagaagcaacttttgttattattttgtatgtttcctttgtatctgtattagtgtgttctcatactgctaataaagacataccaaagactgggtgatttatgaaggaaaaaggtttaacagactcacagttcagcatgactgagaaggcctcaggaaacttacaatcatggtggaaggggaagcaaacacatcattcttcacatggcaacagcaaggagaagtgtccagcaaaatggggaaaagccccttacaaagccgtcagatcccgtgagaactcactcactatcacgaaaacagcatgagggtaactgcccccatgatacaattacctcccactgggtccctcccacagcacgtggggattatgggaactacaattgaagatgagatttgagtggggacatggccaaacaatatctgtgtcttttttcatgtatatgttttttttttcttttctcagcataattgatatactgtggttactctacctatttgtgtaggcctctcaggtcattgaaacaagatgttgtacaaattagcagatgacactggcgcatggaggaatggtttgtattttaattttcactgtataacattttagtaaagcttttactggaaatgttttctacccatatcctcaggaaaccatgtgaagtagacagccttgcatttcctggattgctccctcgaaggatgaagggagcagttctatcagatgctcttcccagcctccttctccagggagacctagccgctgctgttttgagtttcctgggaggacatcccccaaggactctctggcttgtccttgtgaagttggtttgctttttgtgccagctttttaggcttacaaaatgttgtgtgtgtgtacataggaaaaatatggaagggtacgtacccactagtttgtgtcagcactggattctggcatatataatagatgaggagtttctgttatgtatatgggatttctgagatacacaggggttttctgtgcacatctctctataacgcagctgtcccgtcacatcctgcatgtcagtacaggtagtgccgttctcttcgtaggactgtgacactttatctttgttctttcacagttaaaaaaaaaaaagcttctttaaaattctgactttatataactaacgcaatgctcatgctacttcacttgttacaagaacatattattctgtcctatagatgtactgcagttatttaatggatcagctattgataagggggcccttttaatgtaactattttaaaaaatggaagtaataccagcacatggtaaaaaacacattgcagctcatgaatgggtataaattaagttggagatttcctctttctccctccccaccccatgccccgtttccagaggtaaacaatgtacagtttgtgttttcttctcttaagttcttcttgtagtcaccattatagctttaacttttctgtttgtgagttcatgtggaagtcaacagtgccttcacactctgagttttgatgagatttatattgacaaggcttaaaacatttgtagtgtttcccatctatcattaggctccctgtgcttttcctgcaagtgtagtctaaacattttaatataagaaaagtaacatttatagtattatgatagtatattttgccatagaaccaagtggtatgaaatgtaattctgcctcaccaaacctttgccaataaaaggagaatattcagatggaactcccagtttctctttaggtgtccgctgtttctagctgcctcagttgccatggtttctcctatcccatggtgttggtttcttggattctatttttgttttgctggagcacctccttaatccacttccttatagaatggatggctgacagacttcttaattcacttccttatagaatggatggctgacagacttcttaattcacttccttatagaatggatggctgacagacttcttgggtttttgcacgtaatgttcaaacatgcaattactttgttctcatacttattgataatttggtagggtctagaattctaggatcgtataattttccttttgaaatcagaaaatattctctattattttccagagtctagtgttggtaatgagaagttggatatccgtttgatccttgttctactgcaggtaaacatcttctactctctccttctctccctccctgggcttcatgtcctgacggtttgatttttcgttaccctaaacccggatctgcttctcttccagcccgcgtgcccatattgggatcaccccttagaaaacctcaggctttctttggagagcgattctcaggtttcagcccaggaataaaagcgttccctatggctcctgcttcttgggaagacccctcacctctgttgtcttgctctgcagtttcctctgctctctcgcatcaacctgctttcgtctgccttatgccctaaaagccctggcaggctttcttgtgttctgctaaatccctctgtaaatttttagcaccgtgcactattatggttcattcaccaccaaaaagtaccttttctgacattttaacagagctctgggaagaatggagagaagatatggtgtactttatcaccatttttaattaaaagcccttttaattaattaatttagaggcagggtctcgctctgtcacccagggtgaagtgcagtagtgtgatcgtggctcactgcagcctccaccttctgggctcaagcaatactcctgttatcagcctcttgagtagcttggaccacagtcacgtgccacattgactgattaatttttaaattttttgtagaggtggggtcttgccgtgttgcccagactggtctcgaactcctaggctcaagccatcctcccaccttggcctcccaaagtgctgagcacaccactgtgcctagcctaaaagcctttttagatcactctcagtggcaaaattagtgccttggtcacctttaccagtagctgttcttgctctccagtggaaatatcactcaacattatcaaagaatcgggatgaaattaaatgaaccagtttaggtacttttgatacagaagttcttatgagacgtgttgttctttactatgtaagagtgtggccataaacttaaaaatagctgggtaactttgttacacttgccttgatggtgtgttgcaagttagttaaatttcatatactcttaatcagcacatcaccaacaaataaaatgttactgctgcatcagaatttagaggaggttctatacatctgtttcgaaataaagacggagatgacttagggtacttataagttgttgaaaaatcatggctcctgaaactatgaattgtcatcgtggtatatacccagacagcccacattaaactgctgtgaacatgagaaaatggacatcgaaatgataaaagcaagagtgttggtaattgaaatccattataaataaagctgtcattggtaacgcacgaaatgctgtttctgaggatgaggactttgtggcccccacgtgggcgcattaccaagctttgcagctctgcacaggagcctcccttcttgatactgaactagacctctataaagcctagtaacacctcaggtttaggttataaatcttaaattttagtgccccgtaataattcacttcgtaggttaccatggactagcccttagttgcactgagaaaagaaaggctatgaaattttgttggtgaagtgccaaagaaaggattgggttttgggtcatctcacagcccatggtgagggctgtctttggcctctaccgcacggacaagtttgcatgtcagatgttggcacacttgtggggtattgggttcttttgaatatctgattaaatccatttacattttcgttagaaaaattcatctgtgcatatgaacgcatcatttcatatatgatttcacacttctcattgtcttcctgaagcccattcgtgaactgtcgattgaatgcctgctctggagaggagtgtgaagctgcacttcttccgtctcctcctggcactcgctcaggatcctcacaggtgtggaaaacactctaaggaagcctgcgaaggccagatgtctcccttttgccttctttggttctgttcatgatggccttatcacggacacactaggaccctctgaggacaccacccctgccaccgcattgctctgggggcaacttccgagcttattgtcttcctccagcaagggcaggaatgtggagaagctgtgtgtgctgggcctttactttcattattggcgacaatgtttgttttcattttatcagctttctttatcctccatttttttatcttccacaggtagtgtatattttgagaacagcgtgaggtttattctactaatggaaatttacaaaaataccagtttgaatgattgagaaatctaagttaaagaacccttgaatagaaatgtcgctgttcagtgcgttgatcgattctcacatctgaagccagctgtgtattcttggtatgtgtgtattcaactcaggtgtgacctactgtcttttatatgtccctggatttaaatatgctaattttgttatgatttttgtgtctacatttgtaaaagccgctgatagttcatgtctggcacattcttgacagattttactaccgagattatactgggctcgtaaaacgagtgggggatgttccctgtttttttgttcgctggaacggtatgtgtaagctttgtgcttttcctttattcagccagtgctttcacatgctgcttccttttatagccactcttttttgctacatattctttctctacaagagcacagttcttctggaatgtgtcccttaggattaactatctcaggtgtgatttgtgtgaaaacatctttattcttattgtggaaagactgttgttaggtggggagtttactttcccgtctgcacattgaagatctcatcctgctccactactggtctcttccctgggccctgggcatccgctctcagcctgactgtccccctgtgctcccgcatcatttctctgtgctgtgtctgggttcatgcttatttgtatttattctgctgcgggttagttggccgaatctgtttctgtgagagctcccatgcttttggtactttctgtctctcgtgtgtctctgcactgctttctgggttattgcttcggttctactgcccagtttggccattttctctttaactgtgtctaatatgctgctaaaacctgtccactgagcttttagcgttagtcattatagctattatttctggagggtctctctgcttccctgtcctgccaagtccaattggtcattcttagtttacctgtttactaactgtttgtatctcctttagccgttgttttctgtacgtatatggtgtgtttgacttttccagcatgttcaaggctgttttcccagctgtatcccctcctctcgggccatcaactttttgttccccattgttgctactaattcttaggactaataaagcacttcaaatggcagctactgtcaaaaattaggaagaaggcttctttgccgtagcagcctccagttgattactttctcttgacctgtactttacttgccacgagcatatcatgcctctgtacttgctgcagtaattactgtctcgaaacagtgaaatctcatcagttgcccatatgtgtttaactgcacacgcgtgcatagtcttggctttatgcgaggtagaaaatgagagtacttagtttttggcagagcagagcctcaatttccacagtctaattaaattataatgataaatatcactttaaaaggaaacagttgcttcgtttaatcaatatgattattactggcacagcaaatccatcaagtgctgtgaatgataaatgtgttttaatacaacttgcagtgtacttgctgttggtacaaggcatgttaaatcctcagtggtccctcttttcatagcattgctgtggcactggcatttccctttgttaggagatagtggggtataaacccattgtggaaaccccttcagcttgacaaatttggagtcatgctattttcagaagaggatttcctgcgactaggagcagtcacccagagaaagctctggaaaggtggtggtgctggggttgaagatgagctgctggcccctggcatgtcagtgggcggaggtgggagacgtgcagagctgcctatcccacagtacttccctttccccatccaccctttcaggtggctcactccccaccagtttcgcaggatggctcaaggcaaatggagaaaacggcacaggttgaaactcttggccgtagcttgcgagcttgcctcttagcacctccaaccacgatctccttgaatgtagtctcctcagtctctcttttttgtgtgaggaatataaagtttctagttgccttttcgcataatctcatagctcttctgcacctgtggttccttagctcttatctgagaccgtggcaggcagacagctggttgcagtggttggttagttgtttcatatggttgatcatacagcagctacttggtcccattgttattgatagtattgtataaaatcagttgtcattgctggcatttttttttgttctgttgcctgattatttgttttctaatacatttttattgtgagatacctttcttgaacatggacacatatataagagaataattttaattgcatgtccatgtaactctcacccaggttaaatagacactgtgtacctcacagtttccttcatgctcctccctgatgataactccccctcatccatatgacacatctaatatatactacgtgtgtgtgtgtgtgtgtgtataattaattataattattattattttgagacaatgttttgctctgtggcccaggccagaatgcagtggtgtgatcacagttctctgcagtctcaacttcctaggcataggtgatcctcccactgcagcttccagagcagttgggattacagacatgagccaccactcctggctaattttgtttactttttatagagatggtgtctccctgtgttgcccaggctgttcttgaactcttgggctcaagcgatccttccgcctctgtctcccaaagtgctgggcttacaggtgtgagccatcgtgctggcctttttgtttgtttttgagacagtgtctcactctgtcactcaggctggagtgcagtggcaggattatggctcactgcagccttgaactcccaggttcaaacagtcctcccgccttagcctgctgagcagctgacaccacaggtgcacaccagcatgcctcgctgagtttttaattttttgtagagatggggtttccatgtgttgcctaggctgatcttgaactcctggcctcacgtgatcctcctgccttggtctcccagagtgctgggcttataagtgtgagccactgtgtttggtaatatcctatattttgaaataatactgtccttttctttttaattttaccatgtaagaatgcatccccaatcaatgtagttcagttttgcctgtgatggaactttatccaaggggagtcatcagtatattcttttgtgtttctcttgatttattaatgaagtggattacataaatcgattttcatacattaaatcatgtttgcattcccatcataaattcatcttaatcatgtttgatcgctttaaaaaatattattggattgagtgtgatcacattttgtatacgatgtttacactgtatttgtaagattgacttactgcttccttttcatcttcacagaagtgtcttgttgaatgttggattcactttctagagaagccatctagtcatggagtgttctttccaggatgatttttgtttactgactataatccatccctccctccctgcattccttccttccttcccttttcttctcttttctttttcttgagacaaggtctcactctgtctcccaggctctagagtgtgatggtgcaatttcggctcactgcagcctctgcctcctgggctcagacgatcctcctgcctcagccttctgagtagctgtgactacaggtgcacgccaccacacctggctaattttctttattttttttgtagagacaaggtctcactatgttgccaggactgatcttgaattcctgggctcaagcagtctgcctgcctcggcctcccaaagtgctgggattccatgcatgagctactgcatctggcttctaattctttaatgtttgtagttttgtcagattttctgtttcctcctgagttagtgttaataagttgtatttcttttctttttaaatggtgtgtgtgtgtgtgtgtgtatgtgtgtgtgtgtgtgtgtgtgtgtgtgtgacagggtctcactctggttgcctaggccggagtgcagtggtgcaatctcagctcactgcagcctcgaccattcaggctcaggtgatttctcacacctcagcctccgaagtagctgggatgacaggcgtgtgttactacgcctggctaatttttgtatttttagtacagatggttttgctatgttgctcaggcttgtcttgaactcctgggctcaagtgatccacctgcctcagcctcccagagtgctgggatgacagacgtgagctaccgcacccagcctaataagttgtatttctcttggagtttcttcatttaacctaagcttacaagctttttggaataaagtttataaagcctcttactatatttttagtgttgtcagagtttaagtgataattccattttggtttctcttgccgcctgatgacccattcccaacttagtgacataaacaacaatcactttattaatgctcagccaggtagcctgagtgtctggagctctgcttctggctgtcagctgtggctttcttggttcttctcagtgtcctgtatgagaaggcttcttcagtgaggtggctggctcccgcctggggctgactagacatccttctctgcatgtagcccctgtgatctcttcagagcatctgagttggctccccagagacagtgttcccagaaataggaggtggaatctggcttcctcttcaggtgctggtctggacctggcagtaccacgcctgctgcgttcaatgggccagagcagtcacccgcctgctgggactcattgggggaagtaagatcttcccacacaaggacaggagagtcacattgtggccatcaggccttcctgccctccaattcaattccaaggctggttaatttgggctttttctcttgtgttccctttctgtgtttccatgagtcttgccagagatcactggttcactgcattgtcttttcaaagaaccaatgtttatctttgtgtacctgccgttatatgtaattaatacaggttgaatttcttactagttccctttttctgttttctttgagcttactttgttcttctctccctgacttgttcaggtaggcactctttaatttttttactcctattctagcttgagcaccgagctataaaggtccctctgatgtactgctttatctgtgtgccacacaattctgtacataatcttttctagttttaagttctaagtgttttctgttttctcctgtgattattttcttttgtctatggattatttagaagtgtattgctgaactctcagacatatgggactttctagttatacttggcttgttaatttctaggctcatggtattacgatcagaggatgagctctgtctgatttcagccacctgaaatatgttgagattttctttacggctgggatatggtctatttttagaagtggctcatgtgtccttgaggagctgatgtgtgatgcactgttaggagcagcgtcttgcatgtgaccaccatgcagcttgttaattgtgttgtgcagatcttccatctctccactgttttgttttttcagccgctgtctgctgtctctgtcacctgctcctctccactccctccatgacaaaaagactccggtgtttttgaccatcttttattgcgcccctactgtgatcttagtcacggggccaagcactctacatctgttcctccatttaatcctcacggcaccatctgcggcgggtgttccttgtgtcctcgtcctgtcctcataggagcaagcctggaaggggctgagtcactgttcaagtcacacgactgcaaggctgaggtctagggtggtggcctggacccctctttcctggaagccatgcttttcctgaaaccccttgcaatactcctggcaagtatggcagttttacctcagttggtatgagtgtactcaaatgggaggcaaccattctcacacttgatgtttagactttgcagcttccaaaacccactctgcatatcacctgctccctcctcaaagtggctgggcttcccatgcagtttcccatcctgcagacggcccagggaggtcagatttcttggccaggcttgcagagttggtgggacatgatgtgggcactagaacccagttctgtaaatcttggtttcatgtcctttctgctgtgtttttctttctctgtttaggcggtggactttttggtgtgtaaagcttctagaatggattttacttctttgtggctctttggattgagggaggggctaggtgccatctccagagaagcttgttcagctcatgctcactcggggcccttgctctctgcccactggggaggggctgtggtggagctggattcggactgagtggaggcaacgctgaaggtcagaggccaacgtccttgcacttcttgacactctccacccaggcgtggtgattgggaccgctggggagggtgatttgggagcttgaatctggtgtggggatgatgggggtcattgatagtggggacagttctggacatgtggccctcattctctgtgctggacaagatgactctgtgacctgtaattccaggctgatagagcattttcagtgacagcccatttgacttgatggtgctagtgcaggacacaggtgagcttgtctctgtgtcttaggtctgtcccagcagacgagctgacgtgtgttgtagatgaatgtcagctggtcacaggtgggaggtttggaaggtagcctccaatctcctctgaggactgcagcagcgaccggggcagcaggaacgcattgtgatggcctggccaagtctgcatagcgagagtcgagccactttcacgcgcaccttatcccacacttcacctccttcctccaggttcccactcagaaacccgctcacccctggacacacctcccagagacttctctttggaactctgcaatggagaaacccattgcagacttccccttcttttggatatcagtttgcttttcaggaagaaaattttaatactccatattgaggttttataattatattagcatgttgaaacattttctctaatggcttgctggttgaaaacgctttcacacagagcagaaactagatggagatactgtttcacaacctctgcttcagaagcagaggtggcctgtagcttccaaacccgggcagagcacgtgcagggatggtgcgtctctgtatctggactcacattcacatgtgtgcatgtgtaggggtgtgtgcatattgaattgtaaaaaagatgagtacgtgtgagattctgcctgagactccagtcctcagtgtgtggcctggtgccgctgatgccgagatgttgggctggcagcgatctgcctccgtctgtcacaggtgcctctacctgctgcaggcagacggacggagacgtgatggattgcgcatatcccctttacagattcggaagagtacatttaaaataacttaaatttgtatttagaagacttttcatggagagtatttattgttatagagttcacttctgaaatggtgacaaagcttttgatactgaatcaaacaagtgtgaagttaccgaatctctctgttacacagagtggagcctttcaggctggcatggagagcttaaggggcaactgaaggagacacactggccaagcgcggagttctgcttacttcagtcctgctgagatactctctcagtccgctcgcaccgaaggaagctgccttgggatcagagcagacataaagctagaaaaatttcaaggtgagtaaaaacctgtaaagatctgatcaaatctgactggtagaaatgcctttttcttgatataaaccgcttaattaagccttttggcttgcctttgaaagatgctttattgaatacttcccggcacagatgatctgttactgttggttgatttctaatcttactgcagccttagctcacccatgagtccctcctgcttgttctggggtggtgcctgctgccctccagtggcatgtgtggcacctgctgccctccagtggcatgtgtggcacttgctgccctctttggggtcagttcaccatttattgagtcagtgcttcatgccgggcactagacttggtgaaagccttttaccatcaattattattttcttaggagtaattaaaagaaaattttcctgtaatcccagcacattgggaggctgaggcaggcagattacttgaggccaggagtttgagaccagcctggccaacgtgacgaaaccccatctctaccaaaaatacaaaaattagccaggtgtgatggtgcacgcttgtagtcccagcctcgggagactgaggcaggagaatcgcttgaacccgggaggcagaggctgcagtgagctgagatcatgccgttgcattccagcctgggtgacagagcaagactctttctcaaaaaaaaaaagaagaacatttctttagtacttatttttggcgactatctcatgattcagcgtctgcttttgagagaagttgtgacaaatactaaaatcccagtaaaattagtatggtgtcagattaatttacttatgagcagctgagtgactaactcaggaagtccagttgtacatttccagggaagctttttcatgggttcagatgagatgaggggaaagagaaggtgtcagagggctgctgctggctggaggaacgcaggtgtgctcctgtgtccatttgctctgtggatactgacgagcgcccactgggcctcagatgccctctgggcatggcagggaccaggcgctcgcttggcagctctcatgtgagccgctcactggacacagccgtgctcccgcctgggagttcgggatggcatgcagagctgtggggagggagcggtcaccagggcgtgagtgtggacagatgggagtggctggtgcagagccataggtagggggcggtcaccagggcgtgagcgtggatggatgagagtggctgggagcctaggggggacgccgtctttggggagtagagacacacccatgtctgactactgggttttgagtttgtgccagcaaaggtcctgcttgccatttctgtctgtaaatgtcaggaatttcaggtaactggttccctagcgagacctttaaaggaggctttatcttcaaccgatgctttttttgggggggtacacaggcagtccaagtatgggaaggtcaaaatcaggtcacctttatcatggcttgtgctgtgggatgggattttattttcagccacagcgcttcttctagcttaattagtgataggaaatcagcttctctgtaaccagaggttattgaaagaatgaggatcccagagttggaatgagtctgaaagagacgttgtggtttaatattgctaagttaagtgtcgatttgtgactacctatttttaacatgccacagaagtaaaacattgcattaattatgccatatatgtgaaatagcaagtatttttatataatataactgtgcattggagaaatgaattatttataatcctttgcaccaataaattgttcttaaaagcatagaaaaaataatcaggccagaaggagatatctaaagcatgtgctgagaaagcaaaactgaagagctggaaattataaaatattacgacatgatgagtcatatctcctcctcctgattctgtgttactaaatgctagctgcgaatagaaatcgtgtatttcctttctttcataaaataagagctaatttcggcagcaaacagtttggcgtgttattcttttcccttttcagggtggtttaaataaaaataaataaacatgaaagattttggctggaacatctttggaagcacggccgtcctcagcctcactgcactgtctggtttccctctgagcctccctcccgggtcctgccttagtgctgtctgtgccgtgtagccacaggtcgcactgcagggctgtggggagttatttttagtttcaggcagactcactgtttttgcctttctttttgcttgaaaagactgaagttatttcttgtgtttttatacatgagattatcttctgaggctggaacatcttggggggatacaatagatagaattcctatagtaattcccctgcgcaagaggaattgctgaggagggcttcgggaaaccttgactcttgttgaagcctggaaagctttctcagtctttctcattgccaccccacaccacatcttctttttgtaacaaatatttattaactcatctttttattttaaaatgaagttcacagaagatattaccttatataattatagccatataatgttaaaaagcagtgtcatgctgaaatgtaatataaagagaaactgaagatacataataaaatagttttctatgccactgtatggacatttaggcactgctgctttcactcggatcactgagtggtgtgggcctgtcagtgcaggcagatgtggggtaggtactgagctggtgacctgaaaaccataagcaatagagctgagtggcattactttctgaaatggtcaaacctgaaggaagcagtgttcagtcttccctgtctctaggtagtctctgtatttctggaacattgagtgtatgttaaaagtatagaaaaatgcattgtgtcaatccaaaactcagctgggctgggcttagagaattatgagcagcctttccacctgcatggaagtccttttgtgcaggacagttccttgtttccggggtggccctgctccctccaggaggtttaggagtgcccatgtcaccatgatgcctacgccacttctcatgttgctacctgttgctaccaccgggcatcgctgccgcctcctgctctgtgcacagtgtggtgtggccgcctgaccgactggtcaggaactaaagttctctcgaagccttgactgaaaggagaagtgaggaggggcatggagcccagtgccaagaggcagctgcgtctttaggggctggcacttttcagaggggctcttggggccagaaggaaagagccgtcattcaaggcttacacagcgtggaggtgccctccctggggtgtcctgtgtgctgacctctgtcctggtgcctggcggtgtcctggcgcagagctccgcaagcctctgcggggctcttctctgtgtggaggttctcgagatgggcagtccgggtggatggtcaggccaatgagggccttcgaatgaagcacattattgtaaggatgctaattctggatcctcagatattgtgacaaaaacttgacatttttcttccttcaaagtaatttattgactaaaataaccaactgagcaaaggtgatgttttagtatctaaatattccaaaagattactgaaattttaaagtaaaaatttggccaagaacgagaagtctctgaatgtgcttttctggcatgacccctgtcaccaggaagctgtcagtgtggtgttgggcctgattgattcgcatcagctcaggtggcgtcctattggaaggtcggcagtgggagagcagctggccaggtcagaggattcatttctgtctgaagctttgtgaggaactaagatggcttttccagtagcctctgtcattccagagagttttaagattgcttttatttgttcttctaccctggaactaggaagccagacccaagaaatgtatccacaccaggttttgcccatagtttttaaaaatgttgaatttctttaacttgaggccctcacaattttctgggcccccataagttatagaacagggaccaggcctgctaccttgtgggggctgggtgggcactggctccccagggcacagatccttcctgtgggtgggcttaggggatgtgagggattcactttcagatgtgacactccagatgtggggttggtggcacattttttttgtccggttacatccaagtaaaaaggaggacaaattcttactgaacctatgcagtaaactccattgtcaggaagagtaaagtgtcttagcatgagtgttcctgaattctgaaagttcaggagagtaagatgttacctagagagtgttttatttcagctttgaaagcagagtctactggatttagggctagagatagacgaagaagaaagagaaggggcttctttgagcgcacattagaaaatacaccataaaagaaaataccgacaatcttccaaagccacagtcagcgtttccctgccagctcctccagtcttccttccttcctgtctgctgggtggcggctcatctgtcaagttttcacagtcatgtgcttctgggcgcaaagccctggtgagcctggctcgtttccctggtggaatcggacagttgtcgaaggggtgtcagcctctgttcagaagcctgagcccctgattctgttccttgaagtgtcaggagttaaggtgcctgtattgagcaggggctgccgttgcttctgactgagggtcctcttcaggcccactggctcttggcagagctcagttccttgtgaccataggcctgtggcgcttggctcctggagactgcccatagcccctgccctgtggccctcttcccagcatggcagtttgcctctcaaggcgtataggcagggtctcccctcttcctttcctctctgacttctctcatccttcaggggtttacctgatcaggccaggcccacccaggaaaatctcccttttgatgaactcagtcagctgatgagatgccttaattgcatctgtaaaatcccttcacctttgccttatgtaacactatatcccatcatgttcacagttcctcccgcctgcaaggcaggggagtgtacaaggtgtgtaccccaggggcaggatgctaacactgcactgactgagaaaagaatttgtcttacctgtacctgacaggtgtgtacctgaaagaggtgtgtgcccgacggtgtgtgcgaccgatgggtgtatgctcgacagtggtgtgtgcgcccaccgggtgtgtgcccgacggtgtgtgcgcccgatgggtgtgtgtgcccgacagtggtgtgtgcgcccgatgggtgtgtgtgcccgacagtggtgtgtgcgcccgccgggtgtgcgcccgacgggggtgtgtgcccgacagtggtgtgtgcgcccgacgggggtgtgtgcccgacagtggtgtgtgcgcccgacgggggtgtgtgcccgacagtggtgtgtgcgcccgacgggggtgtgtgcccgactggtgtgtgcgcccgacgggtgtgtgtgcccgacagtggtgtgtgcgcccgatgggtgtgtgtgcccgacagtggtgtgtgcgcccgccgggtgtgtgcccgacagtggtgtgtgcccgacagtggtgtgtgcgcccgacgggggtgtgtgcccgacagtggtgtgtgcgcccgctgggtgtgtgcccaacagtggtgtgtgcgcccgatgggtgtgtgtgcccgacagtggtgtgtgcgcccgccgggtgtgtgcccgacagtggtgtgtgcccgacagtggtgtgtgcacccgacgggggtgtgtgcccgacagtggtgtgtgcgcccgccgggtgtgtgcccgacagtggtgtgtgcgcccgacgggggtgtgtgcccgacagtggtgtgtgcgcccgatgggtgtgtgtgcccgacagtggtgtgtgcgcccgacgggtgtgtgcgcctgacaggagtgtgtctgacatgggtgtgtgagcgcccggcaggggtacgtacactcggggtgtgtgtgcctgacgtgtgtgtgtgtctgacatgggtgtgtgcacctggcagaggtgtgtgcgcccagcagaggcatatgcctgacagaggcgtggcttagtgttcagggtccatagtacatgaagaatcctacagatccctatggacaaggcagtacagtagaatttggggcaaaagacttgcacagattttttttttttttttttacacaagatgaaattgaaatggccaatgagcacaccctcattcatccagcgagcattgaggaccccctagaggccaggcccatgagtgatgaagatcccgaggatgaagacgccttgccagccaggtcagtgggtgatggcatttgtggtcaggggcacccagcaccacacccctggctgccgttgacagctgggtgagtcccctgctgcctgggcagagccacctctgcagatgcccaggtgggtctcctggggcagggactggcaggctgtagcctgtgagcagattctgggacctgaaagctaaggatggtttttacatttttaaggagttataaaacaaacagaaaaggaagaatctgcaacagagaccataagtggtctgcaaagccaaaggtttatagaaatgggcagacctgctctaaggggcctgcttgctgatggggccttgtctggattgccagttctactaattctggaattggaagttctcatggaggactgtgtgctgggtaggatttccagatcccaagatgctttggctgcattcaaacccacagggcagagagagccctccgccctgttccttggcagaggcctccacactccgtgtgctgaccggcctgccagaatgacaacaactgtcagctgtctgcatcctcctggcaccccttagtgtggctgcatactgaggggagttaaaaccataaacaggtggagaatatctccttccagggaatctcagaggactcagtgatttaagaggaaaagaccaaactgctgctttcagcaggaccactgtgtgctgcctgcctgtcagtgcatacagatacggggtcctgagttggtgacctcaaaaccgtgagcggtagatagacagagtagcccctaatgaagcagaaagactagaagagacaggacctaatttaggtcgaaaagcaaagtgaggcctcagaagatgaaggcagagtgcgagaaaggctttctggaactgacaagtctgccatccacatttcgaaatgtattagaaaaattggaaaaaaaacatatgaagtgtagaatgtcagcagaaaggtgtggccacagtcaagagggccctctgtgggtcctgtggtcctggactgcaggtgggcccagtggagactgtgctgcccctcaccctccccggtgggtcctctgtgatgggggtgggtgaagctgagtgctgtcctgaaaatctgaccatgcacagcccctttccaaagacccttctaattttagaggccgccagcagccacgggactaggcagcatcagagcagggacacaatgtgagtcatatgcgcctgtgttcatcctgtggtgtccctgggcccatgggggtgggagggatcagagggatcggagggaggggagtaaaaccaggggaaggagtggaggaccacgaactccctccccttcttggtggccagctgctgtgaggactcgctctcttaggacaggtccactgtctctgagctctggttctggcctcctgtcaggtgccctcgtgcgggaatgagtgagggacagcagggcaggctttccaggcttccagcaagctctacatgatgggtggggagaccctgctcttaaaaacatgtggacccttagcattcttcttcctcagacctggggcctcagcctaagctgagatgacagggaagaactacagatacaccagatttagggaaaataacgtcaagtggtgcagacaagtggaactgctgcttgtgaagtgggctgtggagtcgtgatgtttgctacgcccggcaccatgtttcagaacctgtagcagcgctcaagagagaatcattcctttaacaacaaacatgtactgagcccctgtggggaggcactgaccgaggcctggggacaaatgtggggacagaccagtcctgtggggacagctggcgggggtagaaaacagtagagctgccccaccagccagcggctgctgggagagcaggggtgtccccgcacccagaggaggcaccctgccgctctcccccaggttgcttggtgtgtgcgctgcagggagaatcccgcccccagctggtgtccacaggggccagggacactggtaggtaggtgtggaacaagggagtttgtgacttgggattgttttctacttaaaaaataatctgagtaaagcttggtttaaacagcatcaagttaaaaaaattcctaagaagtggttggattcccagtttatatgtggctttaaggttctgaagaagtacacaattaaccacagaagtatgacttgaatagataagaatttaacaaaatacacactgttgggtgtaaaatcataaatatctgaagttcttagaaattggtaattttcttttagctttgctgtgctctgagcatgactaaactaaaagtaatgaatccagaccttgaagactggtgtgtgtgtaaaaggcaagaagtgagaagattcacgtgtagatccaggacaatctgaatttacttctgttcagtagttcccaaaggctttttctacatggagggactcggagtgacacagcagctccctcttgtgggcagattcccctgtgtaaggtgctggaggctgaggttccagcctgcagccgcttgtgatcctgatatgtcgagagttctggaagactgatgactgctgacccccttcttaacctacgccatcgccatgctggtggtggggatggggctcttggccattcctgccccttggctgcccttccttggtctgagggtacgtgggtggcccttcgggtgtgccaggagctttgtgctttagtgaccaacagtcccctgatgtgtgaaggcccatcaatccgatttaaaataaaacatttgaagtctcttcagaggacggtgtgaggatgtctgcgttcagtgatggagcttggcctctgccttgcccctgattgaggctctgagggttcagatacagtctctgcccactgcatgtgaacagcctggtgggtgtggaggggaggaagcctgtgatgatggtggcactgtgaggaaagtggggatggaaggaggtgtgcccaggaggcagggcaggagagttcatggatgtagggttgcagcaagtctggaaagctgggtttgttttccagggagatggcatgggaggtgggcaccccaggcaggaggggctctggatatgactccagaagcctggtgggctggaggggagggagaggctgggcctgctgggggcaggaaaagggcagacctgtgcttaatttcaatttctatgggagtgatgccctcaaacttagaagggcttttgatgagaagcgatagagtatagctcttgccctcctcagtggcatcactgattttttaaaatgcattttagatatttgtatttctatattaattagtattaggattggctataagtgacagagatgcaacataataggagcttaaccaagagaaagggctgcatcctgcacttgctattgtttgatttatgaactttagacattaactgtgcactgttagttcacatggaggaggatttagctccgtgacgtttctccaaccttcttttcctgtatcatttaggattgattctgggtgaaggtcacagcatgactcacagtatcttacacaccttggatgtatatacgcacttcttatgtcgtaagtaatccagagggaggagtttgctagagctagtccagagttcagccatcttagggctctgggtgagtatcgctgcagtacagcagcagcagctttagacaccacttctgtgtttaaggcaggaacaactgagaaggagcaggccgtggagctcttgtctattccttttgtcagagacattgtggaagccctcagcatattttcacctgtctttcaccagaactgtgtctttctccttggcaagaagtgtgttttgtggccagctttagtcacaaaagagacagaaaatgagcctttcatttttgtggcacccttggtagaggggtaggggaaagggcttcaggacgagcactggatcagcttaccaagcctgaaaccacgccccctgctggtcatcctagagactgagtggcccatgtgctcgtggcctgtgggccctgggcggcctctcagtttcctgcatggaaggcagcagaagcacttatctggccctcagctcctcggtggtgtcagtttgtctgacctctgtcagtttgttgtcttcttttttttttttttttaagacagagtctcgctctgttgcctaggctggagtgcagtggcacaatcttggctcactgcaagctccgcctctcgggttcaagcgattcacctgccacagcctcctgagtagctgagactacaggcgcatgccaccatgcctggctaatttttgtagtttttgtagagacggggttttgctgtgttgcccaggctggtcttgaactcctgggctcaggtgatccacccatctcagcctcccactgtgctgggattacaggcgtgagtcactgctcccagccttgtttgtcttctgtgttaccaaagtagaaaacttcttctgttctgtaaccttggttcaatcaaagttccaaattcataaatggcacttatattattatgacgattgctgaaagtcatgccacagtttaatttgctttatacttggatttggtatacttgattttttggttctgttttctctttttcctgatttccttgatttttttggttccgttttctctttctcctggtttccttgattttttggctccgttttctctttttcccatattcttgcctggcatggagtggtagagcagagtggggaatggagttgagtttggatccagcggtcgagcaagtgtctcaactcccatgctcagcttcctcctctgtcacgtggggcagggaaggtgcctgtcgggcgcagcgagcgtggtgagtggtagtgtggggccgcgtgcgcccgtgggccctgagcatcagcacttctgcctctccgtgttctcttgttgagagggaccactgcctttcttatgctatcgccagccttttccagcttattcattctgtttcttggaacccatttaattcattcttcttgaaatatgtgtattttctattttatttcaaattgagacttacctttcttatagaatttgttttcttctgggatctcttgatttttttaaaattggatttactgaggtaaaatgtacagacaataaaactctttttttttttttttttttttttttttgacacagagtttcgctcttgtcacccaggctggagtgcaatggcatgatctctactcactgcaacctctgccttccaggctcaagcgattctcctgcctcagcctccctagtagctgggattacaggcgcccgccaccatgcccggctaattttgtatttttagtagagatggggtgttgccatgttggccaggctagtctcaaactcctgacctcgggtgatccacccacctcaacccagccaaaaatcattcttctaaagtgtgcactctaatatattctgacaaatgtatgccagtgccacaccaccaagcagctgaggtagagaatattcttaccccaaaaagtttcctcttaccccgtgcagatgtcctacccatcagggcccagggcgaccttgtctgatgttgatgtcccatcagatggtttgtattcagcagagcacctagaccaggctgtgaggtacaggtccgcccctggcagcccatgccttgtagcttctgggtggctcctggcttggttgctgtggtgtggagcgttgagtgacctctgcagaacagcagatggtgctgtagggccgcttctaagactcagtggaggaggctcagtggcgttctgagcggtggccaccaggacaaacctcttgtctttacaccatctgtgtgtgtgtgcgtgagtgtatgtgtgtgtgcattccagtgtgcgtccagaagccagtttccttcagaaagctttctgttccctggcttcatttttaccatttagaggacctgtgaagcaatgagatggaatacttatagctggtttaattcagtgagtgatctgaattgtaaataaaattttatcaagtaatttataaatttgatataataaattaagtctgcggaaggggctgattgtgttatggaatgagaagttttgtacatcttttgcaattctaaaaattgtggccaggtgtggtgctcaagcctataatcctagaactttgggaggctgagacaggaggattgcttaagcccaggagtttgagaccagtctgggtaacatggtgaacccctgtctgtacaaaaaataaaagtaaaaataaattagccaggcatggtggcacatgcctgtagtcccagctactcgagaggctgaggtgggagaattgcttgatcccaggagacgggtggcaatgagccaagattgtgccaatgcactccagcctgggcgacagagcgagaccctgtctcaaaaaaaaaagttgtgactttgctgtgtagtctttgtgtaacataattttatgattctattgttttaagcttaatattccaaataggtaataattatgttaaaatgcaaaaaattagcctatactctcatgatctaaatatgtagtagtggttttacagaatatatttcaaaggattgccattctgttttatttttagtagccagttatagaaagcattatttttaaataatgcctaagaatctttaaagaaatacctgtcaatgtatgttccagtttagtatcaaatttatattcagagctcataagaatttaaaaagtttcccagagtctgtaaatggggatggagctgtccttcaagggtgatagtccccctaggtttgagttgtcctctgctgctagcatagtaccacctgagctacctgtgggccaccttcaccacccgtgggtccctccagccaccccagggacaccttagcctccctgggtcgccttagccacccctgggccatgttagccaccacaggatcaccttagcatccctgggtcaccttagccaccccagggtcaccttagcatccctgggtcgccttagccacgcctgggccatgttaactaccacaggatcaccttagcatccctgggtcgccttagccaccccagggtctccttagccatcccagggccaccttagccacctgtgggttacctcagccaccagtgagtcaccttagctaccccaggatcaccttagccatttgtgggtcaccttacccaccctttcaccttagtcactcatggtcagcttagctgtttgtgggtcacttagccacccctgggccactgtagccacctctgggtgtccttagccacccccgggccaccttggccactctgggtcaccttgtctacccctgggttacctgagccacccttggtcactgtctgtgggtgcttgcttgctttaagccacattatgctactgcagctaattaaggtcgctcaattcaagtgtctcctttttttgggctcctgccttctttttgtttttcaaatcgaacacccgctatactcatttgagaagtgtagactttgatttttaaccctaagttgcatggtaaagtcacctttaaagccaatggaaaaagcttaattgaattcatttgtttgaagaagtagaggaatgttgcaagtagactgaaagttatacttagtctgttctgtttgaaaccattctcattcagaaaacagaaatgtgtttatgtaaagaaatatgttacttgacttaatattgtaaggaatcttaattgagaaaataagtagttgtgttttttctttaactgggcagcattgtagcggggtggagtgtgggtccccaggttggagagctctggatttggagtggatcctagcacatggccaccatgtgaccttgggcagtgactcagcccagctggctgccaggctgctccccatgaggtggtgggagccgtgtgggatctgcctactgggtgtgcagctgctgcggcctaagcggcgtccttgcttggtccccccatgaactcaggggtgtggcctggctccgtcatgtgttttgcagggggatctgaggggcccagaaggtaagaaattgcctacggcccttggctaatagaagagggagcagggctttgaccagggggaccagctagtgactctgtgctggttactactttaccaacaccatggccatgctgcacagctgtgcagcctccacccacaaaggccaaagctccaatggcatctgcgatgcttgtaaaacaagtagcagccgtgtccagcctgctgctctgaaacctcagtctcctttactgagatttgatgatgtttaaatgagcaaatgcatgtgtagtgattggcaggtggccatcgctcagccgacttttcctgtgccctctgcttcggcaggtgcccttcctggctccctgcttcttcctctcctaacctcctggcactgtgctcctcactcaggaattgcacccagcatcacctctgcaggtgagtcccacaccttccccctgctctccaaactcagaccccaagtccagcagcatcttctctcaggcatctatagacctccacaacttaagacatccaaattctcattcccttgccttgccataatcttcccatctcagcagctccttccttccaggctctcaggctgaaggtggcctatcctttcttttctatcccacatggcagccaggaggcctgtgggcggtgccttcaggacatgcctcttgtgcccctgtcccctactctggcctgagtgttccttttaaaactaggtcagaactagattaaagcccgtgtccaagatgctgccacagtctcttgccaccatatgactgccatgtcctcactgtggcccaggaggtcccatgtgcagagccgctggacctccgtctcctctcactctctgttaactgtgctgctgtcagactggctgcctggctgttcctgggcggtttcaggtgctgcggctacctagaaccttccatcttcctttcttcactcttcccagaagagaacactcttcccagctgtcttacggccagcttcctcaccacctcgctgcagtcttttccgcaatggcatcgccactactgccctcccacatccagccatcatcctagaataacagccactgttgtcccctgacacttgacggcagttcatcttttatgacccccattgtccccattgtcagttgtctttttttttccttattagaacataagctccaggaaagcagatgttaacgtctttgttcactgatgtatctcaggcatttaggacagtactggtacatagtagatgctcagtaaatagttagatgaatgaatatttgctacttttcttattgacagacatttctgaggtactttaatattacgttaagtaatgttacaatttcccatgtgttgattttatgtaaataatgagtaaattactctcatagagattttagaattctaataaactcatatttccccttcttataagagtagaaaaatgcttttaagagttttcctaaattaatattctgggaacattaaattttagaactttactctgagggcatagataaaaataaaattaattagataccaggaatgtcagatgctaaatggtgtatggctatttgtgacattctcctagaattaaacagttattaacttgcaaagacatggcagctgaagtcagaaattgatgaacttttaaagttgggaaaaaaagagctttaaggtatcttattaaaattgtaaactgtcagtttaatcatcatagaaaccatacctgatacagtaaatcgttgctattctgctttgaatttctggattctcatgaatcagacattctatttttatgtttctcttcaataatcctaaaggtggaagaaagaaatgggaagaaaaaggaagagaaccatagctacgttgtgagggcattgcttcaactctggtaacttcatgtgaaatgactacaaaatgaattaatatgcagtaagagagccagtgccccaccagggcacctttccacttgctggcacacagatttaccacaattaggatactgcttgtcctgtcatgccgggagagtctaaattactctgactttcaagaaaccaaaaatatgcatttttgatgttaggaagatttactgtgcattgggctgtgtcatttgatgaggaaaaaaccaaatgatctctttatgaaaatgaaggtaaaatatatgtaaatgccattttaatctaactttttatatgaatgtagaacaaatatcaaacaggattatacagtgtgatagtcaggaaagtagcatgcttttgtgttttatagactagtctaaaaggagccccagtagacttggtattgttaaaccaaggagatcttgagaactgttctgtctcccttgtgcccatagaattgtagcctgtggaggtgaccaaggaaccagatcccaagaggcctctgccactgaaaggagatttttattacttgcgtttcctagacgggggggcactcgcgccaagcaggcccacggggcacactggtgtcagtcaaggggcagaaaggagccacaggaaagcccaggacagagcctgagtggggtttctgtgggaaaggcagggcagggcacccgtgtaggaatggctagtgtgaacagttccagtgggccctgggctgtaggagagatcactagctgcctgctaccaggccctggggtgatttcgggcaggcgggcagttagataagggaggtgggtagagccgaccacctgcctggaaccctgtgctggctataagccctgggagggccagtctctccctgtgtctgtaaggcccacaaatgccaaagcattaggaataagaaaatggacgtaatagaattgatcctgtgaggactggatgcctaactgccacatacagaatgtgagaaagcacagaacaactgccttcattgacaagatggtgcccagagctcaagacaggcacacagcaggaggatgccggcaggatccctcaacaagcttaccgtggtatctttcacaatgttaactgtcatcccagatgaacttttaatgacagtgtatctctgaagattgtgcttttagcgtattttcacttaaagtcatatctcatttagtagacctgccagattcctgaaaagttacacacaagccagctgacatgacctttgccagtcatgttgaccacgttctcaccgagctgtggactcctcactaggagcctttacctacggccagatggctgttgtcactgcctgtggtggggttacggtttcggactcacctgatccgttctgccgggattacctacggccagatggctgttgtcactgcctgtggtggggttatggtttcggacttacctgatccgttctgccgggattacctacggccagatggctgttgtcactgcctgtggtggggttatggtttcggacgcacctgatccgttctgccgggattttaaagtatgggagtttaggcatactttgcaagttgtttcttgaatatacttttctgaattatggcttgctatacaagttttggtcttttaaggtaagagttacaatggagatggggaaattatacttttctcatttcaaggaaagcaacagtcatgagttatgcatcagttgggaaacgggatgataggaagttgcaaggcaacctggtttcagccggaccgggactctcccggggctgcgtcctgctagagctggcaggacacagaataccactagcagcctccctgggagtggcttggcgtcttggccacctctttccacggatgtggtggatgtgggggtaaactagagagactaaagcccactattgggctcagcttcctgtagaaatcaaatcagatgaaaaccctgacccagagggagaaggcagagagttggacttttgaaaacgtgagtgtgtccagcaaccaggcagcaacagtccttgtttttatcgaacttctataagcactttatttctccagaataatttcatcataaagaatccagagctcagacagctctttaccatctgtcttttccttttttcttaccctgtgtttggcttgatctggactgcacttaaccatgacaatgttaagtgctttcttctgggtaaaaattctggcttcttctccagaaattctggctccacttctcaaattgtttctgtccctgttaggagacccctggggcctcggctggagagacagtgcagctagtcccagcagccactgtgcttgggcctggccagcccctcctcaggggtcacggcactgctcacctggtgactaggtcttctcagccagatcagttcatgtgctctggtgtttttgagcttctggctagtcctcagtttctcagacctggttaatcacagtgtggagtcatttttcataactgtgcacctcacttgtttgatgcatggcaagggaataattaaattaataaacctacagatattcccccttacagttttcaaatacagtaagtgaatttctactataaaataggtccaaagaggttttattgtttcttatttgaaataattaaagaacatttatgtttcccttttgtggtttcttggttctaatcctgtgggttgcttttgacgtcctctgttggggatacactgtgcatccgtatttaacaggagatcccgaactcccagcagggagctaagcacagatgtgtgcacagatgcgtgcttaggtaaggattttgtgcaaggtgacttgtaatatgaaactgtaaaacgtgctaccttagactggagagagaagggggtggtctgatgttttccacacgcctcttttaccaaaatgggtcatcttatctgtctcaggccaggcccccgggggtgcacaggaacagcacagctgcagtgaaggaggggctcctgcagccgggctggccccagagctgtgggtcgtgccccgcgtgttgctcagcgcgttctgcagttgccctggccttagtcccccatctcgctgtgatagccatgcaggtcagcaactgtgagccttcctggctcccacgctgcccccggcacctctctctgtttctgctcccagcatcctctcagcttctcttctgagccccacgcagcggttcctgctttaccagcaccacttctcctctgtcaccgagagagagcaagaggctgccgcgcctgtgccaactgcctggtgaggctccgtcgagtgatgtgcagggccttgcggtacagccctctcgaactcaccccaccagaggcctgtcggcatcactgtcagaaacaggcgttctcccctcccagcccccgtcacaagctaagcatctgtgagaacggaggctctgcttccccgaggatcctgccccagacgtgggggcagcctttgcagacagcttctgtcccactcacctcctccttggttttcactcctttatgccctcacggacctgcccaccagttcccaagccctcagggccatggcagcctccgtgagggtgtgagctgggtaaaaggaattaaggtggagtcacagctaccagtggctgattgcccgtgggtgtcaggctggccctaggtgccccattgctagttcactgtcctgggacggccccagtattgtcagcattgaaggaaagaatccggacaggcagcagaggctcccacctgatgacactgaggctcctgccttagcaccagggcctgggctcccctttgctgtaatgtcgtaaagtatgtcaggaaggtttgcccatgacctggtggagagagaagagatgtgacaaggcgactctggcttgtgtatcccgcccacaggggaagcttggaggagtcggtttgtgaaaaatcagggctctgagggcactggagctggtgctgagttctgcagcagtcaagaagtagagcagagctgaaatcctggctgctcatgggcatcacagatgcattcgccagcagctgggctcggctttgctctaacatccgcccctcctctgggagcgttgtttctctactcctggctgcccagcccagctccctggcctggcgagatctctgcatcatttcttctccccagcttctctctccacccatgccgccatgggagagtttaggctgtctcgtccctgactggcctgaggtagggctgtgactgtctccttttccctctctcctgtcttcctcacctatgcccacataatcagtccaccttccttactgctggatgcaaacctgctgagtctctatggctttcaggatggagttcaaagacatcacctcagcgtgaaaggccctttcaggtctggcccggcacaaccctgacacccgcatgttcctgggtgcaacaacatggggccccagggcagcttcccatgatgcatcagcctctgctggctcctgatgtggcctctgttcctgtcttaggcccctattcctctcggcaggctccacacttgccttactctatctcagaagctcatcctgacaccagctctgtcctctgtactgggaacatggagcagaaatccatcacggctgctgatccatgcatgctgatgagttgctggctgcctccttgtgcacagcatctgggggcactcaggtggccctgctgtctctgggcctgtccctgacactggcaggggttggggcaccagagttcaaatgggggccgcatatcttgtctaaatcttccagagttttaagtcaagccagtgcactattgatacaatatgttgtgtcttcttctttgacaactacatcttcaaaatggaaaaaatatgtggggacctatggtttttatatgaattaatgttggcaaaatatcaaagaccactgaatttaactgttaatttaactgttatctaggtgttctgttcagaggccactcatgtttgaatgagtaacaggatcaagacatgatttatcaataagtgcatatatctcccataacattgattattttgtttttatttctgcaaatgactaatcatgttttatattaagcattttcggataatgcttgttctgttggtgctcacggcctaatgcggggctagcgcacagcggcctacatcctgttttttgtgcagtgtttacagtttttaaagagttgttaaaaaataaaatagtgcaacagagacatggccacgaagtctaaagtacttactctttgcccctttacagaaaatgtttgctaccacttgatctaaaggattaaaaaataaaacatgtcattgggccagatgcggtggctcacgcctgtagtcccagcattttgggaggccaaggagggcggttcacctgaggtcgggagttcgagaccagcctgaccaacatggtgaaaccccgtctctactaaaaatacaaaagaaattagccagacgtggtggcgcacgctacttgggaggccaaggcaggagaatcgcttgaatccaggaggtggaggttgcagtgagctgagatcctgccgctgcattccagcctgggcaacagagcaaaactctgtctcagacaaacaaacaaacaaaaatgtcattgaatttgaagtatacaaaatttgaatatctttctatcaaaaatttgaattttaaggaaataacaaagcaaaaattataattttttgtgttttcaaaaaattattttttctaaattattaagttataagatataaagtagttaatgtgaaatgtttaaatcaaaattgtttaaagctgagttttaaatttaatactttgaaaatttagttaaatcatattaataattttataagaaataaaactattgataattctgatgtctgacatctgtctgattgctgacatggatcctgagtcttacagtgttttgagggcctccagctacattggggttccagtgccagagtggctggcagccccaccctaacgagaagtgaaggggctgggcatgctgtttccagtgctttcatgagatgctgctttgcctggcggtcgggcctgatgtctcgttgttccacctgtgaccaaggggtccctctggaaatgtgtgtgtactgacacatgccctggtggctcttgtctgatccatgtccaggttattcctgcctgaccgtcactcgtgccaggagcccaacacaaattcaggcacaaattcagtacaccacacaatgggggaaacatgttcaaagatttttacttacaggtcctgagcagggagggtgccatgagtcaggagggcagtcctctgtccctgggtcatgcaagcaggaacaaagggtcaggcagagagagagagcactgcagccaaccagcagaacaaataagggagtagggtggggtcacttgaagtgtgtgggcaggtgcctgagtgaaagatgcctctaggttctcatctctggtactggcttgagccactgggtgtggtgtagaactacaaagtgtcaggggtggctgaactctgccgctactaggagaaagtgcagctcatattccagatagatgctgaggcaatagaaaatgaaaagaattcactatgcttacgcagagtgtgtctggacacacacaaatttaagagtaataagaattgcttaatatggcataatttccttaggtgccatgtgcagttgtcacaagcattgcactaattggaataatgaattagaaagtggatgttggtcattattaggaaaaggtactttgttacacgagacagtaattgcattgtggcaagagaaagaatctgactaattaatttgtcttttttttcttttgcctatgagtgcttcttctgcttgactcctccccataatcggactccttccaagacagcctaatcttcagggcatttggatgcagctgccttttgttccagagacacaggccatctcaggggaggtatctccctggggcctgaacagcgtttttctagacaagaggaggctgagggctgtgggttctgctttgccagccctgaatgctggatcccgagtggcagaggcaccaagtgctgtatgatgtgtgtatgtgatgtgtgtgcatgtacatgtgtgtgatgtgtgtccctgctcgccccaggctggccatggtactgtgctagtcacagactggctgtgctgatcaagccaggcacagtggaaaatgggaagatgttggcgtttgcccctcccttggctgtgtgtcattcacctggggcatgagctgtgcccctgctctgcagtaatgaacaaggcaggtcagcattggtccgagacacgtgagttaagagaggaggaagagcactctctgggggcggggggatccatttgtcagtggcctgcagtttcctgtcccagggatttcactggtgacatcctgaccactcacctgcactttatatggagctgttttcatcagctggcgtctgctgagcctctgcattgtgttgtgtggtagcctgttactttttgcagttttattttctaaactgtactcttttattgatagattttttgtattaggatttccatttaaacaggactttggtacgtctgctgtgggagatttgtttccctagaagattcacggctgtcgttctctcccctctgctcgtggtgttttactgtgactgcgctgaacggttagctgtcacatgtcattctctgggtggtgtgctctgaagtcattgtggtgtgtgggccccttcagcctagttctgcctaactgcggcatgatgaatgggcccgaggcagaggaggaggctccctcgtcggtaggggctgctgttgtcgcagctgccggcacacggaagtgagtcggtgtgctgctgccccgagtgactgagggacagaatgaggctggggccggccggactggcattggcgtgtctgcatggcgtcgtccaccactgggcctttgcacatggggacctttttcagcatcatggggcgtcggtataaaaggaggcgcaagaagcgctctgagaggaaaggtaattcatttagtttttattcttcagtgtgaagcatttgtctttaatgcaatacagaagtgttttctgggatagacggctttgtgaattaatcttgctgatgccagttacttcctattttccctttttgagtgccttttttgttgttggcattttatagaattttagataggggcacttaaaaaggaagattcaaaaacatgtctgtaaacatgaatagaaatcatttagcttcagagtctggagtatgtctttggaaagatatttataaaactttaaagtttgtagctttgagctacagaaaaggtttttctcccagagacagatgcttatatgagatttcctttgccgcactcttcattaatgacttttctacattaaaactgttcttcatgctgcagaaagcaaggctgagcaaccattgtgaaaatatttcccctttaaaagaatggagagcaaattccttacattctgcactccaggttaataccagtttttaattcaacttaatgttttaagtcattaaaatctagattttttttctcaaaaccagattcaaaagttgtccatgactatacacatcacaagctactggtttttggacctaaattgctgctttaaaagctgttgatgttttttttttctctttgtataatatgaaataattaatagaaaatgccttagtgaaaagatgtgtctagcccggagaacagctgaacacaggcgtgatcagtgcctctgcctctgtgtcttctgggcgcccccttagtgtcccccacccgacaggactggagtacagcgcttcaccaccacagggcccttgggacatgctgtggcaggagatggctgtttcttcaggaagtaaaattaacctcggttttttggtgtggcttcctaagaagaagaacagatgaatctcaaagtcagcaatcttgtaatagtaccttgtaatataacaaaggtgacagcacctaatggaagtctgtgtctgggagtggggaacccctgaccctgggccctctgtgcaccgtgctgccaggtgcttgtgtccagggctggggatgccacaccctcgatgctttcctggactgacgggcggtctcaggacagccagtctgtgcggccccctctgccctcacctcaagaggtcacagcattggcctgtttttgtttcctcagttaagctttggaaattgagatgtcactaagacaggcaatagggagtaaaacaaaggcacaggcaaaaactaaaggacatttttaccaaataccctcaatttagaattaccaccacttttcccatggacactcatcactaattatttaagttgggaaaaatattgagaagtacaagaataattctgtcatcattcttttggaatttactgtgattcaagcttaaaatgtctttttcatgcattccataatctcattctgcagtgggaaaaccactctcaaatatgttgcattttcagaccaaggttataagaaattgagagggttataagatgtaacaatgaggcccacatattaaatggcttgtgttccttggtcattcctatgtgagtaagttcattgtgagtgttactaaacagtatcatgttatgtgttagttctcgctgttggtattttgtaataagcattatctttgaaactaataaaaatacctttgaaattatcgatattattaagattggccatcacatttataccaaactggcaaagttttataagatgtaaaatagtcttttatactgtatatttctaaggtactgtaaatcatgtgtattgcatggttttttccctaagactgatacaatgtacgccttttaaaatgtaattctttgatgaaaacaatgtagtagcaagttacgggttttagttggcttcagtggcaatataatttcagtgatttttttcatcactcctggattatacttgcagttactgccttccacagggcaaataattgactgttgactgtgtgtgagcctcagatgggttagcttaatcatcaggaaaatagggctaaagaataatgtaccatttaaatactggccagagtccccatcaagcagacactgccaccctggcagatgctgccagcacgagacctgggagaggtctgggagccacagggcaggattctgagtagcagttagtgcccatatatggagcgcttcctgcacccagccagtgctcagtggctgctgctgtagcctcattcactcacagcactgctgctaagttcatgaccagtgggaggggagagagatgggaacaaagaggcagtccttcagtccccaccctcctgctgtctgaatagcatcctgtatttccagatgtatttctcactgagtgttttgtttgtcccctatgtgataacatccttatctgtgcttagtcgtgtatgcacatgtgaagaccactgtcctctggcagcagttctgaactgtgttttagtctgaggctgggctcccccatgtttccaggatagaggtgaacagggtgtggggacctctgtggagctggaggtccaaacgtagagaggcctgctccccctgagtacttctggaggagaagccctggaactcctgaccttcacccttcacagagtgagcagagccagttggccaaggggaggaagcaggcggctgtcgtaccagcctccttctctggtgccagccatgactctcaccttacaaagagagcaaccctttgtgagatgcagagcatggtagcacctggaggtataggacgggatggcatttatccacccatccatataccagtccatctactcattgtagtccatccatctgtccgtcaacctatcatccatctgttcactcatttacccatctacccacccatccatcatccatccactcacccatccatccacccatctacccatgcatccatcatccatctctccatgcatccatcatccatctctccatctagtcatccatctatctgcgcatctacccatcacccatctattcatccatccacccacccacccacccatcatcacctatcatccatcatccattcatccatccatccacccacccacccacccatcatcacccattacccattatccatcatccatccatccatccacccacccacccatcatccattcatccaaccattcatccacccacccaccctcatcacccattacccatcatccatcatccacccacccacccatcatcccccatcatccatcatccagccatccacccacccacccaccatcacccattacccatcatccatcatccactcacccacccaccatcacccatcatccacccacccaaccacccaccatcacccatcatccattcatccatccatctacccacccacccatcatccattcatccatccatccatccacccatcatcacctatcatccatcatccattcatccatccatccatccacctacccatcatcacccatcatctgtcatccatccatccatccacccacccacccatcatcacccatcacccatcatctatccagccatccatccacccacccatcatcacccatcacccatcatccatccatccatccacccacccatcatcacccatcacccatcatccatctatccatccacccacccatcatcacccatcacccatcatccatccatccatccatccacccacccatcatcacccatcatccatcatccattcgtccatccatccacccacccatcatcacccatcatccatcatccattcatccatccacccacgcacccacccacccacccatcatcacccatcacccatcatccattcatccatccatccacccatgcacccactcatcatcatccatcatctgtcttccatccatccacccacccactcacccatcacccatcagccatcatctgtcatccattcatccatccacccccccacgcacccacttctctacattgttccgttcatccaacaagtactcattacacccttctctgcatgctggcaccaggggtttgaacatgcttagggaagatgggggtaatgggatggcagtggcagggggcagccacagctttcaggcttgaggtttgttctggaatgggccacctgaaatcccactaggtgcatgaagaggatggatttatgtgatttgtcactgctgcactgtatgtgtagtagtggggagggatattctccagtatctggtgagaaaggaagacaccattctctagcagtgtctgccaggagaggggcccaagtaaggaaagttgaacccccagtggacagcagcgttatggatagaaggcccagatctcctagaacccgttgtaatggctatgtgtgtacctttcactgcatctgtgctgatgggcctcgcagcacaagaaagactctgctgcctgggcaggagctcctctcagctacagggtgcatttcaagcacaggtgcatacactctaggttaacagttgaaattctaaagtaagcatgtagaagtagatttgtgaaattgcacttgaaataccatggaaattggatccaaagcagattgaacagtgccaattcttagtgcagttataagtgttaatattgaaaataaagtttacatcgttgtcttttttttccctttgattccagaaaattaactacaattttcaaataagcaggaacttacttaggttgtgttaagtagagcaaagtggacagtctttcaaatgcattgctgctgcgtttgcactgtgaaggacggagcaacttcacgaaggcagggccctgtgaaggtttgtgctctcgtgtgccggctctgacctgtgattttgttgctggatgtctccttcagcagttcatgtggctttctaaagcttgccattgcttaggcatgcctgactgaggcgggaaacaagcgtgtggatcagtgtggctctgtatgtgtgaacatgtatggacatatgtgcatagggtgggggtaacgagggagagggacaagaagggccagggcttgtgaccacatcagaagcaagggtgatgctctgtggcacagctggccctcgaagtcactcagggacctaggtttcttccatccttaagctctgttctctaacagaagtcaccctggcagttgcttctagtccagcaatagaaaggtgagaaagaatacagagaagcacgcaggaagctgtgtgagttggcccagatgcagtggcacacaccacaaattgcacagcacccccacaggaggcgagcctgtgtccttgcccatcacctctttccagctggtgtccagacctcggggtgatcactgattgttgtttcgttggtctggctgtggctcttcttgggccagcagcctgggagccacacagggacagggtaactgcgataaaatacaattatgcaggagaggaggcggaagggcccagcctggccctgtctggccagcttcctgcaccctgcacagcagggagcatcctcattctccagaccctgattcttctcgggttggggcgggaggggggaactcccttgtccattgttctctcagccactggcctcatcctttgggggttctttctgatcatcgcctccagagtcccatctgaagagggtatcagtgtagaacacagtgaggcagaatgtggaagcaaacgggaccatctggaagttttgctctaggccttataaaacacataatttgttaggtgtaaaatatatagtatgttgtagtagtgataataggatggaataaatgccttagatttgcaaaattgggtcagagagtttagggatctttggtcctgtaccagtgacatcattttgtggctcttggggatttggggagggacctccccgaggccactgtgcagcagcctcatgcccagggctcacaggtcccatatgtgtttcctccaccaaagcaccctgagctgtcctaccttcctcacatccccacaccccgcgggtgtccctctgcttagcagctatttattctgcctgtatttgggccaactgcacaggctgtctgagacctgacagtatgctagaatgtacagggcatacaatattttgtgtaatatcatggaaaagtgtgccgttctttcggttgacggtggttgcagataagactgcagagacagcttgtggtgggttggagtgtgactcagtctcccgtgggtctgctccccttccagactgcatgtggaattctgtatagagtaaggcatattcgtgtatgtgggagggaggcttagaataaaatttattttttttcttatggaagcagtacatgttcattgtaagaattcggaaacatagatacaaaataaactttatgaaaaagcaaaggtgatcatctgcattagtctgttttcacactgctaataaagactgaataatttataaagtaaggtttaattgactcaccgttccacatgactgcagaggcctctcaatcatgacggaagatgaaggaggaacaaagggacgtcttatatggcagccagcaaagagagaaatgagaaccaagcgaaaggggaaactccttttaaaaagtcagatctcatgagacttcttcactaccacgagaacagtatgggggaaactgcacctgtgattcaattatctcccactgggtccctcccacactcgtgggaattatgggagctacaattcaagacgagatttgggtggggacacagccaaactatatcatcatccttgaagctaaatctttgaatgggagcaaaaccataataattttcttccaattcgtagtactagaattagatttagaagtgtttaaggctttatatttttgtcttactatgaccaggggctcagtaatgccttacttctgccttggaggatgatgtgagcatacaagaggggtggccgcatccctccagcttcattcctggtgtccaatgggaggcgaataggcccctttgcacctcttaaccaccatagtcctctcccattgccagcctcttctgacttttgggattgttttaccctctggacagcagtgtgaacaaggtatgtcaggccaagggggctgctccccatgggaggcctggccgtgttggcttccaagaggccagatgggtgctgctcaccatagaaagtgacccttttccctgttcctgagccaacctgtcacttccatgcgctgtgtgtcactttgaaaactatctttgctttctgcaaaatgaaaggaaactttcaaaagtcaacgtattaaagcctgtttgcatttattcttttatgaattttgctcacattttttaattgggtgtttgtctaaagacaattatcgatcatagtaggctgctggaaggttgaccacagaaacctggttctctttcagggaggtcaccatgtctgcctccaggcccatcgggtaggggctgccttctgtcaaggcacatgctccaggtcccttagatggaaggaaaacacatggtctttatccagtggactcagggtgcaggtaactgaaggaattaacctccatcattttcacagatcctcgtagagctggaccgaaggaggtgggagatccctgccgggagccgctgcagtgggagggcttacagacgttcgcatagtctctttctgtttggttgttttaactcccattaaaaggagtggctttcagccttcttgcttactgtcttgtgatgtatgtgtgttcacatgttccatgcacatttgtaacgctcaccatgctctctgattcagctttgttcccttagagttgccccagcactgctttgccatgatgattgtgttttttaaaatacttccagttgcttacttctgtttagttatctcagtgctaaatattgttaattaattaaatataagcagcatgttctagattttatgtgtctggaattcttactaaaaatcttcctggatatgacttccagtcataacgttatggattttattgtaaacaaggtagaattttatttgccttttaatcatttcattatggtgagtgtcctccttacagagcgtgtactgaatttgggttttactccttttttgttcatttccacaagttgaactctgtgttattatcctattttctgttagggtcattgtgttgttaagtaatcgacttacatagaaggtgtgcacctagaaggttaacagaaaacaagttgaaacatgactgaaaatatatttctgtaagaattactgtaattcttctgagagtataaatagccagggttttaaagatctgctttataggatttatactgcaaataacttggcaggattaattggcctgcatttgcttgctgtagtcagtaccatctagtgttttagtcaatatcagtttttgtagtgtggatgaggctggtgatggcagctgcagcctgtctggagttgctgctgccgtggtgtcagctgcagcgggggaggctagggctctgtgctccgcaagttggtgggaaccgggaacaggtggaagccccacccccttccaagttggaggggcaggagccctgccatcctgggcacagctgcagccgtccattagaagctgtggacccaggcatccctgcactcaccagggcccaggaagcccccctgccccgacaggctgagaagtgcctgctcccactgcttggtctgtccccactcccagcacctgctccagtttcagatcaaagttgtggccgagctgggacactgtcacaacctggctgggtgtgtgtttgctcagggcagtgctgacatgccagcaccctgctgcctcggcacccccagactttgggtgctgacaagcatgagagggaggccaacgcggggctgagggaagcacagcgcaggccttgcagccgcccctcggcaggaacactctggatgccatgcacactgtggatggcaggataatggtggccggaggcagacaagctcctgggaagaaaggggagggtccctggtgaaactccaccttcagcttacagaggacttaaggcctggggcccaggctgtcagttccacagaccggagtgagaacttacggtgcttttccagggctcacccgtgactgcccatgcaccaatcagcacacactttcctctgaagcccataaaaacccccggactcagccagacttgggcagaagacaggatgacctgcttatggagaatagctgcccactgtgggtctctctgagctgttctgtcactcaatgaagcacctcttcacattgctcaccttccacttgtccacgcacctcattcttcctggacatgggagaagaactcaggacctgctgaatggcaggtctgaaagagctgtaacacaaacagggctgaaacacacccattgtttgccacattgcaggcaatgaggagaggaggagagaaggagagaagagctgcagcccttcaaggagcccagacctaggagctccctgagccagggcagtgacgccccctttggggccctgcggttcctggtgtttccaagcttctgggcactaccgtattccctggtttcagccatggaagctgtgtgtggtatgcctggttcagctgcagccttgcagggagccagtgtccatgccagtgcctaggtctgcccgtctcgcctgcctggctgtacacaatggctggaccccacgcccactcactcacacaccccttgccactccacacctggctcccccttggcaggcatgggatccaggctggaagtgtgagccgagcgcagcctgccaggctgtgtgggcagaatgagcccagcaggcccaagcaaaactcgggtaaaggcgccaccagtgatggaggtttctggccagaaaaatgataccctgaggatcctatgacactgggttctgatttaccaaaaagagccacacctgactagggacatggggaagcaggggcatgcagatctgtccatgaaagccccactccttgctttagggacagtagctgatgcccatgagcgctccttcatgcaggtgctgtgctagcactgaatcaccagggcttgctccgcctatagaaccacaaccaagaagatgggagagactctcagctcacagcaccagacacttcagacccaggttggagagctcaaaggcctgaaacaggctccaagaagatgtgagtctgaattcacagcaccagacacttcagacccagatgtgaatcttaactcacagcaccagacacttcagacccaggtcggagagctcgagggcctgaaacaggctcagtcccagactctcacccagtgctcccttgcccactcggccaactgtcgttttgcagacggcaggctggtcagaggcttcccatccagagtgacccatgaggtgtttctgttccttagaagaggatgctaatagctgcctgggaaaacagttgttaatgaggattgtactaagtagatccctttcacatcaatagtaaccagtttaaagccttttcatttacaaatatttctgatttaaggacttagaggtcagttcgtatacagtcaagtttagatgtgttttggagaaagtggatacagcccacaaggtcccaaaaggcaacagggcacaggtaacattccctggctgtgattagttggttgaggacatcacaattggaagcatccacgttcttcctcacaggaagcacttggctgagagctgtggacactgaggatgaggcttgagtctgtcctagcagagctcagggcctggtgggaaaagcagggtggtcaggccagcgggggagtgagcggggaggggcaaccagctttgcacaaggagccaggaatctcccccccacctccaccctgcaccaggggcgctgactctgggccctcaaggccccccactggggacgctgactctgggccctcaaggccagtggaatccacagctccatccacagcagcgagccttgtgcagtttcaccacaatagtagcacatgtgtgacctcctgggggctgctggggcctatgggagtcgggtgtggacggtgtgctccctgggcctgctcggggatgctgagtaccaggcagcagtgagtggggtgactgaagggaaactcgagggacatctggccctctgtgctctgccacgcttgtccccatgcttgctgtgtttggtttggggccattggccctgctcctgtagactcagagtagctgtctgtcccacgttgccatagctgagttcactcggcacagtcaccttgggctgtgtgctttttttgctgatcccttaactggtgagaactagtgtacatttgaacacttgccatccagttgacacctttcaataaaaattgcagattaataataaatgatagaagttcatgctttttccttctggtgaagaccaacacatggccctgttttaaagagcagaaagctgcagagccactgccacgtcgcaggcaccatcgaggatgtgtaggcgtctcagggatgttacggcactcagaggattggtttatttttaggaaacaactgtagcagccaagtgaagactctggacaggggaggacagctgttgaatgtgtccacagggcctgaagtaggccacgaaagccccaagtttgcccctgcgttggcacaagtactggggctgccaaggaaaaggcgggggtggaggaactcagtgtacagcatgcctgtgggggcaggcatggcgcccggggtggaggggtggaggagaccgagcctgccccagccatgtgggcctcgcagcccactgggagaggcaggccacaaacagggagacaaattgtggattgcactgtgcgtggagggagagggagcggggcggtggggtgggttggtgccgtgtgagctgggacttgagcagtaaggtggggtctgatgaagccttgcgcgaggacatggcagggagggaacagggaagcaccccaggaagttggagaggctctggtgggcatagcgaagggctgacgatgagcacatgggcatgtgttagagcacgttttttatttataaggacataaccctggctgctgcgaggagaggggctctcagggtcaagagaaggcagagaggctcctgcacaagctgagtggtaacagcagcgcagaagcagacaggctgatgtgtttagcccaactttgggagaagagctggtgacatggggtgtggggtgagaggggagagagaaccaggtagtctccaggtgtctggcctgatggctgcagcgaggtgacaggatttacacatgtgcattggtacacctgctgcccgggatggccaggtgaacaaggagttggcctttgtcaaagctgaaaacaccttacttgaggccccctggagcgcccaggcctcaccaggcccacccccgcccagccaccctagagttgccttgctgggccagtctactactgtctgtgcgactggcatgtggttctcccgtgatgcatcccttttagtgaggaaggaactagagccacagtttgatgaagttgctgactggaccactgaggtgttagtgccctgtgcaaggtgccctaactgacacctctgcatgtttctttctgtcatttgtccttgctagaatttcctcttctgtttcagtagattcctattctcatcaatatttcccacttaatatgatgaatattgtacattattattcttattttaattatctccttttgcattgcactagaaaaaatgtgtttgctgaaaattaggcacaaatcttgcttgctctgtgtacaagatctataaagattcacttagcagcttgcagggacggtttcctagaaggtaaaatatttcactgaaaatattatcaattgaatattttggaacacttcagtgatattgtttggtttagataatactgaaagcaaaatataaattatgaggtgaagtgtatctctaaacatgcatgattcgcttgttgagtttcagattgttttcgttcaaatgatgtaagaggtttatacttcagttgcttttgttaaataagcaaatcatctttcaatttttttgctacaaagttaatctagctttggaatgctgcttgatgtatagtaaagaatgaacacgaataatctccactttaataccgtttctttttttttttttagtttgcagttcaaagctattaaatatggaacccatagcagtcataaagaatatgtaaaagttttctcaaagctatccatttttgaggggaaaatggatttaatccagtaatatatgttagtaattttaatcaagttcaccagttgtcttaaacagtttttaatctataaacttttagtggactcctaaagatgacattttttaccagcacaatagaaactattcaagttctgatgcatctttaatgtaaataagtcatgtttttaatattttattccaggatatgttttttcattaagggaaggggagaaaaagggtaggtatgctcattgtccaaagttgataagaacattatatttatatatattgtttatacttgtggttgcaatgtatctataaaaaggtataaagaataatataacaatcatttacctacccccagtacaaaacgtataacattgtcaatttgaccatgttagctgaaatcaaaagcgagctcatgaagaaatgatcaggacacggtgagggaacggccttgtttgatccagcttgatcttcttccatgtcggcacccagtgtctggtcctgtttattaaaaataaaaagcatgttcatatgtccctgatttaaaatgccacctttaccaaatattctgtgtctggatgtgttgtgtctgattctgggtttttcttccatcacattgaccctctttgtccgtgagccacgctgtgttgcgttaggcactgaggctctttatttctaataggaaggactaagccacctgctcctttggttcagagttttcctgagtatttgagtctgtttatccttttcacgtaaatgttagaatcagcttgtctagttccattaaaacaagttggatttgtacctggaaccaagtgaaactgaagtctcaggtcttctgcagtcaagttcaatgttcttccacactcaccacctcccagctctgtcttcttactgcattaggaggcattctgagaaatgaagaggttgttttgaatattgctatcaaataagtctttttttttttaattgaccattcttggaattttgttccataggggatatttgatagggttttaattcttatttgtttgtagttcaggtcataagaggttcttttaaaaagggaagaaaaaatagctctgtgaaatgtgctaaagtgcttgcatgtgctgttttgctttgttttataacctttggtacaagagttggcattcgtcaaaactgaaaacgttggcttctgctctgcaagagatttgtagctcccattcttaatgtgggcggtacctgcaggtactcacctgccaccacactcggcatgactattttctactgcgagacattttccatgtccttttaaaagaattttaatatgtaagggcaggaaaacaaagtgaactgtatgaattaggtgaactacatgagctgggctcactcctgtgcctctgcacttttattgttgttgtaaagtttgtttttcctggtcccagaaatctgagagaagtcagccttctcaggcaaaccaattattgattaattatgtataagaattaaattagccatttgtgtgtcttctgcctattattaataaactttttattttgaaggctgggtgcggtgactcatgcctgtaatcccagcactttggaggtcaaggcaggcagatcacctgaggtcaggagttcaagaccagcctggccaacatggtgaaaccccatctctactaaaaatacaaaaattagccaggcatggtggcacatccctgtaatcccagctactcgggaggctgaggcaggcagcttgaacctgggaggtagaggttgcagtgagccgagatagcgccactgcactccagcctgggtgagcgagattctcaaaaataaaaaataaaaaatactttttattttgagataatatagattcacatgtagttgtaagaagtaatacttatatgaacgtaagccttcatttctctgggataaatgcccaggagtacaattgctgagtcatgtggtagttgcatattttatttttaagaaactgccaaactactttctagagtagctatcccattttacatttctgccagcagtctatgagagatcccttttctccacagcctcatttcacctggggctgtcactatctttaaagcaacactatgttgaatagcccttctcggaggtgtgcagcggagttatctcacggtagttctcagctgcatttccctagtgactcgtgatcctgagcatcttttcatgagtttattttccatctgtagatcctcttcgtgtcctttgcccattttctaattggactatttgtatattttactgttgagctttgagaatttcttatatattctatttgttggatatatatttttcaaatattttctcccagtctgtagcttgttttttcatctttttaacagggacgtttgcagagaaaaagtttttaacttccagtttatcagttgtttcttttgtggattgtgcttttggtgtgaagtctaaaaactctttgcctagccctagatcctgaggattttctcctgtaactttctaaaagttttatagttttatgttttgcatgtaagcccataatctattttgagttaagttttgaataaggtaggagacctgaattgaggttcatttttttggaactctagttgccccaataaggctgtgcctcttcacgaaattgcttttgcacctttgtccaaaatcagttggacatatttgtgtggtgtattcggggttctctgtgctatcctcttgtgatctgctcgtctgccccttgccaacactgtaccgtaccgatgactgtagctttgtaataaatgctgagatcagctagactgattgctcccactttattttttttttatggtggttacattaaagtctttctaagagaattctaacacctgtgtcatctccgtgttggcatctgttcattgtcttttttcatttagtttgatatcttctgtttctcgatgtgacaagtgattttttattggaacctgattatatgatattatgagactctaaatcttactgaagccttctgttttagctgactttctcatacaccacggtgtcagaggaagcggggatgctgtctcattactgctggatgggggataagtccaagttccccactggggctcccggatagctccctgttgtgagagggcctcatcactgctccatctggagccttcactggcagcaccggctagcgtcgtttctaccaggtggaaagagagcccagcttccccacatagtctctcatgactctgcactgtggcgtgggaagggaaggggttgttagagcctggtggaaatgaagattgtggcttgtcactcagccttgtctgacaccacccaacaaggggactctggggttgtccttacagcctggcacgggtggggcgtggttgaggttttttgtttggtgtttggctggaataaagcaattcttgtctaagaagttttctgtcttgctgggctacctctttcctggtcctttggccagagagagcagcttttgttgcagctttttgtgtgttttgtttctgccaatgcctgctgatgtttctggcttcctcagctctatgttgagaaaatgaagcaaaaggaaaatgcagggtcgcttctcaggtcctgaggccccctggcttgtcagctttctctacatctctcagtctttttatgtgtgttttatgtataatatccaggatttttagttgtatttaatgggaggaaaaaggagaagaactctgtcttcccactgaggaagttcctttgcctatttaaaaccagtttcagccaataagaacagagctatttggacaggcttattcgttgttcctccagtttatagtttgggcttctgagaagcgccttgccatcactttgcctgcataacctcagtgccctcacacaagccacctgttttcccgtcttcgtgatatgctcagccagaccccttgtctgaagctcagtttgacgagcatgtcctcattttttggcctgatccctccagccaggaggctcctgggagcacccacagcctactgagggcatctgccctgactgcaggggtcttgccctctgtgcctacatctcacctcccattctagaccttaacccaattactttttatcggtccttccataatggaaatattaaaacatatacaaatatacaattgtatcaagaactctgcatgcccgtcagccacatcagtaattaccaaccagggcccatttgttggttttgtctacactcatctatgtttttctcaccacactgaattattttgaagtaaatcctagatattgtcctttcatttgtaaatacttcagtatatgtcactaaaagagaactgccatttctacacctaaaataatttatcataattccttaatataatcagctgttcaggcagtatttacatttaagtttctcagaatctgatttaggttcttgtatctagcacaagtgctttgcacgtaatagattctcagaaaatatatcttgaaatagttaatgactataaaataataatgcttttaaaactatctggaaaactttgttgaataaaggattctaaagagaaactcatttaacttttagcaacacatttgcctgaaatatagtgagattgaaagttattaacatgatttcatgaaaaactatatatataaaatatatatttttagatatatgatatttgatatagatatataagatatatgcatgttttagtacattttagtcaccattttctaagagcaatgaatttgccttttagtgatttataagttttatttgtacacaaagtaacgtgtgattataaaatttgcaaatcttctttttcctcaattgcaatttgatgatattatttattatagaacatgtattaatacagtctgacaaagtataactaaaatatttaagaagaggaaactcttaaatttgttagtaactagaaattgtaatacctgttctttgaggatttcctgtggtttctcctgccaacaaaataatacttatatgtaactaagaaattagattgaattttagcagtcttgtgcactttagttttgtctgcataaggagctattcaaggtgagagagaagtagctaagtgagaagctgtaggttctggttctgctgtgtggctttagtttacagctggaagccaaaagtctacccagagtaaagatagatggcaagtatgtgagcgcccttctgaggtctgtcgccatctgtcatggcgtgttgtgtccttagtccatcctgcagcaggcgtctttccagagtgcaaatgccagtgcctttgtccctagttcagcgctcttcatggccctccattgcctggaatcaaacccaccctcctcagagtggtgtgaggtccctgggcactggccctgaacctcccttgctgggacctggtcccaccctcatcatccctccatgtgggagaatccacgcgagacgtcctttgctgtgctggaatccacgcgagaagtcttttgctggactggaatgtgccaaggaggagtattttgtaccagatggcagatctgacttctctaacaagacctagttcttattttatgatttttttcctttaatttgtaataatgttgtaattatttccttagagtagacttacttcatattactcctgtcataggcacactaaatgctattttcttactgtctttcagacagaaacagtctccgccagtcaagaaaccctcaaaagtattttgccatggatatagaagatgaagaaaacatgagtaagatctaggcctatcacgtagtatcagatagctaattttatgttaacattttggtgtttttgcaaatgtatttcatgagaccagtgtggggattgtgttttttcccgtaacatcttctactgacagtggcatgtttttaatttttggtgtgttctctgcaacaggtgtcagaatttgctgcagacgtttttccttcctcgttatcgtcgtggggcatcactgtgccccgtggaatgggcttctgggtatatctcatgaagccccactgtttcatgtggagtcctgtcacggcatgcctctcagaataatgctccgagtattcacacatacaaatcgaagataacgtctgagattgatttaaatacccaggcctttgcaataataggacagaaatatttcccttcaaaatgcaggttctcgctgcattttgaaggaaggggattcacacgtgtctgttgatctaaagttcgcaaaggtgctaatgagagctgggactggtgtgggcctcctccttccgtgctgttctctctggtgccggggtggtggaaggccgctggggtacgttggtgtttcggtgaaggtacttatctcttctagttcatcttcagtcccagaaaacaggtttagatgcttccacggaagttgggagagtttagtagagaaattacaacaaaggcatcattgctctaactaatataaatatctgtatttaccttcttacttgtctgaaggaataacatgcagctgtcaatgatgagtgacatgtcactgggagtgattattgagcattagaacttagcactttccctttgactttacgcacaaccgatgatctggggtcttggagtcactcttgcgtaccatgtagaacccaaaccatgacccagtgaagcatttctgcatggtattgatttctgcatggtattgatttctgcgtggtattgctgccccatgggtgtgctgtggaggcggctgggcctctgctctatggactgtgtgctaagtgttggctttggttgaagtcagccatctggggtgtgagggtgagaccacctcctgcagtgctacccaggaaccacgggaccagcgtgctcacctcacttccgctgttgtgtgcgcagcccgtgcctgcctgctggtgattgtttttttcaggtttttatcctcatcaatcctgctcttgagatcttttaaaaacccagcttcatgtttttactgggcagttctactcactgtttccaagtttgtgacaagttttaagagagaggttacgtccatactcctcatttgagaaaatgtgacctgtgcttggcccgtgcagtagcccaccaacggagcatgtgcaggggtcctcagggcctctgtgtcaggactgtggcctacagcctacagctgcagtcacctcgcatagacagaggctttgtgatcgtgtaggttctggaactatccccaaactgatcctgtgatcacttgacatgataaagaatcctcccacatttttctgtgaagagaagccgatgttgtagtgctaaaacgtggacattctggtcctgtatttgtatcattttgaaagcaatgcaaagccctgtcatgatcagtatttacatttatgaagtgtagtagcatgatacagaaagagaaggcatctgttgaagaaaagctgtgaaagtggcatctttctctagttttagtattttcctttatgatagtagcattttcagtgacagtgagagtagtatttcagtgtgcccctgaggtgaataagaatttagaatgtatggaatctgtatcacagaaagtgtattcttctcaagattatttgtcaatccaatagtaattatttttatttctgaaaggaaagcatttggttatttcagaggttataaatatttggttaaatgcatgtccaaatacatttataatgatttgatttttgatattgataattgtttagcaacaaagtcaaaatgtaagcagtaatctagtatgtcatgttcttgctcagtttattaatctctgaattccatcttggctctattttttttaaccttttgttccctttgagcaccgaaaggagtaacctatcgagcttttgctggaggatgttataaatgaaaatttagtgtccattccatcagctttgtcaactgggagaagtggtgtgtgtgtgaggattattttggagaaataatgtctgtagagaaagttttaaatctcttagcctctaccacagtgtggcatcagttttcccatggattgtgtctaaaccaggtttatgctctgctgtcttggccgaatgatgacagccctggaattagagatctttaacctcaaagattggcagccaagggcgaggacttggtccctttaaacattcccatggatgaagctgatgaatattttcacaacttttcagtttgcttaacgtaatgagaatctaccattttacacatgtagtagaaatagaccctaaagccaccatatggggcactcgtaaattggtttacaattttagtaatattttggttactttaaaaaatacagatttttgaaatctagtggtagatgtctttaactttcattcacattacaaccttgcagggcactgtagccctcacccttgggctccatgtgacagctgcctagccatgatggaaaggaattatttcttcttctcctttttaaaaagcttgatgaacactttatactcctctttttaaaataaaaaattagggctgggcacggtggctcacacctgtaatcccagcactttgggaggccaaggcaggcggatcacctgaggtcaggagttccagaccagcctgaccaatgtgatgaaaccccgtctctactaaaaatacaaaaattagccgggcatggtagcccacgcctgtagtcccagctactcgggaggctgaggcaggagaatcacttgaacccgggaggtggaggttgcagtgagccgagatcgcgccactgcaccccagtctcaaaaatacatacatacatacatacatacatacatacatacatacatacatgtataaatccataaataaataaaatttaaaaattatgtttattttgccatgtaattttacaattctaaaattgtctgtattaattcaaaatctgaaatacctttaaaagttaggataaacaaattattctggaaattcatcaaataattgttttaaaaaagacaaaatcaccagaaagtgtatttatgaagttaggaagttgtaacctgcctacagcttcagttttgtgtcttgttcttacacacttttcctatcatggaacgatattaaggattcagacttagtcagcccccatatataatattctcatttttaaatagatactagaaataaaaccataccctcctaaacacaacaactaaaaagccataatactttacacaattacataagcagcttttaaagattggttcataaactaaatcaaataattgcatttattgattgaatattttaaacctgaaaaactaattatcttgtgaatgcatgtttttaaatagttttctcttctgagagacgctgcaatttaaaacccttagatagcatgagggtaaacaacagtgaaaggaagatgctaaaataaatatatatttatccatatattgatattaaattgtcatttcattagacttattaatgtaaggtctttctggattaatttatcatcccacattttgataaggttgaaaaagtctaggtacttcagaatattctcagaagaaaaaaaattatttaaagattttactttttaaagcaaaagcagttggtgacactaaatagaaatggtattagtcactaagcaaagtgtcagattacttgtttagttgaggctgatagttctttaactaaatgtataactcttcatgtatacatcaaggaataaaatttataagcacacatcacttaaccagttacaaagagagctaaaggaatctataaattttgcatttacaagatcctgcaacgaaggcattgtaagttactctttctgggcaccacaggttccagcagcactgatgtgaaggaaaaccgcaatctggacaacgtgtcccccaaggatggcagcacacctgggcctggcgagggctctcagctctccaatgggggtggtggtggccccggcagaaagcggcccctggaggagggcagcaatggccactccaagtaccgcctgaagaaaaggaggaaaacaccagggcccgtcctccccaagaacgccctgatgcagctgaatgagatcaagcctggtttgcagtacacactcctgtcccagactgggcccgtgcacgcgcctttgtttgtcatgtctgtggaggtgaatggccaggtttttgagggctctggtcccacaaagaaaaaggcaaaactccatgctgctgagaaggccttgaggtctttcgttcagtttcctaatgcctctgaggcccacctggccatggggaggaccctgtctgtcaacacggacttcacatctgaccaggccgacttccctgacacgctcttcaatggttttgaaactcctgacaaggcggagcctcccttttacgtgggctccaatggggatgactccttcagttccagcggggacctcagcttgtctgcttccccggtgcctgccagcctagcccagcctcctctccctgtcttaccaccattcccacccccgagtgggaagaatcccgtgatgatcttgaacgaactgcgcccaggactcaagtatgacttcctctccgagagcggggagagccatgccaagagcttcgtcatgtctgtggtcgtggatggtcagttctttgaaggctcggggagaaacaagaagcttgccaaggcccgggctgcgcagtctgccctggccgccatttttaacttgcacttggatcagacgccatctcgccagcctattcccagtgagggtcttcagctgcatttaccgcaggtgaggaactatgctgctgctttaaaacacggggtcattgctcttggtaatgcttctagacagcattttagtttcaggattactgttgactttccaccttgacatcactctgtccccaccaggaggagttactggtaagtctggctgcttgatttccatggccatgtggccactgagaagccgtctgcatcctagtgcatgctgggtctgtcgcaatgcaaggcagggacacctgagaccccgtccaccagagcagtgtttacaacactatccataactcccttcccgttaggcaaccccccccatgaccctcatcccacagcaagcctttagcaggagagacggaagaagagcccagtctttgaaaccttgcccccagttcagcaccattttccttcaaaggtctcatccaagaatctcacattcaagataagtgacaccagcccgtcagcagctgaaaacccaagtctgggtcaagatggcagcctctgggctcccacatgactggctggtggctgtttgctgttcctaagccgaggagcccatcaaagcagcgaatgagccagcacagcagtgagcacctatcagagcgcagggagggaggggcctccaacaactgttctagggcctgccagttgcctgggagtctctactttgaatttcctacatgggctgtatgaggacttccccgcatgcccaggctggaggtggacagccacccttccatttgacctccccagcgcagtgaaatcaggatgaaggaaggggaagttccagggtgggcttagattggcttacgtgaaagagaaaaagtaaaggagaaaatcacctttagttctcatctctaaatcctaaaactctctgattatgtattccttcttttcttggaaatccaaagttcttctggtctattgcaaaagttatttttttgaccctctattcatttattactttgtatcagagtcttcttcactttgaagataacatgtatactacccttgaccacaagacttgaaggtggcttgtgttcccctggaagaatccaagtgtcttatagtttcttttttgctgttggctacaattagaacaacctctgtgcagttgtagtctgagatgaccaggagttctgttttaaaggaaggaaatgtattttattttgcctaaaggaatcaaatgcaacatcagtataaaataatatattcaaggtatttcactgatttttttaacgaaccaaatacttgcttcccttattaacctctcgtcaacattgtttataaggattattagtccatttgtactttaacaaatcagtgctactagatcccatgtgattttttattttcaggattactctttgctaaaatattaaagcctgagttcaaaatattgtctgatgtgacttgtcttcccttaatattgacagagtggcatataagaccattgaaatgacatcaaatgccgtggatcccagatgtctgaaccttcagtgtgtaggctaggagcaccttaggcggacgcagatcgaagtgccagtagagatgtcacccctgcctccctggcttggctgtgcgcctgcagtgacttctgtgtggagcatgaccagagcccctggcttgggaaggctggagggacatctgttgggctccagcctggggaggggtgcaggtgggcagggctgcctcagccccctgacgccacgttcctctgggctctgtaggtgctgaacaccaggctctaggcctcatgtccagaaccactagggcatgaggggatggagctgcacttcgagtctctgccggagtggaacctgccaccttgtgtctttggagcccccaggatagccccggaatgtgacgtgttccttgtaggacccgggtggccctcccagaagcagtccttagggctttgttggtgggctctattgtccttcaacaggaaatttccaaatgtgcattctaggatgggtggaaaaccctcactctttttctagagtaacccttgaaggacgtaggtcagtcatccctgcgtgtcactgcaggtaaatggtgctgcctgggactgtgtggcatgggtttaactcttaagagcattttttttgttcttatatctgtcccccaaattaagagggaagtccttcattaaccatacaggttaatgagaccagtaatcccctcaacggggtgctgagccctggccatgtgcctcagatgtctgcgttaacaagcatcagccccagcaccagaccttcagagtgaggctctcggaactcactctgaagttaaagttcttcgcctctctttgaaagtttggagattcgcctaatcttatatgaaatggaaacttttatttcctctggcttatccctaatcttcttatgactttttcttctctgtaaactcgaatgaatcgccctttccctctggcaccctggccaattggaatgcgtcgccccttccctctggcaccctggccacgtcctgtgtttctgtcacagcctcagttcctcgcgtccgctcacccctgcattgcagatgccgctgcctgcgggtgcatggatccctgccaccaaagcctctgtccattctccacatgacttgtcttgaacactgtcctctggggctcactgatacttgctggtgcaatgataagagaaaaacatcctgacaactatcttttctactcatttcagaaatattttattaaggaccaacctggggatgctgggttttcctagtagtcatttgattttccagacaagtgtgaaattggtgggacatgagttgaaactggctcttaacacccacctcccagcagacatcatttcccaaaatgccatgggctcattatatccaagataaatcataagccataagaccatgtccaaaatccaacaaatacatctgttctcagaagcactttaatacagatgtctgtctgacctgagcatatacctgtgcaggtgttccgaacgtctaagcgctttccctccccgtgctgttctctggtacatgattctatcgtaccgtctgggcgagtgagcggagtcagagtgcatttgtgtggagaggctggaatgactgagaagcctctcggtggcgcctttgagggaggtgctgtgcacagcttgtggcttccttcactggatcgcatctccaagctgcccctttctcttgcctttgattttgcacatcatcctgggctgtgctcccagctgtgtgtggccctggagctgactgagccacaccgtgtgtgcatgtgagagagggcaaggggggtgggagggccatactaggtgggcgtaggcgtgggcaggtggccctgagcaggcagctttgcctgtttgcctcggtttcctcctgagggccgggctggcctgcggtgaggattggagggatgctcatgtgtggtgcccacactccacactggccccacgcgggtggcgaaggactcagccagagcctggcaggatcctggggtgtctatttccaaggaatgttctggaagaaacatacacacatacttgtttgccagatttacctgtgtggtcttccagatgagaagcagcctgtgtcactccataagggagagtgcgtgcagcattgagagagtgagccctgctcccagctgcatctggcccctaacctgcatctgtgcttcccacacaggttttagctgacgctgtctcacgcctggtcctgggtaagtttggtgacctgaccgacaacttctcctcccctcacgctcgcagaaaagtgctggctggagtcgtcatgacaacaggtaaccatcttggtgttgtatgtaaccctgcctgttttcatgtctgacaaatgtgaaatgttctcaatcgacaaaaaccactgtgccacaccgacgggagatggttacttcttttcttcttcaaaatgtctgccatatgcaagtttacgaactgcacttacaagcttttttcccaaaatgttcatctttttaacctaagtttgttttatctggagaaagcacactatattaatatttgattcctgtcatcttcatcctgtgaatggcctcaatctgctctggaagatggcaaggggcttactaattcttcctttatttgaaagtagagcctatctattgtatcagttaatgttaacgatgccagataagtttcagtgtgacttcctttgaggagggagagagctctagcaagagtagaaaatccgtggggaaaaaaagcacaatttagaacgatagaagaaaccctattaaattagtctagaagttcccagtagcaaaaggaacccccgagtcctctccccacatcccgcgagtgagaacacgcagcagcatctctgtgggtagctcctgggaagggaagccacatccttggccagtgtctggcaccccagggtggagcaagactcagggagaggacccctgtcatgtggggccgtctctgtacccagcatctgctcagcccagcctggacagccagatgcaggaagcagaccctagaggtcagggaggaagctggggacagtttctctgtctacatccaccagcccaggagaaacccccagttctcggtatgtgactttcttgttctttccccctgaggggtcacctctatcagactctgcagccctcttcactgacccacctcttgctgccctaggaaacctggctgctctgctcatgaccattgtttccttgccgtgccgtgtccagggaggaggaagcacccgaacagcagcttctattctaatgttttgtacctgtatcttctcccccttttacctctctccttactgctatcttttacattaatcaaaggtgaacaccacaacgactgaatagaatagttccctaggtaagactccctgcctcttccagcagcatgggtgagtgagctggtcatgttctttcatcgttttgttgttgttgttgttttgtttttgttgttgttgtttttaacgaccttagaagaggccgatcaccttctgggaacaccttacatcttagtgtgtatttcacctgagaccacttgctcagagccatagtttacatctgaagccaggacgctggagcacttggcactccagacagctggttcagggggctcccgctggttgagtggacttgggcaggttacaaggcctctgtgcctcagttccctcatctatacagtggagacattagtagcatgagcctcagaggacatcgtgggaatgcagtgaggacaatttacctaacagacctggtgcttacctgccacatggtgtgcacaccattggttcagctgcagtggatgcgagtttcccggcaggtgacttccagggtcctggcatcacacctctggtcagtggtttatctcacaaagttgagacggagtgatctgtctgtgggagttcaccactgcttgtgatttcactccgagtgtggttaatggtgacagtttactaatgaaaacatcacaagttaattctgttttccttcttattcctctgggtgccgttaacccctccttcctaatctcttcagtactttgatatttgatgtcaagattaattaccagaccagttagtccacctttccatagtgttgcccagctgtgttctagttgtgggcattcaagaaaagatgctattgcataccagaggaaatgacttccttgagtttagtgtctggacactaagcaatgacgatggttggctttccagaaatgtcacaaagtgagtcctcaataggaggttgtttgcgtgtatacatttgcccacttaaaaaataggtggtaagaatatgcatgaagatgagcttgaaaagtctgttggcccctgaaaagttaagtcactgagaataagagtcagacttcaggagcacagttaggcaaacattactgtgaattacagaaaatagtgtctctttttttttttttcaggcacagatgttaaagatgccaaggtgataagtgtttctacaggaacaaaatgtattaatggtgaatacatgagtgatcgtggccttgcattaaatgactgccatgcagaaataatatctcggagatccttgctcagatttctttatacacaacttgagctttacttaaagtaagtttagtaaacaaataaggacaggaagctctttttaaaaaatattcctctattagaaaacattgcaaaacctttcattgtttctgtaatcatggaaaatctctcaaaatcataactttaattagtaacaataaggctgcatcccattcttccacaatgctcaacacacatatgcacacatacatacaataacataacatggtcataaatttcaagtctgtgtttaagaccatgtgattttgttgtatgctgtataaatagaagttcccaaactgccaggtaaagatggtaatttttattctagtcaccgtttctagaaagagctagtcatgtatccaaactccttttctttacaaagccattttttgtatgtggtctttctgttctgaagtcataaattggaagaaggaaaggttactcacatcctgatgacatatccattattgagtgacaagaactgtattaattaccctaaacatgtaaaataaatattccagttcaaacttatctttcccttgtggaaaatactagcctctgaaaatgatagactaaaatttaactatatacagctttaaatgttacttttgcaacttttttcctttcagtaacaaagatgatcaaaaaagatccatctttcagaaatcagagcgaggggggtttaggctgaaggagaatgtccagtttcatctgtacatcagcacctctccctgtggagatgccagaatcttctcaccacatgagccaatcctggaaggtatgagacgagattcttcaacaagccagtttctcaagaaaatgttaacagataaaaactaacctgtgttaatatcccttttcctttttttctttttatttttagacttggatgtggatctgataagagtctctataaaagcatggatttttttctttccaattaacttaattagaaaactttaatgaatgaaaaatgctgattgtaattaaccaagtaattagaatggagtgagaatattggattaaaattgtatcagtatttaaatttgggtaataaatatctctaaatcagaggtgtatgtgatcctccatatttctgaggaattctaatttgctaaatgtgtaattaaagtatttatttgcctgatatttcagaagcagataaacactagtgaaaagtgaaaccactattgtgatcatatttttttccatccttctttacatttgaggttagcacttttgttttttagtgttttgtatctacatcccttctcccaagcccttaggcattgtttattccaaatagaacgttttattacattactttccttgtttataaaagcaacaggcatactcactgtggaaaattgctaactatttttaaaatataagaacattaaaatcatccgtattcctgtaacccagaaatactcactatggatgttttaccatactttccatgggtttatttctgcatctgtctagatttattttggaaattttaaaaatatagaggaaaataacatggcaaacacccaagtatccatcacccagaattagcaaatgttagcattttgtcctatttgcttcagtgcatttttaatgatagaaataaatcatttcagttaaagtgaaaaccccatttccccaactcccttggagaccacttttgtgaattttgtttgtgttatgtccttcctactcaatttcatataattttttttttttttttttgagacagggtctcgctcttacacccaggctggagtgcagtggtgcaatcatggctcactgcagcctcgacctcctgggctcttaagcgatccttccacctcaaccttccaaggagctgggactacaggcatgtaccactatacctggctaatttttatattttttatagagatggggtttcaccatgttgcccaggctggtcttaaactcctgggctcaagcgatccacctgcctcagcctcccaaagtgctgagattacaggtgtgagccaccatacccagcctctcagcttcacatacttattttgtatgtgtattttgtatgtatggcataaacatatgcatttatatgcacagactgtattttaaatttataagctattgttagatgtgcttttcaataaatcaaatagatggtttactacctgtggggttttaactctttttctctcttagaaccagcagatagacacccaaatcgtaaagcaagaggacagctacggaccaaaatagagtctggtgaggggacgattccagtgcgctccaatgcgagcatccaaacgtgggacggggtgctgcaaggggagcggctgctcaccatgtcctgcagtgacaagattgcacggtaaggggcgggggctccctgtggccacctccctgcacacaggattcatccatactgtttgccaacctcccttttccacaaccatttgaattttggccccatttcccactcaggtgttccacagtattctttgaaggactgaggttctaaacaggtgctgctgggacccccgtgaggggcagcagcaggacctagacacaggaggctccacgcttctaacattcctatccaagcgtctcagagtttaccacttatttttaacgtgggcttctgggttaaactgatgtttttaatgggctacaggccatgacatcttaaaactactggcttctcctcattagtagtagatgcaacttcagtggtcactttcatcattcagttaacattttaggtagttgatatgtgcattttaaaagtaatgcaaaccctgtcacaggcattgtgttctaagcacagagagcatccccagccattctgtgcctgggtgtgggttaggcttagaggagggctctgcaagcacacttctgtagtcagcaggcacctgggagatattcatctttcagaggcctgtatccagagcagattatagaaaacccatttcttcagatggtatcagttccagtagttctttgttttcatttttaaactaatgtttatttggaaaaaaaaagtaacataagcagatggcaaaaagcatacaatgataaagtttaaaacctccctcttcagagccctcctgtggcacccacagtgagtgggttttgactgtccatccagaagctgtcaaaattgatgcatacgcatgtgcacgtgcacatcttttcattgtttgtgtgccctttatgttgatttccttcagtgggtcttgtcaggcaacctcaagtacagggagctggattaatcacacattttgggccattgcccacagcccaggtgaccactgtgatgtgtttatttattatttgtccttccagtccacctccacacgtgcatatgtcaactttgtgtgtgtgtgatgtgggggaggggggtgtactcttgaaaaatacacaatagaattatttggagtatttgttgctaatttacagaaatgatactatgctgtaaatcctatctgattcttacattttcattcaacctatatttttggagctatttctgttgctctaaccaacagccagttcactactgacttttgcaaatcttccttcatagtcatgggccatttccttcatgatgggacacccatatttcttctaactcccttatacatgtagtcctgtatatccttcaacttatgcaaactccatcacaatattatagactttgctagagtttcttggggcatatattcaggagttatgcacatatataacttcacagaataatatcagattgcatcccagggcagtcacactagttgacacttacaccaatagtgcattaagttagcttctcccacattctgtaaactgatatcttcatagtttcaatttttatttctctttatcactaggaatgttgggcatctcttcaattacatattaactgttcatcttacaccttctttgagttgtctgttaatatcatttgttcatttgtcttttgaatctcatgcctttttcctcttgattttcagagttccttttacagttgatattgtaatccttagccctttgagaagatgcagtgtcttttgcaagtcctttcccctttgagtagtcttgcactctgttgaagatgatttgaacatatacacaagggtttattactgtgctgtctgttctattccatatgtctattctttatgccagtgtcatgctgttttgattactgtagctttgtaatatgttttgaaatgaggaagtttgaatcctccaactttattcttcttttttcaaaatccttttggctatccagggtctcctgatatttcataaagatttttggatgaagtttttcaaaaaatgccatcgttattttgatagggattatgttgactctatagattgctttggttaatatggacatcttaacaatattaagtcttctaactcatgaacatgcgatatatttccatttatttgtatcttcatttctttcagcagtgttttataatttttattttacaagccattcacccccttggttaggcttattactaagtaatttattcttttttgtgctattgaaaattgttttcttaattcccttttcagatcattcattgttagtgcatggaaatgcaactgatttttgtgtgttgattttgtatcctatgattttgctgaatgtgtttattatttaaacagttttatggaatctttagggttttctacatataaaattatgtcatctgcaaacagatataattttacttcttcctttccattttggatgccctttatttctttttcatgcctacttactgtggctagaacttctaatactgtgttaaatagaagtggcaaaagtggacatccttgcattgtacctgatcttagaggaacagttttcagtctttcaccgttgagtacagtattaactgtggtcttttcataaatgtcctttattacgttgagttagttttttttctattcctagtttgttgaatgtatttattattattaagaaagggtgttaaatcttgtcagatgctttttctgcatcaattgagatgatcatgtggcttttgcccttcattctgttaatgtaatgtattaattgattttcatatgttgaaccatccttgcattccaggagtatcataatgtataatccttttaatatgctattgaatttggtttgttgagaatttttgcatcagtagtcatcagagatactggtttgtagctttttttacccttcttcatgtctttggctttgatatcagggtactgctggcatcatagagtgagcttggaaatgttctctttagtttttttgggagtctcaggaggattggtggtaattattcttaaatgtttggtagaattctctagtgaaaacatttggtcctgggcttttttttttgagatggagtctcgctctgtcacccaggttagagtgcagtggcacaatcttggctcactgcagcctctgcctcctgggttcaagtgattctcctgcttcagcctcccgagtagctgggattacaggtgcctaccaccatgcccagctaatttttgtatttttagtagagatagagtttcaccatgttggtcaggctgatcttgaattcctgacctcaggtgattcacctgcctcggcctcccaaagtgctgggattacaggcatgagccactgcccccagccatgggcttttcttaattgggaaatttttgattactgacccaatattcttatccattaatagtttgaatgaattgtttttcatattcattattcctgctatcatttggttaccatctgcatggaatatatttttccatcctttcactttcggcctatgtatccttagatccaaaattagtctcttatagacagtacatagttgaattgttttttttttttaatccatttacccaatctgtatcttttgattggggagtttattcattgacatttaaagtaatcactgatagggaagacttactgttgccattttgctgttttctatatgcttgtagctttttgcttgtttttcccttattctcttactgccttcctttgtgtttctttcattattttttctaatgataggtgtattagtccatttccattttcattgctgataaagacatacctgagactgggcaatttacaaaagaaagaggtttaatggactaacagttccacctggctggggaggcctcacaatcatggcagaatgtgaaaggcacaattcacatggcagcagacaaaagagagctagcttgtgcagggaaactcccctttataaaatcatcacatctcatgatacttattcactatcacaagagtagcatggtaaagacctgcccctatgattcgattacctcccactgggtccctccgacaatacatgggaattgtgggagctacaattcaagatgggattttggtggggacatagctaaaccatatctataggattctcatttattttattttttccttttgtctccgtggggtacaaaatctcatttctttttgtgtatattctacaggtattttctttgtggttaccattgcaattacataagacatctttaaattatagcattctattttaacttaaacttcaattacatagtaaaactttacttctttacttccaccccttcacactttgttattgaagtcacaaattacatctttatatactgtatatccattaatatacattgtagttgtaatgtttttgtcatttaaattttatgcaccaaaattacaatagtattggttactgtatttgtccatgtgcctccctttacaggagaaccttatttttccatacagcttaatgttgctatttactgtctttctatttcaacttgaaggactcactttagcatttcttgtaaagcaggctagtggtaatgtactccctctacttttgtttatctggaaaagtcttaatttcttcttcatttttgaaggacagttttgccagatcaaatatgcttggttgacagggttgtttttttttttttttctttcagcacttaaaatatatcattccactcctttctggcttgcaaggtttctgctgagaaagccacaggtcttatgaatcctcccttgtatatgacaaatggcttttcacttgatgcttttaagattctctgtcttcactttagacagtttgattaaaatgtgtcttagtgtggttctccttggatttatctgtatttcatttctttgagcttgaacttgtatggtccatttttttccacagatttgggaaactgttagcaattatttcttcaaataagctcttagcccctttctctccctcttctccttctggtattcctagaatacttgtataagtctgcttgatagtgttccgtaagtcccttagtctcgcttcacttttcttcattcttttttctttttgctcctctgactcagtgatttcaaaaaaagacagtgacctgtcttcttttttccacctcatcaagtcttctgttgcatgcctttaatgatattttcagttcagttattgtatttttcagctccagaatgtttggctcatttttatactaatatctctttgttgatatgctcattttgttcttgctaagtttttcttattttgtttagttgtctatgttctcttctagctcattaggcatctttatgacagatattttaaattcttttttagacagctgatagatgtgcatttctttagggtcagtttctggaaatttacttttggtcctttggttgggctatgttttcctgtttcttgtatgccttgtttatttgtgtgctttgctaatatttgggcatttgaaaaaagaaccatctctcccagtctttgtgtactggctgtgtacagagaaagttcttcactaacaagctggctaaaaaatctaggacctcttatgctttttctgatttcctgcttctcctggtgtcttcctggaaaactgtagctctaatgtgctgcttgcctctgtttttagtggctcccaaactctggcaccagtctcatcaccgagtctgatgagactcaggcaagacagaaaccagccctttgggcagactccagacagccagaacatcagactaatgatccactcttttgtttccatcccaagagaagagccccagtatggaggcttcctcccacttagggggcaccttgctatttagggaaaggggaacaaacaggcatgccaaacatcgtgaaatttcctatccctttcattggaatctcttcctagttttacaatggactggatactgtagcttctcagttggtctccagagttctcacagagccattctggtctgtatattgttgttaactcagggtctctatgggggaaagagggcctgtagcttcctagactgccatcttgttgaagtcgtagtccaaacaccattgattttttaatgttaaccttatggccagcaacttaactcacttcttattctatttatactttcctggttgttcttgaatgtaccaagtcacagtctgtagatattgactgttctatatcttcttttgttataccagtgttatttttctttattcctgctgtccaggaccttggatgatatgttacagcactgtccatgttttcttcctgaatctcagagagattgtgactgaagtttctccatgatgtacagtttttcctacagggttttagtaggtagccttcatcatgctaggaaaattctgttctattcctattgtcttagagcctttttattatcatatattggtgttactttatcaaatgttttatgtgtgtctatttttaataatggtaaataattaatagatttcctgatgttgaccacctttttgcaattttgacataaaccttactttattatagtcactcattgttttaacatactgtttgatttggatgactaatattttacttaggatttttgtttataagttaaataggcctatactttttctaaactttttaattgttcttatctgattttggaatccaggttaatatagcctcataaagtgtgtttgtcttcttgttctactttctgaagtctcttctgtgagacagcagtgtatagaacccaagagtgaaaacatccagtccatatatatatatatatatatatatatatatatttttttttttttttttttttttttttttttgtagttatcttcatggtcatcctcatcattttggcaggagaccagtctagttgtaatttcaggtccttttctggttactagtttcttaaatttttgtttcttctagaacaaatttttagccttcatattattctagaaatttatctagaatttgaaggtttgaggcttctttgaaataagccagtcgattgtggcattcaggcagagaaggtggatctataattagagaatagagtagtggtagtaagagaatgagagctaaaaaagagtcagctaatgcagtcagaaagaagaatgctagaattttactatagtagagctacaataatttctgtggttatggtttcaaagagaaggtatgggaaggagtaaccaaataaggtggacatttgaaaattatgatgtattgtattttacaaagatagccccaccccaatgcctctcatctaaaatcctctccaacaatgtgaccttgccactgtaccattaagaggtgacgtctctgtcccatgcccctgaatctgagcctgtcatgtggctgctttgaataagagaatgtggtggaagtaatgcagtgctagttctggcatagccttaattggcctgacaacttccatttcttgcctcttggtggcagccaccatgtgagagttgtgactaccttgagaccaccgggctataagaagctgcccctccgtgtagagaggccctggaagatgagatgccacttgaagacagagagagggcaaggaacagtgaagcaccaaatgtgtaagaaaagagttcacctggaaaatggaagagagaagacaaaattaccaatatcggaatgggagaggtgaaattaccacagatgctacagatactaaaaggattgtgaagagaaattataaacaaggctatgccaattgacaatttagatgaaatggacatatttcctgaaagacacatactaccaaagctcacttaagaagaagtagataacttgggctatctatatgtattagagaaaatgaatttgtaatttaaagcctttcccaccaaaaatgacaacaaaagaaaaaccccaagctcagatggcttcactattgaattccaaacatttaaggaagaaatacccattttgcacaaaatattccaaaattgaagtgaaagagatacttcccaactcattctgtgaggccagcatttccctggttccaaaaccagatgaagacaccacaagaaaataaaactacatgttaaaatgtgtcatgaacatagatccaaaagttctagcaaaactttagcaaaccaaatacagcatcatgaccaagtaggggctatcccaggaattccaagctaaatgaaacatttgaaaaatcaatataattcaccatattaacaaactaaaaaagacacagaaaaggcattttgcaaaatccaacatgtgttcctcataaaaactcatagcaaaatagaaatagaaggaaaccttctcaacctgataaaggaaatctatgaaaaatctacaggtaatgtcattcttaacagggaaggactgaatgtgtttgcctaagatcaggaacaaaacaagattgtctgctctccccacttctgttcaacattgtattggaagttctagccagtgctataaggtcctaagaaatcagtggtatccatattgaaaaggaaaaagtaaaactgtctttatttgcagacatacttatctatgtaggaaatgagatggatattatacaaaactatgagaatgaatgaatgattttagcattgtggcaaaatataagatccaaaatgtaaaatacaaaatcagttatattttttacacctgcaacaagcagttgaaattgaaatgtgtaaagcaatacactgaaagctgtatattgaaaactgtaacacattgcctagagaaattaaagaactaaataaatggagagatacatcatggtcactggttggaaaactcattattgtcaagataccagttttcaccagattgatctatagactcaatgcaatcctaatcaaaatctcaacaggattttttggagaaattgacaaactgattccaaaatccatatggaaatgcaaaggacatagaataggtaaaacaactttcaaaaggaagaacaaagtaaaaggctaatactacctgatttcaagatagtaattaagaaagtatgattttggcataaagataagtatacaaacaagtgattccttattatttagagtggttttaggtttataggaaaattgagtggtagatacagaatttcccatatacccagtgccctcacgtatgcacagcctccccatcatcagcatctcccactctagtgctatattcattacaatcgaagacacatcatcatcacccaaagcccacagtttacaatggggctcactcttgatgctgcacattgtctggctttggacaaatgtataatgacctgtatccaccatcacagtgtgagaccagagtagtttcactgccctaaaaatcctctgtactctgcctgttcaccccctctcacctcctaacctctactctgcctgttcacccctctcacctcttaacctctgtattctgcctgttcacccctctcacctcctaacctctgtactctgcctgttcacccctctcacctcctaacctctgtactctgcctgttcacccctctcacctcctaacctctggcaacagctaatcttcttaatgtctttgtagttttgccttttccagaatgtgatctagttggaatcatacagtatgtagccttttcagattggctttttacacatagtaatttacattcaagattctttgatgccttttcatggcttgatagctcattttttttaagtgctaaataatagtttggatgtgccacagtttattcattcacttcctgaaggttcattgcttccacgctttggcaattacaaataaagcagctataaatatctgtgtgcaggtttttttgtggacatgagttttcaagtcctttgggtaagtaccaaggagcacgaatgctgggtagtatggtgaggatatgttgagttttgtcagaaactgccaaactgtccttcaaagtggctgcactgttttgcattcccaccaacaatgaatgttgtcccacattgtcaccagtattcagtgttgtcagcagttctggttttgggccattctaatacacatgtagtagtatctcgttttaatttgcagattcctaatgacatatgatgtggagcatcttttcatgtgtttatttgccatctgtatatcttcttgaatgacgtgtctgttaaatttttttggccaatttttaatcaggttgttcattttcttattgttgagtttagagagttttttgtatatttggaagagttcttcatagatttatcagatatgtcttttgcaaatattttctcctagtctgtggcttgtcttttcactcccttgtctttcacagagtagaactttttaattttaataaagtctagcaaatcagttatttctgtcatagattgtgcctttgatgttacatctgaaaagtcatcaccaaacccaagatcatctagattttcttctgtgttatcttctaggaattttatagttttgcattttacatttaggttgtgacctactttgagttaatttttgtgaagggtgtaaaacctatgcctagattctttttttttttttctgcatgtttatgtccattggttctagcactgtttgtagaaaatactaccttttgtccatttcattgtctttgctcttttgtcaaagatcagttgactgtatttatgtaggtctgtttctagactttttattctgtcccattgatctatttgtgtattctttcaccaataccatgctgtcctgattactctagtatagtaagtctttaagtcaggtaatgttagtattacagcttcattatattccttcaatactgtgtttgctcttctggatttccctttttatatcagccttaggaacagttcatcaatatctacaaaataacttgttgaaatattgattgggattgtgttgaatctctatgtcaagttggacagaaccaacgctgagtcttcctagccataaatatggaatatccatttatttagttctttgatttctttctttggaattttatagttttacttatacagatcttgtacatactttgtcaaatttatacctaaatatttcagttttgggggtgttagtgtaaatgatgttgtgtttttaatttccaattctgctgttcattgctggtcacagttaatttttgaccaaggcacaaaggcaattcagtggagaaagaatagtcttttcaacagtgatgctgaaataagtggatatccctgtgcagaaaaaaaaaaagcaaaaaaaatcaagcaaccaaacaaatggacttcacttatattttgcaccttatacaaaatgaatttgtaatgggccatagacctaaatgcataaaaattctggaaacaggagataatgtttgtgacattgagttaggcaagtttttagctacactaaaaaagactttccataaaaggaaaaaaactgtcaaagtttaaaaattacttctttcaaaaagcactgtttaaacagtgagaaataaactgacaaacagggagaaaatgtttgcaaatcatatatctaataaacgattggtatccacaatccactgttactctcaaaacgcaacaaggggaaaatagtttttaaaatgggcaaaatgtttgaatggacacttcaccaaaaaaagatacacaaatgtgaaataagcacatgaaaagctggtcaacaccattagtcactgatgaaatgcaaaggagatgccacaacacatctcttggagtggctgaaattaaaaagactggccaaaccaaatgttgacagtgatatggaggaactggtactgtcatccactgtggctaggtatgtaaatagaacaatcacttttaaagacagtttgacacagccaggcacggtggctcatgcttttaattccagcactttgggccaaggcagatggatcgcttgaggtcaggagttcgaaaccagcctggccaacatgacgaaaccccatctctactaaaaatacaagtattagccaggcatggaatcccgtctactctggaggttgaggcagaagaatcactcaaacccaggaggcggaggttgcagtgagctgagattgcgccactgcactccagcttgggcatcagaataagactcaaaacaaaacaaagagagtttgacagttccttaaaaagttacagatatggccaggcgtggtggctcacgcctgtaatcccaactctttgggaggccgaggcgggtggatcacaaggtcaggagttcaaaaccagcctggccagtatggtgaaaccctgtctctactaaaaatacaaaaattagccgggcatggtggcacacacctgtagtcccagctactcaggaggctgaggcaggagtatcgcttaaacctgggaggtagaggttgtggtgagctgagatcacgccactgcgctccagcctggggaacagagcaagactctgtctcaaaaaaaaaaaaaaaaagttacagatatgcctgccatgtagcctagccatttcactcctagtggtttaccaaagagaaatgaaagcgtatgtccacgcagacttgtaaatgaatgtttgtaggactttctttgtaatagacaaaatagtcaaaaactggaagcaatccacgcagccatcaaccggtaaatagatagaacagacggtggcatatccatgcagtggagtactactgggtgaaaaaaagaacagtgatacacactacagcatagagaaatctcaaaataattacgcagagtgaaagaagccagatgaaaaagaggaattaccatacagtcccatttgtatatatctcgggagaatgcagactaagctgcagtggcagaaagcaggtcagttattgcctagtggggacagaacgagatgtaaggagacaggaggtttggggagtgaggtcacatgggtacatacaaatgtcaaaacttaccacagtgtccctttaagcgtgtgcagtttattgtatgtcagttgtaccgcagtaactccaggggaagaaatcacatgagaaaatgcttatataagtaaatgacagaaagcaccacaactatatgaattagaaaaattcaaataagttagaaggatgcaaacagtaaagttaagagcagaaattagttttgtaagcaacaaagatgtagcagtgagcagtaacaaagcctctaagatgtcagtacttagagcaggcaggttgattaaagtcaacagaaccggtgaggctgatcaagaagacagaaggcactaccaaaacgtatctggaatgaaaacacggatatccttcagggtccagcagagattgctacagtggagagtcctagacacttcagcactgataggttttaaaactgagacaaaatagaacattttctagaaaagtgtacattgctaaaagtgacttaagcatatgcagaaaattggaatagaactctgcctattaaattaaatcacacacacacacacacacacacatacacacacacacagagaataaattaagaaaatagaaggaaggagagtctgtggagagaggggaagtggttggcccagacaacattgagtgagttctagacatcgtttgtgggatgatgatccccattttatgtaatattttccaaggatagaaaagtagggaagaattctgcagctcattgtgtggctcataactcaaaggttactacaacctttatctccacaccagacaaggacagtaaaggaaaacaaaacaacaacatgtcatggaaatacacatttatacacttacattatctttaaaaatttagcaagccaaattctattttatattttttaaagcttcattaattcctcttaaatctatcatttcaatgtgattttaataaaaatcttattttttcatagtacttaaaagttgaatcccaacatggcaatagaaaactaacaatataaaaccatagtaatcaaaagtgagtggtaattttcggcagaacagtggcacaacatacaatctgaaaagacctgcagacccatggggcagcactggtgatcaggcctgcctgtgtttaaaagaaaatgtaaactagatggaggcttgtctctctcacagaaaattaagtccaaaaataggtggcccagagaagctctggtggctccatggtctggagcctgatccctctttgtcccgcaccatctaagaggtctcttctgagttcagggtcttcataatccctagagctgacgaaatccctgagtacccagtctgaattccaggcacagggacacttcagccagctcagctcatcatccagagctcaggcacagggctccactcgctatggggcagctggggtggccgggcttacacactcagccacctggaagaggactggggctctgtcatgcaggaggaagggaagaaaggcagggctgcagccagcagtctgtgctagacgtggtgctcgcagaagacatggacaaagtagccaacgaccagtcctggagaaacaggctgtctgtgcagagaagcagcccaccatacactatccaaagcacatgctaggacagttaaggacctgagtatgcagagcagtgcctggcagttgcagggttcttcagtaaggcacagaaaaccccaattataaagaaaagtgaataaatttgactaaattaaaatttcaggaattatttactataacccacatatttggaaaagaaaagccacatattgggaagagatttctgatgtctcatgtgaccaacaaaggattcgacttggttacaggctgactcctgcacctgcatagcacaaagccatccatttggaggatccttgctggggcgtggggatgtcacacacataaatgcaggagtcggggctcatggacctgaacccttcagatccaagccttttattatatagtaattagactttacctcaaggaagaaacaaacacaagctgatagaacctagcatgggtgggccaagaaatagcaaatggccagaaaagttgcccggaaagagccctggtggccaaaatgatgccagttggctgcagctgtgtccctgctctgggagagttgagagtggggagcagccaccttggagggccaggtggatggggctgggtgaggctgaactgttccccttacacaggacacagtgacaggcagagggcccagggccatggtaggttgggggtggggtgggagccacagcactgccattggaggtcaccagggtgtccatcccactggcaggcagtttggcggtgaatgcagccccagagagttgtccacaagaccatggggtgagaggctcccatggggttggccaccccacggtgattatgttggcgcgggagccgtgggaaggaacgagagtcttggttcagatgacctcggcctgtgtcctcagctgcacagagctgtgggaacaaacaagaccatccagaggaggaccagcagcctgtctattcagagtcggctatggcaagggggccagagcactgtgttgggcagactcaaaggcacgcacaggaagggggatggctttattgtagggaaagggggaggctttgggtatgttctgatggaggtaggggaagccaagatgggctctgcagaaggtggcctcccgtgcagctgcttgaagaacccaggggcatctctggctggtcctgggttgaaagcaggaaggaatgggcgtggggcaaccactaggaagctgtagtccttcctgaaagcctggctgactgggccgagtgctgtggaggctgtggtttgggtcagagtagttctcctgccctgtgtggtctggccgacgtctgtctgcagctcagtctctcaggccgggccctttactgaatcaggggacagatcagatgatagcagtctggactctgttcctaaagaaatggcacaaggaaaatgaaagacgaagaaggccaggcacagatgcctagacccgggtgcactgagccgaggccatgctgtgagagtggggacacctgtaggttccttgggtgtcagccaaacacacttcatggcacgctgtgagtgggcacctcccatggggtccgcaggacaggtggctgtggacatgtagtgggtatctctaggagacgtcctgcctgcagtcttggcagagctttacttgttttatttgcatggacgctgactgtgtctgacaccctctcgctggcgctaggcgatttcatcctgatgaagtttgtcccagctgtcctttgtgaggtgcattagtggaagctggtgccacaccatttcccacccagggcctctgcagagctgtagacactcttggaattctctttcaaagcatacgttcagaattaatgactcctaacaaatgaaggtttctgcaggatcactgctttaaagtttgcccagaagacctaattcagcttaaagatgctgagtccatagaggcttctaatctgtagaagaaaggggcctgtgtttcttagaggtattgaatcatttcatgctttttctgtaagttagggaaaccttcattttcatttccattttggaaggtggaaggaatgtgtcataggaattggaggatttgtccattcgacacatatttattgatcttctgtatgtgccaggtacatattgtaagtgctgggataggtcagtaaagaaagcagacagaaacctcttcctgcactggggtaggatgggagcagagagtccaacatggatctgtaaattatgtggaagtcagaatggggttggagggcttgggcggcagggaagggagacctcaggcagcaggtaagcaaaaggcttgagtggctgggaagggaggcctccctcagaacggcttttgtacagggacctaaagtgggggcagccatggctgcctctgggattggtgttccagctggtggacctgtggacagaagctttgggcaagcagcaaggaggtccctgagggtggccagaagcttggggacaggtgcagggtgagaggtgacagggctgggggatctggccggaggactgctggcattttcttgggagccactggactgttttgtgccagggaatggcctgtgctggcccacgtgttcacaggggtcaagaggagagggcttggggcaggcaccgggttccccttaggagagggcgtcatgacacaggcaggggggcatgacttgacccatggcgtagcagtggcagtggccagaagtcaggtcctatatctcttccaaaagtggatcccaggtgatctgctgatgactgctgtgacagggatgagcagggtgagggtgaccccagagtggggactgagcagctggaggtcagtgctggggcatatccagaatgaggcgtaaacaggtgaggttggcggctgtttgtcatgtgctgcctaccccacttgccagctctgccctgctaggttcttgagggggcatggagtggccctgagacttcaggcctccaaatacaactgtgggcattgtcaggcagaggctgtgccacggagtgagtgacagaggggggatatatggaggctggttccagtctgggcgtcagcctcctccagtctcaagtcctgccacatccgcagatctaagcccgaatgtttctcatctgccctggcctccctgtccccacactgcccagtcgaccttcatttctgacctgtactgctgagcgtcttcccctgcagcgtgtgctgagcatcttcccctgcagtgcgtgccacactgtgctgagcgtctaaccctgcagcgcgtgccacactgtgctgagcatcttcccctgcagcctgtgccacactgtgctgagcgtcttcccctgcagcctgtgccacactgtgctgagcgtcttcccctgaagcgcatgccacactgtgctgagcgtctaaccctgcagcgcgtgccacactgtgctgagcgtcttcccttgcagcctgtgccacactgtgctgagcgtcttcccctgcagcgtgtgccacactgctgagcgtgtaaccctgcagcgcgtgccacactgctgacgccacttcgtaaaatgcgcatgcgccagcccctcccctgagacactccatgaaattagattgggccactccagaggcctctctctgccatctgaataccgccccctccctcatcaagctcctggctgcttaggggcccctgccctgcccctctgccctggctgcccttgctgctgtcctgtgtcccctgccccccaggctgggacatgcgttcctccctcagcctcacagccccctcctttggggctaagcttcagggtcaccccaggagcattccttcaagtacatacacccctttttctttttcacagaaccccgccctttctcccaaattgattttacctcaatttatagttcttcatttgtctttttattgcattattgtttagctcctgagctgtatctccccccaggtacttcacaccctgtgtatgtagcgcccagcaaagggtgctccagacacagcaactcccaggctgagcagagcatctctgctctttgtggggctcagaaagagagaacaggcatattgtgaaggcatgtgtgtgttggagctgataatgaatacctaagttgccattggcatgcatcattggtgtcatgcatgtcagctgcacacgtgcagtcgctgtaaatccccacaccctacctgcctgtgcattcagtgccattgtcacttgcagagaacaggaaataagcagtttaatgttttgaaggacctcttgaagagctgtccttttttaagaagtatagtggtccccgcttctccgtagatgtgtctcaagacccccagtagactcctgaaactgtagatagtactgaaccctgtacgtgctggtatttttcctgtaagtaccttcctatataaagtttaatttatgattagacacagtaagaaattaacagtcactaataataaaataagagtgacttgaacacaagcacagtgatgctgtggccatcaatcttatcaccaaggcgactgctaatgggccagcggcatctgcaacgtggatggttcacatcccgggctggacagcacaagatcgcaccacactcctcagaacggcatacagttgaaagtctggaagtgtttatttctggaatttttcatttaatatcttcagatcacggttgacagtgagtaactgaaacctctgaaagtgaaacctcagataaggggacctgctataattaaatatgtaatttcctttctgatatttcccacagatttctcacaagaaacatatgtggctcattgattgtgggaaaacgtaatggtaaaaacaaacacagtgtaaaataacttttaagtagatttttgtctttgtgatcgtaagctgctaaatcagtctgttaactttttgttgcactccttcgtcagttggttgggatcctgcggaattgccagtgcatccctgtaaccacgcaggcttgggctgggctgcgtcgacactgagtccgagctccctgaagactgtgctttcttctccctccagctggaacgtggtgggcatccagggatccctgctcagcattttcgtggagcccatttacttctcgagcatcatcctgggcagcctttaccacggggaccacctttccagggccatgtaccagcggatctccaacatagaggacctgccacctctctacaccctcaacaagcctttgctcagtggcaagtatctctagagtgtgctgatttaatctctgtcttgattttgcaatgttttcatcctcatgaatgaaaaaaacaccacctgagctgctctgtggctatcaaaagaacatcagagtccttctaaagagacccaaggtgatgtttctgaggctctccgggccttgtctctagggccttttaagtgagtctctctgtaagattaatctcctttaccaatcacaaacctagccattcatagaagaattgatgggttcacacctgtcatcccaacactttgggaggccaaggcctagtggattgcttgagcccagaagttcaagaccagcctgagaaaaatggcaaaaccccatctctacaaaaaatacaaaaaaatcagccagatgaggtggggcatgcctgtggtcccagctacttgggaggctgaggtgggaggatcacctgagcccaggaggtcaaggttgcagtaagccaagattgtaccactgcactccagcctggacaacagagtgagaccctgtctttaaaagaaagaaagaaagaaagaaagaaatgaaaaatgaaaagaatgaaattatgactgggctgggcacctgtctgttttcctctcactcaggcactgtattcattcctgtctcagcagcagagactcaacagacactgaaaattatgtcagcattggctttcccagactaaccctgagccaggtctccgggacgtttacgctgtcttagagccaccagggtgtccacagcggtgagctgcctagagcctgccctgggctccctggagaggccctgttggctccgagagatggtgacaggtggaaccaggggtgccaatggcaggcagaggctgtctccctggtgtctgcacctaccctcgattcccttcattgctggttttcttttttctttttttagaatttcagtggctaacagtaaagtgaacaggagcttttgaattcaaaggtcctaacttctaagctcacctttatttaaaaggacacagttaaggtatttttatctttttaaacatataatttcactacttttttaaaagctcaaaactaaaaccataatcctaacctgaaacacgtttattttggggtgtgtgtgtgcttgtgtttgtgctgccttgttttctagtgcctggcaactagcacgcctttaatttgagaaaaagcagtgtggaattttatttgaaagcatgcctgtcagagcacatgaaggaggcagggatggggaaaaacagttgtctttaattaaattttacagttccgtaacttaaccattgtgttttaagaaaaacaaaatagataaaacttgatggtaggtaggttgaaattgtagcatcaatgtcttttgaagtattttgttgtgtattggtgtgtgaatttctcatgattcagaaaatttccctctttgctctctgtcttctgtacttgagcaaagagtgctttaattttagctgtcactcatcttttatatgcatagatacttaaaacattgcatgtggaatatgggacacataggtgatactcaaaaatagttgttaattagggccttgttgaatagcgctgtctaagcaatatctcatccgtaactaaaatctgcaaagacagaatcattttgctaaagaaattttctaagatattgaaagtagagctcatttataaaagtcagtgtatttttatcatatttcacttatgtgaaaagcatctatatctgttaaaagaccttgaaagatagtgtctgcaagatagagacttcaaagttactgatgctgctgtttatcctttcctcctcaatatcttctctggtctttttttttttttttttttttttttttttttgagacagagtcttgctctattgcccaggctggagtgcagtggcgtgatcttggctcactgcagcctccacttcccaggttcaagcaattgtcctgcctcagcctcccaagtagctgggattacaggcgtgtgccaccacagccagctaatttttgtatttttagtagagacggggtttcaccatgttgaccaggctggtcttgaattcctgacctcaggtgatctgtccacctcagcctctcaaagtgctaggattacaggcgtgagccaccgtgcctggcctccgttatctctaatcttgatagcctaaagcacattaccaaacccctcccctggtccccgctgcagggggctgtgccgagctgattcagcagcagcagagagagcctgggttggagccatgaggctgcccctgcgtcagctctgcctccttggaagcttctgtgtctcgggttcttcatacgcccagtggcagggatggaccaggcaccccttgcaatccttctggacaaatgtgccactgtcctatgaaaataaaaggacaccactcaagctccaggaggcagaaccttaactcaaatctgagccaataaacaatgtcactctagcaccaaagtctatttcaaaatgcaaactatttgaaatatcttatttttggtaaatgctttattttggaaatgggtttttgttgttgtttccctgaagagagttcagatcagcaaagcaagtagctttggagaagacacctttagacgaggactcctgtgaatcagcaggacagcgtagcaggacattaggtgagccacagggtggagcaggatgggagggcagaggcttctgcttcagaattgaagccgaaggcaagtaatgctgtgggtgttactggagacaaaaggaaccaaacaagaaaaatctggagaggcaaatgttgatgtcttaatagatttgggaggtcacactctttaaaaatgggtcccaaagcaaagctctcaaaacttcattaaaagaaaagtcttacatttgacaagtgacctggacagaggagctaccaggacattggcccccttgctgtgcacctgcactgtgcatcacagctcacgtcgtgtttgttacactttgtcacctcacattttattataaaggtcattcccgtgttaaaaagagagcgcggtatgacagcgcctagtgaattgtagtgtctttagggaggaacaaaaatggacataaatgaatacaaagaaaagattacctgaaactgggagcaaatcaaagtaaaaatgtagggatagggtgttgctttcttttaaaaagataatgctgtcaggattaaagtgagaagaatttaattttcatttcagcctgaacactagttttactttcagaaaggttcttggtgccaagctgtgacacttttgcctttgtgggtatacacacttggtacccttgcttagcactgtggaagaggaagtctctcgagctttctcagactttctctcaaatgagtttcacatccagcacttgcaagtttcaggacaattccagcttcttatttatgtccattgatctcctgagtgtgagctcctcagctggcccagtttgttgtccaacgctcactaagataaaccaagaagaaggagcagggtgcccaaatgccgcatgcgatggctctggggaccttgttgacagacagcctgctccggggtttgcagacaaggcttcctatcctgctggttttcatgttgaatgttggcacgaaacgttaacaaacaaggctacatgatggggtagggtccttgtgaagagcttgcatttaggtatctctgggaggacagcacagggacccaagggggctggcagcaggcccaggtgtgtggcaggaagaaggcaggtgcctgctgagctgctatccacccgagaccatttgacattatgggcaggaagagcaagggaagctggtttaatgaggccctggctggagtgagagagaaggaacatcactgtgagagtgtggaaagtgtgtgtgtgtatgtgtgcgtgtgtgtgtgtgtgagtgcatgtgagtgtgtgcatgagtgcgtgtgtgtatgagtgtgtgtgcatgtgtgtgtgcacgctcacatgagtgtatgagagagagagtgtgtgtgtgtgtgtatgcgtattctccaggtaagagcaggcaccggggttgtgggaaagaggtgtcagtaatgtgagtttcctccttgccctggtttctaggaggagtgaacgtgccatgagtcattgtagaagagaacgaccaccaagcttggctccaagtacagaatcattcttttcatctgacaatttttctttccattttactttctgttttcctcccctttgcttttgctggaccgattaaattgtctttcccctttcttccgactggtgggaagttctaaatcttatttctattctgaccagtggttaccccaattttttaaaacaaatatgtttaaatcactttgaaaaaatgttggcatcaagaattaatatttgtaaagatccaaacttgggaaaagctgaaatattgggctcatttttattccacactcttcccatcctcatcttcctagattctgatgacatcatcttgagttttagaaactcattttatcgtgctttttttttaaaagcctttcgtaatgagtcacatagcctcatgatcaacaattgtttagatgaagccgtaagagctcctggtttctcttctaaccagttttctgtagccagtgctcctgcccttaactccacatccagatttatttttcactttgctggaatatatccttaattggggtgacagggtgatttcttggttggttgtttttgtttggtttttggagaaaagtcctgtgtgggtggggccctggatcttgatgttacctggcccttgcctgtgtgccaggtggactggggactgtggatgtctgggctctgccctaccccaaggacacgtcaagacctccatgccacccctccatggtcaccctttgtcacagagccagtttgagtttctttcctttctagaaggtacctccttgttttctctcctgtagcgttacatttatctattttccctaaaattcaggaatttcaacagattaagcctaggtgtgtggttagtttgtttgagtttctttcctacttactaccctgaaccctctgatctggattgttgagtcttcacttctgagaagtttccttctgtcctgtcacttctgctagaagcatcttctctgccctctctgttgtccctgaaaatgctgctgagcagaactcacaggcctgtgaccagtgtctctcctctcatctgatgtgcttttttgactgtactgcattctaagagaatgcctgacttctgtcaccatctcaggagtgaactgttttccccgcggagcaggctccccgggagctcatgcctggcccacttccctgcaccacggccgccacacggctccgtctcttgctctagttctcctttctgggagagtgactccatttggggctcgtcatctctgttgggttttcagtggctgcatttggggttcctcatgtctgttgggttttcagttctccttttgcatactgagagaacaactttctagtgattggaactgtctagaaaagtttcctgaaaggaattgagctcccctgactggaagagttcaggttggaattggatggacactgttgttacggacacggtgataggggatctggctgaaaggattaacccacgtgatctccaggtgtcttctaaactcgagatcctacggagtgcagtttgcttgtttttaaattctctgtgcagatgactgtaatgctacagtacagttaccattacctattgtatcaatgacacttttgaaggtttttaaaaataataatagttacacttcactgactgccgtcctcaggccatctcccgggcatgcatgtgctcaagtcaggagccagattcttacatgcttccctgaatccacgccgcagccctgtgggccgggcctgccgtcacccttcacagtggaagcagccgcagccggcagacaccacgaggcttgcagctcacagccatattccactgtccctaggacaagtacagcttgaacccacatcccacctttcaccaccccaagccttgcctcccatggacgaagacagtgcacgagagtgccttggggctcccccaggagctgcttcaggaaaaggaggagctggcaggatcactgtgagcctctcagccccactcccccggctgctccccttcatctacatccagttagcatctcctgcccatgcagctctctggacatgagcccacctcactcaggaccacagctctgaggctccttccacagctggtgttctaaaaccctgaggtctcctttgagaaaggactgttatgtggccagaggtcctctgtgtaaagccctcagcacctggctggggttagtggacaaccaggacaaggcacttccgagctggcagagaaagcctgagagcagccctggggagtgggctggaagggtcaggagaacccagccatcttgctctgtacggattctaatggcttgtgtttatttctctgtcagctcaagggctgcccttaagacgatcacaatgaaaggctcaaaggtgctctgctctcagcttaaatggcaggttggttttggacccagaggggctcagaggctccctcctgtgttgcatggcctgtatcatcctcactgggggtgctgtgcacagttttccttatactgtaacttatgcccaggtcttgactctttcttatttgcagaataaaggccactttcagtcgagattgtaagtacacattttccttgatccactaatgaatgtctgatagtttctataacatgaacccataataaccctaaaatatccattaatcattatgtatattattcatttttgattaccctactgtatgaggaacctattggaaaatacctttagggtagaaataagaaaaaacatcaatgccagctcttctgagttttttaattgtagcagttattaggccaattcacagtttctctgtgtttttgctttaaaagttctgattcagcacacttaatttacaacaacagagggattctcgttaccagccaagttgttcttgcttttattggtttctgtaccgcggcctgggattaactcattaccctagttccctctttgcaggctggaaagataagcatctcactcacgtcagcccccacactgcactggcctcagggactcgtagacgtatgcgcttatgaccatttaggggctttctgccccagaaaaagcgtatggttagtattggaagctcgggctattttcttttttccttgtttcctccatttttgtttcaagatgggacttgatttaacttaaaatataaaaaatattttgtactattgggatcttatattttttgttaatcatttagttttagtgaaaaatattgtaattctaaggtttaagtatcattcaacagtaatcctttattttgatgagaagtagtggaattgcaaaggaagataatataagcgttatccatttgtttatgaaagattcaattccattatggtcagagattccccagcagtttaaatggacaccctctcttctagccattcccccacaaaagaaatccttcctgattctgtctgcttgaagggtgtgaccttgaacatgctcctggggctgccgcctctacagagtgacagctcagggacctgcaggaactcagaacatgcaggcaggtgctggaggtagggcaggtgtgctggtaagatggatgacctcagttccactggcaaaactgtgccacaggagaaacctgagcgtgtggtaaaaaccaccccagcagcaatcagtaaatgcaggaacagtgacctcaggaagacatgaggctcctaccagtgcctgtgatgaggccagcccagccctgtgtgtggttagggcacacctgaccaccccgacaaccagggaaggacggtgttggagctctgagttcttggcatgaggacatgatcttggctgattgttttccttcagaccttctgcagaattgaatgcacatcaaagaaacaagcagaagaaaccatgccagctacttgtattgaataaaagtattttacttacaaacttggattatcaaacttatgaggaaaataacacaaaagagaaagatctatatgagaaaacagaacaactgaaagaaacaatttagaaaacaagagaaataagtaatgataaatcttattagtatgttatttagtaagtgctgaaatcaaatattaatttgaaggtctagaaaatattcagtattttttgagtgtgcagtgggcatggttctgggtgttgggattttgcagtgcacaggacaaacaaaacctcttcctcatggagcttttgctctgatgagggcagggggatggtgaagtcagataagtctcagataacttggaacagaaaggcagaattatgagacagtggccagggtgctgcccaaaacctacccaatcagaatctcagaggtaggattcaatgtgcttattgtttaaagcttcatatctgattctactgaacatatctgcttaagaactacaaaatatatattggctgtctctgggttttatagctttaattttctaaggtttgtgtgaatttttggaattgtccatagtgagcaaatgttatttttttaatgagaacaattttttttatttttaaattatctttagtgtcttttcacaactttattgaggtataattggcatatgataaactgcatatttaaagtatacaatttgatacattttggcctatgtttaggtctgtgcaaccatcaccacaataaagataatgagtatacttaatccacttcaaaattgtcttagtactccttcataatccctccctctccccgatccccattcccatccccagtatgtaccatctgtctatatagatgagtttgcattttctgggattttacataaatgtcatcataaggtttgcaccgttttggtctagcttatttcactcagtttaatcacttggagattgatctatgttgttgggtttatccatagttcattccttttcattgctaagtagcattgcactgggtggataaaccacaatttgtttttcccttgaaatattgatggatatttaggttgtctccagtcttttaatattataaagctgctgagaacatttctgtacaaatctttgggcgcttacttccatttctctttagtagatacctaggagtggaatggctgaatcctaagataggtgtatgttgaactttttagaaaactattaacctgttttccaaaatggttgtaccattttcacattaccaccactagtgtgcgggagttgtagttctgtcacttatatgccggcacgcagtacgagcggttgctttagaaattttagcaggtgtttagtgatattccattgtgcttttaatttgcattgctctgatgactaatgaagttgaatgccctttcacatgctgatttgccatccctgtgccttcttcaataaactgttcaaaacttatgcacatttttactgagttgtttaacatcttattactgggttttgagagttatttatattttctagatacagatcctttatcagatatatgatttgaaaaatgctttctcccaatcagtggcttgtcttttaattctcttcatagtgtcttacgcaaaccacataattttaattttgacaaaatctaatttatagaaattttctttgatggatcatgcttttgatattatgtctaagaaatatttgcctaagtcagtactacaaagatttcttcttatattcttggaaattttacagttgcagtttttacatttaagactatatttcacttgagttcatgtttgtgtagggtatgaaggatgaactgaagttcattttttggcatgtaagatatccagttgatttagcaccatttagtgaaaggttcctcatttcttcatggaattgccttgtgcccttgtcaaaaatcagctggcatgtatatatacatgtgggtctgtttctggactctgttgtttgcctttaatctctttgtctaaaggccagtattacattgtcatgattactatagttttattataagttttgaggtcaggtagagttagtcttccaactttgtactttttcaaagttgtcttggctgcttaggtcctttttgtatttccatagcaattttatagtccactcatcagttctacatccttattgcactggttaggacctccagtacaatgttgagtagaagtgatgacagcagacatccttctcttacatgtcatcttgggggaacacattcagtctttcaccattaggtatgatgttggctgtaggattttttattgctgttttttgttttagagacaaggtctcactctttcacccaggctggagtgcagtaacgtgatcatagctcattgtaacctgaaactcctgggcccaagtgatcctcctgtctcagcctcctgagtagctgggactacaggtgcatgccaccatgcctggttcatttttaaattttttatagagacaatgtcttcctatgttgcccagattggtcttgaactcctggcctcaagcaacccgcctgcctcagtctcccaaagtgctgagattataggaatgatccaccatatctggctgctgtaggttttttacagatgtctttatcagctcaagacattttttttttctatttatagcttactcagcgtttttaatcaagaatgtatgctggattttgtctgatgctttttttctgctcttagatgactgttgtcattgcagtgacttaggcctatagtcccagctacttgggaactaaggcaggaggatcacttgagccctggagtttgaggccatcctgggcaatgtagtgagaccccatctgaaacaacaacaacaaaaaatgagatgagcatttagttcatttttcagtttgctagtggtgacgttaaaaaaaaattaaaccaactttgcatcttgggataaacgttatatggttattatgtgctattctttttatatattgttggattcagtttgctaaaatttcatttagaatttttgtatttatatttgtctgtagggatattgggctatcattttagtttaatgtctttgtcaggcataaaatgagttggggtgcatttctttctcttcagttttctggaagagtttgtttggatttggtattatttctttaaatatatggttaaattcaccagtgaaaccattgggcctgaagtttgctttgtaagaaaattctaactacaatttatttttctataatagatttagggctattcatgttatctgtttttatcttttttcttgagtaagcttcagtaatttgtctttcagggaatttgtccatttcatctaatttgtctaatatattggcataaaagcattcagaatattcattttaatatctgtgatatctctaatgatatcgtcttatcccttatattgatgatttgtatcttctcttggttgtttttttctgatcagtctagctggaagtttttcaattctgtttgtctctaagtgccaacttttaggttcagtgatttttgtcttttgttttatatttcaataatttttactctgattttaattatttcttttttttccgcttacctggtgtttcaattgcccatctttttgtagttttttaaggtgctagttgaggtcattgttttaagaccctttttactgcttttgtagcatttaaaaattatgatatgttttcattttcacttatattaaaatactttgtcccttgggttatttagaagtctgctatttagtttcaaaatactagggattttacagagatctttctgttgttggttttttagtttcatttaatgacttcagtccttttaaatttattagacttggttttatggaccagaatatgatctatctttataagtgttccacaaaacttgaaagaatgtgaatctgccactttggggtagagtgatctgtaaatgttgattaggccaagttgtttgattatactatttattttcttttatattcttaccgatcttctacttggtctatcagttattgagaggcaggattgaaaatctcttagttataattgtacattatctatttcttccccttttttagagtttttacttcctgtattttgtagctctgtgattagatgcataaaaatgtaggattgttggtttatcttaataaaccgacctcctttaccattatatgatgaccctctttatttctggtaatagtgtttgttctgaaatttgttttgagattaatataacctcctcaactttcttttgattagtgttagcacagtgtatcttctatccctttatattaaagtactttatcttaaaaatatgtttcttatagacatatatttatatatatttatatgtttggatcttgcttctctctcccaccatggacaatctctgccttttcactgaggtacttagaccatttacatttattgtgattattgatattattaggtttaaatttcatcttgctacttattttctacgtgtttcatatgttctttgttcactttttcctcattttcttactgcttttgccttaattgggtgtgtttgatgattccattttgactccttcttgacttttgagctgtaacttttgttaatttggtggtggtttttagggtttatagtatgcattcttaccacgatctcccttcaagtgatattatactacttcacatatagtaaaagaaccttacaacaggatactttcgtttttccattcccaacctttgtggtattgttttcagacacttttgcatgtgttaaaaaaatccacatcttattattttcatcttaataattatcttttaaaggaatttaaataataagaaaaaaacctcttgtatatttatccatgtagctatcatttccagggctcttcattctttgtatagatctggatttccattttggtatcattttttcttctggctggaggacttccttttacattccttgtagcacaagtcttctgatgatgaattatttcagctttggtatgtctgggaaagtattttgctttcattttgaagtatattttgctgtacaaatatatttctgctggaatggcagggtcctttttctcctttaagcactttaaagacattgcttccctgacttgttgtttgcgttgtttccagtaagaaatgtgttgttatctttattcctctgtgtgttttttgctctgggtttgcttaagattttctcttaatactagtgttgaacaatttgttctgttgtgctttggtatatagttttattcatgtttcttgtgcttgggattcattgaaattctttaatccatgggtttgttggtttcatgaaatttggaaattttttattcatctttcttcagatatattttccgttcccccttctctctcctcaccgtcatgaaatctaattacacatatttcaccctacctaaacctgccccatatcactgattttctgttctttttttctctctttgtgtttcatttttggtagtttctgttactgtgtctttaagttcactaatcttttcttctgcggtttctattctgtggttagtcccatcaagtgtattttttatctaatacattgtagttttcctctctagaaatttggcttaggcctttttatatctttatgtctgtatcttctatatgtgaatgtcaggcacttttccattctctcaggaggctgtttcccagccttgattgagtaacatgcctactctgatcagtgctccgcaggatattcaaggacaccctctgcgtatctccagggctcactctgtctgcatgtctcttccttccggtactctgtcttatgaaatctggctgacttggtttcccttgactctcaattcaggggatctgctacactctgcctgggttccttactctgaacagtgaactgtcatctgggttttgatatctctccaagggagggataaatggtcattgaaagcaagtgagcatggtgacggggtgggggtggcctccacagggcacgaagtgagttgtactgagtcatctgagagtgcagtgtgctgcttctggccagtgggcttgacagttcagtgtctgggttcagaatatgagtctgcccatgttctaagcatgttctaaagattcatatcccaaattagttttgattttggtggcctataacatccatgtgatatgaattatcaagctcaatatataaatgcagatacatgtattcaattccgagttatgcaagtgtctttttaaaaactttcaaccctgcagaattagcctgtgattagttaagatgagatcgtttaaacacagcaagaaaataagtacaagggtacttcaaaaagttcataaagttaaaagataaaaaaatgtttaaagatataaacattatttctcaacataagctccatcaaattcaagacatttttgtaagtgctgatcctagccatttagattgtccctaaagaactgaatggtggctaggtgtggtggctcatgcctgtaatcccaacactttgggaggccgaggcgggaagatcatgaagtcaggagattgagaccatcctggccaacatggtgaaaccccatctctactaaaaatacaaaaaccagctgggcatggtggcacgcgcctgtagtcccaggtacttgggaggcagaggcaggagaatcgcttgaacccaggaggtggaggttgcagcaagccaagatcgcaccacacactccagcctggcaacaagagtgagactccgtctcgaaaaaaagaactgaatgtcttgggagtttaaccatgtcagtgcagtctttcttacattagtaactgaagaaaaattccttaagcatgccccttaaggaatttttgagattaggaaacaaaaagaagtcagaaggagccaaatgaggtggatttgcaaccaccataaggtggatggctcatgatttcctctcgaaaccctcacacacttgcccttgtttgatgagaggaataaataggcgctttgtcatggtgaaggtctctggcgaagcttccccagggggtttctgctaaagctttggctcactttcttgaaacactgtcatcataagcagatattaccatcctttggccctccatgtgaacccaacaagcaaaacgccttgagcatcccaaaaatgctgccatggcctgtgctttggccagtcagcctgtgctttgactgggccccttctgcctcttggtagccttttttttttttttttttggattatgcattttcttcaggattgtctttgtaaaagctatttttatctcctgtttgatgtttgttcttgcttcaattttagcagaagtcatgtagctctgataggagcgcttttcaaacagatgtcttaatcttcttagtgcctcaaactagatcctattcagacatgtttcagcaagttagtacaagtttattttggtgccaaaaaattttgaaatccatgaggttttttcataataagcattttccatgaactttttcaagactcttgttaagaattagggtttcctattgcatcatggatgtcacacatgcaaagccacgtgacctgaacatgcctggcctctcagtggcaggggagcacatgcaggcatgagcgccagaggtggtgtgatacaggagcaacccccacctgcacgacctcatgggaccctgcattagtctcagaagtggctcccacccatccactctcaggctgccaaggttcctggctccgtcagtgccagagtgagaaaagacacacttgtcaggaagtctcatgatttcaggtttctgtcaatcttctgcccacctgccctgtcagacaagtgcatacccgtgggtcagttctgctttctcagcactgctcctattctggtggccgtggaagagtgtgaggccactgccacggcagatgcacgctcaagtctgcgtatattcctcggcaggcagaattcccccaccacgcacttctgtggccatgtctgagcacagtgtgccgcccgtggctgctccctccctgggggtgaaagcgggcttcacaccaccttcctgtgtcttccgtttcaggcatcagcaatgcagaagcacggcagccagggaaggcccccaacttcagtgtcaactggacggtaggcgactccgctattgaggtcatcaacgccacgactgggaaggatgagctgggccgcgcgtcccgcctgtgtaagcacgcgttgtactgtcgctggatgcgtgtgcacggcaaggtactgaggcgccctcaccgcaatgcgccggctccacctccccaatagcttgtctgtcctcacacctactgttccttaagttgtttcatcatgtcatcatgcacagcttccgaaaacgatcacttggaatgattcttccttcagattgttttagcttagaagtgtggctacgtccctgaaaccttaatgccatctcaaaggcagctcttttcctccctgctgcagggtaacacccactgccaggccactgtgtgtggtggaaacgtctcttactctcagatattgaaagtcattatgcaaaacgcagggccagtcaccctgctgtcccctccttctcagcaacataaaaattgcttggattgtgataaccctccagtggagtttttaaaccttttgaattagctgtggggcccttttttccccagaataaaactttatatagtaagtcagggtattactagtttgtgtgtattcttcagtcaagtagatggcatctgtttattctgagaccagcattgtgcactggcatgggaggtatagccagaagggacagtgcccgggagggtcctgttcaccaggggcagcacccaggccagctgccacaagtccaaggtccacacagaaggagttactggccgcatgagggaaggcctccgaggtcatcagggtgatgacacacataacatccgtggtgcttcttagagttaaaaatgaaacgtgaatccactattggtggtttcccagaagcatgtcttcagaactcgggggtctgtagctgcctgtttgaccagcaagactggaacttggcaataactcagcccttaggagacgccgcaccttgttctgtgtgaagccgttcccttggcagaaggcgccttcctctgggttgctttccccccagaagccaatgcagttctgaaggccatgttttggtatcttattaggtgttgttttcatctgttacagcgtcaacagttgcatttgtttttttatcccttcacaggttccctcccacttactacgctccaagattaccaagcccaacgtgtaccatgagtccaagctggcggcaaaggagtaccaggccgccaaggcgcgtctgttcacagccttcatcaaggcggggctgggggcctgggtggagaagcccaccgagcaggaccagttctcactcacgccctgacccgggcagacatgatggggggtgcagggggctgtgggcatccagcgtcatcctccagaacctcacatctgaactgggggcaggtgcataccttggggagggagtagggggacacgggggaccaccaggtgtccacggttgtccccagcatctcacatcagacctggggcaggtgcgcagtgtggggaggggatggggtgcgtcagggcccagcatcgccgcctggcatctctctgccgcagcatttccccttctgaaccgtccagtgactgctttcaatctcggtttacgtttagaaattgagttctactgagtagggcttccttaagtttaggaaaatagaaattactttgtgtgaaattcttgaataaataatttattcagagctaggaatgtggtttataaaataggaagtaattgtgtcaggtcacttttatgccacattattttaattgcaaaaaagcatctatatatggaggagggtgggaaaatagaggtaggaaatagtagcctaaaggaaatcgccacacgtctgtctaaacttaggtctcttttctccgtaggtacctccctgggtagttccacacactaggttgtaacagtctctccctgaggagcagactcccagcatggtgtagcgtggccctgtcatgcacatggggtcccgcagcagtgactgtgtgtcctgcagaggcgtgacccaggcccctgtagccctcagcctcctctagaagcttctgtactccttgtaggatcagatcatggaaaacttttctcagtttacttctaagtaatcacagataatacatggccagtaatcccaggctggccattcattcaggttttttaaaggatatttaacttttatggactagaaggaatcacgagggctactgcacaatacatggcctaagttccctctgttccttcctctgaatcgaatggatgtgggtgaccgcccgaaggccttcacaggatggaagtagaatgatttcagtagatactcattcttggaaaatgccatagttttaaattattgtttccagctttatcaaagacatgtttgaaaaataaaaagcatccaagtgagagctggtgagaccacgtgctgctggcgtagtgtaggccagacattgacagtcctgacgggagctcagggctgcccagcgcccagcgtgcacgggacggccccacgacagagggagtcagcccgggaggtcaggagcgcggcgggcgagggccctgtgtggaccacctccaccaagctcagagatttgcaccaggtgccttgttgcctccgctcaggatgaaagaggagctgagagaagtgctctgcctgccagtgcagtgcccagctccaaggctctagagggtgttcaggtgggtctcctggggccatggggagagattggtgcagaccttaccccacagcatacacctgccacagcgaaatccagggtgttggcacctgtgtgtccgtgatgagcctaggaaaccagagcaggggcagaggggcgtcatcctcccaccggacgctgggagctcagaccccaaaactgaaacaccgtggcttcggcggggggtgtgcctcctgatgtcaggagccccatccacgtgtgtccacacagatctcgtcgcagcacggcaggaaggggtgctgcttagggctcattgttggggacatgaccgggttcagcggctagaacatctgccccacagcagcctcctcctccaccgaagagggtagttgtctccctgaagcagtcacagcaggcgtctctgccgctccgtcaccacagtggggttttgttcaggcagatcgcgctggggttctgcacctgcagaaggagaggggtctgttgtcgctggctttcccccaagcaggctcttgcacactctagaaaaaacaccttgtaagtctgtgcatttttattgtcttgataaattgtatttttttctaatggggattgggagatggacttcgtttttaaaaatatgtggattttggttaccaagtttagtgttaatatattccatatacatacaaaactacccggtatgtctggcttttcccttctgtcaggtaatagctaaagtcagcatgattgctccctgtaccaccccaaataagtgagtgcctcaccttgtggggcctgagcagctaccttgagaccatgtgaggtggcacctttccggggtggactcgtgcggccttgaggacaggcacagggcaccctatcccaagccgtccaggcaggaggaaggcagccaaggcaactgggttctgggagccctgggtggggcagctgtggggaggaactgggttcggggagccctgggcggggcggctgttggggggaactgggttcggggtgccctgggcagggggctactggggggcggctgtgaggaggagttgggttcagggagccctgggcggggtggctgtcagggggaactgggttccgggagccctgggccggggcagggggcggctgtaggaaggaactggtttcggggagccctgggcggggcggctgtggggaggaaggtgacgtgcaggggaccagaggctctgcactgctcctaggacagctcatctgtaatcagaaaaaaaataaacaaaatacagaacgctgactcctccgtgagacagatcggggaccttagcactttaatccctcccttctgagcgctcggtgtgcacttttagactatagctgtttcattgacgtgtcactctccatccagtgtccttgatgtggcttttagagacttagcagaaaattcgacacaagcaggaacttgattttttaagaaaaaatattacattttgaggacattttgacaagtaggggaagagagggcttctgttgttttgttttgttttgttttgttaactaaacctgaagtattaattccacaaagacactgtccctcaggaccactcaggtacagctctgccagggacagagtcctgctagtgggaggtctcaggtggggcggtgtgttctgtgccatgaggcagcgacaggtccagatggatgtcgtcaccaccttcctcagctctcatcacctggtcgtacgccaggcccacctcttcccagcaagggacgccaaagaactgcagtttttattctgagtcttaatttaacttttcatcatcttttcctattttggagaattttttgtaattaaaagcaattattttaaaatgtgcaagccagtatctcacaaggcatggatttctgtggaatttatttttattcaaataaccatatttatctccaggctgtggaatcgccactttctttgtgaagacagtgtctctccttgtaatctcacacaggtacactgaggaggggacggctccgtcttcacattgtgcacagatctgaggatgggattagcgaagctgtggagactgcacatccggacctgcccatgtctcaaaacaaacacatgtacagtggctctttttccttctcaaacactttaccccagaagcaggtggtctgccccaggcataaagaaggaaaattggccatctttcccacctctaaattctgtaaaattatagacttgctcaaaagattcctttttatcatccccacgctgtgtaagtggaaagggcattgtgttccgtgtgtgtccagtttacagcgtctctgccccctagcgtgttttgtgacaatctccctgggtgaggagtgggtgcacccagccccgaggccagtggttgctcggggccttccgtgtgagttctagtgttcacttgatgccggggaatagaattagagaaaactctgacctgccgggttccagggactggtggaggtggatggcaggtccgactcgaccatgacttagttgtaagggtgtgtcggctttttcagtctcatgtgaaaatcctcctgtctctggcagcactgtctgcactttcttgtttactgtttgaagggacgagtaccaagccacaagaacacttcttttggccacagcataagctgatggtatgtaaggaaccgatgggccattaaacatgaactgaacggttaaaagcacagtctatggaacgctaatggagtcagcccctaaagctgtttgctttttcaggctttggattacatgcttttaatttgattttagaatctggacactttctatgaatgtaattcggctgagaaacatgttgctgagatgcaatcctcagtgttctctgtatgtaaatctgtgtatacaccacacgttacaactgcatgagcttcctctcgcacaagaccagctggaactgagcatgagacgctgtcaaatacagacaaaggatttgagatgttctcaataaaaagaaaatgtttcactactctggtgttgctgagactttcttttcctttcaaattatttctgcccttggctccactagcaggcctgggtatggacacccacatgcataacctgaaaaggtggctgagtcccgcccaagagctgcagctctgcctccacgtggtcttgtcacctgctgtgcttgcaccagtgctactggaatttccccaccttgggacagtctcccctcagtccccacccctgttagattcttgacttcactgtcttcctggagagcgtgttggcgcctctcctatatataaggtggtgtagaggaaaagtaggcagctgccccactcccatcctgcatataaaatggatgttgacacatgcccgtgtgactcgttaccctcacgttacttgtggctagaacacaggaagaacctacacactcaataagaggcaagggtgacacgggtgctggggtgcagtgaaaaaaaccaggtgctaagtgccaccatagaactatgttatttctaattacaacactggaaggacagtcacaataagtggaaagttggcagcaaagcggcatttccgtgtcgtggctgtaacagtgtatatatgcttcacgtactgtacgagcacaggtgggccaggctgtctaagaagggagtctggccgtggtctgtggacatgggatttgagatggttttgattttgtgttcttatgtgaaaagcatatccgtttgtctgatgtttctacaattaaatgaaaaacaaatataggaaaatattttgaaaagtcaaaagcatcatacaagtaataaaaaaagcactattacagacaggtaacttgattttctcatttgcatcaattttgaaactatttcatttcccacaataaaaacgttaaaatatgttgcagcaaaaacaagcttcagagaaaagaatgaagggaaccctctccctgatgagtgaatcctttgaacagtgattcttcgggagctgcctcgggggccacaccagatggaatactcggactcactattctgtcatggaactggggaaatgtccgaatttgaccacgtaagatgaaagttttgctttttacgagatactgtatagtgaatctcgtagagcctggctgtaaatgttgaggttctcgagcttttattcagtacatgcgtaatgaaggccgacccggaaggcactatttcaggtgcttggaacaggtcggtgaacacaacacagactcccccccaaatagctgctgctctgcaggaaagcaaataacacaccagacgccagtgtcagggaatggtgcctgggaagaaagaaaaagcaggtgaggatagtgcagtggggcgggctgcaatggtaagtactgggatcagagtagcctcacagagaaggcttgcaaggcagatggtcagccagagggggcctggcgagcccggggcactggaccaggcatcagcgtgccactgctggaggctgcagtgccaggaacctggcccaccagtaggtgaacgcagctgttatttaacgtcacatttgataaactcagaatgatattaaaaacaaaggtaaacactcgaaactcgtcacttcctactttttgctgcattttactgcaatctgtgttcttactgtgtgcatactctgcaatggtgggcacgcccctcctaggctgcgtttgggaactcacatcagtagcttggaatcagttgtggtgggaggtttcacaccactggtacccacagacacggtgactcaaggcttgactcactgttgtgattgtctctagacctagcaagggatggaggaagatgcagatcaaactgcaaatgtagctgttacattgtgaatggcacagaaaattgaagaaactgtctcacagcctctggaaactgttatctacttaagcaaagaagtcactcagtcactgaacaagtgaagctctggcattcgtcctgctgcttcgccttcatctgactcatcggtgaaaacatccccagcattcttgtcagaaccacactcattcatcagctgcaaccctgtgttggcttcagatgtagggctcagcaagactcaatgaaagcattccataaaaactggctctgtgggatttacaacagtactgtctattttattcatgtttttaagttgcatgctgctccttttatatctgtaacatgtacagtacgcttatgtacacatatgtgtgcccacactggagcagggtagcctgtttagcatttactagcacaccactgggtcccagatgtccttgggaacagatcaaggcagtgcaaaggccctgtgctggtgaggggctgaaagttggtgggaactaatcagcctctggcaggtgcctcccccatcccaccctccaggactggtgagattggtctgtgtggtacagctgcaggagaaaaaagtgtgaggccagacctgagggatgaggagtgagtgtgggtttctgctggcccacctcccgctatgccctcaggcactgaggtcccaccttctgccttctggccaagcagccaatgcctccaggggaaaatgacctcataaggagaaatgagaaatctgcagagcacaactatctaaagctcaaaatggtaatactgaatagagatcctattagaatagattctagcgttttagaacacagtccaggaagagatcagaaaacagaaccaagcagaatttgaaaaagtgaacacaacagatgaactacatagtggaatgaacttaccattggaagaccacatggaaaaggagagggtaacaaaaaagaaaatatagaaatactaaaatatttggctgatagaagtgctaacatctggctaatataatgttcatggactttgccacacccacagactgaaggcatcacagatgaaaggatgtgtctgagacgggcttaaaacagcaacagcagttagttcccaccaactttcagcccctcaccagcacagggcctttgcactgccttgatctgttcccaaggacatctgggacccagtggtgtgctagggcatggtggctcacgcctgtaatcccagcactttgggaggctgaggtgggcagatcatgaggtcaggcatttgaaaccagcctggccagtatggtgaaactctgtctctactaaaaatacaaaaattagccgggcgtggtggcatgcacctgtagtcccagctactcgggaggctgaggcaaaagaatcgcttgaacccagaaggcagaggttgcagtgagccaagaccacaccactgtagtccagcctgggcgactgagcgagcctccatctcaaaaaacacacacacacacacacacacaaaaatactgggacagctgagcgtggtggctcatgtctgtaatcccagcactttgggaggccaaggcgggtggatcacaaggtcaggagattgagaccatcctggctaacacggtgaaaccctgtctctactaaaaatacaaaaaattagccgggcgtggtggcgggcgcctgtagtcccagctactcgggaggctgaggcaggagaatggcgtgaaccccggaggcagagcctgcagtgagccgagatcgcgccactgcactccagcctgggtgacagagcaagactcagtctcaaaaaaataaaataaaaaatataacagggacaggcagctccactaatggagaagacaagaagattcggatgaaacgataccggccaagtgttggtaattgtatgtttgcaaatgttcataagaagatttaaaaagtgctagcatagactttttaaaatgccatttatttggtactctaaggactcgtgggattttttttcacacaaaagcaacaacttttagtgctgtaaaatgtaaattgtccaaattaaagaaaataagaaaaatatcaggaagcttttaaaattgcaatcatttacttccttagagagtcattttaaatgtatttttgtggaaacaagtactttatacatcagctgaatcttatgttgttctccctggtcgattttctttcctagcactgattaatgacatttgcatttgtttatctgtcccactatgaaatgcagacatcagggggtgagaggcattggtttgttcatggctattcacttggcacaagcctgctatgttgcagatattaaataaatatattctgtattaattttaaaagttcccagacataccatgcgtcagagctttgccacctgggaagcaggtttgcatgagatgcttaaattgagaaacaaaatttaggaaatcttacaagaggtttacagtgtaaaaatcagtactttgctaagtttgtggtggtttttttttttttttttcttttgagacggagtcttgctatcgcccaggctggagtgcagtggcgcgatctcggctcactgcaacctccgcctcccgggttcacgccattctcctgcctcagcctccctagtagctgggactacaggcgcccgccaccaggcccggctaattttttgtatttttagtagagacggggtttcaccgtgttagccaggatggtctcgatctcctgacctcgtgatccgcccgcctcagcctcccaaagtgctgggattacaggcgtgagccaccgcgccctgcctgcggtggttcttaaaaagctaaagtcaggccagacacggtggctcacgcctgtcatcccagcactttgggaggccgaggtgggtggattgcctgagctcaggagtttgagaccagcctggccaacatggcgaaaccctgtctctactaaaaatacaaaacattagccgggcatggtggcatgcacctgtaatcccagctactcgggaggttgaggcacgagaatcgcttgaacctgggaggcggaggttgcactgtgagccgagattgcgccactgcactccagcctgggggacagagtgagactccgtctcaaaaaaaaaaaaaaaaaaaaaaaaagtgaaagaaaacaacacacatctttaataacccagaatttagtctgggtaatatcaacgtgataaggccagggcgacatggagacccaagtatatgagagtacgtctcagtctctgtcccactggggcacagatgggaatctccattatttttctaatgaacaaaggtcaaagattttatgttaatcattataaaatctgttaataagggaagtggtaagatgttaaaattgactccgttgacaaattgactaactctaatagattaaatgaattagggcttttatctgcttgtcccaggcagaaaacagtagggccaaaacagaagtcaataaccggtggataattttgtctgacctcatgaatattgaatgcttcatgaatactgaatgcctcatgaatattgaatgtcttatgaatactgaatgccttatgaatactgaatacctctctgatgctcccattttctctccacagtctactggctcatgtgtctcacaggctactggcctgtctgctcatttctcttattttctatggatgagttgaatactcttagatactcataaacaatactgcagacacaccttacactttgtcagctacgggatttgttagttttccacattatgttgattctttccttctaggacttagagtgaagacacattggacctttcatgctatctaccacttgggtcagttatgaagctttatctctcagttccaaattcaatatttacgttccgctttataatattgaggctgggaccctgcaaatatgatgttcccattctctgctggctttatattctgccaaaggtagtacaagagggaccatggcagacaggatgagggagaaggtgatttcctgccatttgcttgctgttgctgctcagccgcagtgcttctgcaactgcaaagctgctattggttctcatcagcaggttgctttggagtctcactgcccgccttcacaggtgccagtagcaggacagcagcactccacctcagaggctgaggtccagctctgcacagcccctcctgaacttctgtaatacgtagcaaaattaatgggggagggtttataaatgacttttatacttgatttttttaataagagatggggtctctgtcacccaggctggagtggagtagcacaaccgtagtccactgcagcctcaaactcctgggctcctcccaccccagcctcttgagtagctgggactacaggtgcatgctaccacacccagctaatttttaaattttttgtaggagtcttgccatctttctcagactagtttcgaactcctgggctcaagtgatcctcctaccttggccttccaaacagctaggattacaggtgtgagccactgcacctggcctatagttgattcttatttagtgttttgctcctaaaagtaatgttcaataaacatatacacacaagtcctcacttagtacatgacctgaacatttacccacatgcttcattaaagtgttacaaattaagtaagaagagtggtatatagatgtattttcttgtaatggcatatcataaagtgggtcaattaattatattagctctacacgtcttaaatcataactttattgcttttggtaatttaataagatgtcctctataatttatttctcagtggttttctttttttaatatccttgaaaaagcatgctaacacttttatttcaattgaaaaagtaggtcagacttttcctgacgaaaaatgtctaatttggttcactggtttgacaaggaggattagggtatatggaggacatctgccataaatagaatgaactacatcttcaaggattcaatgaaaacacatttaaaataatagtataataaaagcattttatcaaaaatattaaattggccccaaaaagcaatgaaattaacaacattttaatgttctcaaccccctcaaactatattagattaaataaggtgacagagaatcagggataaacgacagtcccttgataaactgagacaaggacagcctcttagtaaatgttccagaaattgagactgactggataacacatcctttggcaagtcaagtagtttctaatcctttgctttcaaaacacttgaatgaaaaaccgagttgatagctgataaagcattaaactaatttttacagttttaaaatttcagatcatcatcggatttaggaactattactcagaagagttcagaacacaattgagggccattgctatactatacctccttatctacatattcatgcaaacaaagtttcctaacatggtctataaaaatgaagagaaaaatatacttgagactgaagcctgcctcactggagctgagtcctcctgttccttgagtgtgggaaccaatcggctggaaaaacagccccactcttctcattaacgaggcagtttcaatcaaatgtgtttatgtgttaatagttatctatcagtttgtaacatacatatgttttctgaaaaactgaagtgatactacttgtgaaaataactcaggagatattaaaagcttttgatcacaaaataaattttaaatttttgaccccatttaaagctttttgttgtagagaagtagggcgaggtaagcacaaaagacttccaggaggcaaagtagatggcactggggtcaaattttgtgacagaagccgaatcacgtccaggaacgaccaaaacttccaaaggagcaaaagctagtccttttgcgggggcgcaggcagaagcggcggcagaagcggcggcagaagcggcaggcggaagcggcaggcggaagcggcaggcggaagcggaaggcgtccatctttaccgtgttcagacccggatgagtcctagtccccgccacacacaggtcgtgggttctcctttgagagtgaccactggttcctagagcttttcctaaactggagacggatcctgccctgggggtctcagtcaccgcgaggactcgagggtaactgccagaggtcccaggtggcccgaggtgatgccgggcgcagggaggggctggggcggagagagggctggggtttggggccgtgtcggggatgagtggtgaggggtgcccagaagggggaggcagaggttggtgtggccacggtggaaggagccacaaacgtggacatgtaaaggaggaccaaaaggtttttttttgtaaagatcaatatttaggacagaaatcacaacctttctataaaacaaaacaactgtataatttaaaaattgaattgtgagctaaacgcatatgaggggttacgggttttcaaaattcagagattaggagcaaaaccaaaaacttgtagcccgcttccctgtgagcctcttctccagcccagcccggctgcaggactctggggctgccttgaggacggggtgctatttctcaggtttcgtctgcaaaggggtaagtcaccccaaaccagagcactcagtggtggacttacagccaatcctgagcttctcaagacactagagtgcaccccagcctgcctgcccccgaggcctggcaccagccagtgcggcaaaccagcaggcagggcactgaatgtcgtctgagctgcagggcccttcctggggctgggggtccaggccagagcctctgtgctgtgtgtgtgtccttactgtccacgcccgagcctcatttatatggagaacacatttcttctcagaaaagcaaacctcaagcagttgaactggagaatgaggacagaagggcttatgcagagccgggatattttttacacaaaatcagaggagggcgaccttcaaactattatttgtttttctcctttggcctggaactaatcagcttagcatggatgcctgggtgtcccggtgagatagcgaacccatctcatttgggtgtttaccttttataaaagaaaaaaaaatccatttcttatgagtacattgttatttattctagaacttccctcataaaccgtcagttcatgctatgtaatcctataaagtagtttatttttaaaaatcgttgaaaggataagcagaagatcgcctcttcctggcatgtgtcaaattgctttatatgtagctattctagagcaaaaatgctgactgtccgttgaatattgtcacttgccaagcagagagctgcgcacccctttcacccatctgtgggtcagtatgcagtgtatttggggatatgacacagtttcttatcgcttcccatcacctgtcctgtgtgaattgaggcggaagtaatctcttgaggatgacctgtctgtgtttaaattgaagatgaatattgccatggacaaatctgatttgatcattgaagggacaagcctctgttttagaattcattgtgttgtcactcagttttgctgtgattgcctccttggtgcctcctctttctgcgacaaaaccgagggaaaaaataggtggggggaactgtgctgcaggtacttttaagtggattcaatttacctctgtttaagtagtagagaaatatgtttgggccctggagagaaaaatgccctggataatttgcttataaaccaggcgcatgcctggagtgaccagtgagtgtggcagcagccaggaggggccaccctgttgtccctgcctcagggcaggctctcccaccccagctccttggtggttcaggtgaccttgtgcatccctcatgtcaagcccttgcccaggcaagcaggggtggggctggagccctgggattcacacagggcacgccgtgcaccatgaggtcagtgacatcataacagaagcctggcttctcagacccatccagccccaggaatcctgaaagtgggcagaccttcagggcactgggacaatttggagggaagggaggggctatctcaaggaaccctgcagtgcatgtacctctcagggagaaacgggtgacagtggaagcgccctggtctggggatcaaggtacctgggcttaaagctttgctcccatatacctcagtcagcctcctcctctgcaaaacaaagacagtaaagcctggccacccaccccttgcttggtcttcagggtgtcaagatggaactcacactttgagtcttggctgggatggcgtttgggctggataaaggaagtacagtgaaagtagaagtggtagtcagaccgatgtgcagctgggtttgctctgctgggcagtgagaagcaagtgctgagtgactgccacccagaggaacatggctgtcaggccctgtgacccagcacctctccaccctggatgtaaactgctgagaatcaaggggtggggctcccaggaatgaggccatggcagatgaggaggtctggagtgtctagcctagtgcaagctatttgtttcccagacaaatagctcagtggagcagaatagagagcccagaagtagacccatataaatatagtcaactgatgtttgccaaaagtacaaaggcaataaaatggacaaaagatagtgttttcaacaaatggcgctcgatgttcacatgaaaaaataaaagcatgtaaacacaaatcataaacccttcacaacagctaactctaaatagatcacagaaactacaaacgacaaaatttctagaaagtgacattagagaaaacctagatggcttgggtttggtgatgactttttaggtacaacaccaaaggcaacatctatgaaggaaacaataggctggacttcattaaaattaaaaactgctctgcaaaagataaagccaagaggctgaaaagacaggtcatagactgggagaatatgtttgcaaaagacacatcttataaagggtcattatctaaaatcaataaagactcttaaagctcaacaataagaaaatgatctgattttttaaatgggcaaaataatttaagagattcctcacccaagaagatatacagatggcaaataagcatatgaaaagatgctccaaatcttatgagggaagtgcaaattaaaacaagaatgagatgccactacacatctattagaatggcgaaaatccagaacactgacaacaccaaatgctggtgaggatgtggagcaacaggaacgctcattcattgctggtaggaatgcgaatggtacagccactttggaggaccgtttgacagtttcttacaaaactaaatataatcttaccatatggtccagcagttgcgctccaaagaagctgaaaacttaggtccacacaaaacctgctcacggatgtttatagcagctttattcattattgccaaacttggaagcaaccaagatgtccttccttcagtaagtgaatggataaatgaaacgtggcacatttgggcaatggaatatcagtcagtgctgtaaagaaattagctagcaagtaatgaaaagatgtagaggaaccttaaatgcatgttactaggtgaaataagtctatctgaaaaggctatatattgtatgattccaactatatgacattttgaaaaaagtcaaaactgtggaaacagtaaaaagactagcaggagtcaggcatttgagagcaggaggagtgaataggcatagcacagaggatttttagatggagttttgctcttgttgcccaggctggagtgcagtggcgcaatcttggctcactgcaacctccacctcccgggttcaagtgattatcttttctcagccgcctgagtaggtgtccaccaccacgcctggctaattttttttgtatttttagtagagatggaatttcaccatgttgacaaggatggtctcaaactcctgacctcaggtgatccacccaccttggccacccaatgtgctgggattacaggcatgagccaccgtgctcagccagtataataagatttaaagagaaacatcaaaacattaaaaagtgggaggatgaaggtaaaatgtagagtttttattcgttttctctttgcttgtttgtttatgcaccagtgttaagttgtcatcagtttaaaataatgagttataagatattatttgtaagccccatggtaacctcaaaccaaaaaacatacaacagatacacaaaaaataaaaagcaagaactgaaaacgtaccgcaagaaaaaatcaccttcactaaaagaaagacagaagggaaggaaagaaggaagatgagagcacagaacaaccagaaaacaaataataaaagggcaagagtaagtctttaacttatcaataataacagtgaaagtaaatgaactaaactctccaacaaaagattaaaaaacaagacccaccagtctgttgcctgcaagaaacacacttcacctataaagacacacagtggctgaaaataaagttatggaaaaagatattccatgcaaatggaaaacccaaaaaagagcaggaggccctatacttacgtcaaacaaaataaatttcaagacaaaaactataataagagaaaaagtaggtaattatataatgataaaggggttaattcagcaagatgatataacaattgtaagtacatatgcacccaacactgaagcacccagatatataaaatattattagaactgaagagagagatagaccccaatacaataatagctggagacttaacaccccaccttcagcactggacagaccattcagatagaaaatcactaaagaaacattggacttaatctgcactgtagaccaaatggacctaataactgtttacagaatattttatttaatggctgtggaatacacatccttctcagcacgtggatcattctcaagaccgtatgttaggccacaaaacaagcctttaaaaattccaaaaaaatgaaagtatataaaatatcttctctgaccacaatggaataaaactagaaatcaataatgaggaattttggaaactatacaaacatatggaaattaaacaatatgctcctgaataagaacaaaaaccatatgatcatttcaattgatgctgaaaaagtatctgataaaattcaacatccctttatgattagaaaaaataaaaaataaaagcgatgtacaacagacccatagctggtattatactgacggggaaaaactgaaagcctctcctctaagatctgaaacaagacaaagatgcctcctttcaccactgttattcaacatagcactggaaggcctagctagagcaatcagacaagagaaataaataaagggcatccagattagaaaagaaagtcaaattatcattgtttgcagaggatatgatcttatgtttggaaaaacctaatgactgtgctgaaaaagtattagaactgataaattcagcaaagttgcaggatacaaaatcaacctacaacagtcagtagcattcgtgtatgccaacagtgagcaatctggaaatgaaatcaagaaaataattccatttacaatagctacaaataaaataggaagaaacttaaccaaagaagtgaaagttctctatggtgaagactataacacatcaatgcaagaaattgaagagaacacacaaaaaaatggaatgatgtttcatgttcatagactggaagaaccagtattgttaaaatgcccatacaacccaaagcagtctacacactaaatgcaatccctctcaaaataccagtgacattcttcacagaaatagaaaaaaaaatcttaaaatttatctggaaacacacaagacccaaaatagccaaagctatcctaagaaaaaaatgaaactggaggaatcacattacctgatttcaacttacactgcagagctgtagtaaccaaaccagcatggtaccagcataaaaacagacacacaccaatgggacagaatagagaacccagggctggttgcagtggctcatgcctctaatcccagcactttgggaggccaaggcatgcggatcacctgaggccaggagttcaagactagcctgaccaacatggtgaaaccccgtctttactaaaaatacaaaaaattagccaggtgtgagggtgggtgcctgtaatctcagctactcgggaggctgaggcaggagaatcgcttgaacctaggagtcagaggttgcagtgagccaagatggcaccactacactccaacctgggtgcaacagagtgagactccatctaaaaaaaaaaaaatagtgaacacagaaataaatccatccatctacatacagtaaacttatttttgacaaaggtgacaagaatatacattggaagaaaggacaatctcttcaataagtggtgctgagaaaaaactggatatccttatacagaagaatgaaactggacacctatctctcaccatatacaaaactcaaatcaatatggatgaaagacaaagacaaatctcaaaactatgaaactactaaaagaaaacactgaggaactctccgggacactggactgggcaaaattttttgagtaataccccacgaccacacgcatccaaagcaaaaatggacaaatgggatcacatcaagttaaaaatctcctgcacagcaaaggatacaatcaacaaagtgaggagacaacccacagaaagggagaaaatatttgcaaactatccattggacaaaggattaataaccagaatatataaaggggtcaaacaactcaataggaaagctaataatccagtttaaaaatgggcaaaagatctgaatagatatttctcgaaagaaggcatacaaatggcaaacaggcatatgaaatggtactcaatatcattgctcatcaggtaaatgcaagtcaaaactatgagatatcatttcacctcagttaaaatggcttttatccaaaaggcaggcaataatgaatgctggcagggatgtgaagaagagaaccctcatacactgtgaggtgacaggcaaaggaaatgtaacatacacataattggaatccccaacaaaatattggaaaaatggacaataataaatactaaaaaagagtaagtcaagaatgtcttccacaatcctgtgcctgcacatgtcatccacaggcccaagggctagccagccctgcctgctgccaccaccactagcacggggggcctgagggtgcacctgcttagcccatcactggtatcatcaacacccatgtaagatgcccaggggttcaatgaccagtatgcaaagggccttctgccaccacagccagtgcctatgctgccacccagggtaatgaggactagcttacacagcacttcagcctccagcaaagcatcaccacagcctccagaaacagccacagcctaagctaccgaggaacttgcagataccactgacgttgattacagccacagaaatcatacagagactacattacagcacccacttagaattaaagccaaagtaccctacccaactgacactatggatacaattataggaaaagtatttccctaagaaagctacttcataaaattggtagaagtgactgttacaacagatgcacagttatcaacctaaggacacaggaaacatgaaaaagcaaggaaacatgacagcttcaaaggaacacaataattctccagcagcttcaaaggaacacaataattctccagcagcagaccccaaagaaaaggaaatctgtgaaatgcctgaaaagaatttcaaaataataatcttaagtcttagcaagatatacagaaagacaaaacaaagaaatcaggaaaacaattgatgatctgaatgagaaattcaacaaagaaatacatttcataaaatgaaccaaacagaaatcctgcaactgaagaattcagtgaaccaaaaatacaaccaagagcttcaataatctattatatcaagcagaagaaagaatttctgaatttgaagacagagcaacgagcactttttgtttgttttgttttgtttttgagacagaatcttgctctgtcacccaggctgcatggcatggtcacagctcactgcagcctcaacctaccaggctcaagtgatcctcccatctcagcctcctgagcagctgggactacaggcgtgccctgccacacgtggctagtttttaaactttttgtagagatggcatctcactatgttgccaaggctagtctcaaacccctgggctcaagcaatcctcccatcttgacctcccaaagtgctgcgattacaggcatgagccaccatgcctggccgaagacaaagcttttgaaataacccagtcagactgaaaaaaaaaaaaaaaaaacaatgaaaagactgggtgcagtagctcacacctgtaatcccagcactttgggaggctgaggcgggcagatcacctgaggtggggagtttgagaccagcctgaccaacgtggagaaacccagagtctactaaaaatacaaaattagccagcatggttgcacatgcctgtaatcccagctactcgggaggctgaggcaggataatcacttgaacccgggaggcggaggttgcagtgagccaagatcgcaccattgcactccagcctgggcaacaaaagcaaaactccatctcaaaaagaaataacggccaggcgcagtggctcatgcctataatctcagcactttgggaggccaaggcaggtggatcacctgaggtcaggagtttgagaccagcctgaccaacatgaagaaaccccgtctctactaaaaatacaaaattagtcgggtgtgatggcgcatgcctgtaattccagctactcaggaggctgaggcagaagaatcgcttgaacccaggagttggaggttgcggtgagccgagatcgtgccattgcactccagcctgggcaataagagtgaaactccgtctcaaaaaaaaaaaaaaaaaaaagaaaaagaaaaaacaaaagaaaaaaagaaaaatcctgtgtgacatatggaacaccaccaagtgaacaaatattcaaattttaggaattccagaaagagaagagatggggaaaggcatagaaaatttattcaatgaactaatagctgaaaatttctccagtcttggaagagatataaacatttaggtaattattatgccactttctggcttctgtgatactaatgagatgtcaacaatctaattgtcattcctttgtaaataatctgtttttttttctttagggctattttaaaatattttctgtttccttgatttctcctcctttggatgtattgggcttcctgactctttgaagaatctatccagtgtctttaaggtatctgaaaaattctcagccattgtctctttaaatattgcctctcgtgttatttctattatttccttcaaaaactcttttacatgtatgttaggttctctgtttccatcatccatggtttttcaactgtttttaagtgttttgtctctttgtttctctggactgcattctgatgtaatttctttggatctgttttccagttcactgtttctctcttcgtctgtgtctaaatctgttgttcagacatcgaattttatagtaatttgtttcctttgttcttattcttgattgtgaactgttcatttgctttgtaaatatattagttggaattatttgagtctttgacttaattttccccagaaagatttgtatttccttcaacttgtcaccttgatgggaggggggaagaggtgtctccagtataggactatttttgtaaataaatcaacttaaaatttggaccacacaaagttagactgaatttggatcatcaacttcattgaggtctgccttgagtttataaattcttggggtatttttttctccttcctcaatgttactgctgaactgtatcttggccttttggctaagatcaagtggagtatcttttcttatcagtttaatgttagggctgagacaggaacatttcctgcatgtctatgtacaattgcatgaaatttttcatttacagtttgaagtttctgctgtacaaagggtcctcttctatttttcccaccttgggaagatcctcaggcttatttcctctcctctcagccctctatcattgtcagacttgctcagtgtttgcagggttctgtagaaaacctggatttgaaagttggatttggcatggcttgtctcctggggttcttgatttccctctctttgttccttgtggtttatttgctttcatgaatgatctgtggtatgttttataagtttctttgaattcaactatttactttattcaggagggttgttcagggcatcttatctgcaatagtataagaattataatccccaaggctattcttcactttctatgtccttttggtttggatctgtcttaacctagaaaacagagcctgaggcaaggatgtaaagcattggggctttatttgggaagtgtaaacccaggactgtgagagtgaggtgcgagagattgaggcaaggaaggacctccctgcagtgatgcgatgtgagtctcaactgtgctggctgctgtttcataaggggctgaagtgacctggctcggcagatgcctctgggtcagctgcatgggaagatggctccagggattccacaggaggggaacggaatgtatcttctggctctcttctggcggctactttccactggtcagagctgtccccgcagggaatcaggggccctgggttgcattcccagcctcctcagcagctgctctgggtaccacatccccatgctgcagagtggcatctcatgaggacacagaagtggcaggtggagcatgtggctggtctgcctggctgcactgagttggtcgaggcaggtcagcaggaacctgagtggctgcttggcccacaccacagcagagccagggagaccagcaggcacacgagatgtctgctgacacagggtctaagatggcccagttatgcactggcccctgtgcatttctgggccacgacaccttctgaattgagttctcagtgtcattacaagtcacaggtttctgggtgatgttaagatatcacaaggtggactggctatgtttccaaccctttttcctctagctccgtacaccatctccatccccagcgctggcccttggcagctcagggtaaagtcatgtgaagctctgggtgcaggtcaagggctagtggtggaggtaagaggctctgctcctatggggtgggggtgaggggctctgtgcctatggagtgagggtcagggggtgaggggctctgtgcctatggggtgggggtgaggggtggggggctctgtgcctatggggtggggatgaggggtggggggctctgtgcctatggggtgggggtgaggggtgaggggctctgtgcctatggggtgggggtgaggggtggggggctctgtgcctatggggtgggggtgaggggtgaggggctctgtgcctatggggtgggggtgaagggctctgcgcctaagggctagtggtggtaagaggctctgctcctatggggtggggaggcccctggggtggataagttcagctgtggggaggcagtgggaagctggtttgggtagcgggttcagacttgtttccaggcaagggtatcagagccctgctggatttcaaccctctgacaccccaagtccaaggtcagtaccccaagtccttccagggcagaacctcaaaacccccacaggagtgatacgaggtatggaactgggttcctggacagccagccttgtaggtgtgcagagacgtcctcttcattgtgatgctgtcactaatactgtaaaagattggtcattgttcagtaggagaaaagaattctgtctgcacattacagtcgtaatgcccccactggctctaagaattcctgaaacaaggggctcatctgacctgacgtcatgtgtgaccatggagtccatctcccacggacgtgagctgagggagcagaagccagattgtgtgcccttccccacacgaagagcctcaggtcttggtagagcagcatgacattctggtgtggccataagagggtgtgggaggggcagacgggggagaaaaatggggcaagcagcgcctcctcagccccccaacccaatgacccttaacagccaccagcacccacaggagcaggtgttttaggacagccagtcgagaaggcgaggtaaacatcctctgtgtctagcctggtgacaagtttgagcttatgggacattaactcacaaagcaaagtaactgcagcacgctgtgaaccctccctgaattaatggcaggggaatctgcttcaagcagaaatgggttatctacagaaactttggatgtgcagtttagtctgaatcctccccattaatggtgagggtaatggggtggagaggacagcctcagccggccccagctgacttctctccgctgtggaagttaattctgtgatgctgtggggcctgacagcgttttttgccttcctgctttttttaaggcagacattgccaattcacctttccggagttgtcttctgttccgcgtggggagaagatgatcgagggggctgctgggagcataggggaggcaccttgtgcccacacacatctgcagatgaactcttggggtcatgcggagtgagtcctaactgtgtacggctttagagggcgtctccaactcaaccaactgctcagtgctcagagcagtcttatctcatggatacatcatgacagatgccaatggcaatgtaatcatcagaaagtattctttaaatttcttgaagcaagcaaccagaaatattaaagataagcctaaatataaggcagccctctgtaacccacccacatgacactggtgtaggtttgcacacgccttgcattccatggagtcatcgaatggttatacaagtgttatttgtggccaggcacggtggctcacgcctgtaatcccaccactttgggaggccgaggcaggtggatcacctgaggtcaggagttcgagaccagcctgaccaacatggagaaaccccgtctctactaaaaatacaaaattagccaggcatggtggtgcatgcctgtaattccagctactcaggaggctgaggcaggagaaatgcttgaatccgggaggcggaggttgtagtgagccaagatcgtgccattgcactccagcctgggcaacaagagcaaaactccatctcaaaaaaaaaaaagtgttatttgtgttattttaatgttctccctttcacttcaagtcgatatacctttctacatgcctaactttattatacttttcaatactgcctagttgtatatttaggagaggtacagtaatttactaaaacatctccattattgcacatttagtcaaatagttgttttttcgtttaagtgatgtcataatgaacatctccatggtggttttgtttcaggtgagattcttgttcttaagctgcatccccaggagtaggattactgggtcaaagcacagacacatctttatgacttttgctctgtgttaccaaaactcacaaaaatgtttaaaggattgtttgaaaaaaggttgtgttcaaggtggttcaagagaatcaggagtttcaggctgtccagaattttgtaaaccaaaaccacacccctaatgcaaagaagttatggatcttataaaagaaagaaagaaaatctgtatgacgctgagcagaaaacatcactcatcagcccgatacttatttttgccatagttgacttgtttaaaaagctgtaatttcagaagatgtgttatttttagtaataatactcagtagctgacatctactgaactcttaatgttccgggcaccatagtaagcatttaacatgaattttcacacataatctgtatgacaacccacggaatagccctattttattttacagctttggaaactggggttagagaagcaagtagccccaaatcacacaggggcatagggctgagcgtggattcacgtcagctgggctaaagccagagccggtgctttggctttatccaattgtgttaggactctgtgctactgatcaatgagctatcgatgaatatcagaaaatcgattgattaaggacacctgacagtgaggtcttaggagtcacttttcctcttggtacagatgaatacctacaacagagagaaggacaaagctgtcctgcagtgccgggctcacctgcgccaccgcctgcagcctttgcttcctgactcagcctaactcccaatgtcagaataaatgcaggagagggcagtttggtgataaaaggagaggaactatacttggaaatgatatttttctgcatatttagaaccaaaaaccccactggttcattgatctctgtgagtaaagggttaataaagctccctttctggaattgaatctgacctctgctcacctccagctctgtcccttgggaaatctgagagggagggccaccagctctattcccaggtgtgggcagcagaattccagcctcggcaaacgccgtcccagaagtgaggtcgcccgtgaaaatgctgcgttgcttggcaagagggacctgcgccaatgtcattaagattcctaatcagctgaccttaaagtagatgagcctggatcctctgggcgatgtgagtccctgacagcaggagagggggcaggaggggaaggcggggactcgaagcatgagggagactggctgctgctgctgctggcatagaaggagctggcttctgccaagaacctgagggagcccagtcgctgctgcctccccagcaccctcaggcaagacctcaggctgggcatcgccttgcctttggcctggtgaggctccaagcagagaacccagtcatcaccctcagaaacttgtttcagtcctttcggtttgtaacaatccaagcaccgcccccagagttacatgataactttcattgtctccttcactgtggaggccatgaggagcccctgcctgaaaaatcctcaagtccccatgctgagttgaaccgtacagtccgcagtagggcaggacctgcccgcctgttcgtcacccctggcggtggctgtgcggtgagtctcccgtaagcagcacataactcagcttcaaaaacccaatctcataattgtgcctttgatcagaagttgtatctatttagatttattgtgatttctgatatatttggattgtttatacctctctatattgtgttttctaatttatccttttgttgtttttttctcctttcttaccccttcttttggttgattcattctttctgcttatcccactttcactccttcacactactttgagaattatattctctattcctgttgttttggtggggaatctcaaaactttaatctactgtttatcttagagtctaaagtggcaggagcaatgctgcacgcctgtaatcctagcaccttgggcggctgaggtgaggggatcacttgaagccaggatttcgagaccagcctgggcaacatagtgagaccctgtctctacaaaatatggaggggggaaaaaaacctagctgagtgtggtggcatgtacccgtagtcctagctactcaggaggctgaggtgggaggattgcttgggcccaagaattccaggctatggtgagctacgatcatgccactgcactgcagcctgggcaacagagcgagaccccatctcttaaaaaaaaaaaaaaaagcctaaggctattcagtgtcttcagtctcttttcattcttctcaaacatccagagtttctgaaactcacgtagtttgctcataaactactcaaggtagtttgctgtaccttgtttttctcaccccagcaagcagggctattgctgttactggtgttaggattattaacacagtgagtttaactttattcatgtttatggttcccttgcttcagtatctctttttgtgtcttcaactttccttctgggattatttttcatcttcaaaggtcctttactgagatgtgtttatggtaaaccgtgttggtttttctttgtctggaagtaatctgtattttcctcttaattttgaaagatagttttgcagataacagaagtctagattgagagtattttccccaagtgctttgagatattactggcgcctcccggcacccagtgtggtaaggaagctggctctcagccttgttgctgctcttttatgggtcatctgccttttctctcctgggactcagcatcctctgtctttgttttctgcaggttcaccatcactctccaaatgtgggtttcttttgatttagcctgttgggattcactgggccttctgaatgtgaggatttatgtctggaaaatcctcacctgacatctccttgaatgtgacctctcctgcatgctttattgtctctttctagaatattctttacataaagatgaagcctgtacattctctcttctgtgtcctttcatatttctttgattttctatctctttagctttcttggctgcattctgtgtaacattatcagatttatcattcggttcatgaattatctttcaagtgtgtcaaatttgctattcatgtttctaatttcaatgatattttaatttctaattgtatttcatttttgataacatcttgttcctttgtcacacttcagtaccctctcttatttctgtaaatatgttagccgtcattactgtatactctgccttggattattccactatttgcattgtgatgagtctgattgtacatttggttgtttctgctgacttacccatggtggccggcttcctggtgcgtgtggtgcctctgtgttgtgaaatcacatttgcatgcatgggactctcaggcatccgagggtggatccctgcagaggctttgtgcctgcctttgccaggacccgagcagcccacttggaagtacattttgtgggtgtggatgctttaaaccttgaacccacttgaggatggcagtggtagaaattctcgagactttttctcttatttgctcctcttttcagagccgaggctcacgcagcaagcgtccctgccacttccccgtgactggcgggtttccctggctcactcttgagggcccttcttttgggctcctggcttcctgcagggcttctgctctgggttcctgcctcacacaggccccaggcttcatctctgtgcttgcctggggctcattaatgttcaggatcctggacagcagggatcaacaggacctgtacagacggtgctgtgcccaggtggactcacgcttctccatggcctcaggccttttgggattcaagttaccttctccccaaaaagattttcaaatgtgatgttattgggcattttcgggttttagaggctgtctgttgggaggcctcctcccccatctcttctgctgtattctggaaggggtgttcctggcccacctcctcaggattagagaactgcattgccgccgacatttgaaggactcgacacagtggcccagccttcctgttcatcttctctgtctgctttccagcttctgctaggcctgtgcaccgtggtgtgtctcctgcccgctccctgcatgcagaacgtcacttgttctacagctttccctgatgtggtctcactgtccctgtccctgtggccacttatgtgcctgtttattcatcctccatgttccctgaggagacgggcctgggagggcagaggcaggccccactcacactcagaccccaagcctgggcctactgctggccacgtggtggctcaggagaccgtggcatctgcctcctggcgcaggtggcatgtgcccgttctcctgaggggcattctctgcagaccagctcacatgctgtagcattgcggcctttctcaggagtcagcaagcatgtgtgttcgtgcaagcctttctagaaagtgacgggtggggacgtgttggcagtggggggaggggaggggccgatagccttgcagcctcttgcgggcccagggctgtccgctctccgtaccactcacatggccaccctgagggcagtgaacccggggccgtgaagctgctctggtgtgtcctgaaaaggcctttccataggagcgagaggtggccgtaatggctgatgggtctggaacgcatggtcccgcagagaggcacggctccacggcgcccccaaaatgtgagcccctccattcactcctgtcattcccgcttgtcggggccgggtcactgaactcccaggcccgcttgggctgccccccgctccctgaagactccgtggcagagggctggagtgcagggaggagatggccccagcagtggggggtctggaaacatctcccttcatcatctttggggtcccctctggacccgccatggcctccctcacactcctccgtgcaggtccaggctctgcctcacacgtgccttgcttgccacactgggggctgggaggctgggtgggctgggggtctgccctccgccttgaggagcaggacatcgaatccaccctaaactgactcagccctgccctggcctcttcttgaggtggaagcggtgtgtgcaatgggaggggtgtcggggcagaactgtgtcccccaaaattcatatgttgaagctctaacccctagaacctcagaatgtgacttaggtcttaaaaggaaataggggcttaaaaatggggattgagttaaaacggaggccttaagtcattaaattgtacaccttcaatacgtaaccttgcagtgccccagataccttaatagataaatgtttaaggcaaaggacatcagcagggtggctgggacccagtctgcctggtgtccctgtaagaggagggggtgaggatatagacacacgcagagggatggcaccgtgaggacacagggaggagacagcgtctgtgagtccaggaccatctcaggaagcagccctgcccctccttgacctcggagccagcctccaggagaatccctccgtgttggtgctgaagcccccaggctgtggtgttttctcacagccgccctgagtgactcacagcagtttgtccctgatgactctgtgctctcctggggctatgtcttggttctgtggctgagcacccctgttccctgcccttccaggctcctgctctgacagctgggtgcctgtgctgatctcctggctggggccggagactcgcagataggaagtgggtattcctgccaggagcagggcgtgcacttctgaaaacaggagggtgatcggtgcaggggaagcctggcttcatgtgctgctggaagtggatctggggatgagtgactcggcttgaatccctcaggaggtgtcgggcgccaaggtcccgagcagttcctgcttctcgtttttataacctgaggtgtcccaattagctgctgcttcagaacaaatcaccctcaaacttaatggcataaacaaccactcatttaattgtcttccacagtcctctgggtcaaggttccaggcgggctgggctcagggctctacttgcaaaatgcactttatgggcccagcttctccctgccgtggtgggggcccaagaagcatccccagtctggtggagtccccggtctggatgaccccccggtctggtggagccccccggtctggtggagccccccggtctggatgagcctctggtctggtggagcccccagtctggatgagcctctggtctggtggagcccccggtctggtgcagcccccggtctggatgagcccccggtctggtggagccccccggtctggtggagcccccggtctggtggagccccccggtctggtggagccccccggtctggtggagcccccggtctggatgagcctctggtctggtggagcccccggtctggtggcgtccccggtctggtggcgtccccggtctggtagagaacgttgaggtgagtgctcgaggggttgctcgctgctgctgggccccacggtgcccacctggcccccaggaccccaaccccacacagccctttgttagcctccccaccccatgcaccttcctccctccccagaacatctggtgaagatttgttgtaacctcctgggcccacagtccttggggctgctgcggtccgagtgtcggtgtcccccagaattcacgtgttgaaatcttacaccccagtgagctggtgttaggcctttaggtgagtgatgaggcacgaggctggagccccttgaatgcgattcccaggggtcagcacagcctcgtgcctgagaaagcagacgcagccggggagttgagacacggcgccaacacgatgtgagcaggaggccacgcatagagacgaagtttagtttcattaaatgtctttctctttggccgcgttgcgggaaaaatttctgctgctcacgagtagaaacacaaagcagacagaagaagccacttgctgagggaacccagggaagggtgaacagaggcaggcaggtcggagggccagggaggagcctggcggcccggagctaggggacaggcagggccaccttgtgaaagcagagggagcctgggggcttgggtgggtcgaccctttcttgtgctgcctgtgttcttccctgagtgcaggagagagagggagacacagagagagggagaaagaaagggagagatgggggagaaacacagagacagggagacacagagggagagacatagagggagagacagagaaacatggggagagatagagggacagagaaggagtgatggggagagagggagagacagagagactcaaagagacagtgactgaggggagaggcacagagacaaacagagcagaagggggaaacagagacagaaagagacacggaagagggtcctgggcggggccaggagctctggttttgggggcaataggactcagtacccgaggggatgtgctcggcgtttgggtggatggggggcgggtgagaatgggggaggctgtttcctcagtttggaggctccattgactgtaggagacacagtagcagagagagtgaaatgaaaactaaatcgatctcggaaggagacagggcggaagacgtggcttttgtcccgaagtttccaaaattccatgcactgcacaagtgtatttggggcagggtgtgaacgggcttccaggatcccccacctgatggagccgaaggtgcggcgtcacctgcttcaggagagcagctgcaaccacagctggccagggccccgcctcccagcccagctctcctgcctgcctgggtggtaactccacccacaggtggcagccgtggccacgtgtctctgggccacgtgattgtgtggggtcaggcgtgactcctgctgggctcttccacctgccaggcttgggggtgggagtgggaggacgtggctgttgctgtgggggcatccctcttgtcaccgtggcagaggagcctggaggagatcccagcagtgcccccccacacacacccggagcggatcccagcagtgccccccacacacacccagagcggatcccagcagtgccccccacacacacccggagcggatcccagcagtgccccccacacacacccggagccgatcccagcagtgccgcctgtgtccctggatccagccgtgcctgaggccacctcacccactgccttttgagtggtggaagttgtgctcttgaacttcaaagccaacttgggtcaggcttttgttctcttgcggctgaaaacgtgctggggtggttgtgggtgggtggcaggtgcctcaggaggtggcacagcttcgtgggcagggcccagaggtgctgacccgggaggcctcctggtgccacggggagagccatgttgaggggtctggcacggatggtgggaagcaccaagtaagtggccctgactccaagagaacgggggagtccagggctgcaggacggaagggcccagtgctgcctgtggcggccggggcagttctggcgcctcacgggaggggcagccgtggaagccccatgagcttcctaggtaccaggccctctctcggcaggacgaatctcacgtggtccttgctgcctggatggaggggagtgactaaagatggcagggacagaggcgtggcaggtcctgtctgcagggtgccgccccgaggtggagcagggggcctggcagtcccaccaggctcagagcctcccctcaccccgcgcttggctggggacatcagagcctgtggtgagggcacctgtaattcttgatgggggctctgctgggtcgggggctgcttaggcctggatgccctgattgtgcccatccccctctccctccacactgtcccctgctcccgaggggctccctgcagccctgactctggctggcaggggaggagtctgtggttggtggcgcacagcaggtgcgcagctgctgaccagagctgcccccgggctggggaactgaaggaagggctgtggagcctgaagcctgggcctggcctgtgctgcggccgcaccgctgggtgatgcaggagccactccacctccctggcaccccagcctcatccggcaacctgggagcgtgggcctcctgcccctccagggaggccctggccgtgtcctcatggggcccctccaggtccttgtggctccaggtcgggacagtggctgtgagatctgaccctcccgttccccctccaccaagtaggagaaaccccggagcatgagccctcgtccttcaccgtcccggggacagggggacccccagatgctgcacggctgacaggccaacgtggcagaagctccagcttcacaggaagccagtgaccatgagagtctgtagctgtaacgaagccacagagctgtggctttctttccccttcagctctaggaaaggttatctgccctgcacagatctccggaggcctggctgggctctgagagcatcagactgattatcgtaagaaaataatctctgcagacacattccttgctagaagcaggggacaaagcccagcttcaaagacaattccacacacgccctccctgccctgcacagctgcctgccgggtgggagcagagcccttgcagccgggctcaggggcctgggcagggacagcgtgtggcaggggcacagctgagacaggagcctcaaagcgacaccaacccgacgtgaagctacagttgaggagacacagctgcccccattcccgggcctcatctccacagtgagacgctggactctctccctgacccaccgtctcttagaacctcccctccatccggagcagttcggcagccccagggcagccaggggaaccctgccgagtgcctctgggccgccacagaccgcagagcccgcgggagccttgctcacacagcctcaggtccactgtggtcttgggggaaagccctgtcctgggacaggggagccgggggtcctggccctggaccaccatctggggaccacgttgtcacgcctgcaaagctccctgccccacccccatgtgccggctggtgttgacacctttgtagagtgggaacctgcctccgaccccagcctgcagccacagggcaggttatagaccaggtgagagggcgccgcgcccagaaccaaggagcacaagtccgcagtgcccatgagatcctcatgctggccggcgcaggagccatcctcggcctctgcaggtcctcgtgggaaaccgcgggggcacgtggggcggctgcagggtccgcaaagccggctgtttgcgaagggcgcagctccacctggaacagccgaggccgcccacgcgcttcccgcgggatcagagcagcctccacggctgttgtctcaggcaccacgggatgcctttcttcgtttcaatagctgtgggaaagcctcaatcggtcctgaaagaacccagatgtgcagcaatgacaaggccttctctgagactctagaaccttctgccatctcagacaggagggagccgtgaggcaggcgggagatttgcagtcagcaaaggacgggcaggtggggcagctgcacacccagggccctctccacggtcttcccgggcccacccctcccgcggtcctgggtcatccacctgctggcctcactctgcccacgcggccaggtcccaccggcccctgagctcaacagaccaaagctggcccgaccccacccccaagaagaatgaaacaatttttttttacctcttgcagaaaagtaaaagatcatttattcattctgtttctagatagcaaaactaagtgtcaaaagcaccttctgcacacagtctgcacacactggccggtggtcctgttcccgcaaggttgagctgtgttccagagacatgggtcctccgggtgatgaggagccgctggagggccctgagctgcacgtgctaatgattaacgccccgtccgtgctggccggtttctcaaatgcctcctgacgattgcgcacagccggacatcatttgtactgagagacaaaaggaaatcactgaggctttctgaggtgagctgggcggccgcggggggactggactcacacctgctaacggccagtccacaggacctgcccagaggctcggacacacagctgaagtcacatcccacggggagcatcctcaccaactgacaatcagcacgggtttgtaattaagggtttctgcccagccaatgaacggcctccagaaacaacctttgtggaaccccctataaaagccttcccagcgcttgccttcaggacactgctcagggctgactcagtgtacccaagctgcagtctttgtttcccaaataagcagtcattcattctacctccgtgtcaatcttttcttcgtgaacacagctggtgtcaggagcagggcttagcaagatctctcctttgagcggctttctctggaatcgggtgaagtccccacaacacagaggcccctgtgcgcgccccttctttggggccagcacctcccttcaactgaggctgatacctttatttgggaatctgggggcagttgctgcctctgtgccggcaaaggctttcagcttggaggacgttttccctgcttactggagattttcccaatggtgagtattattatcttaagtatgggactctgtgcgtctaaacctcgtaacagttgtgccccctctggactccagccccgtttatctggagcaatggacctttttacattggccaaactggggttcctttgctacaccaacctaggttttctctgaactaaattagaagaacttggttccaaaacaagggtcttagcatgtgggaagccacagagccctaggaagggggcgtgctcatggaaagatactgagcgcgaggagcgttgggtgcagctcctccagaagcgagagaacggcccgtggctatgtattaaaatatacacgtccagatggggtgcttgttttaattggcatttggaggcatctggctggatgccatcagaactctaacattgcctctctccaaaacacagcgcctgaactcacagaggctgataaagcactgaaaggtggagtcctgggcccagggctcctcctgcccctcgttcgggttgttcgtgagtttggtgtgctttggaaacagactttttaacctccagagggaaccaaattaaaaatgacacttttgtcaatagtttattaaattcaatttggcttccctctggccataatcaaaatttctgggtattcaaaattggagtcagatgaggctaaagaaaaacttggttgattccacagcaaaagccgctgccttgagtttcactgagaccaaaaaccttacagctaagataattttcccaaaaaggatgtaaatgatgttattaaagacactctgtccccagcaccccatgagccagtgttaccagaatctatgaacacgtcagacgactcattgggcaactaatgaacttacacgtttacaaaacagtattggtggggaaatatttcaagggcggccgaagaggcacaactgccttgtgctgtttgtccaaaattcaacccagcaaagacaattcggagagtcccaggtcattctgacctgccaagtggaccctctgaggtttggcaaatggacttcatccagccactgcctctcaagactgtaagtatgtcgtgatgatttgcatgttcttctcctgggtagaagcattcccttcctgatgtgccgctgcctcagatgctgcaaactctacaagaacagattctccctaagtgacaagggcatatcttcacaggtagtgacaaggagctccactggccaggtcataaaacaaatctgtgaagtctggtccacatgacagcactgtcattgtgcctaccatccccaatcttgcagactggtggaaagcacagatggcatcaactggcagaatttcaggaagcactaaaattgccccggccaaaggcacttcctctggtccttctgaatctaaggtctgcaccttttggaaactgcaagttgtcaccttttgaaatgatcactggagggccaatgcatagagtcccttctgcttttaatagtccactgatgaaaggagacatgctccagtattgtaaaggaataatgaaggctgtccacgcaagtcataccctggtcagacaatctttacacagtgtgttcccagttgataaaggcaccagacatcacaaccttcagcctgatcattttctctattggaaaagacatttacaaaaagatttccttcaacctcagtgaagagtccacatcaggtactccttacccatccctgtgctgccaaactaaaaggtgttgacccttggattgaggtttctcatttaaagaaacctctacccctgctggaattcggacaatcacctgaaatgaaaactgacccaaaagtgaagcagatgacagttgagcttgactgaggtcacgtccccaacgagggacatgactccctgggacaagtccctcccagcaacaagggacatcatcacattcaccaactgatctgtgacactttctggaggaagaacttggtcaaaagggggaaatgtgaaagaaaatgaagtcactaatgctgaggctaagtggaactgggcggctgcgggaggcctgcattcacacggctgacggccagtccacaggacgcgcccgtagacttggaccaacagctgaagtcagcccctgacggccttcacatctcccagctgggagtgcccttaagaactaacccatcagaatgggtttcatttaggatttctgcccagccaatgaactacctccaaaacccctttgtggaaatcccctaaacaaatctctccaggccgggcgaggtggctcacacctatattcccagcactttgggaggctgaggtgggaggatcacctgaggtcagaagttcgagaccagcctggccaacatggtgaaacctcatctctactaaaaatacaaaaattagtcaggggtggtggtgcacacctgtagtcccagctactcaggaggctgaggcaggagaatcgcttgaacccaggagatggaggttgcagtgagctgagatcacgccactgcactccagcctgggcaacagagtgagactccgtctcaaagagaaaaaccaaaactctcgtgtttgctttctaggacactactcagggccaccgtgactcagcttacccaaattacaatcctttgtttcccaaataaatgcttaatactattaaaagtgaacaatgaaaaagcagattcaaaacctattcaaatggttctaactcaatgtgttagtacagtcacagctgcttactgaaaacacacacttggtctacttcaggaagacgtgtggagaaagggtgaagggtgagccactgggcccagctcaccacacgacggccccctgtgcttgtgtgcgccccaactcacagtgacaacactccggccatgcctctgcgtgttggcttggtgtcatctgcattgcactggagtgaaacagggtcaggctgccaccattcacacaaactttaaaaatgaaacctttatcaagggaacatctttggactgtttttaaaacctttggaaccatgacttggagctggcagaacaggctgtggctgtggacttcagcactaccaacagtgctgaaaacactatgatttacatccattccaagttgcaagtccatcttttcttcctgcaacaaaagaccattagcttaaaaaagggagcgggttccatcatccttgcagcagctaagacaaccccttggggtccacctgggctcccagccccaccttcctgatgttcagacccagcaactccttccagggataccgcaggcactcaggtcctcttgttaaattaaatttggcctaaagctgcctccattctttgcatttctgcctagtgaattgcaacctaacgaagcatgtaaacaaactcaacctaataagtctattttgtaacaagtagctgagtctgtcataagctgccagtgggtcagaccacacccacaggtggcagacgcccagccgtagccaatcaggctgtttccgtgtctcacttccgtgttctgtctgtaagtgctgcctgcccgtgctgctgagtggagctcgctgaacctctcccggttctgagtgcaattcatgaactgttctttgttcaaataaactctaaagtttttctttttttgagacagaggagtctcactctgttgcccagacgagtgcagtggcacaatctcagctcatggcaacctccgcctcccggattcaagtgattctcctgccccagcctcccaagtagctgggattacacacatgcaccaccacgcccactaggctaattttttttttatttattttttctttttagtagagacgggatttcacgttggctgggctggtctcgaactcctgacctaaagcaatccaaccgccttgacctcccaaagtgctgggattacaggtgtgagccaccacgtccagcataaagtttttcaacactcttgaccattgcgtctcacccggaccacgcaacagcctcctcaccagcctccggcttccaggctattccctgcacagtggccacatcacaccctacgctgctcagaccctgcagcggccctcctacgcacagatcctcctgatgcatcagtggcccagctgctccatctgggacaccagcttctctccgccttggccgtatgagccctgggggcctctgtattcattgttcccggccattgcgagttatagcccccccagccttcctgagcccctcccaacctcccaccacctccaggctttctccacgcgagttctgcagcatttaccagcacctaccacacaatcttctcactggctggtcttttcccaccacaattaaactcccaaaggccatactgccatctcctatgtgcctaaaaacctggcagttttacacctgagggattctttccccaaagaggcctcccagcagtctaatgaacagaggagggctggctgctgttgatgacgaggacttacagggccccttgagcacacccaggccacactgggggcccaggggctctggcagaagtggtgtcctgatgtagatgccacagcactcgcaggccagcaggagcggcccctaccctgttcctccatgcctggtcaccatccgctttctgggagatccgaaaaggttcttccaccttccgctgtgtggcaggaaatgagtctaatgagtctacactccacagctaccaacttccataaagcagtttatttttcttaaaaaggaaggtacatggtcacagtccaaaatgttttatacagctctcagcctggaaaatgcaactgatgaaaaaggcactgtttctagaacaaatggaaaaagaataaatatgtcatcatttaccctgcacagctttgagtaacaccataggaccctgtcacacgttcagggtcaattttaaaagcttgagaagacacagcaaggtgatgtcctagactagccaggctccgaaaggaagagctgtctgtccctcctaactgtcctctctctgtcacaggtgtccatgtcactgttcctctagcagatgtggaaagtggctgctcagtgaggactcagcccccaccaacctgactgagggtcacacgacaccatggtggaaagtcacaaagggtaacgggccaagagggtgaggggggctccctgaccctgaggacccctgaggcactgctgcaccttccacggattctgtgtctagcgttgccctctttgcagatgcccctcgtggtggtggcacaaagacctaaaaatgatttctgtaaaatgggtacaaggagctccctgataaagcagctcatcctagacagccttttggagttagcgtaactgtccttcctcatttctagttctcaatagcgaatggcagacctggaggccccatgtgcacctgccagccggggcgagggcagggacggccagccgggcgagggcggggcagtcggggtgagggtggggcggggcagtcggggcgagggaggggtggccagtgggggcgagggtgggtggccagccgggcctggtgtgaggagcagagctgcaagtttcctacagacaatccactgagtgccccagagacgtcactgaaaaacttcccagtgctctgacgtgccagcagtagggcctgaactgtcatccctccacggggctccctgaggcctcaggccctttcctttgcagcaccaggtctgccttgcacgcatcccaggaggaaacacacaggcagcctcctgctgcgcggagggcaacggagagattcatgaggcccctggtcgctctgcagacatttaaaatgacgcttctccttgcaccagctcccagggaaatgtcagcccgggtccacctgacggagggcagctcacccgcctgcatctatcctcaatgcacttaaaatatgaagacatgaaaggtggctggaaaggccagagcgggagcctgacaaacactcctgcttctgggtcaccacgcgggcactgctggcaaccgagctgtgggttcacagacgctgcctgaaaacaaccgccacccccgagagcagcggagcctcttcatcagccatggcggctggcaacgccgaggacggagcccagctctagaggcgtggggcctcttctgggcctgggaccctgcgagggacggtcctgtccgcccagctcccggctggcagtagacggtgactccacggcgacagaacctgcatccacccgcgcctgtcgggtccggggagcggccctggaggatcctcctcagtaggtgatcttccagtgggtgggttgctcacacgccttctcttggtctccgcagaacctgttgtacgtcgtcttggggtccaaccccaggatttctctttcctcatgaatccgaaaagaaaatgttgagactgaggtgccaataaaaaacctgcaaaggatcacagaggttccagagtcagggagaactggcgtcacagaggttccagagtcagggagaactgagaggagcagctgagtgaaatgagttccacagttacatggaaccaacacggccgtcccccgagcacccaccagccggccgcccccttgctggcacccctcgctcaggtgccctcgacatcggcgccctgaggggctctgcctggtgctgcagccccatccacaccccacagtcagcagccgccacgctcctgtcccaccgcatgtccccctgggagccctcctctccgtcaccaaatcccaggccaggcacgccagtgcaggtcgaatacctcctgggggtcacatggtgaacaatgagagattcctactaaccacacactgtctagccagggcatggcgggtccttatcctgaggcacagtagacatcacggaggtcaaggccccctccacacacacgctgtatgggctggtggggacacccttctccaggggtttctccagacctcaggtcagcggcctgcccgttcctccggctcctgcgcagctggtctctggctctccagcggcacttcatgaacttcgtgaacaagcaaaccccagagatgtttccagagcaaatgtaacatgcacagcgctgtacacagagccacagggccagcaggccacacaggcctgtatgctgctgcggggtgcagcactggtggggagaccctcaccaccccacacacaggggcctgccagagcaggccgcgccggcccggaggcagggcagcttcagtgagctgggccgagcgcttcgcgcagctgagggcaggaggctgagagctcagtgcgaagcctccccacagcaggcttcctgggctgcggagacagcaccgccaaggtcgcagtcaaaatcccaaggccacacctgagaagcaggggtgagttcgtaactgggctcctgcacacctccgccctgacctaagaagtcagcgctgcatcctgtctgcttaacagggaaagggacccacacccagcagacagcatcacccggagcctctgtgggtcttacacaccatgcccagaacaccacaggaaatagcagatgtgtgaagaggcaccggctcagggcgctcagcattcctcgggcaggagagagacagactaacccacagagacgcacgcgtgtgcacagtgctaaccacggggaagatcattccctctactttcattttccatttaactcaaaccgtttcaccctaaccccagccttcatctcctatgcagatgggcaggcaggtctttggaggaacagaggcccaggcgtacctcccacagcaaccccagaggaatgactgcacgcagggcccacgctcccggcctctgggacgctcacggcagccccacgagaatgatcacacgagggcccacgctcccggcctcggggacgctcacggcagccccacaagaacgatcacacgagggcccatgctcccagccttggggacgctcatggcagccccacgagaatgatcacacgagggcccacgctcccggcctcggggacgctcacggatgctcaacaacacagcaacaaggacatgcccaagtccagggcacgggcaactctcagggcagggggcagacaggggcagaaaccgggaatgatgggaaaatgcgacacaagaagaggttctgagacgaggccagctatgccaacagcctgctatggaggaattctgtgcatgagaactaaaggggcaagatgaacaattaacttcagcccagggaaacactgaaccagatgctacaggagactcagacgaggaggcaaacagtatggaaatgaccactgtgaacacaggcgaccatctgctctgacaccgagtacttgggacagaagaacctttgaaagccacccgacccgctctcggccgacagtgacgtgggcaggcacctggcgtgtgcgcagatccactggtcaataatcgcaacgcctccgtccttgtagagctccagctcctcccacgtgggttcaaacctcaccatctcgggtaacagcttttttagctcttcatattctgcaaagtagaaggagagaccctttgaaccgggatcctccagtaaggacagatacgtgactctttagcagacagacatgcgtacttggcttctggttaattcgttaggaactggctccaaaggtgcagacacacaactcagctttaccctcccaggaattacagttgaagatcatgcagatcttcatggatctgggtagttccaggtctacccagaacagaaccagggatcaagaagaaaggaaagaaacgtgctccctctccctctccttctccctctccctctccccacggtctccctctctttccacggtctccctctcatgcggagccaaagctggactgtgctgctgccatctcggctcactgcaacctccctgcctggttctcctgcctcagcctgccgagtgcctgcgattgcaggcacgcgccaccacgcctgactggttttggtggagacggggtttcgctgtgttggccgggccggtctccagcccctaaccgcgagtgatccgccagcctcggcctcccgaggtgctgggattgcagacggagtctcgttcactcagtgctcgatggtgcccaggctggagtgcagtggcgtgatctcggctcgctacaacctacacctcccagccgcctgccttggcctcccaaagtgccaagattgcagcctctgcccggccgccaccccatctgggaagtgaggagtgtctctgcctggccgcccatcgtctgggatgtgaggagcccctctgcctggctgcccagtctggaaagtgaggagcatctccgcccggccgccatcccatctaggaagtgaggagcacctctttccggccgccatcacatctaggaagtgaggagcgtctctgcccagccgcccatcgtctgagatgtggggagcgcctctgccccgccgccccatctgggatgtgaggagcgcctctgcctggccacgaccccgtctgggaggtgaggagcgtctctgcccggccgccccgtctgagaagtgaggagcctctccgcccggcagccaccccatctgggaagtgaggagcgtctccgcccggcagccaccccgtccgggagggaggtgggggggtcagccctccgcccggccagccgccccgtccgggagggaggtgggggggtcagcaccccgggcggccagccgccccgtccgggagggaggtgggggggtcagccccccgcctggccagccgccccgtccgggaggtgaggggcgcctctgcccggccgcccctactgggaagcaaagagcccctctgcccggccagccgccccgtctgggagggaggtgggggggtcagccccccgcctggccagccgccccgtccgggaggtgaggggcgcctctgcccggccgcccctactgggaagtgaagagcccctctgcccggccagccgccccgtctgggagggaggtgggggggtcagccccccgcccggccagccgccccgtccgggaggtgaggggcgcctctgcccggccgcccctactgggaagtgaagagcccctctgcccggccaccaccccgtctgggaggggtacccaacagctcattgagaacaggccaggatgacaatggcggctttgtggaatagaaaggcgggaaaggtggggaaaagattgagaaatcggatggttgccgtgtctgtgtagaaagaagtagacatgggagacttttcattttgttctgcactaagaaaaattcttctgccttgggatcctgttgatctgtgaccttacccccaaccctgtgctctctgaaacatgtgctgtgtccactcagggttaaatggattaagggcggtacaagatgtgctttgttaaacagacgcttgaaggcagcatgctcgttaagagtcatcaccaatccctaatctcaagtaatcagggacacaaacactgcggaaggccgcagggtcctctgcctaggaaaaccagagacctttgttcacttgtttatctgctgaccttccctccactattgttccatgaccctgccaaaatccccgtctgtgagaaacacccaagaattatcaataaaaaaaataaattaaaagaaaggaaagaaacgaaagcattgaagctccataccctttctgacggcatctgtggccacaaacaccttgtccagccggtgggtcttcatgaggctgcggatcttcctcacggccccttccagactgggtacatcctgtctgtgaccccagatgaaatcttttcttctcaggtggactcccaggtaggggccccctagcgcggagcccagcttgacctagcaaagaaccacaaggaaatgcagaagctgacaggcgggctcggggctcatcctgggcaccgggtgggactcgagacgcagagggatgaccctttccatgtggcctcctccacggggtggctccagggctgtctaagggattcaggtggaatctcgggggcgaccagatgtctttctaagaagacagtgaagcagtattaattaccagaaatcattttatctgaggtaaagaaaaatatttaaaaagagaacagcatgtggaggctcacgctgtgaacttttcctccgagaaccaccgcagggacgtgccacaaagagttcacggatcctgtggacaaagcagctcacagctgcaaactccccgggagccagaatgctctgctgccctcttgacagtgccacctcctggctggaggccaccaacgcaaatggctacagcaaattctaaccaacaaccctgctccaaggaaggagaaagcaacagctaatcccaccacctgcaacctcctggctgtccacaggtcccgagtctgtccacgtgacaacttcactgcagcataaccagcattcgagaaagccagtgcactcaacaaaactacaaccaaggacccccccagagtccacttcactcccccgccacctccagcagagcaggtgctggaacccatggctgggagacccgaagacggatcacagcacaggactctccgcagacattccccagcagcatcccagggcctggtagccccactgggtggctagacccagaagagcaataacaatcactgcagcccagctctcagggagccccatccctaggggaaggcgaagagcgccacagagcaccccgtgggataaaagaatctgaacagtagcccgtgagttccagatctttccactgaagtagtctgcccaaatgagaagcaggcagaaaagcaattgtgataatatgacaaaacaaggttctatagtacccccaaaagatcatagtagctccccagcaatggatccaaaccaggaagaaatctctcaattgccagataaagaattccgaaggttcattattaagctactcaaggacataccagacaaaggtgaaaaccaacttaaagaaattaaaaaaaaaacaacaacaacaatatggatgaaaaatgctccagataactaggtatcttaaaggaaaaacaattgcaacttctggaaatgaaagacacacttaaagaaacgaaatacactggaaagtttcaataatagactagaacaggagaagaaagagcttcagagctcgaagacaaggttttcaaattagcccaatccaacaaacaagaaaaaagaatagtaaaaaaaatgaacaaagcctccaagaaatttggaattatgttaaacaaccaaacctaaggataattggtgttcctgaggaagaagagtaatctaaaagtttggaaaacttatttgagggaataattgaggaaaacttacctggtcttgctagagatctagacatccaaatacaggaagctcaaagaatacctgggcaattcatcacaaaaagatcatctcctaggcacacagtcatcaggttatctaaagtcaagatgaaggaaagaatcttaagagctgtgagccaaaagcaccaggtaacctataaaggaaaacctatcagattcacagcagatttctcagcagaaacctacaagctacaagggactggggtcctatcttcagcctccacaaacaaagtaattatcagccaagaattttatatccagcaaaactaagcttcataaatgaaggagagatcatctttttcagacaaacaaatgctgagagaattcaccactcccaaagccagctctacaagaaatgttaaagaagttctaaatcttgaaacaaaacctcaaaatacgccaaaatagaaccttcttaaagcataaatctcacagggcatataaaacaacgcaatgaaaaagaaagaaaacagagtattcaggcagcaactagtatgatgaatagaatacagtacctcacacctcaataccaaagttgaatgtaaatggcttagagactccacttaagagaaacagaatggcagaatggaaaaaaatccacctgaaagctgtgaggcaaaagtcttcaagagactgacctaacacataaggactcacacaaacttaaggtaaaggggtggaaaaagatactccatgcaaatggacaccaaaagcgagtacagtagtattcttatatcagacaaaacagactttaaagcaacaacagttaaaaaagatggaggaacattatataatgataaaaggatcagtccaacgggagaatgccacaatcctaattatacatgcacctaacactggagctaccaaatttataaaacaattactactagacctaaaaaatgagatagacagcaatacaacataagtggggacttcaatactccactgacagcactggacaggtcatcaagacagaaagccaacaaagaaacaatagactcaaactataccctggaacaagtggactaaaatatttacagaacattctacgcaacagctgcagaatatacattctgttcgtaagcatatggaacgttatccaagataaaccatatgattggccacaaaacaagcctcaataaatttaagaaaatcaaaattatgtcaagtaccctctcagaccacagtggagtaaaactggaaattaaatccaaaaggaaccctcaaaactatacaaacacatggaaattaaataatctgctcctgatctttgggtcaacaatgaaattaagatggaaatttaaaaattctttgaactgaacaataacactgacataacttatcaaaacccctgggacacagcaaaagtggtgccaagaggaaaattcacagcattaaatgcttacatcaaaaaatctgaaagagcacagacaatctaaggtcatacctcaaggaatgagagaaacaaggacaaacccaaacccagcagaagaaaaccaccaagatgagagcagaactaaatgaaattgaaatgaacagacaaaaaaatacaaaagttaaatgaaacaataagctggttctctgaaaagataaacaacattgatagaccattagtgagattaatgaagaagagagaagatccaaataaggtcaattagaaacaaaacgggagatattacagtcgataccatagaaacacaaaataatcatccaaggctactatgaacacttttatgcgcacaaactggaaaatcaagaggataaattcctggaaatacacaacccttctagatatagaccaggaagaaatataaactctgaacagaccaataacaagtagtgagattgagacagtaatttaaaaattgccaacaaaaaaagtccaggacccaatgaattcacagctgaaatcagacactgaaagaagaagtggtatcaattctactgaaactattccaaaagacagagaaagagggaatcctccataaatcaacagaccaatatccctgatgaacatagatgcaaaaatccttaacaaaatactagctaaccgaatccaacaacatatcaaaaagataacacaacatgatcaaatgggtatcataccagggatgcagggatggtttaacatatccaagtcaacaaatgtgacacaccacctaaacagcactaaaaacaaaaatcatatgatcatttcaatagatgcagaagaggcatttgacaaaatccggcattgctttaagattaaaaccctcagcaaaggtggcatagaagggacatacctcaagataataaaagtcatctatgacaaatccaaagccaacattatactgacgggggaaaagttgaaagcattcaccctgagaactggagcaagacaaggatgcccactctcaccacttctattcaacatagtactagaagtcctagtcagggcaatcagacaagagaaagaaataaacggcatccaaatcagtaaagaggaagtcaaactgtcactgttcactgatgatataattgtatacctaggaaaccctaaagactcatccaaaaagctcccagatctgataaatgaattcagtaaagtttcaggacacaaaatcaatgtacacaactcagtagcactgctacacaccaacaacaaccaagctgagaatcaaaccaagaactcaactccttttacaacagctgcaaacaaacaaacaaacaaaaacaaccaaaaaaacccacaaaacttgatctctacaaggaaaattacaaaacactgctgaaagaattcatagacaacaaaaactaatggaaatacatcccatgctcatggatgggtagaatcaatattgtgaaaatgaccatactacaaaagcaatctatcagtgcaattcccatcaaaatgccatcatcattcttcacagaactagaaaaaacaaaaacctaaaattcatatggaaccaaaacagagcctacatagccaaagcaaaactactaagcaaaaagtacaaatctggaagtacacaatactcaacttcaaactatcctacaaggctatagttaccaaaacagcatggtaccgctataaaaataggtacctagaccagtggagcagaagagaacccagaaataaagccaaatacttacagccaactgatcttcgacaaagcaaacaaaaacataaagtggggaaaggacattctattcaaaaatggtgtggggatattggcagcccacatgtagaagaatgaaactggatcatcaactcaaggtggattaaagacttaaatctaagacctgaaatcataaaaattctagacgataacatcagaaaaactcttctagacactggcttaggcaaagagttcctgaccaagaacccaaagcaaatgcaacaaaaacaaacattaatagatagggcataattaaactaaaaagcttctgcacggcaaaagaaacaatcagcgaacagctcccagagtgggaggaaatacttgcacactttgcatccgaccaaggactaatatccagaatctacaaggaaatgaaacagatcagcatgaaaaaacaaataatcccatcaaaacataggctagggacaggaatagacaattctcaagatacacaaatggccaacaaacgtatgaaaaaatgcttaacttcactaatgatcagggaaatgcaaatgaaaaccacaacaggatactaccttactcctgcaagaatggccataatttaaaaacccaaaaataatggatgtcggcacggatgcagtgaaagggatactgcgacactcctggtgggaatgtcaactagtacaaccattgtggaaaacagtgtggagattccttaaagagctaaaagtagaactaccatttgatccagcaatcccactgctgggtatctacccagaggaaaagaagccactatatgaaaaagacacttgcatatgcatgtttatagcagcacaatccacagctgcaaaaacatggaaccggcctgaatgcccattgaccaatgagtggataaagaaaatgtggtacatcagccataacaaggaacgaaatgaatgcatttgcagcaacctggatggagctggagaccattattctaagtgaagtaactcaggaatggaaaaccaaatattgtatgttctcacgggaactaagctatgaggatgtaaaggcataagaatgacacaatggactttggggactcgaggggaagagtggagggggtgagggataaaagactacacattggggacagtgtacactgctcgggtgatgggtgtaccaaaatctcagaaactaccactttatccatgtaaccaaacaccacctgctccccaaaaatgattaaggctaaaaaaaaaaaatgataaaataagccaggcacagtggctcacgcctgtaatcccagcactctgggaggccaaggcgggtggattacttgaggtcaggagtttgagaccagcctggccaacatgggaaaatcctgtctgtactcaaaatacaaaaattagccgggtgcggtggcacgcgcctgtgatcccagctactcgggaggctgaggcaggagaattgcttgaacccgggaggcagaggttgcagtgagctgagatcgtgtcactgcactccggcctgggcgacagagtgagactctgtctcaaaacgaaaacaaaaacaaattaattaaataaaattaaaaataaaattaaaaagaataaaaaaaaaacactgaaaagaaacacaagtgggataaaaatgaaaaaaaatcttctatattttttccccagtaaaaactgtccaagtaacttaattattgctggaacaatgaatgctattccacttggaaatagctcaaataccccataaagaacaagcgagtaaaatggcacttctatgaaagttttgtttaaaaaacgctaaaaacagacactgaaaatgcttaaaaacaatatcaagttgaaaaagcaacacatttgttgaaattacatcacagaaaaactcaaactttcagaaaacacttaaaaatatatacaaagaataagaaaaggatgattctagaccaaaacagcactgatggtgcttttgggtgagtccaggtgaacgctgcttttttctctttatcaatcaagtcaagagggaaaaaggccgaacgtgcctctgaccacctcgagctcctgcttccgcgctcctggccttgccgcgctctgagaacacctttgagtccgctgggcctgccatgactgcccgtgttactaaaggtaaagccaggccgagtgactccctgagtctgcacatgacgagggccccagggtcccggcgcctcccgagagcaggtcattactgtgactcacattccagagaggcgccgaggcatccacgcccacagacacgccaaccctgctgtgactttacatggaaggcctgagtgtggggcatctccagagagactttaccttttctctaattaacaaaagggaggggggctaccttcatcttcatccagtcctcctggaaggggatcctgtctgcgtcgtccgtggagttgagatgtctgctcctgaactcgtctcccacctcccgcaggtgcctggcaaacaccatgctgcgacgggtctgtggaaacggcgacggctcggctgagaacacgcccgcccgccacgcagccctcccggagcgggttctcctgtcgctgccaccacccacccccgcagctggaacaagcccctcagacacgtcatccacggtcgcctgagaagcagcgccatccacggtggaggctcttggagggtctcctgcatgaagccaacgcagggcaagccgcccacccctgccggctctgccagcccctgccgtgggaagctgcggcacacactgggctcagctggccgttgcccctggctggcacaactgtgtgcagctccttcccctcagtctctccccaactcgacttctagcttaggcggttagcacatcctgctttgccaaacggggtgggactgacctgcacaaagtcccacgtgagcagggactgtgtctcctgcaggcaggttccggctttacaagctgctgccctggtgaacacgtcagcaggcctgctgtgtccacgggagggggcagccacttcccgccctctgctcccactcactcacagaaccaggggtggctatgggaagtcaccccatcaatgcggaaatcaacgccaacggaaaagacccgctgcagagaatagtcccacctttcaaagctaaagagaggagaaaggaggggtctacgttccagccactgacggagtcactgactccggggctgactccagggcgctgccaccgcattcagggcctgtggcatcagaggggagagctgggtggccctgcgggctcccgaggacctggctctgcagccacgtgaggcttgggggtggcacagtcaccgcagttgcccaaatccatggcttaaaatgatggttttaatcagcaaggttcaaaaagagctgtcgactgttttaaattttcaaaagctaaataatgggcaacatacactaactgagaaaaacgctcccgaggaaacactcacatcccagtattctttccctccatagtggtcgtgaagtaggttctcggctctgtctaacatcacggacctgtttttaaacaacagaagaataaacagttataagagttaaggatgatgacattcacactctcagagcacaaactgggagaaccccgggccgaggaagcagagaccaagtctccgagggacactaaccagggcgcgttgggtggttatggctgagacacaggcaggctgctgtctggcctccacaccacggttctgagagggctttaatgcctactgtcaacgaacagaatgacatcagagaaaagtatctcctaatttgaggagtgtatttgacagtgggcaaaaggcttggaatccaggatccaccgacggctatggcaagctgcaggcgtgcctgaggaggggagggtgggggaaggttttctttgacaaaaaggagaggttcacataagctgcctggaaacaaattcactgactcgagctcaaagccggagctgcatctgttccgtggtagagacgccattcctgggcaggcattctttccacagcgtctcgtccgaattactgcaacccttgtccggtggcaaacctagtcccaggaacacgggcacacgactgaagcagcggctgtgaaaggtgaggtgcgtgaagcacgtgaggaacgtcctggggttatttcagagagccctccagctggcctttatctcagactcgcaggcaggtgcctcctcctcagtgccttccttgctccagtttgggtctgacaagtcatcctggtgcctgtgactgtcacgttacctaattccacgtgggaagtgcctctcctattccagccattgagccaaccgtctcaccaaactccccccagggctcttgatgcaaaataaaaacgaaacacacaaaatggaccgtgagcaaatagacctgaatattggggtggtaaaggctggaatacaaaaacgcagaaatttttaaggaaaaataaaaattttaattttggccaggcgcagtggctcacgcctctaatcccagcactttgggaggccaaggtgggcggatcacgaggtcaggagatcgagaccatcctggctaagacggtgaaaccccgtctctactaaaaatacaaaaaaattagccgggcgcggtggtgcatgccacaagtagccccagctacttgggaggctgagacaggagaatcgcttgaacccaggagactgaggttgcagtgagccgagatcgcgccactgcactccagcctgggcaacagagcaagactcagtctcaaaaaaaatacaaaaaacaaacaaacaaaaaaatgtaatctctacagagaaaaaatgagcaacatatctaagttggcattttatagaataacatttcaaaaggcttttaaagtgtagttttactctgaaatcaaagaaacacacacgaacagagcaaggattccacattttgctactggatccacacagatggaagctctcggccctcgtggctgcctgggaaccagccgtgcacggccactgcggggactctgaggactgcaccaagggcacacccagccatcctcttctgggtggcatcctacagttttacgccctcatggttcacacaaagactcttctacagaaacctggaaacaaccaaaagccacattttcttccatctgtacacagacaactgcaaaagaacgaggtgatgtccatgtgtcgtaatacccaggtgaatggctgggtgggaagaaagggcaaactgaaaaccgcatggagagggcacgtgtggtgattccacgtgtgtttcaaaagatggctgcatgcacaggcggccatgtgaggcgatttctggagagatgggtgtagctggattcagtgggtgcctccggccctgcttctaatgccgttttaagggctttttatgaaatgcaatactgcacttcaagacgcacattccacacgggcgcgggtagaggacattccgcacgggcacaggtagacaaactgctccaaaatgaacacggtgcagcccccacccgggtggaggaacaaggaggaagaaagcgcttcacacacttgctctgccccgtcctcaggggcctccccggcatcctcccatctctccctccgatgcacgggactgtctttgaccttcatgcacatggaacatgactacatttatctttttctttttttttactgggcattatatcttgatttctctttgttgaacacggcagcaggttgcccatcttcagctgtggatctaccacactctatccagtgcgtggctgaggggtgcacgtgttttcctggtccggggaggctatgaacgttcctgggcaggggtctgcgggtgcatgtcccgcattcagggtgcactgggttcccagggttttaccagattcttgctccaggagcagcctttgagcccctgcaggcctgtcctcccgacagcggttggtttcccgagcatgacagcaatgggggcacctgctcgcattaacagcagctgtccttactcctgaatcgcatggatcctgtgttggactcacctcaccccaggctgcccgtccctcactcgctgagtttcgtctcaattgcacggatcccgtcttggactcgcctcaccccaggctgcctgtccctcactcgctgggtttcgtctcaattgcacggatcccgtcttggactcgcctcaccccaggctgcccgtccctcactcgctgagtttcgtctcctgtatcccagagagtccttagtttatcaaatgtgctgcaggacctccctctctgaggcctgtctccatttttctaatggacaaaagttcttgattttaaagtaactggctttaccaatctttcttttttggtccatgcttttcccatcttgttgaagaaagctttctgccccacggtggtgaggctcctctcctgacggcttgatagcttcaccttcccattagggctttaacccccggaagagactttccctgggtgctgggggcagatgacctcaccgcccatcatcagcctccttttccactgcgccttttccccctgctccccggcagaagcgtttctcctaaatcaggaccatctagttggaagccccctctgggctcagctccattctaacctgtaaatgtgagtcaaaaaaactgactggcaagactgttccacaggccccaaacgtaggcagactggcttccaaaacccgaatattgtcatgaaatgaacccagtcccaggacaacattaaagctgcatctcaacaaccaaaacaattcagcctagctccctccacaacctctgagttctgtctgcaacagccgggctggctgagcagcagacacgcgggcctgtgatggagccacctgccttcacaaaggcccagagcagctgagaccatgtggtcccggcccgctggggccagcggcagctgttactgaccagggtgataccgagccagctgtgatgtgcaacaggatcgtggctgatggcctctagaggcacacacagggcacgacagcagacaaggcagcctcaacgtgggcaagtgcgaggggcacccgtgccctgctatgcctggtctatgggagacgctcacagtgcctgctgggggattcagaagacccaagggaggtgacggagagggtcccagtctgcagcaagttctaagaacgtggccatcaacaattccctccagagtttacgacatcatcaggtactgacttgtctgcaaccccagcctcctgggtggaccctcgaggcccagctcaccaggccggcgaccacttgaggcagacgcatggccaaaggtggctgcatgatcctccccagacccgtgaggcagaaaacagatcaaacagtgggtgttgggtgtggggaggggggaggtactggtaaaagctgcccaagtgctacaaatcgagaacagtctcatggtgagctccccgccgcccccagcccagctcagcccctccctgtgcacctggccgggccgagccctcacctctgtgcccctcacccgctgtccacgtcacccactgcacccactgggctgtttcgcagagacacatgcaagcacttccctaaccaccaccccccagggcccccagggtccgctgtctgtgaggtgggtgggccagggatgcgggagtatgggcggagagcccccagcccagcatgcacggagcagacgccacagcctccaggctgctcccggggggcctggggcactcaccgggctgatgtgtttctcagcagcaggggcgccacgatggaggctgagccctggacggacagacaggagacgtttagacccctggtctcctcataaccccaaaaccatcctctggaaaacaaaacccacagcagctctatcagtttattttgctttcacaaggaaaacaaatcaagtctagacacgcacacactgtggcttgctcctgatgaaacgcggctgctttaggaaaacttactgatcgtgactgcagatcgtgacattctagtaaaattttaaaagaagcccatgagtgtctctcaggctgatggaccactgaggctttccccatgataggggctggcgggatggccggggaggcagagggagccggacagaggcagccctgtgcaccttcagggccagcctggctgtgaccgtcagccaagtcaaccgcgcccttcccaagagctcacctgccatgctttagagccagctgccctggcactggacacatggaggctgttaactgacagcttttccacaggaggcctggtagtgtcagagcctttaatggcaatcgacacttgggactgacaagacctccatccctgtggcaacatccaaatgcatgaaaagacacagggaaagaggcacggggtctcagccagatgttcatcacggcccattctccaggcctcagcacaaaggggaaccgcctgtcaaggacgaggaacggtgtgggcagccacaagcgctaccaccacaagggccgccgcaacactgtcaggatgcccaggaggggacgcccagaaccctgcatcagcaaccagcatgggcagcgagggcactgcgggggaggcggttgcggccggggggagtggggggtgaagacaccgtggcggggggaggcggggtgctgcagggggggcggggggcacccacggtggtggggaggagtgggcggggggcgcctgaggcggggggggggggacgcatgcggcagggggaggtgggggggcacctgcggcagggggagcagcctcagcaggcacctgtagtactcgtgcttgtcctgggagtacaggagctgatcaatacacggccgctcgtccaccttctcttcccaggtcccttctttccacccctctgcgtaactttgcaggacgtaaacctggtcaataaagggcccaccagattctgaaagacaccaagaaaagccaggcagtgtgacagcgatcagaagctcacttacgggcatgcatcagtcaccagcagctgactcttactactgtacaccaccctattcccaaagggagtgtaggaggctcacaaaagcagagacagggcagagcacatgccatgagggcacagggccatcagcgtgcaactgcagctggcggggggtggtgtggagctggtacccgattccccggccctacccctgcctggctgcagcaggccccatcctcacaggggcccgtgtgagcccatccggccctcacgccgtggtccaggctgttccctgccaggaccactccccttgggggctcgccctccggccctctgtgaggccactgtcccctacccccctggtttcccacagcgctcctcaccccctcggccaccatctactgcactggtgtcctgcctcccccggggacagaggctcaggtgagcaggagtcgtgcctcttacccacggcccgacccgcaccaagaaggtggcactgtgacgcccaagaggtcagcaattaagatctgctcaaaggcagcaggaataaagcgggagggagcaccgcgcaggtgaagttctggggcaggaacaaagcgggagggagcaccgcgcaggtgaaattctggggcaggaacaaagcgggagggagcatcgcgcaggtgaagttctggggcaggaacaaagcgggagggagcatcgcgaaggtgaagttctggtatcctttttgctcactcatgactgggggctaagggctgcgtggcctaagggcctgaggccacagctgcgggggcttcttttaggctagtgggaggtggtgaagatcctgcacgctgggcgctatgtcagccacatcaggagctcaccgtgtgcagtctcttggcagcctcgccctaggacaggcacccagttccttccccacctcacaggcgaggaaacagctcagcaaagccccaggctggtggatggcaggtaagcgtgagaccagcatatgtgcctcagaagctcattacacagcatctgtcttcccagaccttcccaagcacttggatgcccaaggcccagacctgtccgcttccctgtcaggaaacccactggtaccaaagggaggtaaggatagcatctctgggttcctataacccaatgttcagaccgagggctggctgctagttagacccaatacccaaccacagctttcatcttccaggactcacaagcaaattttaaagtcaactcaggaaaggacgcactccaggaatgctttttacaagcagcagactttctgacttggtatcaacaaggatgttggaggttaccgcctgttgttgcatgcccctagcactcacaagactgaccttgacacagaaaacatttcagagtgacaagatctagggtgcaacgagaaccacatccttgaaaaatgatgacacgggagccacactccttggcagggagcaaaggtctctaagccccgagagtggctgtcgagtaagaactcaacagatgctggaaagcaggagcctgactcaaaactaactcattcgtcttcaaggcctctcaagtgcagcagcaaagcatcacttacctttatctcttccaaacaacgcaacacaaaaagctctaaataccttcattctaagaagagctttaattcttctcttaaaattaactgaaaagattaagcaacacaaaattaaacgagacagacctttatccctggcgctgcactgagacaccacgaagcatactccacacgcagtgcgtcttcctgaacgtaaaacagcctttcgcacagggagccgagtcctgtcactataacacccaggggtggccgctttcttagggtgtaagggcggctctaactgagggggcacaaagctcatccacttcaggtccatttccgagaaacattttgggaagctcactgcagcgtgggaaagggactgtgctcctgaacggaggaggtgctgccacaggcctcaggcagcagcactgggcactggaggatgctggtgaggctggatgcaatcgtaagcccaacctgatgtctaccttagaaatgactgcctggccccagttaagcaaccacggcctcccagcgtgccgctcggcctcacctgcgatgaactgctcatactcgatgacggggatgtttttattgagacttggaagatcaaaaaactcagaccagggaatccggacctggtggatgtcaggactctgccagtgatagaggcggccccatggaggcaggacaagcacccactcctccgtcttcagcagagtcttcaggagagaggcgattcggatatagacatccctgcgcaggttgaagccttccggggggttgacgtcatacagaagatacctgagcagggagaaggaggaccacaggtctcaaatgctgaggtttctgcacggaaaacccgactgctcacaagtctcagcgcgtggcccgactctaggcacttaacaatggttcctagtttgtgaaggcagtgagtggcctgtttctctatgaccagttacttacggagcctgtaagcagaagcagcagacatgctaacatcgttttaacaattagcaatagttcaacactaaggcagaggaatcccagtgactggaacccaagaatcagtacccacatggttctcaaactgtttggtttaaagacccctttacactggaaacaatgactgacggctggttatgtgcactatgtctattgatacgtcctatgttagacgttaaagctacaagtatttaattcagctaaaaataagaagccattacatgttaacaaaaaccacatatttaaataaaaaataagtgtattttaaaaaatgaattagaagaactgtgatgatgttcttaatttttgcaaatctcttttgggtttggtgacagctggattcccatacccgtttctgcattcaatctgttgtgacatcacagatcaagtggtttctaggaaaactccacagtgcattcatgagaagtgaaaaaggcgtataatactctggtactactattaaaacggctacaaaagctcagagatccaggacacactttaagatcactgccctagaggaaggacacaaagcgccccaaggcacagacaagtccccaaggcacagacaagtccccaagggctacagaaaccctgtccctggcgctctcctttccctgctctgcgctggttttccatactcccatcgtcgcgagtgaagctgcgtgcagcgcccaggcctgcgaacgccacgaggggccgtgcacacctctgcgtccaggcccctcccggggtccgcttggagatcccacagccacagggcggccgcgaagctcgtcttggccctgagaattcactgcggagcgcccgcccggcactgactcccggctccgcacacccaggcctggacccgtgtcacttgcaggggcctccggagccagcccacgctcagcctgagcaacccggcccccttcctgggctcccgaggctgcgccccgggcctcgcagacgaccccgcctgcagacccgggccgcagtgacgcagcctcgactacagccaacccgctggcccgaccctgcccccagcccccgccccatcccatcccccagactccagcccggccccggcccctgcccctgcccctgcccctgtcccgtccccgtcccatccttcttggccccggctcccgccccgcccccatcccatccctcgggcccccgttcctgcccccatcccatcccacccctcctggccctagcccctgccccgcccccatcccatcccatcaccctggcccctgccccgcccccatcccatcccatcgccctgatccctgccccgcccccatcccatccctcctggcccctgccccctgcccctataccatcaccctggccccttactccgccacattccttgccccagaaccctgaccccatcccattcccctgacccctgccccctgaccccgctccatcccatccccctggcccctgccccataactccgctccattccatctccctggccccggaccaccctccatcccgtgggcctgcccctgaccccatcccatctccctggcccctgaccccgccccgcccccatcccatcctctgaccctgcccggtcctggaaccccagcgttggcaccgtggacgcgcgtttaccgtctgcgggaagccgcccccgacagaatatcggccgccgattgtccgggccagaactcctggccggaggcagaagccggaggccaggacactgcccccagcagcaggaagacgaagctgagtgtcgccatggccccgggcggccacgcacttccggcggccgcgccccgccccggaaccacgccccgcccccgtgaaatgcgttcccagtagccacggcaacgcccagctccgccctccccgcgcatgcgttatgcgccatcaccggcaagcaggggcgggagggggaactgcgcgtgcgcagagtctccgccctcctgaccgcagcggctagaggttccattgcagacccggaggccgtggctgtggttcgcggcggtgctgtcgcgggcgccctggcgcagcccacgcaggggctcctgagggtccgcgaggccgggaggtccgggggtcgggaggtcccggggtcgggaagtcggtggaccctgcaggccagtggggagggtacgcgagactgggggccgggagggctgacggctggtggcgcggggcgggtccgtggggaggaggcccggggctggtaggggcgggagggctggacggcgggggcggggcggaggagggggtccgtagacggggtcggcgccgggtgctctcgcccctctggagctggggtcggggcgggagccgcgcatgagagcctgggtttctagtcggggggcgccgtcgagctccacacctgcggcctcctgggtgcccccaaccctggagccccggcgagggggcacccgggctgaggcctggccctccaaggagccctggagggactgtgctgctagggcgcggggctcgatggggtgatctggagacctggggggatccggggctgccgcccctgcgctgccaacctcccaccccgccccttctgcgaggcgttattaaaggtctggtttcgggagccaggtgcgtgcccgccgccgccgctccccgcagcctccaggcagctcccgctgttccccgagggcaccagcactggccgaccgacctggcttggggcgcggcgctggcaaacccggccttctgaggggacgccacgctgactctagtgcaggcagcccccaaaacggtataattggacgaatttcttgaaggatgccagttaccaaaaaagaaaatactaatgcttattatctgttaaatttgagatcaatttgttatcaaattttctcacacagaaaattccaggcccagagggccaagctggtgaatcctacttagagaagaaataataggaatccagccactcagacgatggacgaggaggggcacttccctgctcgatgtatgggccagcattgccttgatagcaaagtcagacatcaccagacagtagaaccacagaccaatgtctttcatgaaccaagacacagcatttaaaaaaattagcaaatggaatttatatctgcctattgtttacaaaaaaagccaaactttgtaaaatacttgaagagatttattctgagccaaatatgacccatgacacagcctcaggacgtcctgagaacttggcccaaggcggttgttttactgcttggttttattcatttcagggagacataagacatcagtcagtacatgtgaggtgtgcattggattgatccagaaagtcaggacgactccaagtggaaaggcctccaggtaataggtggattcaaagatgtttctgattggcagttggttgaaagaagttactatctgaaggcttggaatcaatagaaaggagtgtctgggttaagagaaggggctgtggagaccgaggtccttattatgtggatgaaatctcataggtgtccgccctcagaggcaatacatggcaaatgtttcctattcagaccttcaaaaggcactagactctcagccagtctcctcaggatcagaaaaagagctggaaagggaaggggagtctacagaatatgaatttccccacaagacaccgctttgcggggccatttcaaaatttgtcaaagagatatattttggggtaaaatacattgatactttgagggcctgttgtcacgtgatgctataccagcgtcagattggaacttggtgtcttgctgctatggagtctgctgtcagtctggtcagctgcacctgaactccaaagggaggtgggtataatgagccatgtccaatccccgtcccttcctggcctgagctcatttttcaggttcttcagaatccccctggtggagatgagggatccattcagtgggttggggaagcttagagttttatttttgatttacactatgtgaagcagaaattaaaatactgtaaccctgatagggttattttaaagctgcaggaatcaaggcaggttgccgtgggtaagaggatagacaggcaggtcatgtagcaggacgagctgcggacaaaacccctcagacaccaggttaaggaaggatttggctttattcggccgggagcttcggcagactcgcgtctcaagaaccgagctccccgaaaacagagttcctggcccttttaagggcttacacctctaaggggtccacgtgaaagggtcgtgatagattgagatcacatgtggttagagtgggagggggggtaatcttttaacctcaggcctggtcatcggtggcaccggctggtcttgctgctgacttcattcctgttgtttttcaacttttacttcatccttctcttcagagacaggagacagtaaaagaaatggcctctctcctctgtcagagtggagtcccgagctcccagaaatgccacatgatggacaaacgcttgggggaaaaaaaaaaaaaaggagacctcagtcggacacaaaagcaggagctttaaaagaaaaaataagagataagttgaacttcaccaaaaaataagcgtttctggtctttgaaagacacttaaaatgaaaaggcaagccatcgatggggaaaatactcagaataatggatctgacagagggctgtatctagaatatatgaagatattttaaaatccagtaatttgacataaagatggtagccagcctgacacacaaaggaacccgaatggccaatggacaggaagggaacccgtatggccgatggacagaaagggaagtgaacgtgaacatctcattggggatgccgttatcaccactggaatagtcaaaaacatggacaccaagtattggtgggtgagtggaatggcgggaacccacatacacggtcgatgggagctgcaccctttggaaatcatttcacagtttgtgctccatcctggccaaacccacagctggagtctttccaaaaacagtgacgggagtttccaccagggagtgcctcaaaccatcccgagatggggctggttgggattccagggagaggcactcgttgccagggtgatccgtccagagcacttcctaggggatctggcataaggagggctgcagtgtatcctcaggacagataggacagatagtgtatctttgggacagacggcaagatggggattccacccaggtctgtctgcagcgagttgatatgagagtttaaggaatttggaccagggctgctttgtttcagggttttgggcaatgacctaaacacctttatcagtgcctgggaatgctcaaggcccagcttgagttcaggcctgcagggaaaacctgcaactggccgggctgcagagtggtcagggcacggaaagccagaagctggggacacacctgctgtatgatccagccgttcgtctttacctgggagaaatggcaccacctggctgaacataacttcttacactcccatgagtcctcctggacaggtgctgtgacctcgtgcagccttggggaccctgacactcccacggacaggccaaggggtttgcctgggccctgtgggcacagagccccttgagatgggtttccctatgcagccccccaccccccaccggggacccatggcactgcagccctcaccccccctctagggacccacaacactgcagccctcgcccccctccggggtcccacagcactgcagccctcgccccccatcggggacccacagcactgcagccacgcccaggccaccgcctccaaacacagggccgctgctgtttctgtgaacagatacttcttgcagatgtcaatggttaatggatggggaggtgaccgcccaagcagaagccgaccctcttcatgaaggggccacaggtcaccccgaagcagaaatccatagaacagccaaggccacagcggaaccgagcaggccacgcctctgcctctgggccgctcagggccaggcctccctgaccccactggctctattgtgaggactcagggtggagctctgctgggctcagtggccttcacagccggggtccacagacccgggtcctacgggcagtactgtgctcacctagaggccacggtccatgccctgtctccagcaggcccaagtcacttgtccatggcgaaggcccggccttgcttcaggccccgggcgcgctccccctgctccccctgcccaccgtttcttcccaggtgacagaggcgggagagcaggcgagccacgtgccgggcgccgcagcagggggcactccaggctggcgcccctctgcctctccgtgggctctgacctttcttctccctgcctgggcagcctccttcaggttggggagtcttttgttgacccctggattaaagtcctaatcaggaatgacccggaagaggtcttatgaggctttcctcaagagaagaaaatctgtccctgagtatcaggaagtggcccctttccctgcaccgcagtcttctgtgaccagcggctcacacagcgaaggaggggctggcggcccccacaggccactgccccgaggccgccacgagagggcaggagagcccttcctgggagctctgtgccacggggaaacgcagccccgccaagcacagcatggatgtttccagcagggaatgaagagagaggccccagcacatgagagaagagcacactgggcggcccctgtcggagcctctcctgtccccagcgacccctgagagcaggccctgggcctctgcggcccctcccggagccactcttcaactgctgacctgctcccagctcttctgtgccccgcccagctccctgcaaaacctcacctgaggggaaggaggccctgtttgggctcagacgcagcaggtgcagcttgtggtcctggggccacacctgttagagcccatccttctacccctgctgggccctgagtgtcgtccgtccccacagaactcagcagggtcaggtctgggcactccaggccgccagccccctgagtgagccctgggccggaggtagttgtgggtcacaggcaccccagccagaacacccacagtgggtagatgtgtggggaccggatgtgggtcctctcctgagagacgtgcagatggggagaggctgggcagttctcagcacagctggagcatctacctgtcaccacctcggagcctcctggccccgtgggggcggccctgggagcagggtcggcagtgaagagcagagaaaggcagttggggatgttgccactgtcccccgagaccaccctgccatggagacgagggagctgtcccttcgcggaagggggctggccagcaagaaggacagagagtggactggccgaggaccgctgagctcaggacccaaggaggactcttctaggagacgagagagcgaacgccagggaccctgtgcaggcctgctcctccgtttgcaaggtgagttaccaggttcacgtgtttggagtttctggactcattgcggagttccacccctgcacgttgcggttccccagtaatcaaatcctggcttttgtgcctggaagtgcacagggaggggacaactttgtgagtcagtggcagggcagggagttctggttctccagagccagaggccgtgctcagaaggatttcttagcaggagccttggggcccccagtcaacacttccctacggacagcctggccagctctgtgcacggagcaggcgcccgagggtcccaggtcaccaagtgaccaagtcgtgaaggcgcccagggtttcctgggggtgcgctgatcccaaggaagccacgtgtggtcagcatgggggaggggaccagcgccccggggggcctgcagcacagcagggcctgccctcctgggtgagactggccggtgcctgtggggatctggggggctacagtcagggctctgtgctcccgagggccacgccagcccacctgccctggaacagaacccgaggcttctgcctaggggagtacctgggcacctgcctcctgtgctgccctggacacatcccagcggctgcacataggggaggcacagcctgggctcagggccagggtccactctgtggggatactagacccgggggtgacaatgccagctcagaacttccccccacacctgggctcctccagcctggcctttcctggggaagggagggcctgtccttcctcagcactgtgggagggaggcaaggcctgcggttgaagcgtccccaacacggggctccaggagagaaagcaccacatctcagggaatgaaaacagagacggggccgcccagtgcactcggtggctcggaaatcattaaagaatgttctgagcccccgattttggctgtaaaagggactggccggcttgtgaccgctcccctgtctgtgccttgagacgggagtgttcagcgttgggggcagctttccctccaagaggagcttcacaaacatccgctctctgcggggccgcctctccgtggcctggggccgctgtcggaggaaggctctccagctgccgtcatctgggaaacgtggggggcgagcaggggtcatggatggggctcactggggactgtgagaatctgtcccgcaggactttctgggatggaaacgctggcagaggtgaagcctgcgtcatgtgcttcactgaacccggctgcttatttatgttcggagggctggtttcaaggactcctcgtctccctctccagtgatagcgtcagcggaaatgcagacggggacggggctgctgggtttcctccctggaatgaagcacagccggaggttttgctgattcaccagcaggccctgaccgctgagttcagggtaacaaatccacatggatcctgagcccgcatagctccctgggcctcagcataaacatcgtaaacctccgggccctggcagtgtctgtttcatcccctccagagcaagtgcaagtgtgagatttagagattctaagaggggaagggccagaggtcttgaaaacgaccttcattcgttcattcattcgagaagtttgcgagggcctccgtgtcctgcgtttagtggggcctaggacgcagatgtgaagggcgctgctctcaggagcagacagaggtggggatgaatcagtacacgcccacctcgggcccacaggggaggatgcgcggagctgtgggtgtggggaggagacccctctgcgtcatgctgacggtgtcggcagagtcgccagcttctgcaggagcggtacctgtgggttcttctgtgacttgtttaaccgcatcttttgcccagtagttagtcttttcctgttgggacaccatgttggtagtttggaaatggtttcttccatccattgcctgccttttagctttgtcgatggtgttctgttgtaaattttggtgcacgtttaatgtgaacaatggttatgagacgagtgccatgagttcctgtgtgcctgtcacccagcccggccacaagaggtgctgggggcagtgtccacacccccctttcttaggacgcctgagtctcagatgtgacttatagggtatttcttatggcaagacggttaaaacaaacttcagcgtctcgtctgtccttctatggctgtggcttctgatgttctaatggcgttctcgtcagccggggctgagaacaaaataacatagactgtggggcttaaacagcagaaacttacttcccacggttctggaggttgggagtcttggatcaccgtgtagcatggtcaggttcctggtgagggtgggattcctggctaacgtaacgaaggctccctctcctgataccgtgtcactgggggtgaggcttcaacacaggaattttggggggacacatcagcattcactccatcacaggtggttagccctttaatccgcgggaattttgtttggggttgtgtgagatacgggtctaacgttttctttttcaaatacgtagccagttgtcacatcatttattgaaaaaggaatcttttctccaccgactgacatgaaatgctaccatcatcgtaaataaaattcccgtaaatacttgctgtctctgctgtctcagtcctgactcacgggctgagttctctttctgcacagtagcactggcattaactgtgacagctttacagcaggctccctccccgaggccgttcagaagcattcctcagcgggtcctacacgtttcctctcccatgtcaagtttagaagcagtgtcaagacccacagcagtcctgcgggagttttaagggatgcacggagtttatggggacagtttggaaaattgacattcatgtgacttagagtcctactacttgaaaatggattccagctctcaacgaatttagagctttggcaaaatttttaagatttctttgatgtccgatgtgctcatttcttggtttgttcttgagtattttgtggatttttatgaaatccacaaagtttttgttataatgaatgggacactttcccataaaatgttgtaattctgtattgctgttttagtaaacactgttgattgatgtatattgatgttacacttggtcacttgtaatagtttgtccgttcattattttgaactttttaggtaaacagtcatataattatgcaaataattatagttgtgtctctgcctttctaatatttatactttgtgtatattatcatgttggccaggactcaagcgtctttctcttgtttctgactaatgcgaatgattctaatgcaggggtttccaaactggtggccggggggccaaatccagccaatggtctcttcttgtaaataaagttttattggaacacagttacacacatttttctacatattgtctgatggctactgtcacgccacagcaatgctgttaaatagtccagacagaggcggtattgcccgaaaaacctagaatattcaccatctgagcttttacgggaaaatttgctaatatctgttctcatgcattaaatacaatgtttgttacaggttaaggaagtttctgactatttttagctttctgaatatcttgtggttgtgtgtgctttaaaattaggactaaatattaaatttaccagttgcttgttaggggcctatcttttgagatgcccaaagtttcccttttttagtctcttcatgtagtgagttgtactaacagattctctaatgttgaaccgtctttgctttccggagatagactttacttgctcctggtggattggattctgtttgttaatacttttatttttgggtaattacatccctattataaataatatgtcagcatcattgtgtgtagatgtgtgtgtgttattcttgccattagtttctcaggtttttggttaactattgatatggtttggatctgtgtccccacccaaatccgatgttgaattgtaatccccagtgttggaggtgtggcctggtgggaggtggttggatcatgggagtgaatttctcatgaatggtttagtaccttcctcttggtactgttctcgcaatagtgagttctcgcgagatctggtcgtttaaatgtgtgtggcacctccctgaccctcctgcttttgctctggccatgtaagacgcaccagctcccctttcaccttctgccacgattgaaggtttcctgaggccgccccgaaggttcccatacagcctgcagaaccatgagccaatttaacctcttttccttataaattacccagtctcaggtatttctctatagcaatgtgagaatagactcatacaactatatattacagaatgaattgtgatacttttgtctttgtctgtgcctggaaatgatagtaattcttagtaaaaattcacctgtatcaagttcttcctattgcaacaaacacaattctatatattttacatgagttaagtccttaacctggaagtcatccctgtgaactaggtattgctttcgtgtccatctgacagatgaagaggctgagagtttaagtagtctgcctaaggtcaccagccatgggggcgaagatggaatttgaactgagccgttggccttcagaggacaggttcctaaacggtcattctgtctctctgttgcagagatcagtcctgcatattcctgtaaaaaactgcctgagcttggtgcttttttaaaggatatcatttgactacttttttttttttctgtttcctgcccatgtcccatagggctaatcagattttctatttctacttgagtcaatgttatactttatattttcatttttgttgtttttaaatgttacactattttttgagatagagtctcgctctgttgcccaggctggagtgatctctgcttattgcaacctctgcctctcaggctcaagcaattctcctgcctcagccttctgagtagctgggattacaggtgtgtgccaccacacccggctaatttttgtatttttagtagagatggggttttaccatgttggccaggctggtcttgaactcctgacctcaagtgatccacctgcctcggcctcccgaagtgcagagattacaggcatgagctactgtgcccagccatactttatattttctaagaaaatcatctgtttaacctggcttttaaaatgtgtcagtataagccagaacatggtggttttataattgaaaaaacctagtgtctgcctgtgtcttccccgaggtcttctgggtggagactgggaagcaggggccagtccacaaacacacctcatgttaccgttccctgtaggaaccctcagctctgtggccatctcagattaacatccactcctcctgcagaatttgaaaggagagttgctatcaccaaatcccttcaggtctcaacatttacccaggttaccttgattccagagatggctcttaacttgatttctataaaccagtagagaatgtgtctgatggcacagaggaaaacactgtcaacacgaagttcctgaacagtttaaagagatgacacagatgttttttaaagtaacccatctaaatcactggaaatgcccctttctccctattttgtcaatggatggaaatgtgttgagaaaggtgcttattgtaagagaaacagaacagaattaaagctactaataccaattcaaaattggggaatggctgggcgtggtggcttatgcctgtaagccaagcactttgggaggcgaaggcgggaggattgcttgagcccaggagttcgagaccagcctgggcaggatggcaagaccccgtctttacaaaaaaaattttttttaattagccaggggtggtggcagacaactgtagtcccagctactcaggaggctgaagtgggaggatggcttgagccgaggaggtgagggctgcacttttaatttttttttgtttgcttgcttgtttgagatagtgtccagcctggatgacagagcaagaccctatctcaaaaaaaaaacccacaaaaaacaaaactggaggaaaatccagaaaagtaggggacatcaacaatcaacacactgtaaaactgtcatctcaaacacggtaatgtgtgcgtgcccctcgctggggctgagtgtgtgtgacactgcgcaggcttacaggcccctgcacgtttcggcgtctgtcctctgcggatgataacgtgctcctgccggagccgctggggcggtgtctgcactgggaggaagcccgttgggctgtcatcataccctgctctgtgggaaccttccagacgagacggtcacttcggggcagacatttcctaaaggggcttagaatcaaaatccaggaataaggacatggaatgctgagtggtttcacaaccaaaatagagtttatgtcaatattgaatattaaacgacaacaattaaagccagccgggactgaacagctgccagtgcgcagcctgggtgggggctcaggacaaggggctcttatggagcccctcgagacccccaggaggtggacactgcccccagctcttggtggagcccttgggctgcaacagcaggaactgaaccccaggggctttggggttaagagaagaatgtctggacgttagcggcaaaagcaggcgggtggggcagtgagcacaagcgggggtgcccctgatactggctacccctccacatctatctctgtccgggtctgcctctgtcctcggcacacggcacgcgctgctccgggggcggccgcgccacaggtgagcggaacacggttcgaggaaggtgggccgggcacagggcggcccgtggttgcaggtaccagagcttgctggagctggctgggctttgaggatcaatcacctggttctgcagatgtagaagtatgtaaagtaatcagcactttcaccagggcaggactcggatccaggccagcagctgcccagcccaaggctccttgcaccaccgtgtgagccacatactttccggataggagaaggtccagaaggtgaagtctgcgcccaggacctgcagaggtgagaggtgagaggtgagggtcaagcattccataccccgggttccctggggccccgcccctctgcacagtgacagtcgtttgggagaggtttcccacagctggccttcccttcagaccacttgagactcccatcgatggaatgttcatcctctaactgcacaattttttgcaaaccacaactttctatcttaatctcatgaaactgggaatcccagaccatgagaaagtcaggaaatggctttgaacaccggcaggcgctgcacagcgctgggggagggggacgagcctgggaactgtctctgctgaggatctcggccccacgtagcccgtccttcagaccctcatgcggttcatccccttctgtggctctttttcggagcccccctacccagaacgtcccaccccaaggcacgcagtgggtgcccctgcggggtctcaggcagctcctgacttccagtgagtcctgggcgccgcctgcaggaggtgaagacgccaggaccgtcgctcgggcctctcgggtggctctcgggtcagagggccgccctacaccctcacctgtcccagaagccccccacacccgcagctgtccactcccctccgggggcctctgctcttcccctgctgcctcccccaggacttgctcctccctcatcctccatcctcctccgcctcagcatcccgttagctcaacaccacccttcagcactgctcagccacaggcaaagcagagtaaaacccgaaaccgccccgagatccccacgtctccagtcggaccctgcttcccggagcgccgcccccgcctgctgcccggtgtcacccgcctcgtgccacccccgtggccccggccgcccctgaggctccccaggtggggggcatgtggccgcctccctgttttcgctgtgggtgatcctgtgacttcatccgccccaaactcgccggctccttggcagcaacttgatttgtcttttgtggggcaggtgctctcttcccccacgtgggtcctgctctctgtggcctccctcgaggtcacctgcaggggcctctgtaggttgcattgagaggggcctgtgggtcctgccccccatccgacactgagcgttgtaggactcacatcggggagcccctgccacgtttaggcctcacagcagccctgggggtggacgggtcccacaggttggccacagccccccagtgcctccctgtgagccatcctgaccgccagaaggcccccggtgacaccagcacagtctccctctgggttcccacacccaggccacagggcactcaggggcaggctcggcagggagtctagtccaggaattggtaccgacttttcctggcttctcgaaggttcagctctggccagggtcaggcccaggaggcagagcaaaacccaaagctccctgagacccccaccttttctgacggggcccccggggacctcggggtatggaacgcttgaccctcgcctctgcctcttttgagctgcagtctggggcaggtgtgcgcctccccgctcaacccaacaagaggctgatctaagccccggccccatgcggggctgcatccctgcagcacggaccagatgcagtcctggctgtgcccggcacctcccatctcgcagctgagggtaaccagggtggtgtggggcttgtcccagggctggcggttgctgaggagaagggacacacgtgctgactgggaaatgcaggcccggctctgacggcgaggtccgggttgcggtttccacgtcttcgtcacgaagcctcgaagtgctgcctgtgcttagcagtgaaaatatttacttggagatgttcagtttcacagaagccaggaaggggcgggggtggtgcggaagcattgttccccagagcacgcgggaggcggcccagccctcagccaggacgctcccccacctcaccctcgctgggctgtggccctggggacgccaccactggcctcacaccgtggagcgtggataggccgctctggcctgtctgcaggggaaatggctgtcacttccatcagagatgacggacacagcagggcctgtctctgccaaaaccagagtcgaggcagtccccggcagccggtgtatggggaacccctcagcttccgtgtggagggtcagggaggctggatggcttttccttccgttcctgtaggcccgaagccttccccggatgcactcatgaccggggcctggccagcaggcgtccgggagtcagcggctgcttggggaaccagggccccactcacacgcgggaaggtgatggtggcaggcagactggtagctgagagcgaaaggtgtggcgggatccgcctggctgctgctggagccccaggctcgtgaatcgcctctgcgtcccgtcccctgcgttgggcagcttcacctgctcatcctgctcggcctgggtgtttctgctcctaagcgcccccctcacggtggtcttgggaggctgatgtgagagatccccgctggctgcagtctccagggaagccggcattcggggcacacggaggtcctgccttggtgcccagccttgggacaccccacagtgaatgcctcctctccacggtctccatgtccctgagctcctgcttaggcccccagagctggcactaagggtggatgcagcagctggtgcacatgacagggacggcagagcccatccgaagggacatgccacctggaagccacctgcaccggctctgtctggtgtctgacgtgggaaggacgtgctggaagcccatgggtgtgtgggaggcccgggcctcgagccatgtcttggtgcgtgtcggggggacgtgttctgtgaagatgccgcagctgcctcacctcctttccatgtgcggggatgggtgggcagcgtccttgccaggggtgttcccggcagagggaggagagcatcacccttgggccaacaccgccaccagcagcggccggaccatggagctgagcatcagctggacccagggcagcgaggggctgtgggcggcacctgtgcagcaaatgtcagcacctggttatgaatgatgtttaacgacagaagtgtggtcacagcgaattcatcacccttggaatttgaggcatgctctgtccagcgcagtgtcagggctgagtggggcccccaaaatccatatactggatcctcaactcccaggacctcagagtgggactggatttggaggtggggcctttaaggaggtgattacagtaaaagggagtcactggggtggccctgtccagtctgactcccaagaaggagatgaggacccagagcgcacagaggggccctgggagggtgggaggagccattgactgccagccaggggggtcccggaggccctggccccgcagcacctggacagtgggccccaccctgcaggactgtgggagaatcgatgtgggacgccaagcccccgttcatggtcctccgtcccagctgccgagcagactaatctgaccgcaaggtttgggccacactgggctgggctcggctcgttattggtcagcccttgggcactgtgagttcagccagaactgcctcccacatcaaccatctccctgtaaacacggaccctcggacagccctttcctgaggcataatcccacccttcaaggtagagccctcaagggcgttcccacctcagcaactcccccagccatcacaccaaacatagcccagaccaaagccagacgctctctgagctccaaggaccggcttgggcccacaccttcccaccatgtttacccctgctggtgtcatctgttcagttccagccagaccacagggcctctcaccttccctcccactgtggctgccatcctctggcctggaccgtgtcacccttccaccctcctggctgagcttgcccaccttcttggaacgctctcacaagcccccctgccagaaggctctcctctggaccacctgaccccacaggcccctccgctgctcccctggccacacctctccgtgaggctgtccatctgtggcagccgtggtgtgggtgaatttcatcatgctgacactcctccacacctgctccgtgcctggcagtcatggtccaggggctggatgcccagggtaaagtggggaagaaggtgataggcacccagccacatgctccgtgcccacagatccctggggccagccaagctgcaggtgccctccctcaggtgagagtccactcggccttgtgattcctacagaatagcccttctctccttctcctgtgtctctccaggggccagggaggagatgctaggggcagagagccaaggtggggtctcagcctgggagcgatggcactgctgtggtttcaatgtctgtgttcctccgaaatccatgttgaaacttaatccccagcgcaacagtgttcagaggtgaggccttcgggagggttaggccgtgagggttccaccgtcaagggtaggattagagccttacgaaagggctgtctgactggccaggccccttttgccctcctgccttctgctatgagaggacacagtaacaaggggaccaccttggaagcagagagcagtcctcgccaaacaccaaacctgccggggccctggtttcagacttcccagactccagagctgtgagcagtacatttctgctccttatgagtcacccagtcacaggtaccttcttacagcagcacaaaggggccacggcagcctgggaccgcccagccccaccatgcttcctgcagatgcgagcagccagggtgccagccacacagggtgcttctcgcttttaattttactttttatttcaaaacaatttcaaatacaccaaaaagttgcaagaatagtacaaagagtacgtattcttcacctagagacctattcaggttttaccaactgtcccaataatgccttttttctttctttctttttttttttttttgagaaggaatctcactctgtcgcccaggctggagtgcagtggtgcgatctcagctcactgcaagctccgcctcccaggttcaagtgattctcctgcctcagcctctcgagtaactggtactacagacatgtgccaccacatctggctaatttttgtatttgtagtagagacgtggtttcaccatgttggttggccaggctggtgtcgaactcctgacctcaagtgatctgtccacctcggcctcccaaagtgctgggattacagggattataagacttcatgctcatcctcaacctggaacagtcctcagtctttccttgacttctaagaccttgactctgtggaaaagagaaatactgtcagtttcggtttatttcatggttagacgcaggttgtcggtggagggagctggttcatctgggttgggaggtgggcgtaccgatgtgtccactccagggggcattgaccttgaccatctggggaacgtggcgtctgcaggggtctccactggaaattccttccttctctgtcattcatgcacatttcgtggggacactcagaggtgatgtaaaaccccattcttcactccacgttcaccaccaggtttggcactgactgatgttcttgttgcctgaattaattgtgacagcaacggctgctggggggaattcctcatgcggtcacttatcaactggaattctaccggggtgggtgagctttctttttcccccatttattaattaagtatattgacatctatatagaaccacagagtctcattttatgcatgggccatcatctgttcctgtccttcttcagtttattttgttgttaagtttgtctcagcgggggacccttcaggctggcatctgtgtcttttccatccatgtttcctggcattttcttactttgcagacgcacgcacacacacatttcatctgcagattcttctacctatttgtattgggaaccctgcattccggtgctaccgaggtgaatctaataccgtgtgcgccgctgtggctgccgtcctctctacatcgcacctcccgtcagccccgccggcctccctgcatgtgctcacgtgctcggtctcctgtgcgtaaccggtcttctgacccttggggctcagaccggcctagaggctgcgtcccctaaagctgcccgctgtcctgctccaatacctcctccatggagcccagacccccaccgggcaccctccctgcctgcgtgggaaggagtgggtctttctgaattcagctttctctgaaatgagggtggagtctctggtggaaggggggccctcgctctgccgcaccctctgcgggagggagcggtgaggtgcaggctctgctggtcctagggcagctgtgctcaggccaggcaacagaggaaggggtgcctacagaggctgcagggtacctcaggccacccttgctgccccatcctcaggtgacatggggaggacctcgcagggagcctggctggtccactgtccctcctgcttcatctctcactcaggccctaggactctgccccagccaaagctagcgtgggcgattcatggctcgccgctgcggcagctgagcaccatcagaagtgaccccatttgtgactgtcttggcctgagaatgttccacgagtgagaacgtgcccctccctgcagccagtgtcccagactcccccgcagcccaggcaggggctgggctcgggcgctgacgcaacaaggagagcgcttgtctccgggcagccaggcggccagacagccggtccacttagcttcgctgctgcggccacagctgcccatggcacacaaagggcccttgttcccacccagcatgtgctcccggcgcccccccaccgacctctcccggacatgattaggtgtgggaactattttccttagggctgcatttgacatttgccgttcatttgggaggaggcgtctgaaccgaaggagccctcgccagcctcccctcccattcccatctcagtgcaggaggtttaggagcaggcggccctgacatgcctgtgaccccagacgggcctgtgcaacccaggccttcgttgccttccactcagaacaggagagtctggcccaggagggcggcgggcagagaggacgagaggaagacggagccggggtgcacaagcacacacatgcgtgcacgtgcaaatacacatcagggacacacgtgcacagacatgctccaggaacatgaacgcatgtgcaaatacacaccaggaacacacgtgcacagacacactccaggaatatgcatacttgtgcaaatacacaccaggaacacacgtgcacagacacactccaggaatatgcacgcatgtgcaaatacacaccagaaacacacgtgcacagacacactccaggaatatgcatacttgtgcaaatacacagcgggaacacacgtgcacagacacactccaggaatatgcatgcatgtgcaaatacacagcgggaacacacgtgcacagacacactccaggaatatgcatacttgtgcaaatacacaccgggaacacacgtgcacagacacactccaggaatatgcatacttgtgcaaatacacaccagtaacacgtgcacagacacactccaggaatatgcatgcatgtgcaaatacacaccgggaacacacatacacagacacactccaggaatatgcatgaacaatacaccaggaacatacgtgtacagacacactccagaacacacacagatggcagatgtgcaaatacacaccaggaatgcacacgtagaaatgcacaaaaagacgaaatgctctgtgtggaacagtgaagacacgcaacccattccctaaggacatttactcacatgttcacgcccacagcccagccggccagccccagcagagctgcggcctcatgacagcaggggcttgctgggcagtgggacttcagggtctatctctcacctgccccactcacgggctgcccgtgccctactctcgtcctcgcacagtgggacccaagatgcatttgggcacagcaggagggaatgtcctggtgtgtgaggaatggcagccggtgggagctccgtgaactgcctggccacaaacccgcactgggagcattgttgaaactgccctcaaaaccacagttgagagccgggtgggccctgggagtttacagtgtgctggggcagtggggagagcctctgataaacactggaggagattgcaaaatcgtgggtctgaaatgtggagccgaagttcagttgtaggctggggcctccggcggggccagagtacctggggcagtgcctggcaggctgggctgggcctggcgctctgttcttcctgagcccaggctgccatctgcagacaactgctgcctgcctgctgtctcgtgccgctggggggcagaaagggtcctgtggcaccgtgggcagggtggcggctgatcccctcttcccgcaagggacccttttcctgaagtccacggcactggtgccccccagcagccttggccctcctccagcttagccgcccctacatcgtgtttgacccctggagcctgtggatgggaccctgtctaagagggagtcttgtgggtgaggtgaggtcaggctcttgaggcaaggagagggtctggtctattggaggggggacctagatgacatctcaagggtccttaggagagagaagagaacagggcgcaatccagccaagggactccggggcttcccagagctggaggaggcaggaaggatccgcctggcagcccctggcgccccctggagggaggtggccccgtgacactttcctttcagactccggcctcggacctggagagcacatttctgatgctgaaagcaccaagctcatgacactttgttaccacagccccaggacacatgcagactctcaccttgacccaaaggagcgtattttattcaaatttcacaaaactgaggactaggggacattccagctgctcagagaaaagctcgtctgacttatctgtaggaagatgagttaccagtgatgagtcacggcttttaccatttccaaaaatacctgttttttcctgaacttttagttctctctaccctgatcagaaaattaaaaacaaaacaacaacacttcgtggaccagccccgacagctgccgttctgttttctccaggccagcgctgagcagagccgaggtggggagacctgggcagtgccagggctggccctgctgctgcttcctggcttctggacggggcttcctcttggctcagggccggggaagcccagcctctgaacaaagttagggtcaatatctgcatccctgccctggccaggcaccgcatctcacatgggaaagacctatttgtccttaaatgggagaggagacggaatcccagaagggggcagtgacccaactaaggtcaaagggctgcccccgggaaaccagccgcttctcatccccaaggcagcctgcccgccctggagagcccgggatccccagatactgtcgacgaaaggggcagggcctgtgagcgacgctggccttaggcctggactgcaaggggtggccctggctagagatgggactgcacacccttccaggcaccatcctgggtaatggagacactctgggaacacgtatgtgcacatgcacatgcttacacacacatgcacactcatgcaattacacatgcatacacagccatgtgcacacacacatccatacacacatccatacacatgaacacacatccacacacatccatacacgggtgcacacacttgcagtcacacatgcacacacagccatgtgcacacacatccacacgtgtacacacatgcaaaacatgcatatgcagtcatgtgcccacacatgtgcacacacatatacacacatacaagcccccacacactcagcatgtccacaggtggaggtgggtggggagggtgttctgggggagctgggcaggtgggggcagctctaggatggcggtgcccgagctcagcccggcctctgcttcctaggtgccaccctaaggaccaaatccccagaagccaggtgaggacatcggagaaccgggctgctccgtagcagacccatagaccctgatgcatggctgggcaccctggcctgtcccagagcctgcagaagggcggaagcctagacaaactcatccgcttctgctgtcccaagatgactttcagcccaggtcagcccaggtaagtccgtgtccaccagctgcccggtctgctctggaggcagaggcttgcagttccgggagacagacccgccacctggcagaggttgtgggaggcttgtcaccgttggttggccccctggcacctgcctctcctcccagggagcagggatgagtcagctccctggcccttggacttaggaagcctcagatggctctgagaaggctcctccagggcttcagaggcacccttagaggcttagagtctcctgaagatgcgagataggcctttgcccaccagcccatcacagagcagtggctcatgcctgtaatcccagcagtttgggaggctgaggcgggcggatcacctgaggtcaggtgttcgagaccagcctgaccaacatggtgaaaccccatctctactaaaaatacaaaagttagccagacatggtggcaggtgcctgtaatcccagctacttgggaggctaaagcaggagaatcgctggaacttgggaggtggaggttgtagtgagcagagatcacgccattgcactccagcctgggcgacaagagcaaaacttcatctcaaaacaaacaaacaaaaaggtagaggaagggagaattatctctctgcctgactgcttgagaggtggcaccttctcctgtcctccagctgggacttgaacccacagccccactcatgtgcaggccttcaactcaaactggaaccacaacaccggctctcctaggtctctggcttgcagatggcagatcgtgaggcttttcagcttccaaaatcatgtgagccaactcctcagaataaacttctctctttctctcatgtaaccacacacatataaacatgcatgtgcgtgttttcctgccctctcatctctgctccgttgacttatttcgctattcctgcttcatttactctagttttcttaggcatgtccattaacgcagcttgtccttcttcgctttttaaaatagactttactttttagggaaggtttaggttcacagtaaaatcaagcaggcagtacagagttcccatgcaccctctgctccaccacaaacatgcagcctccctcaccatcaacacccacaccagagtggcccaggaaaacgtgtacacatgtgtacacacacacacacacacacacacacacacacacagcatgtccacaggtggaggtgtgtggggaggatgttccgggcccagtgacagcacgaacacatgaacccatccatccatccatccatccatccatccattcatccatccatccatccatccaccaatcctcttggctctgcttctctggagagcactgtgcacacagatgcacacagatatcttcacttggtcttcaaccccggagcacaggcagtgcaatggactaaagatagccttttcaacaaatggtgctggaacaactggacatccacatgcagaaaaaacaaatgaatctagacacaaaccataaaaccttcataaaaattaactcacaatttatcacagacctaaatgtcaaatgcaaaactataaaactcctagaaggtatcgcaagagaaaatctagatgacttaggatttggtgatgtttttaaagtacaacatcaaaggctgatccatgaaaaaatatcagtgataagctggacctcattaaaattaaaaccctctgccctgcaaaagacaaagtcaaaagaatgggaagatgagccacaaactgaaagaaagtgtttgcaaaatacacatctgataaaggactgttatccaaaatatataaagaactcttaaaactcaacagtaagaaaacaaacaacccgattaaaaaatgggcaaaagacctgaacagacacttcattggagaagatgcacagatggcaaagaagcacatgtaaagattgtaagaaatgcacctaaaacaacaatgagatgccaccacacacctgttaggaagtcagattccagaacactgaccactgaatgctggtgagggtgtggagcaaagtttggcattcactcatcactggtgggaatgcagaacagcacagctactttggaagccagtttgcagtttcttacaaaactaaatgtgttcttactatacattctagcaattacatttattggcatttacccaaaggaagtgaacatttatttccatacaatcacctccatgcagatgtttatagaagctttattcataattgccagaacttggaagcaaccaagatgtccttcagtaggtgaaaggggtaggtggaccgtggcacacccagacagtggaatatgatgcagtgctagaaagaaatgtgctgtcaagcagccaggagaaaacatgcaggagccttgactatgtattactacgtgaaagaagccatgcagagaagtctacagacggtgtgattctaaccatgtgacactctggaaaaggcaatatcgtggtcgccagcgctcaggaaggagggacagacaggcagagcccaggggatcttcagggcgcagaaccgctctgtgtgggactgcagtggtggatccatgccattgcacatctgtccaaacccacggcatgaagagcaccaagagcgagccctcgtgtggaccagggtctttgggtgctgacaatgtggccacgcaggctcatggcttgtaataaatgggccgctccggtgtgggtgttgatggtgagggaggctgcatgtttgtggtggggcagagggtgcatgggaactctgtaccgcctgctcgattttactgtgaacctaaaccttccctaaaaaataaagtctatttaaaaaaaaactaagaaggacaagctgcgttaatagacatgcataagaaagcgagagtaaatgaagcaggaatagagaaataaaccagcggagtggagttgagagggcaggaaaagttccacgcaactgtgggagtcccattcgtgataagggcggtttctcaaatgaggggtatgcgatggactccccagtacatgtgaagtcagaccctcgcaagactgaaccaagaagaagttgaatcctgaatagaccaataacaagttctgaaattgaggtagtaataaatagccattcctcccattcctcacttcattcccaaaaacatgtttcacagacagtaaaagcctaaacaggaagggaaactataagatatcagaggatgggagttcactcatgatttgggtttctgcttatctgttgttggtgtataggaatgcttgtgatttctgcacgttgattttgtgtcctgagactttgctaaagttgtttatcagcttaagaagcttttgggctgagacgatagggttttctacatacaggatcatgtcatctgcaaacaaagacaatttgacttcctctcttcctatttgaaaccctttatttctttttctcgcctgattgccctggagtcagaacttccaacactatgttgggaaagagtggtgagagagggcatccctgtcttgtgctggttttcaatgggaatgcttccagcttttgcccattcagtatgatattgcccatgggtttgtcataaatggctcttactatttcaaggtatgttcctttaatacctagtttattgagagtttttaacacgaagggtgttgaattttatgaaaggccctttctgcatctattgagataatcatgtggtttttgtcattggttctgtttatgtgatggattacgtttattgacttgtgtatgttgaaccagccttgcatcccagggatgaagctgacttgatcgtggtggataagctttttgatgtgctgctggatttggttcgcctgtgttttatagaggattttcacattggtgttcatcagggatattggcctgaagttttcttttttgttgttgtgtctctgccaggttttgctatcaggatgatgctggtctcataaaatgagttagggaggagtctctccttttcaattatttggaatagtttcagaagaaacggtaccagctcgtcttcatacttctgatagaattcagctgtaaatccatctggacctgggcttttttaggttggcaggccatttattactgcctcaattttagaacttgttattggtctattcagggattcaacttcttggttcagtcttgggaggatgtatgtgcccaggaatttatccatttcttctagattttccagtttatttgcatagagttcaaaataactatgaatacagctaacaagggaagtgaaggacctgttcaaggagaactacaaactgctgctcaaggaaaccagagaggacacaagcagatggaaaaacattccacgctcatggatagaaagaatcaatgttatgaaaatggccatactgctcaaagcaatttatagattcaatgctattcccattaaactaccattgacattcttcacagaattagaaaaaactatttaaaaatccatacggaaccaaaaaagagctctcatagctaagacaatcttaagcaaaaataacaaagctggaggcatcatgctacctgacttcaaaatatactacaaggccacagtaaccaaaacagcatggtactggtacaaaaacagacacatagaccaatggaacagaatagagaactcagaaataacaccatatgtctacaaccatctggtcttcgacaagccaaacaaaaacacgcaatggggaaaggatttcctagttaataaatggtgctgggagaactggctagccatatgcagaaaattgaaactggacaccttccttacaccttatgcaaaaattaactcaaagtggattaaagccttaaatgtaaaacccaaaactataaaaaccctagaagaaaatctaggcaatgccattcaggacatgggcacaggcaaagattttatgatgaaaatgccaaaagcaatggcaacaaaagcaaaaactgacaaatgggatctaaataaactaaagagcttctgcacagcaaacgaaactatcattagagtgaacagacaacctacagaatgggagaacattttttgcaatctgtttgtctgacaaaggtttaacacttagaatctacaaggaacttaagcaaatttacaagagaaaaacaaacaaccccattaaaaagtgcacaaaggatatgaacagacacttctcaaaaaaagacatacatgcagccaacaaatgcatgaaaaaaggcttaacatcgctggtcattagagaaatgcaaatcaaaaccacaatgagttctcatgccagtcagaatggtaattatgaaaaagtcaggaaacagcacatgctggcaaggctgtggagaaataggaacacttttacactgccggtgggaatgtaaattagttcaaccattgtggaagacagtgtggtgattcctccaagattgagaaccagaaataccatttgagaagctatcccataactgggtatatacccaaaggaatataaattattataaagatacatgcacacgtatgttcactgcagcactattcacaatagcaaagacatggaatcaacccaaatgcccatcagtgatagactggataaagaaaatgtggtacatatagaccatggaatactatgcagctataaaaaggaacgagatcacgtcctttgcagggacatggatgaagctgaaagccattatcctctgcaaactaacaaaggaacagaaaaccaaacaccgcatgttcacttataagtgggagctgaacaatgaaaacatacggacacagggtggagaacaacacacaccaggtcctgttgggggagggtgggggtggagagcattagggaaaagagctaatgtgtgctgggcttcatacctaggtgatgggttgataggtgcggcaaaccaccatgggacatgtttacccatgtaacacacctgcacatatacaccggaacttaaaaagatattagaggagaacacggaccttagaatagcaactctcccaaacaaagacgcagccccacgtggagcagaggaggagaagataaagtggactgcagcagaagctaacacaactttatcaccaaagaccccagaaaccaagtcagaaggccagtggtggacatgggaatgatagatgctaaagaatgctcagcttatagtagccagagaaaatcctggcaaaggtggaaagtgtgaaggcaccaggcatcagtggcacgcgagtgtgatctccggaggcgggggaggtgggggaggccggggcgtgaggggctgtggttatcaaagggaaccggctctcttaggggggctcttttactttctctgttactcagagcagggaccagccagctctgtcgaggcctggaaagtaatggatttaagctttgcggccacatggtccgtgcacccactctgctctgtccatgtttttctttgtatttttctccaagcatttaaacacgtgcaaaccatccttagcccaaatgcagccaaaagctcctgtgggtggagtttactgtcttacgcccgggagcggctcaaagtgtgccccaaccagcagcctgggcacccttggtgctgtaggaatgcaggtgccctggcccacccggaccctggtgtggggggggggcccacccaggcctctaagaagccgtctaagggtgccgcccaggtctttgagaagggcagccttggccaaatggtcatacctgtacacgggccgggccgcacgacttctttagagctggggccaatggaagccccctgagtgctcctcaacaggggcctggaaccccggctcttgttaaaatgcagattctgactcagcaggtctgggctggagcctgggactctgcatttctacccagcgcccaggggtgcccaggctgcttctgggacctcacttcctggccgtggtaccttcacagcaccagccactagcgtggaacttgcactgcagcttccgacagctgcagaaatgggcatgtaggtggggtgggggctgggacctgagcttgttgtctgtccctccctttctcactggggcattgaggacacacatgaaagaggcgagggggcgagaaacaatgctggcatctccatcctgggaagaggctgggaagagtgactcagtcacaaaaaataaacaacaccagcttttgtcttagaaattcaccctgtttgacttcatggattcccatcggtctgcaaggacccgggttagcctgggatcctcttctgtggctttggtgagcagatccccactccgcctcctcttaggacgcctagtcctgccgtgattggccttgggggcccgggggtgacctcaagtgtccccagccaggccgcccaccccaatctcaagaagaaacagggtgggaggaagcagggcaatctcagcacccatggcagaggaggccacggtggaggaggccacgcctggctcagcctggagttggggacgtgaggaggggctgagacggtcaccccaagacccccacttcaggccagctcagagggtccagggtgggggtacttgggagaaggcttgtgagggggtccctgtggccttcagggaatcccaccccatttggatgttacctccaggctggtcctaggggctgggcacccacaggccagaggccaaggaaccaggaagtgccccccgacatgcgcttggggagccccaagctcctccactcatgaaaaatcgaacccccccaccacctccaggtcagtcaccgtctccaggacgtgggtggctgcccccactcctctggcccccacttctctggctgagaaactccacgtgcaccaccccaggggcttcaggctcctccagaggggctccattccccttcctgccccgtcccctgatgttccttccccaccaagccctgggccatcttcccacagcctgggactagccttctggtcacctgcagtggctgccaggtgggctggggtgggggctgtccctgggtgcccaggcctctcggggacccctgcatgcactgggcatgacatggagggtgcctttccccacccagggcccaatgaacctggaggtcacagccccgaccccggcccagctccagggtgaggccgggcccctctggagccccactctggcctcctctcctgcccccacccccatcctgccccttcctgccctggccctgtgtctatctgctctgcaggccgtgctctgggagccttgaggccctgcgtccaccccctggcagttcttctaggctgggctccaggattggggcctgttacctggaggtggactggcctccctgctgtcaggcagggccattgggatgggcgtggtcacaactgctgcagacctgggtctgggaggacaagcgccttccttcccagcggcgaggttttccatgactcacttcagagccaggccaaggtcaaagggcaccggacgccggtccctcctcaggcagagggagacaggaagggacacccaggccccaagggggaagggctgctgcagtcgggacagggagcatgtgtgagcgtgagtgagggcgtgaggcctgtgtgcaggcagcaggtcaggtggacaggccggaggaatggccctgactccacagggaccccaccagacagctgattggcaatgccgagagatgctgtgctgctggtccttcctgcagggtcgtggaggagctcggccacttgtgaagctggacgggagaggacagtggtggcagccagaccggactcacatgtattccatcaacacagttgaaatgttttatgaccgcatggcagtatgttcgggtgagggtcctgtatgttttacacgacacatgtttaaacggcattctgtgagcccagaggctttgcctgccggccagcaaggtgcagtagaaaaggttgagggtcctagtctggtcccgtgtgggcactgcctgaccaggtggggtcagcaccaggatgagagccccagcctgcacctgccagccgcggtgccacgtccttcctccacttcccttcccgcagccctgggaaaccccagcccagtgggctggcaggaaggaggccggtgtgcatgtgcctgactggcccctggttggcgccaggcactctctgcaggaccctggcgccagcccgtcggaagacaaagcctggaggctattcttggagcatgtgtcacaaccccaggagcgccttataaggctctgtccaggctcaagatgctctctgagcgccagggtctgccctgacaatggcctgcagctggacgtggggccacacggccacctggctgctcctggcccgtttcgccctggggtccagactccctcctgtttcctgtgagtctcccctaagatttgaaggaatttgaccaacaccttggcctggggggacctgggagagaagagggggatggagctcagagctggccctcggcagccttacatggtgatcgtctggtcccgctaagccgcgccttggaggctctgctgtgggagcctagcaagtgtttatttttagaagctcttactccaacaccagggctgggcccaaataacacatgtattttagtggttcaaaaatacaagtttatggtaagtcattcgatgtggagaaagtgccaaaccagtgagtgcagtgagaggtttcctggggccacgggcctcctcctgcaggtggcccaggtgcacttgactagctggagcgtgtggctataatcccaggaaatgtatccctcctctcggagggactcgggctcaggagcacacactgaagatgggaggccaggacccagagtgtgaccgtcctggccctaggagggcagggcagcctttggtttgctatcagagcctcgaggcctggcactgagcccggcgtcccctggagctccctgctgcattggatcagcagctggcagacaggtgggccagcgggccgagttttccccaggactgggtgaaggaggcattgctaggaagtccccagatgcagcaggcacccagaacagccggccctccctgtcctgggagaggcatctaccccactggaggctgagccctcgccccaccaccgtggcccctgctccacatcaccatcaccagtggcttgttagagatgcggatggaccctcagtccccatcacacgggtggtggatctcataaaacctcccagaccaggctctgcagctgcggggctcagctggtggctctcgctcagggactcctgaagggcacccaagtggctcagcgcagggagggcaggaagggcaggcggctggggtggggctcagcttgggctgttggctgaggccaccccacgtggccacactggggctttgcagagccggcagcagctgggatccgagggggagcatccccagagacccaggcgggtgctgccaggccccttaagatgtaaccctgggaaccccagaaagtctgtctcacttctgctggttgagcaagtcagatttgaggagacgggactcagacgccgtgtgtgggtggggagtcatggccccctggtgtgtggatggggagtcatggccccctcgtgtgtgggtgggggctcagggtcccctcgtgtgtgggtgggggtcagggtcccctcgtgtgcatcctggggtcagggtcccctcgtgtgtgggtgggggtcagggtcccctcgtgtgcatcctggggtcagggtcccctcatgtgtgggtggggatcaaggtcccctcatgtgtacgtggggggtcagggtcccctcatgtgcatcctggggtcagggtcccctcgtgtgcatcctggggttgcacctccagaacccacatctgcacttagtcagattctggcttctctgtggctcattgaagggggagaagtcggggggctggtttcgggggaagctcacgcccctgctgagcctcaggcggtggccaaggtcctgcccacaggccagccggggagcgggcaggcggaccaggggtcagcaaactgctctgtaatgagccagagaatgaatattttaggctttttttggccagtcacaactcaactctgccactgtggattctaacctcatggcatctgtgtcacacaaggcgatgtctgccgattcctgaggttaggacggagacaccctagggggcctggttcagccaccacagccacctccaaataacgctctggggtagcgggggctggacgacggagcctcccatccccatcccgccccataacgacatcactgtcccattacttatccccacgccatgaccacccagcacaattaggaatcggaaaacgggccaggcgccgtggctcatgcctgtaatcccagcactttgggaggctgaggcgggtggatcacctgaggtcaggagtttgagaccaccatggccaaatggtgaaaccccatctctgctaaaaaatgcaaaaattagctgggtgtggtggtgggtgcctgtaatcccagctactcgggaggctgaggcacgagaatctcttgaacctgagaggcagaggttgtgacgagcagagattgagccactgtactccagcctaggtgacggaacaagactctgtcccccctccccgccccccaaaaagggtaagaaagcagaaggctctctctgtccttcctttccccttctctgacactcctccttgctgtggacctgagtttctgacctgtcccatgccggcagccccaacaaggcggccagacctcagccccagcctggctctgagagccacacttcctagcgggcaaggagggctgttggccgaggcaggctggctcctgggacagagggtctcctgggacggccccttcctgcacctgcctaccccatcctgcacgctcttccctctacggcttctgaagagctagatctggggtatgtctggtgtaaacaggatagagttgggttttgctgggtgagcccatacagccacttttatcttcacgggtgagtggaagctgacggggccacaccagctcagccgcgctgttctgtttactgtggtctctccctgaatggccgctttggctttttgaattcatttatgcagatttgtacgtttcctcacggctcatttgtgctcatatgtatgatatttgtgcgtacacaacacccacctcctcttcctcacgtgggttctcctgtcccagccccgccctcctcttcctcgcgtgggttctgccctcccggtcccgcccctcctccccctgctccgtgtttagtcctcaggtcaaggtcacggaccagaccctgtcccctgaacccaccctcccctcaggcagggactggactcttcggatctctgtgtggtgctctctgctcatggcagtccctctgatgccacctctgggctggccgagcctcacagcatctggcggtgccccaggatggagtcgggggcagggcccgagttcccccttgctgagctgtttcccaatccctgaggcgttcaggacagcgtggggggaaagccacgcccaccgtctcgcctccacccaggtcctgtcctgcacggggctctcgggaggcctcagcattctccttgaagatgcccaaactttaccaacccctgtgcccagccctggcccacacccacggaagcagggaactgaccccatcccagccagagcgggtactccaggcgggcccagaacctggagctggtgccaccaaactcgcatgaagagtctggctgtctgtcaggaggaggcgtctgggcgccccctgatgccaggacggctctgcccattgtctgcgtccctgactcgagagcttgagcccggggtgggcctccagaggctggtgctctgtgccagccatacgggcacccatgtagctgcccctctgtcttcttgccaagctcgggaccctccccacctgggacaaagtcacctccaacctctgcgcttcactcatcaaaatcacctctgcttaataaaccttgaaggtctcaggtgctgccggcatgggaggctcctgcctgcaggcctggggccaggccctggaaagcgcttagggagggctgggctggcagctgcacaagggcagcctcgtgggatgctggtcaagcagaaaatccccagggatgtgagctggttttttgtgggaactctgaaagtgaaaacatcaactccccgaactgggaggccaccagccccagagggccctccccaagcccccgcggggtcccagccagggccatggatgtgggcaggcctacagctcactggccagctcccctctgcttcctcccgggccacagcattcctggggccaccagggtctcattgtccctcacctggccagggtctccgtgcccctcacctcctctttgctggaacattccacacattccttcccccgacagggcagggttcctgggctgaggctggggcaggtgtgctgggcctggagctctccctaaggtctccagctgatgtgggctcctgggatctgcaccgtctcccctgggccaccctcgctgggctcatcctaaagaagcctcctccgcctgcccctcctccctcccaaccctcagcctccccaccccccggcacccaccatgagctgagcctgctgtgaggaggggggcagccccaggaccccacacaggtggggctcagcagcttccagtgagaaacccatgcaaactgcctggggagttccggcagcgatgggaaaaggcactgtcctacccagggggctgagaaggctgagccttgaatgaatggcagtgagcagacatcagtggaggtggacaggacactgaggacagagtcaccctcccagggagtcagaaatgaggggtgcaggggagtgggagggaggtgagggggtaaggtggggtgaaggatgtggaggggtctcctgggctctggcctgagctaggaaggggcagggctgggtcaggaagctgggtctgggcgctgtggtgcatcctgggtgactgtgggacgctggaggaggaagagttcccgcatttgcgtctgggttgggactgtctaggcgaaagctcagtgtgaattgtctgctgtgttcccggtgtccaaggcccccaggggctgggtgagtcccaagagggatgtaggccgagcagagttgggcactgaacccccaggctccccttgttgaccacccagccagaaattcccagggcagaaggtggggtctgctcacccatggggcaggcggtctggggatgtctgacgcctgggcctctggccagcaggatgtggacagaagtggccgctgggtggggctgagtgcagagggcagtgcccatctgcagcgtggctatgcgccccacagagtgtgggcctgaagcggggaaaggacccccctcaacacctcaggccggcgggtcccattccagctgccacccggactcagcctgaggcctcctcacctgcaccagcttaacttggatccccagccaccacggcaccatagcgcccgattcccatcccggtgcccctgcttcgggctcactcacatcccagagagtcggtgccagcagggcaggggacagatcacgtggggctcctgggggacgaacagtcgtgggaggcagggctgcaaggagcctgtgcggaggggcctcgaggctggggtgcagggaagaccccaaggaggaactgtgcggggaggggcgagtgccctgcgggtgggggacccctgcccagcgggacagccctgagaagctggggcccagcgtggcaggcaggcacatccttcccaccccagcttcccccatcgcccacgacacccgtccacacctgtggcccagccacctacaccccggcaagtcccaccggcctgttccactgggaaaacccgcacacccccttatctgcaggacactggcgcccaagcttgtgggaggcctgagccgtgggcagagtgggggagggagggagccactggttcccgggagagcttcctctccccaacccccacaacaggtggcaatacctgatccccaggagaaggtgcttccttctgctacccggcctcactttcccaccctgggattcccgagcagcctcagtgagcagcagactccaggctgggtccccatgaagcgggggactgctatgcctgcagcccaggagcaaggtgcacagtgcacccgggggtgtctccaacctggttctacctggctccacgggcaacggtcccagtgggctgtggtccctccacgagctgtggttctgtgggctgtggtttcgtgggctgtggtccctgtgggctgtgctgtggctctcatctgccccccaaggggcctggctggacctctgtctcctctgacgctgcacttgtctgtgtctcggccttggctgccgctcccctgccatgcgggctcgtcccacacggcccctgccttgaagacatcttcacatggagttggcaaagccccgggaggctctgggcccttgtatcggggttgggggcgttaaccagccccccgggaggctctgggcccttgtatcagggttggggggttaaccagccccctgggaggctctgggcccactctgtttctaactgagtcagagccaagattagaaaaggctgaaaccaccccctacaacccagggccctggcgcctttgccagctgtttctaatcagtccgtggtgtcagccacatggtgttgccccaggatccccgaagccaagtcagccttcactgtggaggagcagggcggccttgaaaggagctctgtcctccatggggcctcggccaggaaggcacaaaggggctttgtccccagcccaagcctggaagaccctcctccagctgtggccctcgggactgtctggccggctcgtccttgggggttgcatctccccaggctgcagcatgggccccagtcagccgctgaggtgcagaggatgagaaattccacagaaaagcatgtacggacaccttggggaagcttccggaagaatgcatgcaggaggctagccacatgcccagggtgggactcgggtccagttccctgctcctgcccccacagcatcctcaaagcactgaaacatgagcgcatgggccgtggggacgcactgtcggaggtcactgcctgacccggtgcccagtgtctgccctggcccgtacggtcccatcgatctgccccagacgtgctgcagccgtgtgttcagggccccaggtccccctaactcccgggcttggcttcccccgataccacccacgctggtcatctcttagtcaccctgacaatggccactgctcacaggacagtcccacgctctgtggctgggtgtggaggcccccactggcccttcctgatacctctgccccctcttttctcctctctccctcctgtcccacccctggctgcagttgactctaacatttcactggcattcaccccggcacagctcacaggctgcattgctacctctgggctttgctgcctggtgaggtgtgggcatccttcaaagcccagttccccaatcacctcttccgggaagcctcccctgactgcctgggtggcaatgactcctccccttctgtgtgcaatggaaacaggtggcctgaggagtcaaacggtgcaaaccctgccccactctgtttgggaagcacctgctgtgtggcaggcgctgcgcttggtgctggggatagaccatggggaagaaacacacagaacctgccctgctctcaaggaacaggccctgggggcggccaggggcagagacccaaggcagacacccacacagtggcgtaatgacagtgcttatggtggggacctggctgcacagcaggtcagcaaggggatgttcaggtgacactgggggcacggagacccaggggagagtggattgacagaggggacgctgggcaaatgtcccgaggctgaggtggagttgcgggaaggaggaggctgccgggcagaggcgcagagagctttgcaggtgttggcagagaccagcaggccctgcgaggcctggggtgtgtcctcagctgggagggccatagaaggatctgggcttgcagatgctggtgcagactggaggcctggggtgtgagagtccaggcggggctcctgccaacacccaggggagtgggcctgggccaggtggaccgggagctggcacggtggtcaggtgcttggaggctgcgtgccacgctggggacctggaggtgtgtgaggaggtgtctgttgctcctggggctgccgcctgcagggctgggtgtgcagcagtgcggggcaatgaagtgggcgggttctgggatggtggacgttccctttgttgggaacgtgttggtgccaagctgccatttgagtttggctctgaggggtctgggcaggggacacacagggaatcacacaggatggagtgagttcccagggacccagggtggcttggcctgagaacagctcccactcccagatgtgtgggaagccctcggcaccaagcctcagcctctccatctgtgaaatggagacaacgtcactggacttgcaggctgtccatgagggtgatgcgatcagaaagggtggagttcctgaacgccccggggtcggggtctcacagcaggagcttagctggtgtcggcatctcctggacccgtcctcagctccgagcgcccagtcctgccacctgtgtccaagtctgcactgtgcccacgaggccctcaaggccgcagacagccccacacttctcggacgccgccccagcacggtccttgtgtgaggtggacactccttctggacgccgccccagcacggtccttgtgtgaggtggacactccttctggacgccgccccagtacggtccttgtgtgaggtggacactccttctagggaaggagtagtaactcttgggtggtcgggtagttgccatggaaaggggcagtaatgcccaggtattgccgtggcaaccgtaaactgacatggcgcactggagggcgtgcctcatggaaagctacctgtgcccctgccctgtgttagctaggcctcaatgtggtccagtatctgagcaccgcctcctgcctcagatgttcccgtctgtcaccccattaccagggcggcacttcgggtcctttccagccatcattgtcctggcattgccacagtggacactgccacacaggcttgtgtgcttgcgcgtacccaggtcctcacctctctgggataaaccaggcacgtggcggccgccccattttccacccgccagcggtggaggagttgcccagccttgcaggaaaacagctctcatgccagcagcggagcatcctattcaagttttctcagggctgccagcacaaatgctgcatgccgggcggcttcctcagcagaccgttgtttctctgcgtcctggaggctggacgtcccaggtccccgtgtggcaggcccggttcctcccgcagcctctccttggcttgtgggcggcgtctcctccctgggtcctcgcagggccacccctccgtgtgtctgtgtcctccctccccttataaggaccccaggcagactggatcagggcctgccctaaggactgaattttaccttaatcacctctttaaaagctgtctccaaatacagtcaccttctggggtcctggctgttagggctttgatgcatggatttgggggacaccgctcagcccctaacagcccccatcctctgcctgcctttaccatggggctgagcccagccctgcaggagtcccctggtttgatgtctgctgtggccacggcgaccctcaggctgctccagccgcacttgtgcttgtctctgcctggccctggggcttcacctcctgagggggtggagagagagagacctgtccctcccagctctcctggccttgcccactgcagagcccagagggacatcctccaccgtgggcctgggctcaggtgtgctccgcgttctccggcccctcctccaggtgcgctgctcacagcacacgtctccacgtcctggcatcccgggcctccctgggctccgtggccccggagggtgcccctccctcagccagtactgtgggaagagcccggtccctctggggccagatgagcagggcagagtgagcaggtccccctttggtggagattcacgatctccaccccgcccagcagccatcccaggccgcagtctgctgactatccccagctcacacttctcaccagctgacacggtgatctggccgggcacctgcccagggtcccacccgcagaggaacccgcctcttccaggttggttccgggctcctggacggatcacgcgctgttgacatgcagttgtagcttttttcttgtgggtgggagcaatgctcttcccagctccacctggaattccaccagggatgggtgcagcatcctaaccccgccttcccttggagaattcactgctctggacagacgcctggcccaggatttcaaaggcgcatctgttatggaccgggcccccagaggagacgtctttttgccattttgttttctgaccggagggttttttggaggttgccctcccacccaccgggttgctggcagcccagcccgtgctgttttcagtggacccttttgcaaatgtcttcacaggctcccgggaagctgagctgaacagtgacctcagccttgagcaatcccgaggatgtgtttgctgaggaaatcattaaacagggagatgagagcactcaacccccaacatgccaggctctgcgggaggctgcttattcctgtggcctcgggccaggtgccccagcgtttgctgcccttggtagacacttgtctggcctgagccctcgggcaccatacaccgacatggttagggcagccagggtcagcccgggcccctgggagagctgagtggagggaccactggccaagcacagagggtgcagggtgcccaggaccaggcgtcacctgatggtcacctgggggaacctgctcactccgccctgctgccctgctcactgctcgggggcccagccaggccggggaccagggcctcagagtggaggggggtcagggcccagggcctcagggtggaggatggtcaggactcagggcctcagggtgggtggtcagggcccagggcctcagggtgaaggggggtcagggctcagggcctcagggtggaggatggtcaggactcagggcctcagggtggaggatggtcaggactcagggcctcagggtggaggcagtcaggactcagggcctgaggatggagggggtcaggcctcagggcactggacagctgactggcttcttcccaacccttttccttcttttcgcccaacataaccactgggaggtatccacagaagggggctcctcaaacactgcctggtgtcctctgtctcagccccaggggaaaggactcgcacggggcggagtgggaactttgggtgaaactgggcagggggtgctggccaaggcgggggagagggtggactcccatcaggtcaggagctccgaggtgaggcctctgctagggtggagggtctcaagatggggagggaggggttgtgggaaaggggaggggaggtggagccgctccaggagcctcacgggccttcgggatggagccgctgggcgttggcgagaggcttccgtccacggcacagccccgcacgggggcagaggacgggaagggacccagggcagccccgaaccacctcagacttttggaaaatgaactggaaagaaacaagacttcttttgaaaagaagaatgtccttttttattttgactttttgtcatcgatattttttgcgttactcctggttttaaaaagaattgcattaaaataccgcttttctgatgagtgagtttttggaacacccccctgctccctgctttaattttgccctggagaggagcacctcattctactctgggctgtgcatctttggaaggaatgctgagacccccggttcccactgtccccgtgggccataccccgtgagccagcgggaccagctccgaaggcagaaggtcaggccggggtcagcttcagccttggcgggggcagccgctcagcagagggtggcccagggaggccaggctggctaagggcagggccaggaccacccagaatgggaggcccacagcccaccaaggggttgccccgtgggaagacatggggaatgggtctggccctctcagcacgctgtggagtgtggcagagggcgggggtcgtgtcctggaaggaggaggctgagcctccagagagcagcgtcgggctggaagattaggggaatgctgtgtgtacaaggcccagccatgacaagcagtgactgtggttttagccaagagtgggcagtgagggaggggacacacgtggcggatagggtggggggtggcccccacaggacatcaggagggacctaagtgaaggaggaagcgctggcaggccaggcacccaccctcgggggccaactatccagagaggggcagggggagggcagggggagggggctgagagcgggcagaggcagggctggagcaggggctgagagcaggcagtgggagggcagggggaaggggctgagagcaggcagggggaaggggctgagagcgggcagggggagggccggggcaggggctgctgcctcctggaaacgtttcatgttgtccttgcactatttacagtgaggattatttataaaacccaaatcgctttaaagccatttccaggttttacatgaacaaaaatctatttgaaaaaagaaaataataaaataaacatttaaaaatctttcttagaattccctaaatttcagggccgtgtgtgtgcccatgtgtggtatttgtgtgtgtgcgtctgtgcatctgtgtcagtgtgtctgtgtctgtgagtctgtgtgtctgtatctgtgtgtcggtgcatctctgtgtctgtgtgtgtctgtgtctgtgtgcctgtgtgtgtgtctgtcactgtgtgtgtgtgtctgtgtgtctgtgcatctgtgtgtctgtgtgtgtcagtgtgtctgtgtgtgtgtctcagtgtgtctgtatctgtgtgttggtgcatctgtgtgtctgtgtctgtgtctgtgtgcttgggtgtctgtcactgtgcgtccgtgtgtctgtgcatccgtgtgtctctgcatatgtgtgtgtgtgtcagtgtgtctgtatctgtgtgttgtgcatctctatgtctgtgtatgtgtgtcaatgtgtctgtgtgcttgtgtgtctgtcactgtgtctgtgcatccatgtgtctgtgcgtctgtgtgtctgtgcatccgtgtgtctgtgcatatatgtctgtgtacgcacacagctgatcctctgacaccgaggaggagacacagtggggattctgggtctggcaggctctctcctctgcatctctcaagcctcccacaacccccttagtgtccacccatgctgtaagaggagaccatctggagtcccaggtgttttagagactggaaaccagcccacggggcccctggaggaacaaaaaccagctcccagccagcgcatgcacacctgagacacgccctcagccactggcttctgccactgctttactgggtcagccatgagtggggctgaggagcccgccctcccatcaacgtgttgctacctggagagcattgacagacttgggccattcctctccgtggcgggtgcccctgtcttcctgtctacatgagtccaggggccctgtggtgcatgggaacagccaggaggggtggctcagcaggactaagatgagagactatcatgagacccgggcacattcccaccaacagcgggttcctttccgtccccgcatcttccctcaccagcaagcccctgtgcagagcccagactccacaaaggcccatcagtcatcactgtccacatgtgcatccgatgtgtagggtggcggcggggacgaggctcagacagacaagacaccccagggtcagccaggccggcctgtcccacttgagctgggctgagacaccaatgtcacccctcttgaagcccccaaagcttgctctctggccgacagctggcttttgagccagaaggctggtgaccctgttaggatctggcagacccgccagggtggctcccaactcacccacttcccgccctgaggtcctctcctccctccccaccctctggctacatggactctccatcctggaacaccgggcatgacctgactcgcctttgcctcgccgttccctctgcctgcgatgctgtttccccgaccacacaggcctccctggctcctggcctcctccagtcttttctcagggtcttctccgtgaggcccctctgacaaccccgttcacattcctaaccagcacccagcagcctgtctcattgtctcttactggaatgtgtgtttgcacggcagggattttccccctgctgtgtggtgatggatccccagcgtctggaactgcttccaatgcgaaggagctcggaagccttcagtgtggggatgagtgagtgaggcaggcggctgccggtgcggggaagacagttagggttgttcttacatgatagtttttaaagatgccatcttttcaaccaagaaattctacttctaggcccctgccctggagaaacaatgaactggtggggaagagtttcatcatttcaaatgctcggccatggtttctgtgacctgtgggtctggttcctccatggatggagcagatgtcagcggcctttgactggagaaggtcgtgggtcttgcaggcttcaaaagcttcttcgtttatgttgtgccaagaaagctatggctgggaacggttccctccctcagtgtctgcttgtggcagctcccgggcgtttctgggctgcctcaccccgcactgcactggcctcagagccaggccttcatctgaccaagtccccacctcctgctgtcttcactagtgctgttctttatctgtctttgggttccttttagtattttcccctaaattttcaaatgatgtgtctggttggttgaatgtgaacctttcttgattactaggtaaatgcatctggtcttcctggtgtggccgagtcccacaggtgcagtgtggggcacccacgtgccttccctggagtgaggagtccgagctctcctctccgtctctgctcatgatgggggccatgctcccccgtgcccttcccagcaaagatggggcctccagggctccactcccactcccgagccccttcagtgtggacacatctcactgttaccctggtatccgttcacagtcactgagacttggccagcagctttgctgcctttgtgttggtttttgtcaacactctgttctgtgtcccatgccagccgagaggcctgtgggggtggctagtggggggaagcttggcctgcaggtgaaggcagggctgggggcccttctgggccatggtgccagcctgtcaccttcgtgttttctgccatcaggtgtcagggtcccactgggccttcagctgcctgtgctacctgggcatgtgccccctccccaaatatgtgcccctccccagacctgtgccccctccccagatctgtgcccctccccacacctgtgccccctccccggatctgtgccccctccccggacctgtgccccctccccagacctgtgccccctccccggacctgtgccccctccccagacctgtgccccctcccaggcctgtgccccctcccgggcctgtgccccctccctggatctgtgccccctcgccgggccagtgccctctccctggacctgtgccccctccccaggcctgtgccccctccctggatctgtgcccctccccggacctgtgccccctccctggatctgtgccccctcgctgggccagtgccctctccctggacctgtgccccctccccaggcctgtgccccctccccggacctgtgccccctcccagacctgtgccccctccccagacctgtgccccctccccagacctgtgccccctccccgggcctgtgccccctctctgggcctgtgttttcccaaacataccccatggagaggagctgggtcctcacaggttcaaaattgtcctataaccctgggggggttacggtgtgtgcgagggatggaaaccagactctgaggtagacgtgtgtgtgaggagtgtcagcccccgtccctggagggcgaggaggggagtccagggaggccccacccctggcctggggagatgggtctcggtgaagaaccagggccacactggcatcacaggcaggcccagtcctggtggatatgtccaggccgccccttttcctcccctccatccagggtgcaccaggctcctcccctcagagaccacccagccggaagcccaggctccccaggtcaccaaaaggggcttgcagggcctcctaggtgccacagggtgccgggggtgaaatgtgactctaccaggcagccgtcaaagaaacaggtgtaactgcatccccagcgtggagaggaggctggctcgggccagcagggtcccagagagagcccagggtccgggaagcagagcaacctcaggcagctccagggggacgttgatggagggaccattggcaacggtggagcagggagtagggagaaagcgagcccatggctggagcgcgccaggagggtgaggtgagggcggggcccctggagccttagtgcagggagacaggctgcctgtgcacctgccgagaaggagccctccccgaccttggactgccaatacccgaggccaaacccaccctccccagcctgtgccagccccagggtcagcctgggcagagcgtggtggggagaggtgcccagggcacctggaggggtaggaggggacacctgccctgctgtacacagtccctgcttcccccatgtgctccccaccagcctgcagggagcatggagttgctttcacttcatcaagatcctggagcacctcttcctgctgcctcaagtggcccacagtttccacgacacctctctggtttccggagctcctgagctgggatgtaagccaccagcattcatctctggcccctgcctcaggcccttcgactcccaaaataatgggcaggagtgggagcttcatccaaggcccctgcacactgccttggttcacagtgaaatctggaacacggcatcttggtttccaggaaaactgccttgggtgccatggcgcagcctgcccacacttcaggcacagagcacagaagattctgtggtttccacacctgggaagagaaaagaaaaaccttccaggtactttaaagttccagaaaaatgagaaatgcttggccacaggtacacctacaaaccctgctgtctgcacaaaccttgctgcagaagtcacaggaaggctctaaggagcaaagaaggaagagccggcccctcctctctgggagactgtaggagaatgaaggaaccctaggtggcagcggctgagctcatggtccgctgacgacattgcctggggtgggaaggaagcccagccagcccaggcagccatgggccagccatgggtctcagagggagaacagaggcctcccgccaccagcagcactagtgtgccagccacgtgcctggacctggaccctgcagccctggggaggctctcggatgacagtggccccagaggcatccaactgcagcctcatgagagccctgtgccccagcgcccagctaagctgtgctggatttcctggctcagaggaactgtgaggataaggaaggtttattgtaggttgttgtgagccattaaacttggggtgctttgttaggacacaatggatagcaaatacaccactgaccggttaggagcccccaaactggggagaaagtctcacaggggagcctgtgctcacagggacggagtcagcctcacacacagacacattttgttatgggttgaatggtgtcccctccccccaaaaaaggacgcactgaagccctacacccccatacctgtgtgtgtgaccctacttggaaataaggtctttgcagatttaatcacgttaaatcaagttcattaggatgggctgtaatccaatgtgactgtgtcatcaccaaaaggggaaatgtggacacagacacagacccacaaggaggaggccacatgaagatggaggcagagactggagtgatgcacaggccaggggacactgggggctgctgggagctgggagaggcgggagggatcctccccagagcctctggagggggcacggccccacccacaccttgatctgggacttctggctccagatctgtgagagaacctctgttcttagccatcagttttgtggaacagtgttgcagcagccccagaaaacgaatgcagatttctgcaccttttaagagcaaagacagtctgggcgtggtggctcatgcttgtaatcccagcactttgggaggccaaggcaggtggatcacccgaggtcaggagttcaggaccagcctggccaacatggcgaaaccctgtctgtactaaaaatacaaaaaaatagctgggcgtggtggcaggtgcctgtaatcccagctacttgggaggctgaggcaggagaatcacttgaacccaggaggcggaagttgcagtgagccgaaattgcaccattgccctccagcttgggcaacaagagcaaaactccgtctcaaaaaaaacaaaagaaaagacaatcaaaacacagctcaagtgagcagcatttgtactgaatcaattggcctctgtttagtactattaattagacaagaaaaaagggagttgtctttgtgtaccactgggggtttgcagtttttagataataagtttattttaagtaactatgattttcattttctttcagtgttcaggtagccacaacttgaccatggggaccccttgaactggcacgacctcccgtccgcacccaagtccccaccagcctgtccctctgatggttctgggctgggtgtggcagggaaagggcagaagtgagactttgacctggtgggtgcacacgcctaggtgtaaatctagctccaacatcttacatgagaatgaattgaattcagattctttaatggctcaccctggagttttatccctcctggtaataatttcatgaccaacacaattctttgtttagctgagtattttgattctggtgagcatcatttcatgtgtgtggtgttgtcaacagccacaggtgagtctaaaataatagcacagggtcttgtgacggtgctgggaacctctccgctcatactggcccgcatgtcttcggacgggagtcgcagcgcaagcttgcaggtggtcattgctgggagtgttaaggcaatacaggtctctgagaagagagaaaaaggtgtctttatattcagaatagtcagggaacagcgctggtgtttacagctgatgtgaagtgaccaacacagagaagaaacagacacgcccaggtcaagggaatttgtctttaacatattttttttaaataacccacaatttggtgttgaattctaatttttaaaagacactcaggtatttatttatttgagacggagtctcgctctgtcgcccaggctggagtgcagtggtgcaatcttggctcactgcaagctccgcctcacgggttcacgccattctcctgcctcagcctcctgagtagctgggactacaggtgccagccatcatgcctggctgattttttgtatttttagtagagatggggtttcaccgtgttagccaggatgctctcgatctcctgacctcatgatccgcccgcctccgcctcccaaagtgctgggattacaggtgtgagccaccgtgcccggccaggtatttatttcttaatgccctattcctacaaagtgcaaaggccatttgagaatgtcagaaactataatgaaataagatcaaaatacaatagctttccacatggatattattagagatgcttgcccttaaatttcaccctgcaattcaggttaaggagcaattttataggcctttataacattatgatataatcaatgcttctataaaatcccgtttatgaatgacaagggacccatcgtgtgtgtcagagtcactcacaaaacgtttaatgagctgttcaggtaatgacatgacccaacaggggatttccaaaacgcccagtctttcaaaaacgatatgaaaatctccaaatcggacatttaaaatgattcatattattattaggaaaagcatataagatgtattaaagaagaagcatggtttggctcctttttaaacattttaattagtggactttgttacttagagcagttttaggtttacagaaaaactgagtctcaggtccagggagccccagtgtctcggctcccctgcgactgacatcctgcttcctgtgctgcgtttgttacaattatcagtcgcgcgaacacacggctcacattagggctcactccttgtgtcgaacattttatgggttttgacaagtgtgtcatgacatggatccactagttgtggtcccttttatcaggttaaaaataaaacggggccttgcagagatttaaatgtggtagtaatcacctttgttatatttttccttctgaaaatattagccttggaaggaaatgttttaacaactagccactgttctgtgtctgggcacatgtccatagtgagcgtattctcttatctgcttcatgctgttgccaatttacagaccagtcgctcagaagctgtgatttttcttctgagcataagcttatcctcaatatggaaactttaattcaaaatacagtttggtctcataggagcattgtagtcttgctggctggaattcacgtggagaccgatgccagtgcctctttcctctgcatccatccatccatccatccatccatccatccatccacccacccacccatccatccatccatccatccatccatccatccatccatccatccatccatccacccacccgtccatccatccacccatccatccatccatccatccacccatccacccgtccatccatccatccacccactcgtccatccatccatccatccacccacccgtccatccatccacccacccatccatccatccatccacccatccatctatccatccatccatccatccatccatccatccatccatccatctatttatccatccatccatctatttatgcatccgtccatcatccatccatccctccgtttgctcatttccacccaggaatccatcatctctcaaactaaggtttcgacatcattccttcttttcagaaagtgcaaaccaaagctaagactggctcacacatgccacgcgggagttagagtgagagcatttttcagatccttgttctcttctggccccacctcccgcagtttctggaagtcccaggacagggaaaaggagagaaaggcagaaaagaaattatcgagtgtggctcttccctctcctcagaggaaattgttcacctgccaccctcggaaatttaattttcagtgttaaaacttgaaattttatagtagtatgtgtaccaaagttataaaatgggcaaacttgtctaaacgaggattcctacattgttatgacattttccccagagaatcacaagctctgagatacacttgtgaaccttacttatgcagacattctcttaaactgggattctttctctcagtttaccttaggctaacacagaaacatattttgacacagaaagaattttttctcttcattgctcaagtcacctggaggcagctcctgcctggggtggatgcctccgacccctgggaatgacccctgcagccaccactgagccccccacagaaggaggctcgtgcctggtccagctttcccacccggggtctctgtggctggctccccccagctcggggcagaagcctaattcagggttgttctgctcagttgatccagtcggacgctaggatttgcctgggggcccggcctgccagcagtacaggtgaggggacgcaggcttggtcacaagcacccctgctgaccttccctacagacctggcacatttaatcttcttctttggggaggagaagaggatgcattcagaaatgcctttgctgatgaggccctcaggagcttgtactggaatcactcaaaattcccaagtagcctgagtgtcctaattcatttctgtgtacatctgcctaattctcaatccacgtctaaggttagaatgaacatttgaattagccattctggacaacacacacacgcactataccatgcatttagatctctctgtaccttgctcgtgtcagcacaaacgcagcccctctcttttcaaaagcccggttcgttttccagcaggcgcgtgctttcattagactttccctcctgtgggttctggcagatttcccaacacaagcacggcaggaagtgcattgtgtttgtagaaaatccaaaataatctctaggtgagtgttaggatgaaaaatgaatttagtgttggtacaggtttttgcttgttgtactttttgtgggggagggtgataaaaatattccaaaattgattgcgatgatggttgtgcaattctgtgaatatactaacaagcactgaactctatactgcaaacaggtgaactgtatggtatgtgaattatattttaataaagctgttatttttaaaaagtaaatttagcaacaacactggatacaagctaaatatacaaaaattaattatctttatacagaccagcaactaataattagaaaatgagaatttttaaatgataccattttggtagtatcaaaacccatcaattacctagtaactgttcagtaaaatattccaaaaacagcaaaacattgactaaggtacattaaagaagatttaaatagcccaggcatgggggctcacgcctgtaatcccaacactttaggagtcctaggagagcagatcacctgaggtcaggagttcgcgaccagcctggccaacatggtgaaaccccatctctactaaaaatacaaaaattagccagatgtggaggtgtgcgcctgtaatcccaggtacttaggtggctgaggcaggagaatcgcctgaacctgggaggtggaggttgcagtgagcggagatctcaccacagcactccagcctgagtgacagaaaaaaaagaaaaaaaaaaaagatttaaataaaggaagggatatgatatatttatggattaaaagcaagttaaaaacaagttaacaaacacaacaattgatctataaattccatgtaatcaccattaaaatccaggccaaagtgtgtgagtgtgtgtgtgttgcgggtagggggttgccaagctaaagtttacgtgggaatggacggggcaagaacagcaagacgaccttgaggacgaccaaagcgagggactcggcccccaggtgccagtgcccaccacaaagctataggagtccagaccaggccacacagcggtcagtgaagtgggatggaaggtccagaccaggccacacagtggtcagtgaagtgggatggaaggtccagaccaggccacacagcgtcagtgaagtgggatggaaggtccagaccaggccacacagcggtcagtgaagtgggatggaaggtccagaccaggccacacagtggtcagtgaagtgggatggaaggtccagaaacacgcacacgggacacttgatccacaacagattcaggattgcagaccaggggcacggggaacctctttactcgtggtaccagctcagttgcagatgcatacggaacgcaggaagccggggccccacgttcccccatatgcagtctgcaaatgcaaacacggaggctgaaacaaacacgtctggaagaaatcacaggggagcatctcccctgctgtgcccaggatccacgggtgagcaagacagggtccctgtccggatggggtttcatttgggggtgcggagggggtgcagaaccaaaaaaaaaccaagcaagcgagtgaaacagggagctcggaagtgggcgctcgcataggccaaggtggggaaggctggcaggcacgtgtgtgtgcaaggacaccaaatgttgatctgcagagcaaagctgggcaacagcaaccacattaaccaatagacgtcggcttatccaggccatgggacgatgtgtagctgttaacataaaggtctatctggctgggtacggtgcctcacgcctgtaatcccagcactttgggaggctgaggcgggcagatcatgatatcagaagttggagaccagcctgacctggtttagtagaaaccctgtctctactaaaaatacaaaaattagctgggcatggtgggacgcacctttagtcacagctactcgggaggctgaggcaggagaatcgcttgaacccgggaggtggaggttgcggtgagccgagatcatgccactgcacaccagcctgggtgacagcgtgagactcactctcaaaaataaataaataaataaataaataatgaataaaataaaggtccggatgagtttggaatgtggaaggaaccacaccgggagtggcgctgggtgtgtccgtgtgaatgtgagaggatgtgtgcgttccatgcggtgctgcagagggtggaaaggcagcatggtatagcagccagtggccgggacccatccgtgaacccagtcttggctcagcactccacggtggggttttctgcccctgccacaactcggaggacagagggagttggatgaagtgccaggactgtgatgaggagggctggctgggaggcaggactctgacctgtgttcgcggaaacatccatctgctccacagtcagacagagcctgtggcagaggccatggaggattttctggtggccacagactgtcctgtggaattccagctcgtcgttggtcaatgggatgaagtttggctttagaggtggatgagacaagttgggctctacccagagcaaactaaagctgctcctggtcaacaaacaccagctcagctggcccaaccgatgcctcggccctggacacacagctggggggaggccgggtgaggagactctgtccgtgggattccacctgccccgtgggagtgagagcacaggcatcgctcacggcgctgcaggccatgtccaccacagtgcagcgcagccctctaggccgcgcccacattgcccaggctccgctcggcctcatcctcgatttcaggcctctgtgacttacccttggggcccagcatagcacagacactatgtctgtttaaataggagagcatagaaaagccgagtccctgcaagggacaaccggcttgagatgacagtcagggtctcaggcgagacggcctccagccgccttcagagcaggtgcctatcagcggggccacgtggtggtttcacagtgccttggtccccagtgccgaacctgcccccttgcccgaaagccgggctaagccaagcagctgtggttgacggttttgcctcaggaattgtgtgtgtaatttagcgacaaaacaaagcaggcacaaggaagactcaaacagggaggtccctgaagatgggagacaaatgaccaatggacagaatttcatgtcctattggtggcctaacagcttggagaagcattccaactggattttcaacacaaggaattggttagacgtccctggcggggtgtgtctcttccagctggattttcaacacagggaattggtaacacgtccctggcggggtgtgtcgcttccagctggattttcaacacagggaattggttagacgtccctggcggggtgtgtcgcttccagctggattttcaacacagggaattggtaacacgtccctggcggggtgtgtcgcttccagctggattttcaacacaaggaattggttagacgtccctggcggggtgtgtcgcttcccactggattttcaacgcagggaattggtaacacgtccctggcggggtgtgtcgcttccagctggattttcaacacagggaattggttagacgtccctggcggggtgtgtcgcttccagctggattttcaacacagggaattggtaacacgtccctggcggggtgtgtcgcttccagctggattttcaacacaaggaattggttagacgtccctggcggggtgtgtcacttcccactggattttcaacgcagggaattggttacacgtccctggcggggtgtgtcgcttccagctggattttcaacacagggaattggttagacgtccctggcggggtgtgtcgcttcccactggattttcaacacagggaattggttagacgtccctggcggggtgtgtcgcttcccactggattttcaacgcagggaattggttacacgtccctggcggggtgtgtcgcttccagctggattttcaacgcagggaattggttacacgtccctggcggggtgtgtcgcttccagctggattttcaacacagggaattggttagacgtccctggcggggtgtgtcgcttccagctggattttcaacgcagggaattggttagacgtccctggcggggtgtgtcgcttccagctggattttcaacacagggaattggttagacgtccctggcggggtgtgtcgcttcccactggattttcaacgcagggaattggttagacgtccctggcggggtgtgtagcaggataagaggagccacgcagaaatatcgggctgcagtctctaattgggttgctgataataatatttgtattctttttttttttttttttggctgttgttgttgttttttgtttttgtttttgagacagagcctcgctctgtcgtccaggctggagtgcagcagtgcagtctcagctcgctgccgtctccgcctcccaggttcaagccattctcgtgcctcagcctccccaaaagctgggattacgggcacccgccaccacgcctggctaatttgtgtatttttagtggagacagggtttcaccatgttggccaggcaagtctcaaactcctgacgtcatgtgatccacccgcctcagcctcccaaagtgctggcattacaggcgtgagccaccgcgccaggtctgttggcttgtttttgagacagggtctcactctgtcgtccagactgcagtgcagtggtgtaatcacagctcactgcaacctgtaactcccgggttcaagagagtctcctgcctcagtcttccaaataactggaactacaggtgtgcaccaccatgcccagctaatttttgattttttgtagagatggggtctcactatgttgcccaggctggtctccaactcctgggctcaagtgatcctcctacctcagccccctaaagtgttgaggttacaggtgtgagccactgcacttggccataatattggtattcttattttaaactagaatatatacagtttcaaataaagcaaatgaagacaaaacatgttaataccatcaggggccaagattttcggggttagagaaaaaagcatacaagtataaagtcaaagaagttgaagaaactctccagtttgaataggaggcacctgtgtaagctcttgaactcatgccatatgtttgtttcataaaaatacattttttccgctgtgtcatctggaattgcccagaagcaaagacgactcaggagccacagtccccggcacccaggctggctctgagcccctctccccactcacctgaaccaggactctgggaagtgactgagcgcgggctgggcagcggcacagggagctgctggaagcccaggaggcatcagcaagtgcagtgtcacccgccacgccggcgtccccctgtcgagagggcagcccccagcttgaagggctcccagcgccagccggggcacgacaggcatcgaacagactaatggtatagtgatggtagaaaacatcaaatgtttgaaactctgtgaatttatcaaaccgctttcaaaacctcctgtccctctcggatgctgttagggcgccaagccgtgatgctgcgaactggcaaatagggggaggtagaaagcacgtgtcccggctttcctgcgggaactttctcacccagccgagcagctcacgggagaaagctctttccagaggatctccagcgagtaaacgcagaaggagtgatgggatccgaagatcaccgttttgcaaaccttcaggaaacgccagaggtgagccactgccacgagagggtctgagccgtcagggcgggagtagggtaacacagggaaaccgagtccctacaaggagagagccggcttgagaccacagttagggcctgagccgaggcagcctcctgctgtattgagctctaaggcggtccaaaaactccctctgcggggccaccctctgcagcagcacaggctggagggggtgccagcatcctgccctccagggatcccaggaccaggggcaggagtacccagtcctcctctggggacctgtgtgaccaggctgaccatccccagaagagaggcaccaggacgccctgtgcccccacaagatgccaagggcagaggccagcactgcctggcaaccccaaggctggaggaaatgcagggaggagctcatcaaatccggccaggcagcagcagcagcagcccgagagtgggcatcccatgggacgaacggcccgggatccacacgcagatgcccagaaagcgagaggacagagggcgcggggcgggaagacgcgcctcggccggggcagcaaggaaaagacgttacaacagccgttttcagtcagggaaatgtgaacaggctgaatatttagggatccattgtgatgattatattgtgactgtgttttctaaaaaggagagattttatctgctgggggcacataccacagtatttatggacacagtgataggacgtcttcatttcatttcaaataccccatgggaggatttatgaggctagagggaggctggctatcactgaagcttggtgatgcattaatggattcatcttcctaataaaaagttataaaattatgtaagagtggataaaagaaggacattaaacaaaggaagtaaaaggaaatctccttactggcggagtccctgggtggtctgtctgattccagctgatacatcatcgttactgaaggtcataggtcaggctgctgggagtctcaggctccaagggctgagggcgggggctccaaggcggtctgcagaccccctctgtggggtgaccctctgcagcagcacaggctagaggggtcctagcatcctgtccgccaggatcccagtacctggagtgggagggcccagccctcctctgggttctcctgggggccgaggagttgggcccagggcattgtcgggacaccaggccctcccatcgtcggcttcctatgaacgcttaggccaggccagggcagaacagtgggtgagggcctgtgtctggggcctgtgtctggggccaggctgcctgactcccaacctcttctctccccttcctgctgtacaaccctgggcaagttagtgactttgctggatctcaaagtcctcatctgtaagacgagcatcatgctgtgggtgtgaggaaccaatgggagcacggccggctggcggcacctgcccggtgcatggatccagggtggctggaacccaattccacattaacctggggtctggcagccagaaccaccagtctctgggagacgactgcccgggtccccagcaggccagagtcaggccctgtctgggtccccacagcccccatgcccgcgctgtaaaccagcctcaggggctggggaggaggagtattcccagccatttcccaggcagaagccttggtgcttctgctctaattagggctgggggaggggacctggggtcatcatctccaaggtcagtggtcaccacattccaggaatcaccaccagcattggcctcaaactcctcagcaccaattgacataaaatccatgggaattcagctgaagcttcacgcctacaatcccagcactgtgggaggccaaggtgggaggatcgcttgagcccctgagtttgagaccagcccaagcaacacagtgataccccatctctacaaaaagtacaaaaaacaattagctgagggtggtggcacgtgcctgtagtcccagctactcaggaggctgaggcaagaggattgtttaaggccaggagttcaaggctgcagtgagatatgatcgtgccaccacactgcagcctggatgacagagcaagactctgtctctaaaaacaaaacaaatgaacaaaaaatccatggaaattccctcagagccagaaaattgcttccagcctttgggaacggagtgtggtttgagctgcaccgactgggcacggtgggccccactctgggaagagaggtttctttctgcagcttgatcaccccagtggactaatgaggcgagctgttcccaggaagtgtgctttacgtaactgctggtaatgagactggtggggccgtgcgtgtgtgtgcgtgtgcgtgctcgtgactctggaagccttcaagctgccagcattcatccgtcttctctaatgagcctcatgggaacattatcgccctggaggaaggagaaagcggggctgggctctctcgccggcagctctgctccagaactggaagaacttactgctgtcagggacactccagagctcctgcctctgctcattcctacatcactcaagtgaacagctcctgaatttaaagaggcacatgtacacatgcacaagcattcacacatgcacaagcattcacacatgcacatgggccacacacatatatgcgcacatgcattcacgtgtgtacacaccacatgcatgtccataggcacacatcctcacatgctatatattgcacatgtacatgcattcacacaggcacacaccacatgtatgtgcacagagagctgcatcacacagcacatgtgtatatagactcatgtaccacacacattacatgcatgtgcacacaaacgtatcacacaacacacatgcatataaatttgcaccacacaccacaccacacatatgcatacagacatgcgccccatgccacacatgtacgtgcacacaaacatgtatcacacagcacatgtgcatatagtcagcaccacacacatcacacacatgtgtatacatatcacacatagacttacacatgtgcaatgcattcccacacacaccatgtacattcatatacccacatgcatcacacacactgccacatatacacgtgtgttgcatatgtgtgcacatgtaccacatataccgcatacgtgtgcatgggtgcatgccacacacacacacacacacaccatgtacctgtgtgtaggtgcatgcactcacatataccatagctatgtacacacacaattcgtatgtacacatatctgcacatagacctgcatttacatatatacctgccatagaagccagatgtgagaatgaaaacctcagaacccagaagccgttgtgagaggagtgtggtgatcaggagatggactggggctgggagaaagcccctcccacgggctgcagtgctcgggacttacagaagaccccagggtaagggacaagctgagcagctgatgctggaggcaaagctgaggtgggcagcacggccccccagggccgcctcggtcccagcgccgaccgcgagtctgtcctccagctgcctcgttcactgggcttgagtcgacaagaacctgccagggagggtggcaggaccacgaggctggggggcctcagagtttgccctgcaatgacaagacccagaatgggggaagggcctccgcacacctggggctccgcggggaccaggacgtggtggcggccggatcccaggatgggggggaagggcctccgcctacctggggctcagcggggaccaggacatggtggcggccggatggaccccaaaaacagagcaagactgacggagagcgtggatcagggaggttctgcaccagctcttcgcacaatgaggaaagatcttgctgctacaaaatagaaggaactcagcaaacaacctctctgagtggtgggtaaagatgcccgcgccctggcacatgtggtactagaacctcatgctgtacaggcgttccgctccgctgagggcctcctggacaccttgagtttgaggccagcagaggcctggccttgctgcctacccacctgcctggccacttgtccaccgacagcgtggcctgggccctggcagtggaacagggaggcatccctagtttcccctctggctccggggtctgagtggggagcccctggtgtggggatgtgttcatcctcagctctgcaccagcccccacaggccccagggttaacctgggcccacagtttctaggaaagaggggcacgggctgaggatgcagggcccacccttcctgtgggggccagagggctcctctgcctctcccaggaccacttccttcctcccacatggatgacccgggggtccaaccctggaaaatctgagcagcttggctgtggttcaacctcctctttccactagcctgcacctgggacccacttcctgccggctgccactgctggcaggtccagggcagccctggccattggtcagccctgcagccagcagcccacacagaaaccacgctgcctccagcttggacctcagcatgcagggagctgtgggggcctaggcatctggggaggatctgccagacttgagaagccatgagggccaggcacagtggctcaagcctgtaatcccagcactttgggaggccaaggcaagtggatcacctgaggtcaggagttcaagaccagcctggccaacatggtgaaaccccatctctattaaaaatacaaaaatcagccgggcatggtggcaggtgcctggaatcccagctactcgggaggttgaggaaggagaatcacttgaacctgggaggcggaggttgcggtgagccaagatcgtgccattgcactccagcctgggcaaaaagagcaaaactccatctcaaaaaaaaagaaagaaaagaaaaaagaaaaagaaagagaagccagaaatccacaccatacaagggatctcaagggaacagaagtccagctcctcggcctggcccccagagactggacagttgcctggacccggtgcccaggccacgctgtcctgctccctgtccctcccaaagacccaggcaccgagtcccgagggctcctgcggcggctctgtgctcaccccgccagcccctcctcggcctcctccggctctggcttcaaggctttatccctggtgctcacaatcagccccccgcccagcagttacctccatccaggcacacacggccctcgttcccctctctgcccgtggggcgcctccacagatggctggaggacccatgcagaccctcggcttggtagcctgctgcccattcctgtgcccacagccggggctcctgtgcccacagccggggctcctgtgcccacagccggggcggcctgacctcgcagcacagggtgtcagccgggaggatgcgggggaggcggctgcccagcctcctgtgatcccggcaggtcctggccctgcactgggcccggtttcaccacctgtcagcctcagggtaggattttatgcagagtcacgcagtttacacacaaacacacacacgctggtatacacacgtatgtgcacacacatgcacaggcaagcatatacatatacatgccgttatagattgaactgtgtctctcccaaattcacatgttggagtcctaacccccaggatctgtgaataaacttatctggagatagcatctgcagttaatcaagtacaaatgaggtaattagggtgtgtttgtgtgtcttttaaagggggaggtctggacaccgtgtggagacagctgtgggatgcatctgcacactgaggagccatgatggctgtgggacgcccagaagctgggggaggcctggagcagcctctcccttacagcctcagggggaatcagcctgctgtgagataataaatgtctgttgtttaagcccccagtgtgtggtggcttattgtgacagacctagcaaactgtgcacacagacacaggcacacaggcaaaggcacaggcacacagacacatacacacagacacaggcacacagacacaggtacacaggcacaggcacataggcacatacacagaggcccagacacacagacacaggcacacagacacacaggcacacaggcataggcacacaggcacacaggcacatacacagaggcccagacacacagacacaggcacacagacacacaggcacacaggcataggcacacaggcacacaggcacatacacacaggtacatatacacaggcacaggcacacaggcccaaacacacagacacaggcacacaggcacatacacacagacacaggcacacagacacacaggcacacagacataggcacacaggcacacagacataggcacacagacacaggcacacaggcaaaggcacaggcacataggcacctacacagaggtacaggcgcacagacacaggcacacaggcacgtacacaggtacaggcacacaggtgcacacaactcacccgtagtcagtagcatcaactttaaagtccagcatagcagggctcaggacctggctggaccatattccatctgttcgaccttgaaaaggtaatttaatgattctgagcttcagttttctcacctgaaaactaggaatcataatagtctcttcttcatagggttgttgcaagaagccgggacattttgccctgggtttggcatgaggggctgcagtgtctcctgtacatgctttaaatattttttaaagtctcaactatttgtacactaaacaacacacgtctaaataatgtgtgggtcaagaagaaatcgcatgccaggcaaggtggctctcgcccatcgccccagctactcgggaggctgaggtgggaggattgcttaaacccaggagtccatcagcctgggcaatgtagcaagacttagccacaaaaaaaaacttttaaagaagaaatcttgaagaaaatattttgaattgaatcatcatgaaaatgcagaatgtaagaatttgtggaaatgcaggcaaagggtgcttagagggaaatttatagctttaaatacttaagattagaaacaaagaaaggcttaacatcaataatataagtttccaatataagtagcataaaagagataagcaaattaaacccaaaaagtagaaaataaataatgaaagtagtagcagaaattattgaaatacaaaacagataaaaagatcaacaaacccaaaattgatttttttagttgttaaaattgttatctgtcaagcaagatcgatttaaaaaagagagagaagacacaaattgccaatatgtagactgaaagaaagaatatcaatgtggatccttgagacagcacaggataataataaaactttatgagcaactttgtcagtaaatttaacaacgttgggtgacacaaatttctgaaaaacacaacttaccaaaatcagcatgaaatgaaatagaaaatctggatagccttatgtctacttttaataactgaattcgttatcaaactccttccacaaagaaaactgcacgccctggtggttttatggtgagttgtatcaaatacgtagggaagaaataatgctgatctttcacaaactcattcagaaaacagaagaagggagaacgtctgccatggcctgaatttgccccctccctgctgccaaaattcataccctaaccccagcatctcagaaggtgactgtatttggagaggggatctttacagaagtcattaagttaaaatgtggtcattagggttgccctggcccagtctgctggcgtcctcgtaagaagagcagatgagggcacggacacacacagagggacggccctgtgaggacacagggagaagatggtgtctgcaagccaaggagagaccccaggcaccagccctgcccctccttgatctcagaccccaggctccgggactgtgagaaggaagtgcctgttcgagccaccagttctgcgcattcttaaggtagcccaaacaaactaataaaatccctagtgcgttgtaccaggcggatgtaagcctgagacgacacctgacaaagacattatgataaaacacaattggggaacgtcccgcacatcaacacagacacaaaacactcaaccagatgttagcaatcacggccagcaagggaagtaaatggtacaccacgaccaaacgtgcttccgccgggaatgcaagagccgtttactgtttgagcatcaatcagtgtcattcacagaagcagaaaacatgatcattcaataaatgcagagaaatcattcaacaaaaaagcaacacccattatcacagataagaactcgagacaggctaagaacaaagtgaaactttctccatatgatatggccacgtatgaggagcctacagctaaaatcagatgtgatggtggaatgccgaccttacacaaactcattcagaagacagaggaagaggggagaattcctgctctgtcctgaatttgccccactccctactgccaaaattcacatcctaaccccagcatcttggaaggtgactgtatctggagaatgggatctttacagaggtaatcaagtgaaaatgtggccattgggctgggcctccctaacagtgtccctctcactctgtgaacggggtgaggctgtctgcctggccacttctgttcaatgccgtactggaaattatagccaatgccacaaggtgagacaaatgagagtcgtgcagtttggagagggtgcctgttatgaaggtgtggtcttccacccaaacccaccctccggaccccatcctgagctgccggggctgggaccccacaaaccacatctctgctcagcctgccagcatccccttagactgccaataaggggcgctggagagaccaccaaggtccaaaaggacaggagagttcaggcgagtgttctgggttcagggagattggagacatgacggttaaattccacgcgtgctcctgcactgcacccttgggtgggaaggaacattactgggacagtggacaagaatgggaaatggactgcccgctagatggttgtatcacatcattaggtgattacaccaaggggcgttccctgcaggcacacgctgaggtccacagtggggagtggacatggtgaccccgccttgctggggctcagaagctggtacctgagatacagctttgatgtgaaccgaggcagcctcaaggtctctctgacctccctgctcctgtctctcccaaagcacgaagttgttccctgaatctcccttatctgcctgaagtccctaccggccaaagaagaaaacaatgacccggaatcccctccctgcgtttccattaactgagcttctatcgcaagaagaaaggccgaggtttgtcaacacacctggcaaatgtcacaaccattgtctgctccagcggactttgttccaggccattgtccgtgcttcaagcccattgaattccctaaaaatcatttactaccaccctaaagtcacccacactgccccatctcctttcccccaagaagaagggtgcatggccgtctgtggccccccggggtttggggtaatcgtcctcctaagatcctccatgctatgcacattagaacacatgtcagcctttcctccagttaatctgccttctgtgagttgattttccagtgaaacttccgagggcaaaggggaagtttttcccttggcctctgcgcgcctacttgtttttttttttttggttctaaaaacacttttgagtgagggagaggaagtgtgataaagaaaatggggcaaaatgcacaaagttagtgagtccgagtgaggtgctccctctctatcctcgcaactttgtcttctaagttttaaatttcaaaatatagcagtgaaaagaatgagaacgttaagtcccggaaaagccatgatttctcgctcagggaagtggccacgtgtccgcgatcgcaatcagcgaggctccgactccaggactgcgaagcggttccactgtcaaacacgccgagccggcgcgtttcacagctgccctcagctcctgcagctgggagcatgtttttccaatcagacgttctttcgcagaacaagaatgttcagttttttgctttcggtctcactgttggtgacgctttccggctgcgtggggccggacacacacaggcccacaccactcatttctctcttcaccagccagcttaggattgcttgaccactgaatgcatattcccacacgccgggcactctcagggcacggggggtgtcaggagcaagacagcgagctggcccctgccgcacctgtgggctgctgggtggagagtcctggtttcacagcatgtccaacgtggaaggaatagacaggcccccggggtcctgtggttttcaaagtcttcaatccgtttcgtacacggcagcactgggataaacgaggcccaatatgtgaagcgaaaagcagccctgatctgcctgaagggggagctgccccgggacctcctgagtcccatgccctctcctgagccccttgatctcccatgggggccccagggaccagggcactcagggcagccagcaactcgggccccacactcgggcctggtggttgatgccgggaagggcccagctgcacaaatgctgcccgatgggtgaggctcgaagcacaaggggcagcctctcccggagcagccgcggcccccatcaggccaccttctccaagccccttctctccatgctttgttttgctttttgtgtgtggtggacacatgagtgacctcccgccaacaaatctgaccagtgatgactagcgaccattcctggctgctctgtgaaccggggccccgtccacacagagaacctggattcacagccaattccaggactgagagcttcgctcaggtcagagccaagatccggggatccagccgttccaccactggccacatgttccttggtacccgagcctctgctgcccggggggaccatcgagccagagcccccaggtaggcgaggggcctgggtggaatatgacggaacaaaagatgatggaacaaaatagcctcattatttcacaccaagtatggaagagcagttcccccaactagcatgttctgtgtcatgttccacggctgttggctgtgagcacagcctggccacacaactccatgaataggtgccaccactatccctacttgacagagcaggaaactgaggcacagggaggctgcacagctgagcagcacagagcttggatttgcagccggggaatcagacggcaaagctgtagtccaccagctgcccagagggccacagagaggtgtggggcctaggacagtgcgcctgagggtcccagcctttgggaacccggggcatagcccaggaatgagaagccgagcagatggacagggaggggagcatcctggcagcagaggtggcttagggcatctgagggggtgggggccagccctgcaggccctgggaaggcgggctagtctgggcgcagagcaggagagcggcatggagcggggtctgtgcgtgggttgcccctgcactggaagcagctaggggcagggccaaccccactgaaccttcccagggttcgcagccccagggagatgccttcctcagctcagcttttaatgcctcctccggcactccccattgcagccccaggagtccctcaaggggctatacctcccactccctcatgctcaccagccagaaaatgcaatggaaaaaaggacctcatattcacagttgcaggcacacgcaaacgttaacacaggcaatctgcactgtgtatggccaaacacgagtgaacttttaaactgcagtgtgagctttaggcacttggagggcgggaagccccacatcccctgacccctcacgcgtccatccctctgtcctcatgggcaccgggtgaggcctcggggacagggaaactggacgggccccactgctgtcctgggccttcctcccgtgcaggtgataaggaggtgagagcatcgtgacggctggcacaggcctgagagggaggggatgggggctgctctaggtggggtcgggaggccccactggggagattcctccaggagacccagaaagctggaagccgccagcctatgcagagggcgctccctcctcatggatacagtccccagagaacccccccgcaagggccttaaagcgaaggcttgttctgaggttcaccaggacaagcaagtgtggctttgccctcttgccatccacacccctgggacatccaatcaggaccagcgatcgtccactgcctagaccagacccagtcatccccgaattcattatgtgggaactgaggagggggctccaggcagggggatcgtgcaggtggtcttggtgtccaggaggcctcacagtatccactcaccgccgtctccaccccctcaggcacaggtccctgtcctcatcctcatcagtgcggtcccacaactcaggtgcggcccccactccccttcccgccaacccccttccccggccctgccgcccttccccgcccagagggaaacatgagcatctcagaacaagagacaaagcccaggcattcagggaggataaagggggaacgcagcccccaccaaaatcttccccagacacaatgaggttttatcagcccattgtattaagcggaatacgagtcccataaagcccccacaccctgctccctcccaggaatgtgtggctctgtgcagaggggactggtcactgtgatgaaggccaggcactctgacacgggaggtctggttatctgctggtaatccttaggggcccttatccagggaggcaggagggcccgggggaggcacaggactgcagcagggactgtgggcggggaaagtgggagagcgattctcctggggggccaggaggagcgggccctgcccaccccaagtgactccttaggagccatgagataatgaatctttttttttttttttttgagatggagtcttgctctgtcgctcaggctggagtgcagtggtgcgatctcatctcaccgcaacctctacctcccgggcagttctcctgcctcagcctcccagtagctgggaccacacatgcccgccaccacgcctggctaatttttgtatttttagtagagatggagtttcaacatgttggcctggctggtctcgaactcctgacctcaggtgatccgcccgcctcggcctcccaaagtgctgggattacaggcatgagccaccgcgcccggccggatctgtgttgttttaagccactgagtttgtggtcatttctcacagcagccacagggaactcatacaaacgtggaagcagatcatttcaggggaattgaaaatatgccacaaatggagaaatgccacaaaaaattttaagttaataaaaatcgcacagataggaagagaaagtattatcatctatgaagggaagagcttcgggggctgtggctctgagagcctgagcagagggcagagctgggtggctggtgaggacgctgggccagcttgggggcttccattaggagccaagaccaggtccttgtgtgtccctggggcagggtgaggggtctggggtgctgtggcctcgcaggtggcgggggcggccagagaccactgctaagatcagcctcatgctctgtgcgagggctgagccgaaaacaatcttgggggccccacctcgaggccccggggtagggaggaggggaagctgatgcacttattcctggaggctgaggggagggtgccctggggaccctccctgctattagagactgcgcaggccgctaccccaaccccctcttgtcccagagacaggacaggagagacagacgggagaggcaggcagatgcctccagcagccatgggacagagtccagatgtcttaacggccgcataaaatggggcatgtgggctacccaaggagtggcccaggactcacaggaagccaccctcccgggctggaatcccaaaaatccaagccccactcgcagtcctaagtcttcctgcagaaaacctctccccctggataagcaaagatccctgtgagctcagcccgacccctgcctagtccctgctcccagctccgcagtctccaggcagccatggtgcctctggctgaaccatccacctgaggacccatacgggccagagccagtgcttggggtccccagcggcctccctccctgctgcctcagctgcccctctacagccctggtcacctgcaagtcatctggccaagaaggctgacccagaggccggactgcctcgtcacgccggcagggcccctcgcaggggcacgctgacagcaaggaggctcttagtgaaactcaaggatcttggcaggaggtgaaggcggtgcccgagcccccctgcctggcgtggcctcagtgagctccctgccctgcaaggtttggatttcaggtcctaggccagctccccactgtcctgcctgtctgaattccaacagattttatttgaaaatgttgcttttagcccagcgtcacctctgagctgcgactttatgttcatcatgtgcttcttcccccacttctacctgcagacccaagagcagggccgggtctcctccccttaggagcagggtgagggggtctgggaagcccccgcccacctccctgatcacctggccccaagctctgcccaggccccctacctgcatccagccacaccccacctgtccccagacccaggacataccacccctctcacgtcagcacctttggggtggcatcaggactttggggacagagcaagcgtggagaggggacccctccttgtgagcaggagagagaagcaacctgaccacaccaggcggggagagagagagaggtcatccggaaagagctgccagtgagcccattccacaggggtgctgggaccccgaggacacagccctgcctgtcccagggcccaacagtgactgcagtgaatgtcctcaagcatcagctgctcgatggcagccggggtttctgactgaccctgtggggttttctccatcaaattcctttgaacatctttgtccttaacgatcctgactgatctcagttgtttaggcctcttcttggctgccaggcgcacactcaggtgtgctttgcttttaaacgctgagaaaccctcggcaatgttttcttttcttttgaacatcactacagcagcccccaggaggggtgggtggtcccaccgacaagggcccccagggcccacaaaaggccactctctcatcccaaagtgcatcgtgccctgagcctggaagtcgggtctggccttcaagtaggagaggccaagccccacagaacccccaagggcgagcgggagagtgggcgagtgggcgcttccccgacgcccctccttggggctcagcgtcaccctcccggcctgagtcggcccctgctggacagctctgttcctgggtttggtgacaactctcccacacccagggctgtgacttggggacactggtctgtggagtctgtggattctgcggacacctggtctgtcacagagaagccccgttagtcctttttcccagcaagaacacagtcagggaaagacctccatctccacggcctcctcacaaagacactgtgaagactgaaaaattaagccacacagtgagagaagctaccgtacgtgtcatttcttaggattcacggaggtcttttgtcgagaatgtatgaagaactctgacaaatcaatgagaataaagcacccggctggcagaggcagggacagaccgaggcgcgtcgcgatgtgggtgtccggtgagcacgtgggaggggcccaacctcacccatcgtccgggaggtgcagactaaaccctgagacgccgtcctaccccagagaggccaacatttcaaagatccacagttccaggcggtgggcagagtgccacggccggtgtggaaaatggtggctggcatccactccagtctaacgtttcgtacctgggacccggcagtcccaggcctcagtgtgtgttctgggtaggaagcacctactggtgttcacccaaagacatgagattgtttatagcatcattattcccaatacccctgaactggaaagaactcagatgaccactggcagtgg[214 bp omitted]ggcccagccacagcctggcttgtgctgtgaccactgctccttctctcgctagactgggtgctcctgagcgtggacactgggcctctggtcatctgtgtgagctctgcgtggtgcctgacacacagtaggagcttggcgagtgtctgctgagtcaatgagaaaggagtgtagggccagaaacacgggccgacggctccctgccagtgagtcactctcggggcactgctgagtcataagttcctttcactttggatggatttttaattgtatgttctgaacagatggaaatttcttggctgttgggagtcaaactgtggatatttggtgagtgtatccaaaaggaagtggccgcagtatgagtcacccaggccatgtgaactttgatgggggaaacagaaccagcaacttctgctggttcacgaccaaaggaagcagtgccggagcgtgaacaatggggtgcaggcggccaagttctgagtggctgctgggagcgctttcccactgtctgcggagcccgtgacaccacagtgtccctcgaacatgcggggatggccggccaaatcacccagcctgctttcacgagcgaccgctgagctgtgttgcggcagtccctcccagggccgctgggccaggcccagctgcggggtagaggagaggatggggagaggggcctgagatggggcagggaagtctgtgagctcagcccgggacctggggccaagcaccaggaggccagggggagtctccaggggctggggctggagccgcatcagagaggaaaggggtgtttgaaaaaggggcagggcctgggacccaggaaactgttcttccagagacacccgtgaagctgagctttgcctctcagggaagctgtgaccccacgggtgctgcccagagagatcgggccaggtggagccaagatggactggaattccccgacggggacaaggggccggacgaggctgacttgccctgtctgatgaatggtcaggtttgctttttctcctgaaaacacgaggcagtgatcccggccagctaattccagcagactggagacgggatggtggagaatgaggctgtgggcgggaagagcagatgggactcgccagcatcctcacggcagggccgcgctattgccctccctcccctcctactctctggggtcccaggagccccagatacgcaatgctgccaggcgatttctggcgccccgcagacccctgcccctggagttgggccaggtcccggctggagcaaagggggctccttcaagcccgctcctccctgtcaaacccgaggagcctgacaggcgcagcgtcaccagcgtcaccgggccatagtgagcggccaagccagcgtcaccgggccatagtgagcggccaagccagcgtcaccgggccatagtgagccgccaagccagcgtcaccgggccatagtgagccgccaagccagtgtcaccgggccatagtgagcggccaagccttggtctgccagagccggccgcaccagaaggatttctgggtccccagtcctggaggagcacacggtttacaccaggccttgggaggggaagaggcaaggcgtgggcccagccctcactccccaggagaaaccctgtttgagcggcagaggagactggagagaccccagggcggggatccctgagaggagagaaacccggaattcatccacggaggcgttcacccagaggagacccggagcttctccaggagaggctggattgctccaacaggggccctgaggagctgatggcaagagcggaaggcagctctgactcgtgcgtctgactccaggtgtggccgttggggctacagtgggaccagcctgttgtcactgaacccacaaagtgcctccgagcgcgggtggagagagggggacctcccaccgtctgctggccttgaatcttgaatctaattcccgtctgtgctttgatgggagaggcactgggagcgggcggctttttcagttccttttatcttgaatggcctttgggggattttcacagattctgagttcaaagcccagggaggtgtgggaacgtgacattcctcaccgcattcctcaccgcattcctctgtaaaccaggcggtgttggcacccatgagcctgtgtcttctatgacatcaggagttttatccctcacgtcagaaatcagggttccaggcgccttggtttttcttggcgccagcggcttggctatagaagaaaaactgaaggggccaggtgcggtggctcacacctgtaatcccagcactttggaaggccaaggcgggtggatcacgaggtcaggggttcgagaccagccaacatggcaaaaccccgtttctactaaaaaaatacaaaaattagccgtgcatggtggcgggcacctgtagtcccagctacttgggaggctgaggcaggagaatcacttgaacccaggaggcagaggttgcagtgagccgagatcatgccactgcactccagcctgggtgacaagagcaagactccgtctcaagaaaaacaaaacaaaaacaacaacaacaacaaaaaagaatcactgaaggaagagtctctggggcaaggaggctacacagggctcggctcgcgtcctctctgtctgggccactcctggggcctccgggtcagcggcggggcgggtggtggtgtgcactcggcccctctgagatgcgaggttgcagtattggcatgtatgagaggtggtgcgtgagctgcttccagggaggtgctcccactgggtcgcctggtgagggggacagcctggcggggttggccgtggcacaacctccttctggcagtgaaggaccctcaggccgagggctgaccagaagtcagcatgggctcagatgcgtttccagcccactatgggaagttcacacagaattaaacagaggagtgagagtccgaccccctccacctggccccgttctcccggccacctcacgggtccttggggttcagactcagacctgtggggtgagagagagcagaaggtgctggggagaggagctggaggttggagaagggaggttggatgcagttggcggccctccaggctctggagggtcagtggggcctgggaagagagcagccgcagaggtgactcaggcccagctggcgggggagggacgcagccctcgctgcaactggacgtggggtggggctcccaggcctggtcctcctggctctggagaccagcaaccagcctggcctctgggggccacttccagccagtgcagtgctgtgcgtcccacgccagcctttccccgacctctgcaccagttccctccacacccggcccatgggcatccggccccagccgctcattccagatataagtacacgtgagcccctctcccactgctggctgccaaggctgggctgtggggtggcgccttctatctctgcagattcctctcctctctgcctctgcctggtgaaacactcctccataaccatcatgtacagtccctgacaactgcacaaaggctagggaaataaggggacccctgggaaaggtactcctgggggtcccagatggggaggttctgatgcgtgtccaggcatggccagcgtggctgaggagacgaggctgggtgtcgcctggagctccagcagggagaccaggcatcctggaggctgtgcctggcctgtccgtcccacacggggcagagctaacccaggccacattgctggcctgccatgcactgtgcaaaaagcatttggagagagaaagaaaagtttgtgtcctcagttacaaggcacagggtgaagtccttgtccttgggatcccatggtcagcccctgggcgtggcttttgagcccagtgggtccagaggggactcagtgaggtcttgtcttgcagagtgtgtgtggcagtgaggggaagaggttcatctgctgcagggcctgggaactcctgacacttggtgtggccttgaccaccgggagcaaacgcagtgcacacggcaaccggctctgacaaggcagatgctcctgcccagggcaggtcggaccctggctgagggagacacaaacctgaacgggctctgacaaggcagatgctcctccccagggggtttcagactctggctgagggagacacaaacctgggagtggaggggagtttagcactggatggcccacatgcagctaggatggccgcagtacccaggctggagcgagcggcttctggggcccaggagaggccctcgagcccgctgtcttcccggctgtcatctcctggcagggatctgctggggaaatagaatctgacgcaacgtattttccaacccagaaaacctcttcagaaaggtggaagagaaaaagcaattctattactgagtaagcgttaaagccagaatgcgaggtgcggctggggcagcccactgaaggcatcgcagagacagaaacctcactccttacagccgagtgaacactgagcacctgtgccttcaggggggtttgcagtttggcgagtgaggcccgctgctctgaggcgctaatctcccaaggaaacgttcctgagttgagcctgggcagaggcttccttagctagaaaacagatttaca[450 bp omitted]tgccagtggtcgtctgagttctttccagtttaggggtattgggaataatgctgctataaacaatctcatgtctttgggtgaacaccagtaggtgcttcctacccagaacacacaccgaggcctaggactgccgggtcccaggtacgaaacgttagactggagtggatgccggccaccgttttccacaccggccgtggcactctgcccaccgcctggaactgtcaatctttgaaatgttggcctctctggggtaggtcggcgtctcagggtttagtctgcacctcccggacgatgggtgaggttgggcccctcccacgtgctcaccggacacccgcatcgcgacgcgcctcggtctgtccctgcctctgccaggcaggcgctttattctcattgatttgtcagagttcttcatacattctcgacacaagtcctctgtgaatcctaagaaatgacacgtacggtagcttctctcactgtgtggcttaatttttcagtcttcacagtgtttttgataacagaagtccttaaacttcatgtagtccttgtgatacactcttctggtatctgtgtaagatatcatgattatatatttccttatttcacattctaaaatctctattattttatcttgagagcaataatccatatggaactgatactttagcatgatgggaggtgagatcgggattcatttcctccgattagagaccccatccctgcagcgcggcttgttgaaaagccgcccacatggcaccgcttgttgaaaggccctcccggctgggcgcggtgcctcacgcctgtaatcccagcacttagggaggccgaggcgggcggatcacctgaggtcaggagttcgaggccagcctgaccaacatggcgaaaccgcgtctctactaaaaatacaaaaattagctgggcgtggtggcgagcacctctaatcccagctacttgggaggctgaggcaggagaatcacttgaacccagggggcggaggttgcagtgagccgagattgcgtcactgcactccagcctgggcaacagagcgagactctgtctcaaaataaataaaaaaataagaaaagcctttgctgctgagccacagtcacctctgtggtttctcagctactttgacatcatggcaactgtagtggctttcttctgcttggtgtttaaatgatatatttttgcattcctttacttgccatttttctgtgtgttttttgatgtatcccccataaacagaatattactggattttgctgccttctctaaaccaagtctgacaatgtttgagtgtttgctcacttgccattgatgtaacctcgaatatgtggggtttccactgccatcctgcaggtgggcttcccttcctgttccaagttccttgtcttctcctttatcttctttcttgttttattacctatctttctattattttatactctccttctattcgcttgcttgctacagattcttttagtgttctattagtggtgacttcagaaattacaatatgcatctttgatttttaagaatctaatggaagttagttttttacctctccccagacaacgccaggacctttgaactctttaattccatgattccttgtgatagatagaatgacccctcccccaaagatgtgcttgttcaaatccctagaccctgtgaatatgttatgttacatattacacaattgaaaagagacttttaatgagggttgcggtcttatgacatcatctggacgggcccagcctgagcacgtgagccttcgagggcagagaacgttccctggcccgtgctggagcgattcactggctcatgatacggagatcatctggacgggcccagcctgagcacgtgagccttcgagggcagagaacgttccctggctcgtgctggagcgattcactggcttggaaaagaaggggaggatgatggggaatgtgggaccttcaggagcagaagccccagctgacagccaggagggagagggggccctgggctcacaattgcaaaaacctgaattctgccgacaacaataatgggctcagaagcgggtcctctcccaggcctcccgctcagagcccagccggccaacgcctggactctggccgagagactctcggcagcaaatccagtggagccccccgacttctgacaccagaaaccgtctgtgagtgcaggtctgcgttctcaagccgctaaactcacggagatttctacgcagctgcagaagatgaatgcatctcccttctacgccttctgctgtggcggccgtgagtgttaacccactgcttctaaacccgtgaagcctgtcatgtgacgctgatgtcctgtgactctggtggtccctaccccccaaggcctccacacccccctctctgtgctgtgttctgtgggccacggccacccctcatcagagcagccccctggggatcccttccagtggttggaagcaaacactttctattttcctgtgtctggaaatgcttgtattttgacttcatttttacaggatatttttcctggatataagatagttggttactgagcaatgacataaattacaatattattgacttcaagcccaaaggaaaaatgaatatacaggagtccacgttgatttgattaatgattgaatatgtaaattcataagaaggggcaactcttaactacagaaaaattccaatggataaatgtaaaaggaataagggaaatagaaaatcattgttatgacattacagtaataattgctgctgtcaccactgataaatgctaaaattagtggacagaattttaaggaaaaacaggatatttacgtaactcaacatagcagttattgcagtggctgtagcatgcgtcctcaccctcatttatctccctgtttctaggagacggagcttaatgtcactccccttgagtgtggactgaatttagtgactcaatttccaagaattgagcaagaaaagggaaaaataataactttatgttggagaaatgcacagagttcaccttgcccaagtgatcaaaggtgacttcacagtggtaagtcaggacaataccctgcaccctgacgtgatgtcgtgaaagggcactcgcgtacgtggtattctctccacaagtccataacccacggcaattgtgagtaagcctcagacaaacccccaccgcgggtcactctccgacattgctggcaatcctcttcaagagtgtgcaggttatgaaaggccaggacacactgagaaagggtcccagatgtgaggagacgaaggagatttgacaggagaagcatgatgggatcctggaacagagcaagaacgttagtgaagaacaggtgaaatgctgctagagcctgttggttctttgataatagcgtaccaaaaacaattttttagttttgataactgtaccatggttatgtaatacattaacactggggaagctcagtgaatatgtggactcttggactatttttataacgcttcttgtgtagaaggtctaaaatgatctcagaatacaaatttaaataaattaatttaatgctcaaaacacccttgattggaacttacagctggccctctgtattcatgggttcaaccaatcactaattaaaaatattggaaacaaaaattgcatctgtactgaccatatgcagactttttcttgttattattccctgaataacacagtataccgactctttacatagcatttacagcacattaggtattgtaagtaacacagagatgatctgaagcatatgggagggtgtgtggaggtggtatgcaaacactgcaccattttacagcacggacttgagcatctgcagattttggcatctccgggaggtcctgggaccaatccactctggataccaggagacagctgcattttctctctaaactttgtaacggtctcattccattgtctcccagcctccatcatctccttgggaaagttagcttaagttttgttttcctttgaaagaagttgccttttttcccgtttttaaaattttgtctttagctttcagcaatctgactgtgatatgcataggtgtatttttctttgtatatttgtcttgaacttgtctgggtgagctcacacactggggttggctgcgggtgactcagcacctgggcgagctcacacactggggtttgctgcgggtgatcagcaccagtgcacacacacctccatcccccatcagactagcctgggcatggtctaatggtggtggcagaggcactgcagggaacaagtccagccacacagcctcacttctgaagcctgggcctgggccatgtttgctgacacccctttggccaaagagagtcactaggctgtatcatcatcagagcctggggtgtcccaagtcacacagcaaaggtgggacccagagagtgggagcatgagccaccagtaaaatctatgcaccagattcactgccagtgagaggcccatccactactgcctgccgcaggccagggggcatcagggagcacatgaatacttaatactcatttggactgacggtgcagaagcttctgtgccccttatcctcttaacaccctcaggaggtgtgaaacacccccattttacagagaagtaaaatcactcacccccagcacacaccaggtttggggcagggccaggggctgacctaacagtcatctctggagctgctttgagctactgccatgttccatggggaatgtggtagatgggcattcctgtcccatggacacctccgaggtcacacgcccaagctggtcagctgagaaatgccatcacccacctcacctaagaccaggggtgataccctgccagccccctgccatcatccttttcaaactcagactcttgacagtaaagcccagaaaccctgggtggtcccaaatagaagctgcccctcagccatggagctcttggcctgaaggccaggatcagcagcagggtctgagatgggccagcctcctcagaaacccctgcttacttctcccacccaactgagaccagccctggggtacaacccttaagctgggtttggctgtgggctcctccccacgggggtccctcctgatgaggggagagctcaaggtggggttgccacactgttccatgagcaaagccagagaagcccccccaggacccgtggaggtgcagctggaccacagccaggtgctgcagagcctgggggctggactcccctgggacgcaggtgaccatcagcccagtgcaggcgccggcccctcctgcagagagtccgtcccagggtggaagccaggctccttggtgcctcgggtccaatcagccctcgtggggaagggggactggatcaggcagctccagggggaatttgagggaccaagaggatgttgccactggctcaagggcagtgcctgcccctccaccatgtccaagcactgcccagagcagaggaaagccctggaggtggatgccgcccagagggacccgcacagcccacaccaggagctctggtggagggaacagaagcagacacccgcatggacaccaccctcctgcagcgctgcccccacccctgcccctcccctgcctcctccccacccctgcctcctcccctgcccctcctcatccctagctgggctgctgcagtggctgatgacactgtcctggcctggaggaacagagacacatcctggaattgtacgctggtctcattgttgtggcccctctagatgcctgcacgggggtgtgggcagagcccactgggctgtgccgttctctccccttccacagagcctgacctttcagtagctgcagacttgttcatggtggttccagtgcctgaacagggagcacaggaaagctgtggggctgtggggggcggggaggggagggggcgtctgttgaaatgttctgttcgagatgggaactaagtaacctccttggcctgaaaatgggcattgggaggaagcagatttggggacggggatgtaaggctgggaggggtctgtgcgatctctgggaagccatgaggctgggcaagatggcccagggagtgatgaggtgaatggcagaaggggccaggcactggggtctccgaccctatgaggggcatgggagattggcagtggggtgtcaggcggggggtgggagagccaggagaagcacattccaaggacagacagaaagaggtcggctgacggccatgactgggaggctggtgggtgacttgctggacagacttcagctgtgggtggggctgggcatctgactgatgccatgggtgcaagcaaagggccgagaggagcaggacaggacggtgggtgtctgtcctccagcaccatgcagagcaggatgtggggagggagggaggggctgggtcttcctgagtccagcggccgtagcagggagtgcacatatagaggaggacacacttggggatgctggatggcggggaccatggaggctccctcgatcttcctcatggaaggggagctgagggtcaaccacagaggtgggggaggaggagggacactgcaggctgggggatggaggagggggaggaggagggacactgcaggctggggggatggaggagggggaggagcagggacactgcaggctgggggatggaggagggggaggagcagaggcactgcatttggggaatggaggaggggcaggagcagaggcactgcaggctgggggatggaggcagggaggagcagaggcaccgcaggctgggggggatggaggagggtgccccatctctgccaatcactggggacccattcccaagtccagggctctgccttgatgagccatgctccaagcaatcctctctggggcttttagatgaaatatctgaagaccagagaaaggggcagtggggaagaggtctttgcagaccactccggagacaggagaggaagagaagagtagagcacagagatgagggggcatcctgcgtggaggtggcctggagatgatggcctggaggtggcctggagatgatggcctggaggtggcctggagatgatggcctggaggtggcctggaggcagcctggaggtggcctggagatgatggcctggaggtggcctggaaatgatggcctggaagtggcctggaggtggcctggagatgatggcctggaggtggcctggagatgatggcctggaggtggcctggagagggcctggatatgatggcctagagatggcctggagatggcagggaaatgccacgtggggggtaccaattattaaggggactagtcaattgccaaagcctccgattatgatgggtattactatgaaaaagattataacgaatgcatgggctgtgacgatgacgtcgtggatgtggtcattacctagaaggttgccgggttggcctagttcagcccgaataaggaggcttaaagctggaggtggcctggagatgatggcttagagatggcctggacaggcctagagatgatagcctggaggtggcctggaggtggctcgtcccctgttgctgcatcctcatggcagccaggggtcttttggaaggcctggccagccactgctgagccacttcccccagcttcatcccctgtgactctgacaagcccccaccagccacagggatgagcagaccctgcccagggacaccatccagctgcccatgtggccctgagtgctggcttacctgcctgcctatgtctctgggggtccctgttgggagccccggctccccagcaagattggtcctctcctgggtgggggcttccgcagcagctggagagaagggggagcattccccattaattgaacctgggctgagtttctgtgggagctttgccctgggaacccatggtggccataaaacaccaaactcagatgttgcaagaaccaaactcagagcccctgtgacatcagtggaatgagagcgggaaaccagcccctggggaatcagccatgttctgcagcagagggagggcatgtgagatccaactgaagcctcttctgccttcagcaaaggctgcggtgcaatcctgcattcttgttcaggcaaatgttttccttgaaaaaacctcttgatgatgaagccggtttaactggtgttgaccaatggggtgtcagctttgaaggatgacactggtcagcctaggaggtcttggtggtggaggccaggggccctacccagaccccgggggacctggctgctgggcatgttgatggctcccttgttcaactgcaccccctctgggagcagcccttggtgaagaggattgtaatacatgaccccaaaatatgccacttttgcataagaattattttgagctgaaggcaattcagaagctacagattcaggaagagctctctaccctcctttttcgcctaaaagcagggcatacatttctctgggtaaaggtgttcccctctccagtaccaggcagaggagaatgactcttaactacgaaaaagcccctaccaaacaacacttacctcccatgcattttttaatcaccgccaacaatctaccacccctaggagcccaaaccccctttttcctttgtccttctccacaatttatcaccctttgttaaaatggtatataagtccccgtgtctcatcccttctttgggtttttgcttcttgtctgtgaagcttccgtgcacataacattcaaatttaaatttaattttctgctatcttttctgctgcaaatctgccttttgtcagtttaatttgcaaacctcaggaacagaacctgaggggagtgataaaggttttcctcccctaaataagccaatagggaaggatacagtgtataaaggtccataaggcccctgctcttatgggggctacttggaagggctaccccagccccacagtgcccaggggttggctgataccataaatctcctgggagaatcaacactttggccttgtgtttttaaaaacacagatatgaaagcaggtactagcaccacgcagagcccttccttagagcgcagaggggccatttctcccattatcggattccaaccccacttgacaggtgggaaacagcagataaaggactccaggatggggcttccccaggccagagaaaaaactcaaccacccaaaagtacagaacccacccaggctctggaggggtccacggctgaaaatcccatcttgggacctatgttttgggaggggaagagtggggaggatcattttctccttcattaatcacagacacttgggtttattgttgtcgactttctctgacatgtgttggagccaatatttatttgttaaaggaaaaccagcagtaaaacatttgctttgttacaaaataaaagccacattccagggaagtatacaaagggcttcgcacactgagatgccgctccctgccacgggaggctggacgactgcacgggagaaaattccagccagccccaggctctttgtgattcttcctctaaagactcgaaaggaagaagcaatcttcattaacaaacaaacaaaccaaagaggggagccgactcttactgaaactttaaacagaaccacatggaccctcccaggctagtaatccaagtctccaatccactcacccagccctggggcaactcgggtttcaagcatagaattctctgtcacttccacccaatacacagggacaagggcactgccaggctgctccctcctgggccctctctttgcatgacaaggcagttgtggtctgagacctggaggtcccgcaaagccagctctaggagggcctgaccccaaactcctccccatccccgcagttctccccctgccctcccagcacctcaccttcctttggggctggccagggagggaggccttggagaagcaggcaggtgaggccctgggtgacctctcaggtgacagggaggcacattgcactgctgtgaccgtgccaccgccctcctcagtgacttacgtgtcagggaaaatactgagattcccctgattagtcctttagcccagggatcaccaggaacagagtccctaaactggaggcctgattctttctcatcactgtccagagctgctctcaccagggccacagtggccccgagccgcctgattccttctcatcactgtccagagccgctcccatcagggccaaggtggccccgagccgcctgattccttctcatcattgtccagagccgctcccatcagggccaaggtggccccgagccgcctgattccttctcatcattgtccagagccgctcccatcagggccaaggtggccccgagccgcctgattccttctcatcattgtccagagccgctcccatcagggccacggtggccccgagccagccacaggaacccgtcccactctcctcggaacctcctccccagccccctgggtatcaggcttggtttgcacctttgtctctgctgctccctggtcacagcgcacgccctccccatccggggtgctgtccctgctccttctctgaactcctctgtccaggggctgacttgatttccctgattgcacctccctgagcccctcagatccaaaagacctgagccaacccctcacctctgccttgattctggcatctgctgggcccgcccccaggagccacattcacagccttggacatccatccccaccttcatgctgacagatccctaagggaggtaagaaaactgaggcacggggtggtcaaatgcctcagccatcaacaccccactggtggatgggaagccagggtttgagccccggtgagcccaggtgagctggctccagagccacttatcaacggaggctcgaatgtcccaatctcagcacaggtggtgaatgctatcacggggaagacaccccttcctcttccatttcctctgtcttgattcagccttctggccagttaatgtcagcgccgtggtgcccatcccagaacagaagctcctgctgatgaataatttccggcctcaccgtgacccagcctctcccgtgtttatctgtatctatctgtcatctacccccaccttacacccagcgtccgtccatgcacacacgctcacctcgcacccagagtccgtccgtgcacacactcaccttgcacccagagtccatccatgcacacacgctcatctctcacccagcgttggtccgtgcacacacgctcacttcgcacccagcatccgtccgtgcacacacgctcacctcgcacccagtgtccatgcacacacactcacctcgcaaccagcgtccatccatgcacacaggctcacctcgcacccagcgtccgtccgtgcacacacgctcacctcgcacccagcgtccgtccgtgcacacacgctcacctcgcacccagcgtccgtccgtgcacacacgctcacctcgcacccagcgtccgtccgtgcacacacgctcacctcgcacccagcgtccgtccgtgcacacgctcacctcgcacccagcgtccgtccgtgcacacacgctcacctcgcacccagcgtccgtccgtgcacacacgctcacctcgcacccagcgtccgtccgtgcacacacgctcacctcgcacccagcgtccgtccgtgcacacgctcacctcgcacccagcgtccgtccgtgcacacgctcacctcgtacccagcgtccgtctgtgcacacatgctcccctcgcaccgagcgtctgtccgtgcacacgcttacctcacacccagcatccatctgtgcacacacgctcccctcgcacccagcatccgtgcacacgctcacctcgcacccagcatctgtccatgcacacactcccctcgcacctagcgtccgtccatgcacatactcaccttgcacccagcatccatctgtgcacacaccctcacctcgcacccagcatctgtccgtgcacacacgctcacctcacacacactcccctcgcacccagcgtccgtcggtgcacacacgctcacctcccgcacctcccgtggaggcggcatccaggcagggaagcaaggacactctgcgtccattcctctctctaaacaccaaggcccccgcaatccgaggaatatatttgacagaaacaagaaaaaaggatgaaagtggccaagacaagccgatcccttctatctgttttcaggaacatgattttgtggccccaaactccttgaagcccgatgcttccacctccctcccactccactctcccccgacacatccgtccagctcccgttcctcttgggcacccacctctgccatctcagcagggttcccagcacccccaggcaaggcctgtgtgtggcgctttactgggagtgcgctggggaagagggaggcatgggctggaataaccacagagaccggccctgcacagatagcagaaagggaaggggatgtgttgcccggcccacctcggctcacgcaagacgctcggacacttggagacctggactgaagcagcctccaggggaggagagaggggtgccgctcaccactgccccctcccaagcccagcgtctaggtctggttcaccctcgcgaggtcgcctggcccatgtctggctacctgagctggccactgctgaggcaaagcccacccggctgctgttctggaagtggctctggaaagcccagctcctgtgggtacaggatcgctgagcgccaggcatgggggccacagccaaggcaggatcgctgagcgccaggcatggaggccacagccaaggcagccgcaggggcaggtgctgggctgtctaggagcagtgaccaagcacccagaggagcccaacaaggcccagcacataaaaccagcagcagaggcccaggagccacttagccagagagacacctggtgttcaccccagcacgcagatggggaaaggctaaagcacaaagaagcaactgtgtacagagagcttcaccccgaaatcagagacagccaaagtccgcccagagaggaactggtcggagtcctgtccaggccgaaaggtggtgggtgggtgctttaggggccagtggggagcgaggccgaagctatctctgtgcagctgccccctcacgctgctgtggccccagggtttggttcagatgctgagtgtccggtgacttccagacacttcctttccagtctcagggaacccaccccacaaagcgcctgccccaggacctgggtggcgcgtctgtgtcttctcagcatatccggttcttggagcagggagacgacccagatcctgctctctggctcctggcccgctgcccccaagctgtcaccaaggcaggtcatggatgttccgtgtcatggctgcgtgggccgttcgaccacggccacacacgcatagactgaggaagacagagcaaggggctgatcgctgccaagcagtggatgccagtgcaccgtgacaaggagcccagagcctttggtgggcgcctgactgtgtcttcaagttcccgggatctgtgtggacagctgccatcccagtcggccctttcttggttttcttggttttcagagaaggggcgaagaataagggggcagcgtcttctccaccagaagacacacctgcaaagctccatgaaggcaggcactggctgaggaggaagaaggaaacaggtctctcaggagcctctgcccttgcagccagggatgggcaggaggccagtgcctggtagggagcagcctgcgggttcagctcaggtgtaaacagcatggtcagctggaaaatggtccccaaatacgccaggtctcaatccctgtggtgcttgaatgtgaccttatgtggcaaatgtgtctttggggatgggattgagttaggatcccgggatgggggtgatcaactggggtcatccgggtgggccccaggtggcattgcaaggttcgcacaagacggagacttgacatggaggaaaccatggaccacggaggcagagagcaccatgaagaggctgtccacgaaggtcagagcgatgtggccgcaagccaaggagtgcacggccgctgggagccaagagaagccagcaggaccttctccagggcctcagaggggccccttggcctagtgatgctggtttcagactcctgccctccagaccgtgagcatgcgtttccgttgtttaaaatcaccaaggctgtggccatttgtcacagcaaccccaggaagtccacagaatgggaaaggagacgggagaggaggatggctgggctcagctgtcaggctgggctgtgcggggctcccttgggtggtggggaggagcctctgaaagggagctcagggaggggctgcccatggagaaagcactgggtggagaagctgtcggtcaattatctggtgattgcacctgcctgttgccagtcacagtcttcctccaggaggggtcaccgaccacgggccacatccactcctctctgctgcaggaatcctgtccctgctaaagctgatcctggctttatctgccctttgcagaggtgtggggctttggccctccactgggcaccgcacagcgtgggagccccctccccctggcccctgcggtggggtcggctgaagcactgggctggtcactcggtggaaaaggacacaagttccccttggggcccagaggctgcacatccgtccttccaggactgggcctaaggaattaaatggctgtgaaaacaggggcactgtgagccccagagtcgggccatgtcatctgaggatgatggtggcagcagcaaagctccagatgtggacacagtcccttcacctaccggggctgcacttcctccggtgccacagccaggccaggcgccctccctgagggaatccgcgggtcccgatggcctctggggtgagacactgggacgtgcctgcagagcagcaaacactctctgggcctcacaccctcttcccggctgcacagcggcacccccaggggcctgcccctgctcaaagccagccccaccgcccaaggtctggacctgcctgccctgcaggtggggctcaacttcctcgggttttctgctcccaggtgattttcctccctgcagccagggctgagcacctcggccaagtggctctttgctttaagaagagagggaatctcccagccgccagcccattgaggctccctgcacaggacgggactcagcgccgcggcggtggcatggccgtgccgggctgtgctgtgacctgaggcctcgtccgtgatgaccacgtcctcgcagagcctgggggcagggccggggggtggtcagatgcggtggagcctgtgccctgtgcatgaccgaagccacaagcatcaaaacagctacattcatgctgaagaggacatttatttttatttttgagacggagtcttgctctttcgcccaggctggagtgcagtggtgcgatcttggctccctgcaacctccgcctcccgggttcaagtgattctcccacctccgcctcccaagtagctgggattacaggcacgtgccaccacgcccagctaaattttttgtattcttagtagagacggggtttcgccatgttggtcaggttagtctcgaactcccagcctcaagtgatcccccctccttagcctcccaaagtgctgggattatagacgttagccaccgtacccagctggcaaaatttctaggtgaaataataaaataaaataaaaatagtggtcggaaatctgtctcctgagacagaagtgtctgattttctataactcagttaaaagtggtgccaatagaaacgcagttacgacgtcaataccggaaggccaggaatgccgcgtggtgaagaaagtgggtccagaggccctccctgaccttggtgtgctcggcctggacatgcctgtcactgttgatgaacagcaggtgcagatgtgtgtgccgccctgactggggtctcggggaggcgcggcgccgtcccactgcctagaaccggctggtgtgtgtttttgtttatctgcccacagctcctggttgaacaaattctctggtttcatttttcccataacaaaatgagctttctcagtaatgacaaaagaaaacttatgttctgaggcacggaagcctccataaaggaggggaaagtgccccttatattccagggcacccttcagtggcctggaggagccctgcctccctggagccgtgcgctaggtcgggctgtgtggctggggcaggcgtgcttcccatccacccagctccagcagctccagctcctgcaggacgcacatctggccccatctgcattctctcaccaaagccttccaccagaacctcccacccactctggagccccttctctccactgccagagccaaggaggcggccgcaggagtcattctgggggtcagaagctgacctctgctctattccctctattccttcggggattttgtgaccatggccaagtcatggtggcaggacctcagctcccctgtgtgcacctggggttggcgtcatagaccgtctccatggcctgccagccccagtaggtttgtaaccgcatctgaggccactcgtggcttgataaagaagaaagagacaggccgagggagggaggtggaggtgagggtggcgatgagatgcgttggggagatgcagaaggagctagagagggaggtagtgagggggagtggagcagggcagaagctgggcagatccacccagcccagcacccctgcccaagggagtgcgggagcctgggtggggaagaagtgtgggaggaacaggggagaccctgacttcatgccgctcgcaggcagggccctccctgttggtgagggggtgcttttaggcaggtgttcctggtcgggggaggccagtctagatcagaagagcaggcttgacccctccttggcctttagcagtgccttgaggccgagtgagggtcctaggctggtggacgtggctctcgagaggcctgtggactgattccaccacacgtggctgcctctccgtgagccgcacgggcagcgtgctaggcctgcgtgcctcgccggagggagggctgagtcgcactggctgggacatgggaaacacgccacccagccacgccaactccgaggcagacgaatgccactttctgcatgatatttcccccagatgtccgcatctttcccccagatgtcatcagtgcctgcttccctccctgtggagggctctgagggccgacccccaaagtccatctttcccccagatgtcatcagtgcctgcttccctccttgtggagggctctgacggccgacccccaaagtccatctttcccccagatgtcatcagtgcctgcttccctccctgtggagggctctgagggccgacccccaaagtccatctttcccccagatgtcatcagtacctgcttccctccttgtggagggctctgacggccgaccccagggtgggagagggccagccccccagcagcaggagcagtttaaactgcgggtaagtgtgctccaggggccctggttctgcagagccacacgccgaggctcctgagctatgtgaggaatccagggtgcagctcactgcgtgtcgcccaactgccctgggaaccggcactgcagggtcaggtgcatccctttccatgtgagctcctggccagcccaggcagacaggggaggccacacagcttccaggcaggcagcggctgggcctgagctggcccatacctgccgggctcctgtcccaccggctgtgtccggccagccagggctggggacatacacacctgagctgctctcaggagcacttttactggaacctcgaggaacctcaacctccttgtttctaggttgcagctccattacgtgctctgcaagtgaaagatgctgaggtggacactaacgtcgggagggaagcctaaacattgacgtcatctgtgcaaaaagtcaggagcatccacaggtccactctgtcccggacacgttctcaaagtcaggagcatccacagatccactctgtcccggacacgctctcacgctctctccggtttgactttgcaataacacagcccacgagggtcaccgtgaccttgaaacagtcctggctactttaaaattagctgcccctaggagcatggaagatgattcatcccgtgacaaatcttgccttatgtctcttttaaacacacacatctgggtatcaggcagcctcacgggggcagcttggttgtgctggaactcagcctcattgactccggtttcatgtgcacagaaactgactttgaaacttgcaggaagaggctgtcctggaagaagctgcagcctgcagagacggccctgggcttcctgcatcgctcccttcctgccacggggctgtgccaggagcttccatgcagctctcacacacaaggcaggtccccagctggctctctgcagagcctgacctgaggcacccattcgatgagagcaggttctctcagtgtagaacccagaccagcagaagccgcatcacagggacgcttcagagacgcactgctcagcccagaactgccaggcctggcagccggggtgcggggaccctgggaccctgatgttgtgtgagttcaggaaaaacagcgttgccttcctgaatgctgttccatttacttctagctcctacgtgtttcttcaagtaaaacacagtcgagcctcattattcatgggcaaatttgcctacttactagcatttaccctaacccagattcaatactcagggcacctccacggtcattggtggacgtcacagcgtcacagcaatgagacgtgagtttcctgacacggtgtctgggcgggggcagaacgagccatgctttggtgtctcgtttgtgtgtgcgtgagtgtgtgaatgtgggagtatgtgagtgtgtgttcatgtgtgtgttcgtaagcgtgttctcacctcaacactaacaaccctgactggcatgtgatggcagcctcatggggctccaagcccatgtgtatgggctccctgtctgtgctggaaggttctacagcaaaaatcagcccctgctcaccagaggcaaactgagcatgaaaggaaatgaaagacgtgaactttaatgcctctcatgtgccgggagaacgaggtcacacagcaaatcacggctcttgggaatcaggatgtgtttgaaaacttcaggggctctgagccctcatgaacccaaccgatgggcaagcagcccaggcccaggctggagatggggatggggctggccatggtccctgccaggagctggaagccactcccgcccctcctgctctctccatgtccactggacactgtccctggtcctgggagaagagggaaggcctctcagcctccactggagggactgctgggcgagcctgatctacaccacagcactccccaccacaggagcgacttcactgaccccaagggggacacttcccttaaaaggatcatcccacactgacccttgtcttgggaatcccaagtcggaggtcacgtcagaggcaggaatccaggctcagggacatctgccctgtccccagaggtctttgttgtccgaagccctgcattctctggctctaaggaattctgaagctattttggacactgcagcccttcccagggtggccagaagaggacaggcaggcttgcttggggtgggaggaagccgtggtccacactggagcatagaaaccagccctgtaagccaccctgctggcctcacaggttgtagggagcaaaggccgtgttgaagcccaggagcccctcaggaaggaaacccctcagactagggaacatggggagtgggcagccactcctccccaccctcaggcccataagctgcactccccacagtccccaggttcatccacagggaggccccagcaggaaggcagggccagggcgcagggcgaggtcgggggaatggactcccctgggtttctccctgccgatcgctgtagtggttgagtcctccactgagcacagccactcctgtaggcttaccccgctgcagctcgctctcggatcctaataaacaagtgagtcctccactgagcacggccactcctgtaggctcaccccactggagctcgctctcggactctaataaacaagtgagtcctccactgagcacggccactcctgtaggctcaccccactggagctcgctctcggactctaataaacaagtgagtcctccactgagcacggccactcctgtagcctcgccctgctgaaccactcctgtaggctcacccccactggaccactactgtaggctcaccctgctggagcaccctctcggactctaataaatgagttagtagccctgggcactgtacgtcctgtgttgagttccacaaaccctgcctttgcctttgtaaatcatctcctttttaaagtcttcacagagtatcaattctgactatgccctctgcttctttgtgtgtcatgtttttgaaatcttttccaaacacaccctctaaaagagagccacttaccatttttttcttctctttttttttttttttttttttgagactgagtctcactctgtcacccaggctgtagtgcagtggtgcgattttgacccactgcaagctccacctcccaggttcaagtgatactcttgcctcagcctcacgagtagctgagactacagggacctgccaacacgtccagctaatttttgtattttttgtagagacggggtttcactgtgttagccaggatggtctcgatctcccgacctcgtgatccacccacctcaacctcccaaagtgctgggattacaggtgtgagccactgtgcccggccacattttctaactagaatttacggttttgtttttgacatttaaatccttaatccactgggagttactttcatctttttccatatggacaactatttttttctagctctactgattgataggtttcccctgtttccaccaacctgcaaagccattggttccacccacacaaaaatttgttcctgagttctctgtccaatcctggtgcccgtctgtttttccaggcaaaaatctcacatcacttccactgctataatttcttaacaatcccaacatgcggtggaaaaatctcccttcctcttcagaagtgtcctagctattcctgtttttttagtcttccatatgcattttagaataatcacatcaattctcacggaacacctttttgggattttggttggacgtcccccaacccctgtccctgcctggccatgctggggagacgcccaccttctccaggggcttcgccgtaagggacaggcctgacaccaggattctccaagaactgcctgcgtctcttcctgctgagcactcacctcaccgaaaccacaacaggtaacgaactcggccgctggttcctgccccgggtctcgccagtgggggcccagtgcttctgttcaccagcaccaggggcctggcccacatcccagacagcaaggtgggaggacacagaggggctctgcctgcagaggccttccaaaccctgcccacctgtgccccccgggtgggctggccaggtcccctccactcattccacagcccgcagcaggtgacttcgggctggcagctggttggggaggctgcctttttaccgtgccctgagtgagtcaaggctgaaggctgctgcccggggatctctgcgccgacttgcagcagcacacagagggctccgtgtggctctaaggtgggcagggagagccagtggcaagctcagaagacttccagaaccgccggcccgtggcagcgggagtcggctgcgaggctgtcccaaggccgggtgtcctgcagggctgggcaaagggcacgctggcctctgcctcccctcacggggccgggcaacaccctggatctttcccttttccttcatttacagaaaccccttgagggaggcgaaggtggagagaagagccagacaggagacaggaaaaggggaggcagatggcgggggcgggggcaggacaggagctcagagggaagagggggaccaccgtggggagggcaggacggagaggagaggggctgggtgggtggggctgcagcgtgaggcccccacgaccactgccttcccaggctcgccccccagccccttcacctgcatcctggacgtgacagtcctagctcttcccaccccggccctcccagcacccccaggcctcctcccacaagttgaggggccagaaacgccacgtgtccccttcaccggcacctgaaggcagagcaggggagttgggtctggacgagcctcttcactgagaacatccccagaaagctcaacttcatcgtaaaaattcatccacatttgtagtcctggtcttaaggttttttattgactttgcttaccgtaagatacaccacgcatccacaagtgtgtgtgtgatgtgtttgcgtggtttacagaataacataaaaaccatccgaaacacaccactgtccacaagctgagtctgaggccaggctcccaggcaaggaggtggtccctggtggcacgggcagggtgcgtggagacggggacccagaggatgcacgggaaaaacatgcctttatggttcagttacctcccaccgggtccctcccacaacatgcggggattatgggaggcacaattcgagatgagattcgggtggggacaaaccacatcacctggctacctactactgtaccacgcatacccggccaagatgagattcgggtggggacacagccaagccacatcacctggctacctactactgtaccacgcatacccggccagggaaacccccacccgagggtgcagactgaactaactagtgcttgaactgtcatgaatcatgtttattgacagagaattggcatacaacaagctgcacatcagtgtccatttgacatgagttgacatctgtgtgtacccacgaatccactgccaccatacaggcagtgaacagacccacttctcagggttccttgtgtcctctgtcctgtcctccacagccactcccagtcccgaccccaggcaaccattgatctattttctgtcacataggttggtttgcatttgctggaatcttacgtgaacacaatcctgcagttcacaccttttggtctggcttcttttccttggcacaagctctgtgctgtttgcctgtgttgtggcccacactgagttcactgcgttctactcctgagtgccctccgtgggagaggagctccgggctggctgatacactcgcctcctgacaggagcttgctttgcctccagtttgcagccctcacaaacaaggccgctatgaacatgtggcttcaggtcttgatgcggatgactgaggacctgaatatctggatcacgagacaggtgtgtgtttaactttttagcaagcggcaaaactgtttttcagaagggtcgtcctactgcggaagtgagtggccttccctgagtttccagtcggtgctgggagttccctgagtttccgcactcagggccgggagttctagctgctccacacctttgacgactcttgctacagtcggtcttgtaaattgtaacctttccagggccccaggatgagagagtctttcgttccccttttcacagatgaggaaacagagtcacagagaggctgaggaatgttcccgaagtcacaaacccggcgagtcctggagtcaggcctcgagctctgagccgggcggaaactcagtgggggtctccggaaaaggcctgagccacaggcgccactccctacggctgaggctacaaagcctgcggcacccccacagctgctccacaaatggctcccagaagtgctgactccccggtccttaatggttggaggccctgaagtcggaggcctggtctgagccgcctccgaggaggcagagcccctgcgtccaggtgggggctgctgggcctgtgggcagagggggtgtcatggggcccatgggtgaggagccactgccgtgggaaggaggccgcctggccgctgggtcaccctcacgctcacagtgagctgggctttgtcttgcctagaggaacaggaaaaggagctgtgttggtttccagtcacagtgtggggagagaagcccatgaaatcccctggatatggctcacagagccaagagtaagttgcaaaaaggtgcagtgcctgggccccatggctgagtccttactcgcatgcttgccagggcattgctcccggcacgaggccgcccgcctgcagcaggcccgcaggggcacggtgggtccccgcccgctcctcatgccttgagcgcgtcatccttcccggggttcacggcctctgacagccagacctcaacacggccagcacggtgtgcatggtgtgcacgcctcctgcgccggggccaccagagtgggctctcaccggaggagaaagacagtcggggagagcagcgctgtctgtcacgctttgtcacgctttgccggtgtcatctgagaagtggtgcaggggacaaggggggcgtgacaggactggtcctgcggtagagaccctctggggtggtgttcctggaactctcccgaagcctctcttgttgacatgcatgccccactgaggagggcacacagcagagctgagttatacccacaccctgcaatcaaacatgccccacatcacacctggagtcacgcagaccccaggcagcctgcacaaaatgccaaacaagaaaaaactgcaagaaaaccaccgccacacgcctttctagaacatgcaacctaaggatcaaatcccacaaccaaaggtgcacagagaggtgttggggagaggacaagggcagcctccacactagaggacagagtggggctggcatggcagccgcagggacacagcaggctgtggggccgggggctgagcctgggtgtcagccggctgtggggccgggggctgagcctgggtgtcagccggctgtggggccgggggctgagcctgggtggcagccggctgtggggccgggggctgagcctgggtgtcagccggctgtggggccgggggctgagcctgggtggcagccggctgtggggccgggggctgagcctgggtggcagccggctgtggggccgggggctgagcctgggtcgcagtcggctgtggggtcgggggctgagcaggcactcttaggccgtctacctccgaacccagctcttcccttgtggccatgcaggcttggggaaaatggcctcctctctgtgaacccggtctctgaaatgggatcagaccccggcctacactctctctacctcggctcctgtccgatttctgaggttcagtggattgtcaggttggatccccccagctggttcaggaggcaaacactgttattactgccatttttcagatgagaaccagctcatgaggtcagaggggcgagcatctgccaaggtcctccctggcaagtggacatgggccaggcaggacggctgcagaagctgagtgtgcctctcccgcttcaccacccctcggtgtgaactccctatctatgaatttagaggatgtcctgggtgggttccctggagactcgagcctgaggaaagggttaagtgcaagagcttcgtggggactgtgatccagggagcaggcggagagcagagcaggggacaggcagggtgatgacgagatggagccctgagctgaccggcctggggaccactgggtgtcccatcctctttctaacatcgaaagctctgctcttcacccttgggcttcactgagggaacgaaggggcgctcacgtttatggagactctttccaatcccttggtagaagtttatccttttgatgaagttgtttgcgcacctttcaaggctcactgcgggcatttcatgtttcgtgactatcgtgaagacattttttctatcatactatattagttattgttgatgtataagaaaactattggtttgttttgatgttcaccttgcccatgcccatcatccccaacttttatttattctgatacctttgcagagttctgactgatttctcttggaatttctagagggacaacgctgtcatctgcaaataactcaacatgcttattctccatctcattccttatctgatcacatcatctaggatctcgagaagtatcaagtgtttattcttatcaaattttatcattttctttttggtgattttaaaaggaatgcaaaatatttcacaatctattttcaatatttgggagatgacttttatgaagttaagaatgcatgctggccaggcacggtggctcacacctataatcccagcattttgggaggctgaggtgggcaggtcactcgagcccaggagttcaagaccagcctgggcagcatggagaaaccctatctctacaaaaaatacaaaaattagctgggcatggtggcacgtgcctgtagtcccagctactcaggaggctgaggcaagaggattgcttgggcccaggaattcaaggttgcagtgagccatgattacagcatcgcactccagcctgggtgacagtgagaccctatctcaaaaaagaaaagaaaaggaagaaaagaaagcatgctttgccccatagcaaaagagtttttatcatcaagtgttgaattttattgaacatcttggaatttattgatgcatcccatggctttctgttctgataaagcagtgacttgtggtcgctgatgtcctaatattgacccatctttatatttctgaatgtgatgggattctgagcctctgtatttctaggggagactagtctctgtgtgatgtatgacgaatcagaaaattcattccttatctgatcacatcatctaggatctcaagaagtatcaaatgtttattcttatgaaattttatcagtttttctatgatctgtaagaataactttgaatggtgggttgtgtgtgtgtgtgtgtgttttgatacagggtcttgctctgttgcccaggttggagtacagtggcccaatctcggctcactgcaacctctgcctcccaggttcaagcgattctcccgcctcagcctcccgagtagctgggattacaggcacgtgccactacacctggcttatgtttgtattttaagtagagatggggtttcaccacgttggccaggctggtctcgaactcctggactcgagtaatccgcccatctcggcctcccaaagtgctgggattacaggcgtgagccactgccccccagcccactttgaatgtttctgaccactaaacagtaagggttttgtgtgcatgggatcatcgactgtgtgcacttaggcatctgtctcctcccacgcaaccgtgacatttgtgaggctcagccctgctgtcacaccttcctcctcattgccgaaggtcaccacgttgtgttaaacaaccaccgtctccatttgactgctgagggacactgggctatttctggttcagactgtgatgaacggtgctgctgtgaaggttcctggacaggtgtttttagaacatgtgtggtggggcgcattcccaagagaggacttcttgtcagatgcatgcatgctccactttatcagagaggccacttctccaaagagactgtacaatttatgctcccaccagcagcatggggacgcttcgcccggttcttatcccctccaagagctggtgttatccgttgtgttctttttagcggattctgggagatgagtaaaagattaacgtaaccttctctcatcaatatggacaagttaatactggtttaactttctagctatgtttccctgaaaatctaatcaaggcagaatgttacccaggacgtgacccctgatgggcgcattgcacctaaatttgcaggtctttgcaggcactagaaatatctgctgggggcacccttgatttcggttgcccgggtgcagtgacctgctcctgggcatgttccttgatgcgtgctgcaccgacccctctggagctgaactagagatggaaccgtaggccagggttgtttcacccatccatatggatcttgctctcccatattccagctgccacttgatgggagagggggagaggggccagagaagaggaggcacctttgctgaaaatcaattgatcatatacacacgaatctatttctggattctattctgttgtattggtttatatttgtttccttttgcaaactgcactattttgatgactgcagctttataataaaatattgaagacagggagtagcattctccaactcgttcttcctttttcaaccttgttttggctattcttgttcctttgtgtttttatacagagtttgtaatcagcttgctaatagttaccaaaaagctgctagcatgtagattgtaattgtgttgtatttatacataatttagggacaattgacatcttcacaacattgaaacttctgatcaagaatcttccgagtcttcatattccctgctgtggtaagtattgctttttgtttcatttctaatttttcatcgctagtatatagaaacacagccagttgttctgtgttgcccttatgtcctgcaaccttgctaaactcacttattaattctaaaagtttgtgtatagtctccttaggatttcctacagacaatcatgtcatgtgtgattagtccttttttatttcttcttttccaatctgtacccctttatttcttgttcttgcctaattaaactaagatctcccatgcaatactgtatagaaatggtgaaagcagcatccttcttttgttccttaccttgggagaaagatttcgttttacaatattaagtataaaattatgctctttaccaggctgagaaaatacccttctattcctaacttcctgaactttttaaagaatgggcgtttaattttgctatattatttttctgtagatgtgtattttttgtagggagatgatcccatgacttttttcagttattctactaatagagtgaattatattgactgacttttgaatgttaaaccaaccttgcatccctgagatggtacctgctggtcaggattgtgacgatcctttctctgcagtactgggttttctttgctaacattttgtcaaggatttttgcaggatattgatctgcagttttcttttcttgcagtgtctctgtctggtatcagagtaatagaggcctcacgaaatgaattgggaagtttccctttctcctctgtgttctaaaagagcttctgtaatttgcaattattccttcaataaatattttataatatttaccagtgaagacatctgggctaggggttttcctcctaaatggcttttaattgagtttaatttattcaacagacatggagctattcagtttttaaaattaaaattgttcacaaatggtattttataaattctctattttcataagtagcatttattaccctttttattttttaagagacagggtctcactctgtcaccctggctggagtgcagtggcgtgatcatagctctctgtaaccttgaactcctgggctcagacaatcgtcccgccttggcctcccaaagttctggtattgctggcgtgagactctgagcctggcccatctttttaatatctgtaggatctttctttcttctattttttcattcttgatattggaaatttacgtcagtaccctttaaaaaaaaatcagtctgggccaggcgcggtggttcacacctgtaatctcagcactttgggaggccaaggtgggtgcatcacttgaggtcagcagttccaggccagcctgtccaacatggtgaaaccccatctctactaaaaatacaaaaattagccgggcgtggtggcttatgcctgtaatcccagctactcaggaggctgaggcaggagaatcacttgaacccaggagatggaggctgcagtgagccgagatcacaccattgcactccagcctgggcaacagagtgagactccatcaaaaaaaaaaaaatcagtccagacagaatttccagaagacaaaacaaaacaaaaaaacagcagcttttggcttcagtaatttttctctactgttttggtctgcttcctatttttcattaatttcagttctgatatttattatttcctttcttctgtttactttgtgcttaatttgcttttttcctggcttcttcagttggaggctcaggtcgtgtctttgtgctccttcttttccgcatttagtgctataaatttcccattaagcgctgcattagcttttccccagaaatttggatatgctgttattttcaattaactaaacaaagttttaattgtctcccaagagtcatacaatttattgagaaatgtgttgtttaaaatttcaaaatatgttgggactttccagataactattttttacttcttgcttaactctgttatgacctaaaagcatactttgtaggatttgtgtttttaaaaatttgttaagatatatcttatggcccaggatatggtctatcttggtgacgtccatgcacatttgagaagaatgttctaagctgttgctgggtggtgtgttctatgaacatcaatcagctctaggtgctggatagtgttgctcatgccctctgcatcattactgatttttctgtccatgtgtctgacaattaccgagagaagagagatgaagtcttaaagcataactggggatctgtctatttctctttccagttcgatgggtttttcttcatggggtttgaagccctgttgtttggtacatgctcatttatgactgtgatgtcttcttggagccctgaccctcattatgatgcaaagtccctcatcatccatgtggatgctccttctagatctacatctacatccacgtagatgttgaaatctatttgtcagagatgaagcagcgactccacctttcttttgactagtgcttgaatggtgtattatgtttaactctatatatgcctttagattcaaagtgcatttcttgtagccacgatatagttgaatcctgctttttaaaatccaatatgacaggtcaggcgtggtggctcacgcctgtaatcccagcactttgggaggcggaggcgggcagatcacgaggtcaggagatcaaaaccatcctggctaacacagtgaaatcctgtctctactagaaatacaaaaatatcagccaggcatggtggtgagcgcctgtagtcccagctactcaggagggtgaggcaggagaatggtgtgaacccgggaggcagagcttgccgtgagccgagatggcgccactgcactccagcctgggagacagcgcgactctgtctcaaaaaaataaaaaaataaaaataaaataaataaaatccaacctgacaatctatcttttaactggtatggctagaccatccacatttaatagattattgatacaattggattttaagctaccattttgtcacgtgttttctatttgttacatgttttttgcttcttttgctcgcttttctgccttctcttggttaactgagcattactttatcattccattttatgtcctcttgtcctataacttatacctctgttagaaaattgtactcactgtcctagggttaagtcttaaattaatcaaagtttaccttcggatagtatgagactgcttcacgtatagtgtaaggaccccacagcagtattttcccaacaatttcttccatgctctgtgaattatcatcacatggtttaccttggagcatgttatcaacacaatacaacactaccattttccctttagatagttggcatttgcagcaattacaatttttaattatttcttccatttctatactctattactcttcatgtctgaaggaaataatgtatacagtggtccaattccaagacaaagtgccttgaattggcttaggtcagcaaactgcagaagaaacaggatatcctaggcccctgctcggatagccaacacctgcttcttggcctcccccttccccccttaatttttaaaagttattttcactagtaaagaattctgaatcaggccacgagtggcagctcacgcctgtaatcccagcactttgggaggccgaggtgggcagattatgaagtcaggagattgaggctgccatggctaacatggtgaaaccccatccctactaaaaatacaaaaaattagctgggcatggtggcaggtgcttgtagtcccagctactcaggaggctgaggcatgagaatggcatgaacccgggaggcagagcttgcagtgagctgagattgcgccactgcactccagcccggccgacagagcgagactccgtctaaaaaaaaaaaaaaaaatctgaatcagcacttttttttcctttcagtacttgaaagccatccctccatcatcatccaccttgcatagtgtctgcagatagttctgctgtgcttcttatcttggttcttctcgcgtctcatgtgtccctctccctcccttctcctcccagttcctttagagagtttctgcatgtctttttccccagctgcttgaatatgcacaggtttctgtgctttttttttgtttctgttctattttgtttgttttacttttttgctgttttacctgatggatgttgtctgagtttctttaatctgtgctttgatgtctgtcattgattttggaaaattattgaccattatttcttcaaatattccttgtccaccccctcaccatctgtgattccaattgtattatgttacactacttgagatcgtattgtaatccctcggaaacacgctctatgtttttcctcttatctctttggttttccatttggatgatttctatagagctattttcaaattcatggatttctttggctaagtcaagtttactgacaagcttctcaaagccatttttcatctcttttactgtgttttcatttttagcattttcattttgttctttctcacagtttctatctcttttcaagacagcatattattttaagcaaagaaatggaaataagctaagtctcatgaatggtggaagaattgacaaataagctaagtctcattaattttagggagacttagctagtttcattcaatcatttatgtaaatgtgttcatcctggcatagaaagagctagaacagaaattgagctttaaaagcaagtttcaaaaccatggatattatctcatgtatgctttgtttttaaaattccacaaagcaacataatatttctagagtaacaaatatctacaaaatgcattttgtaaaacagcctggaaggaaaacccacagaagatgataagggttcggtttggcaggaggcagggttgggactccagctttactggtcacatgtggagtttttacagtgaggttgtgtcctgtgtgagctatgtgtcttcagacaactcaccctgtgattgggtggatgatgcggcagagaagggagcacaaagggccctggcaggtgcaggtggaggcagggctgaggccaggtctgctctatgtcaagaggagtgcagcctctcacaaaagctgaacaattcctaggctcctgcgcactgcgggttgtaaccacggcccgggcagctcctctgagcctgagtgcagccccttccctgtctgtaccacctctccctgcaaacccatcaaccccatcccaggccccacctgcccaggaagcaagacagacacctgtggtgcaggccccagacttgaggaatctgctaccgcttcttagaacccagacacggtcctaagcctgctccacctgctccaccccaggacctctgccggagctgccctcggtcctggatgctctctcctccctgcgcaccccacagcccattcctccacagcccatgagccctcccctggtccctgcaatgagccatggccactcccctgctccccacacctgtgctccaaggccccccagggacctggcacgtccgtctctttgggggcactggtttgagcctgcccctaccagagggcacagagcctccaggaccctggtggagggacaaacagggccgagcagagctccatgtggacgctgggcgctgccctcagagcacctgcaggcgtctgtgcagaagggcccgggaggaggtaaggcgaatggagagacttttggtcttattttctacgtgtgtttctgcattttctgttgatttttctgtggttatcacatattactcgtgtctacaaaggaaacaatacaactctaatagaaagaggggatgctacagagcctatggggacacagccatgaggccaaggtaaggccccaagtgaaacgaatgagcaaaaagagttcgtacagctaccaggtaagcagtcacatgtgtttcatagtagctgtgtctcctactgatcacacccccatagtccccaaaggtggagagtggggcaggagagaggtaggccaactcaggccacaggtgggctggcacccgccctgccccagcccctccctcctgggagccgcagacaggcccccagggcagtgcatcaggccacacctgcagagacctgcttcccctggcagcaggcacctgccctgacggaagacttaggaatgggttgggttgggtggaagtggtgccccagggcaggtgagatggaagaggtgaaagagacctgcactgcagggttaatggacaggggccagacagaccaggagcctcgggaggagaagccaccaggacccaggacacatgaacacccctgacacacactcacacgcacacaggctgacacacatgcacacactgtacatagttacagaaacacacacatgcacacacacagcacagagagacatgcacacacatgcacacaaggtacggtcacagacacacacacagcagacacacagacacacccactgcactgcagagacaccaccaaaccctgatagacacacacagactcactcctccatccacctgagaaacaaaagttttgcagaagtgtgcgatgaccacttctactctatgctgttctccttaatctttttatttttaaaaaatgtgggtcataatcctttacattgatttccttcctcacagtgcaccgcaagcactcagggaaggactccaggtttgaaggcagatgctggtcgggacccgaccaggtggctgggcgggaagaggtgagatcgggcaggattgggcctgggaaggctgaggcaggcagggatgatgccagcagaggagaatcccaagcaggccccgcggctgcggctggagagctccaggggcggagaggaggtgggaggcagcagtcaggttgggaggaccctggcaagcaagcccagagaggagggccgggagggccgggcactagaagtgtgaagtcactgctgcctcctggggctgcttcagaggatgggtggggccacgtgtggggagatcagggagactggagactacgctgtttggtccaggcataggagatgagccctggccgggaagggacagtgtggatgggccaggcggaatcagagggtttcagagaaagccgtcaagccagtgccatgagtttcgcgcacacgaggagggagcaggctggggggtgttgctggtgtgagggctctctggttgcagggagcggtccggtcgggtgggggcacagctgccaggaggaaagcgcccagggcctgcaggtggggctcaggatgctggccctgaagaaatagaaacagggttttcacctgggagggaggaggagcctgggaactggggaggaagaggctctgctgggccgcgccctgggaacagggggacctggggacagatctggccctcgcacgcccctcctgtctcgcgtccgtccctccgtgcagccggggcaggaccctgcaggggccttgcgggccggaggtgccggcttcctcctccgtcccgtcccccccgcggtgactctattcaaatctccccccttcccgctgccccaccggactcaggggctggggtcgtagcccggcgggcagcggtgttcaccttccgcataaacctgggcttcctcgcggggcagcccccgggccctgtgctgggtcgcagcctcgggcggttccctcggggcgggacgtgtccccgtccgtcctcgcccgtccccgccgcccccgggtcccggcccgccccgtcctcgcagccgcaggtccgctgcggcgcccgcccccctctcccctccccgggccttgccctgctcgtcgctccgccccctgcccggcccctgcccggccccgccccgcgcccgccccctgcccgcgcccgccccgccccctgcccggcccctgcccggcccctgcccgccccctgcccggcctcccagcggcggcggctgcagcgcggcggtccgagcgggtgcaccgcggcggaggaggcagcatcccgcggcgctgacggtcctggggagagcatggcgccgaggtgaggccggggctgcgggcaggggttgggggacgccaagatgcggctgcgggggtcgcgggggtcgcggggctcggccgggtcctgcgggggtcgcgggggtcctgcggggtctgacccgtgcctgtcccgcgcaggtgcccctggccatggccgcggcggcggcgcctcctggacgtgctcgcgcccctggtcctgctgctcggggtccgcgcggcctccgcggagccaggtaagacccgggcgggacgggaaggttcgcgccggtgcccgccggcctcgccgccctggctggggtccccgcccggctccctcacccccgccccggccgctctgggttcagccccggccctgcccacgcgcgcaggaggcgccggagccggacggagcggggcggggtggccggagtcccgcccattcattctccccgcggggtccgggccgggaggggtgcgcggtgcgagcggccggagtccccgcgcggggaccgaacctccgcggccggcggggtcgtcggtgccgggagggctcggggcggggccgcggggtctcgggagacgcggcctctgtcgccgtcacggcctcgtccccgcagcgccgggtcccgggactgaccgcgggcggaaggcggcggagcgcggggcgtcgtctccgcgtttccaacctgttgaggctcctcgccgcgggccgggccttgtgcgcctctgtccccgccgccctcaggcctctgtccccgcgcccgccgtggtgtcgggttgcgcggtcccctttgatgccaaccgagcgccgcgcggtccgagaacaatgcccagaagccgctgccccgccggcctcgccgcttcccgtgcgcggcaaacggtgcgcggggcccgtggggaccttcctgcctccaaccccgggacccagttccccaccacctgctaaccggggcctcctgcctccagccagcccagcagaggcccgggggaggcggcggggacgcggaccccaggggagccccgcccaaagggcctgggtgccttgtcgcgggtggaatcccacccgggggtccacgcagccagcgcctgcctccgactcgactccacacctgcttgctacagcgggtgaggaagcaggaaagggggagggagggatgtcgtctggattcctgtaataatttgtttcattgtttccaatcgacttagtcaccaggttaaatagtagcatagacctttcaaaaaagtagctagcttataagtagatgtattgaaaacacctgcttgttgagtcgtagacaattcctcatttactgtgtgaactctagggggtgaaacacgggcggagagcggctgtgagctcacgcggctccatccccacagcggcccagggtcactcggggccattaatcaggccgcagagctgccctctgagccgggccgccagcgcccacagggcccagaccagggctccctgggcgggatgttttaaatcgcacagggacaaaggaaaggaaagacgctggggcccaagcccgagcttatgaaacgttatcaaggaggagatgtaaaaggtgatggtttttttgcctttgaatagaaaaaacaaaaactgttaacgcgagctttggtgagatgcaatcttgagatctaagagtggggtgtaaagtcagtgcaggcctcagcagggaaagttacggttggccaaatgggctgtgcgttcctcttctgtcccgggcctgccccagcctcaagcactctggggcaggaaggccccttggaggtgtctaatggaatgtggaaggcgggtggccaggaggctgaagcggaagcaggcccagagaggggtctgcatgctgcccacacacccctcccccagcccggagagaactcaggctccaggccacccgcagcccgggttccagtccttgcaggaccaagtccccctgaaatgggaaaacagtcgccccctttaggggttattggagaagagctaatgtgtctgaaatgctgactctggcgagggtttcagttgttctcaaaacttaaaaagcacccttgagagttgaaggcctgaggcccagtttgctgatttgcacatttttttctggccaagaatgatgcatctttccatgtctctgtgctacacttgatccctagaaaagtcttttgcttttttgtgtcaggattggtcgctgtgatgctgaggttcttgaatggtgtttgtgcctttccctgtaatcaggaacctgggctcagtggtcacttggccgcttggttgccacccagctgtgtgaggtgccgcagtcttacctgcaatctctcctctggtggatttgtgtgtgcgaaacagccgtgacccccaagaggtgcttgtagtcagtgcttcagagtcagagtggagctgaggaagaggactgtgtcaccggggcagttgctgatgcccatggccacgccaggagcctggtctcatgagtctccttgtctctgagcctctcctacactccaccatggcatcaagctctacccctgcctccctgcagcccccagaagatgcatgtcctgcccctgctcaccactaggacctcctcctgtctggtggtcagcacagagcccagtgatgtgggtacaaggcagggtccctgcgcctcacttcccactccctctgaagccctgcagggattgggcttcagtgacctgggttccgtgggtgtggctcaccccagggcacacggcgcctaggtaacgagagaccctcccgcgtagaaggtggtcttgtttctgggctcacccactggggagtcttcaggattcagatgcaaggactttggaagatagttttgaatttcagcaaaacttgtttttcagggcactcctgttttcctgtaaatgaaagcagagcaggggaagtcctctgtaggaaaacctagaaggagtgaactgccctgctccagagtgcaggcgccagacactgggggccagtccaggagagccccacttcacctgctgctgctccatttaaaagtgcaaggcacatgcatacacgggcatgcacaattgtgcacacaggtgcacattcccagtcacgcgaagtgcaggggcacaactgtgtacatgcacacacacacaaaagtgcacatgtgtgtgcacacacatgccccccgcaggcgtgtgattctcacagtcatgctgcatccacacaaagtcttcctccctcagagtgccttgttctgtcttcacctggattgttgaaaaggctgggggctgggttctttgggccccgggagtgccaggggatcctgtggtatgatcaacagcaccaccgccctgggagcagctcctgattgctgggaacagacagtaggggctgggctggggtagaagctgcagcctgcaggcagcccagagagaggggcccccacaacaccctccccagcccccgctgattgtgtgggggcagggagtatgcaggcagctcggagagaggggcccccacaacaccctcccacccccgctcactgtgttgggggaggggtgcctgcttctgctcaggaaggagacccggctgggtctggctgtggagcgtatgttggagacccgaggccaccctggaactctccaggtgaagcctagggatccaaagaacctcacagctgtgggggatggagtggggcaacacctgaaacctccagcaagtctcttcctctctcagccccaggcctgcagaggagggtgtgccagccaactgggcctttgtgccggcactggctccccaccagtgctcaggggtcaggtgcagaggctggcagggacaaagctggctgtggctgtgtctggaggggctggccatggccctcaccccacccccggcatggggcactggaccatgcagagaaggggccaccccagtgcctgccagggccagtcagagctgccaccctccaggctgtctgttagcgggtgcctgtcagagaacaagacgacaggcctggccaggcccaaccccacagcgagatttcagcggctggccagtggcagacggcgcagggtctgagacagatattccctcgtatggtgctgtgcagggcaggggcagaatcctgggaaactaaaatgcatgttgggcgcccttatacgatgatgatatttggtacattttgaaatactgtggcccatgaagatcctgaaagcagtttggggcactgtggggtgttctgtggcctctgggcttgggtgctcctcttatccaaggcctcccaggcctgggagtttggggtctaaggcccttttcaaggcccaggcacctgcccagaatgactgggcagctgagacccgcctgctgggagccttgccagggccagcactgggcggtcacaggccagagccctgcaccaggcggtcataggccaggacctgtccaaggcagcggagtgccaggcaagtgaagccctgccatctggtgcctgagcgcagaccctgctccacggccagtggctgtcaccagccttgctgcctcagtttcccctccttaaccccggggcgggagtggctgcttcctctaggggttctgtgagcggccgctggcaattgtgtaaaagccacataccacacactggatctttgtgccagatcccgtgtcacgtgaggagacagccagcccaggcagggagctgatctgtgttgtcccctggcgctgcccggggccacagagagtgagggagcggtgcttaccggccctggcggtaacgttttagatggcgagtttgggcctctgcagaagggctgtcaggaggagcttttgatcacggatgcgctgagtcagatgaaatgtggaggctgcaggggaagtgtctgtgccccgtgcctgcaggagcacgccttccccccgcagctcctccggcgcgggcaggccccggcacggcctttctggcttcttccacaggagccgtggaaaggggaattattctcaagcccctgcatctttctggcactttctggcatttcatggtggcagatggggtcacctcgccacctcggggctgatcccctgtgggcccctcgttcccacaggagccttgtgatgggcagggcaggcaccagcaccaggctgggtggcggtttggctctcaccacgccggcttccagaaggccagcaggcttgcgagtgggcacacgctggtgctggggccgggcactggtggggggtcaagggctgaccctgcggggacccctgcagacagacactgggccagagccacagggaggaaggccagtgggaacggcaggaggagggagcgtgattggttacggtggcggaactcgcacccacccccgcagccgtttgttcgtttgctcatttatttttggtctgaagtccatgcttttgtatttccccaccgttccgttgagcagcttcaacatttgccgcagttaggcctctctggaatctgtgcttagagattgtgagacagggtcaagtttcagcagctcggactcctctgtctgcagagaacctgccagcacagctgctcctgggggcaggagaggcactgtctgttttggggtgacgtgagctgatgggaaagccaggctggacatagctcctgggccggcagcccatcttggtggcggcttcacgccgtctggcatctccggtcctggagcatgagggctcaggaagagcctctgattcggctgctctggaggcctcgtctggacacacctgggcaggcccgagtccacacaccctatggcctcaggaaccgagagagaccttccttccatgtttcaacttagacaacaggagactttgttttgggaggaatcactcaattcaggtggacgctgcagctgggcgggacatctggcctctccctgtggcagggaggggcatgggagagacaggggtagtgtcccaggaactccgtgggcctgtggcgaagtcccagccctgcagctgccagtgcagggtgttatccaggggcaggacatcgtctgcagtggctctgccttccccgatgccaggtgaccccatggagccagtgtctgtgacctcttccatgctggggctaaagaggccagcaggattgggggctggcattagtggagaacctcagagcccagggctgtgggctgatgggtggcgaggcccccgccagctgcttggggatagcccagccactgttcttggtccacccggcctttgattcctttttcctgtgtgcatttttgagcaccttctgtgtgcgagaggccgtgcctgcccgagaagagaaggaaacaccacaatgagcctcggacacccacagtctgaagggcccggagtaagcctcagacgcccacagtctggagggcccggcgctgtgaacgagcagtcacagggaacagcgtgcccttatcgctgacacaggctctggagggcccggcgctgtgagtgagcagtcatagggaacagtgcacccttatcgctgacacaggcgagggcttcgtcttctcacagctcttatcttgggtgtcaccccagccagagtcagggctgatggcggggggtggggggggggcaggctgtggtcagggacctgcaggagaggggagggcctcgcttctgatgggcgacgttcatttacacacagctctgcggcccaaacggccaggctggatcctgtcttttaaaaaccttgctaatttggttgatggaaaatatcatctcagagttctgttttgtgagtccccattgccatgcgggcaaacattttcatccactaaggggccgtcgtgtttctctgggaacgtggcgttcaccgtgtgggtgaactttttcacgcactaaggggccgtcgtgcttctctgggaatgccgggtttgtggctcgtgcccactgccctgcaggtgcattctctttccccgtagctttttgtctgttgatgctttcagctctggatgtcctattttgcgtacttttattgtttatggtcagcctttaactgggggtatgatatttctttaactgggggtatatttcttttttttttttttttcgagatggagtctggctctgttgcccaggctggagtgcagtggcgtgatcttggcgccctgcaacctccatcttccgggctcaagcgattctcctgcctcagcctcctgagtagctgggactacaggtgtgggccaccacgcctggctaattttttttttttttttaaagtagagacggggttttgccatgttggccaggctggtctcaaactcctgacctcaggtggtccacctgcctcggcctcccaaagtgctgggattccaggcgtgtgccactgtgcccagccatggggtatatttcttaatgtgtggagttgtttttcctcatttttctggtccctttagagatggcaccctggagtggccagcagagctcaggggcctgcggcccaggcacacagacaatggagctggccctgccactttgctcatctgtggtgcaggtctgctgaggggccgtgagggtcctgcaagtgaaggtgcttgaggcctcagtgcctgtggggaggccacgtggcacctgtcagctgttagcgtcttgactctgcctttgtggatatggaattagagatgcttctcacagtagtggctaaactgtcaggaagcctggccgtcatctatggtcctctttgccctcatgggtgggatgccgcctagtgtgatggctgagagctcaggctgtgaccctgagtgtgtgtggccacgggcaggctgctcaccctctccgtgtcttggtctctaatctgtgcctggggatggtggagcgtcatggggccatacaggaaggatgggacatcacacatcggcttcctggggtgtgtcctgctgacagccctctgaggccagccggtcctgaggctctaggggggacgccacagtggagagagggctccatccccacccttagggcagagccccgtaggagggactggtttgcaacgtgagtaaaatgggtccccgtgagcagacacagcttttgtgctgcttcttactgagccccgcgctgtgcctgctgaactgaaagatgtgtattagagagggcagccattcccacctcctccagccgcgctacgtgtccgcaggccagggcgcctgcaccatgacaggcttcaacgcccctgtcgcggggacccagggaacacctgtctcctccacttgctggatttgtgactgggcggcaaacattttctaaagtctcccgctacgacccctcggctgtcaggagacttctgagaaagccgggcctcttttgccccagcgaggagctttcttgtgaagaggcagttcccggagggaggcgtctgtgctttgtaaagtttagcctcatgtgctgcctctgaggaggagttcagagaacatccgcttcctttctgttatcatctcagccttccagccagaaagaaggaagcgtccatggatcccgtccacgctaaccttggggtccctctgccagccctgcacatccttgtccctgggcactgagggaagcaaaggccccgccagccatgcccagcacttgtgcctgggcctttgcagaggctagaggcagggtagaggatggagagggtttaaaaggcaggttcccaggaaattccctaggtgtgggattggaggggtgctgagggaggtggcggaccctcaggggcaggagccttatggagtgagctggtccatggagctgggaggcgtcttctagtataaattctcatttcagctaaacagcttgccctctccaagcccgtgtgcacctgaaccatctctgctctctgagccttggtcccttggaggagcaggaggaggtggaggaggaggatcgggaggaggagggggaggccctttctgtattggatgcaccgcctggccccaggccctcctgcccagccttgtggctctggccgtcaatcagctcccttctcctggctttgctgctgccctgcctcttgctaggaggccatggtgtgcctgtgcctggcaggcagtgttgctgctgacctctcatctgttttgggtccccaaatctcagccctgtctccctttcgggggcacatcttgatgcggggtctctgatcccctcggggcagcaggacatccctgttttccagctgaaatgagacttcacccccaaaggaatgggctccagtccgacctactcaggttgttagtcacacgtttctattgtgaaaatgactgagaatgttgtgggaggtttggaaaccaggaagaccacctgtcccaattcagcctttcctgtcatcacaggggacgtctggcattttaacagacctgggcggcctcctgcagacaaggctcggaccctgcggccgactctgccccaggcctggcccctgctgatggccatgctccgggcatgtggcctgagggcctcacggacagccagcctcccagaccagaaaacagccctgcccgccagtgagagggcagacagatggacactaatgtccccgaacctaagaaacaaaacccaaaaccctcatttatgcttccacttccgatcacacgcatagaaggccgaatactgaccccgagctgaccaccccggcctgtgggacccgtgagtatggcctgtgtgtgggatgaggctcaggatcaggtgcagatgaccctggattatcaggtgggccccacgtcattacgagggtccttatagagaaggggcaggacagggagaggaggggatgatggagatggagccgctggggagggcatgagaagaccaggaagtgggttccccctggagcctccagaggacccctgcgggcaccgtgacttctgacttccagtctcctgagctctgagggatgcctgtgttgctttaagacactgactgacttgtcccagcagccagaggtgacagtgcggcgtggtgttggttcaccgaaggggtggcattagtgaccatgggaataagggcctctcacctgcgaagggccactctgtggggcaggaagtcttggatgtgtgccggcttcagcaggaccctcaaggctgctgggggtcagaatacgagcacttcctgcacacccagggccaccccaggctgcaggctttgtggagacttaaagatgagtcctcggccttcggaatctcctgactcaatggaacctctggtcttcaggtccccaggatgacctcccaacaggcccagggcagcagccaggagctggacacccagggctcagagctcaggaccggctgccacgggtggggcaggaggaggggcaggaccatgcgcaggggcggcggagcggggctgtgaatggagccccccttccggaagatggatgcaggtgggaaccagcgtggtgtggagttgagagcgggggtgcggcaggcggccggggcaggccccggacgggaaagtgcaggcggtgccattgatcagaccctggctgggggcctggggttcacgccttgcctggccttcagagaggtgcgagctctacttttggagaatgaggcaaaggcgcagaagcactcccggaaagtgccatccagcccagtgcctggcgctgcagccgggtggagccccaggtggtgctcacgcagccaggcgggcatggtgtgttgggggttttcataaagaaaagctgaccaggcacgtgccaagcaggccctcagccctgagggtacttgccgggggccgggagagtgtgggcccccgcttatccagaacactgcgtgggccctcggctatctggaatgcctcgccgggcctttcaattatccagaacacacagccagaccccttctgttatccggactgcccagcaacaccgggcaggtatgcctctgtgaccctgacccagctgagttgggaacgtggccacaccggcccttcctgtggggcccgtgaaacctgtgaatcacgcctctcattggcatctggatcgtggctccctagacccggctttttaaacctattcttggggaatggggaccttctctgaggtccatcttggtcaggagcagtagggccggccagcctggatctctgtcctgcagcccactttctggccaggagactggggcagcacacacagtcttgccatgcccagtgtcctttgtgaactggggccggtgtgggggtggccggggcacagtctccccacgcctggtgtcctttgtgaactgggggtggtgtggggaccgcgaggctccgcactggtgtgggggtggccggggcagggcggtgtttgcttggattcagaaatccaggcccctaggtgttgaacctgaggacagtgtgctctcctgggcctcggtccgtcctctgtgacctggtcacccagcatctcttagatttcctctgaggacagtgtgctctcctggaccgcggtccgtcctctgtgacctggtcacccggcatctcttagattccagcttaggctcagcaggtgctaaatattagtcagattggagctgcatgctgactagcacacagtttctagttgaactccagaggtgcagcctctactctcccacttgattggaagcagcacagctcactttgcctgggtcttttatccccagccccagcgcctgcccctgacaactcttcccttccctcgttctgcatatgctcgttctgcatatcctcgttctgcatttcctcgtctgaattgcaagctggtcttgctctcgagagagtgacagtgctttcagtgtcaggtatgttttcttgttccgtgagttttcagatatttggaagcagctaatttgatctttacccttctgttttcagcagaaataattctagttccctaagttatttttgttaaagggcttttctgactgtcggtgttcttggttgcttttggttgtggcgggttgctgtttagataatgtgtgttttgggaaatgatcttcccaaaggtggtgctgggatcccggagagcccgcccagattccccaggagcagctcctaccctcactgccagaccctgctggtttttgtatttcacgtggactcacctcctggcttgtcagggccttgtgggattcttagcctcttaatggatacgaatggcaccggcttgccttacctccttctggcgcttgcttctctgtgcttgtgggctgttccactgtagtctctggattggcccccgaacgtgcctgcctgctgtgcagggatccctgggttccccggggcttggggccctttcacctgcaggttccctgtcctgcggtctgtggcttgctcagtgtcctcaggtgtcctcttccgactcgagggtctcacgggtgcccccgccctgcctggcccagctgccctctctgtggcatttctaggaccgcggtctctctggcattctgtgtgccaacttctgctccctccagctccctgatgggcttttcagcacatccaggacctgtgcaccaggcctgttaataacaacggactgtggggtgaccgctctcggccgggggatgtggtttggcccaaatcctctgcatccgttgttgtagccactgtggtctgggcagagctgggccctccatcctgggtgccactcccatgaagtggtgaaggaggtgctgctctgtggaaaacgctaagggtggggagaattgcaccgtagggaagagagaaaagggggttctggcctccaacctccttccccaggccccacccacagcgcagctggcagcactctgtgtctccggcctcttccatctccccagacacgtctttcctgggaggtggccttggcatggccagtcctgctgccgcaggaaccgagaagggcaggtgcctgttcgttaacgtgtgccgcccccggagcgctggctgtgagtgggggcgcctggcgtggggctggacggccagggcctgctgtctagatgtgcagtgacaagacccttcccttccaggggagccggctctgactccgagctctttgtgggctgcatctgcagattgaggacagcgctgagcggagctggccgggtgctcatccctggtgggggcagaggggtctgcatcccggcccccggctgccgaagtggtagggtgggcgtgcccttcccacgcctgcccgccagcatcgctgagggtccccgagctggggagggatgtctctggcagggcagctcagtgctgggctcattcttcccacgtcaaggcagccgtcccttcttggtggtttcccttgctttgtggcaggagctggtggcctgggaacagctgccgggtgtttagatgaattcccgggctggctctggggcggcgcttgcccggtcacttgtctgctgcgatcactgcagaggctgcctccttgctgagcctcggggtgctcaccggcggttcccacctgctctgcacagcccgcctcgtgcacctgctgaccccaccgtgtccacagcccgccctccttggctcacatctcttcctggggtctcagggaagcggcacctcctcaggggcctcccagccacctcacgtcacttcctggggtctcagggcagcggcacctcctcaggggcctccaaggctgtctctgctttagcgttgggttcccgggtccctcccaccccgacctcctgtgcctgcggccctgcgaggcgtgatggccaatacacaccctctagaggggcttgtgtcatgtggaaccagccagaccccccggacggcttgcaggcagggagatggagaagcaacccctccatggggcagacagtgccatagtcttcaccgcctcagtctgggggcatcagggctgcaggtcagctcttccctgtcttcagtaaaggatggacgcgaggaccagggtccccagtgtcagtggcgggtcagggatgccaaagtgctgagcagaagttggccagcccttgccagaggctctggagctgggccctgacacacgatgccgtgtgtagtgacatgcaattccatgtagtgacgtgattccgtgtagtaaggcgatgccgtgtgtggtgacgtgcagttccgtgtagtgacgtgatgccgtgtgtggtgacatgcagttccgtgtagtgacgtgatgccgggtagtgacgtgatgccgtgtagtgacgcaatgccgtgtagttacatgatgctgtgtgtagtgatgcgcgatgccgtgtgtggtgacacgatgccgtgtgtggtgacacttaatgtcatgtagtgacacgctcgcaggatcgccaaggccaggctggctccaaaggcttgggtctggcttcctggggccactgggtgctctctgaggccgcccatcactgttcgggccctggggtgggagctgggctgcaaagtggcctggactttatgtcctgccaggtacagtgtttccctcagcagatttatcaggcgttttgggtgtaaatgccaggaagcctggctggcgctgaaggaccctcctcaaagccacggatgggcaccatgcttaggggaggacctggggccacttggttgcattgtgaaatgttcatgatttttaaacagttttattttttaaaattactgaagtccaacaggagcattattcagcatttgaggccccagccagtacagcgctgcctggaataaaaagtaaaatgtcccccggaaccccagccctcagttctccctccctggacccccctcctgagaatcttctcacaaccttggcttactgactccacattacggccgtgtccccgctctgtggcccggtggacgcaggtagctttgactcaaaacaggaatttgtttccatcctttcatggtcacaaataataaaaagcagcttctggacaacaatgaagttgagataaataccaggaccagaccggccacgggagccgtgggtgagccgagggtccccctcaggacccctgcatcctgcctgagtgtgcagcagctccccccgacaggagcgtcagggccggtctcctccgagtctcctggcagaggcgttgctgtcgcagctggcactgtgcatggctggcagcagaagtctgtgcttggcagccctcgacacctgctggatgtgtttgcagggctgggcaggcacctgtcccacggcccagccccgagggtctcgtggcaccagcctggcaggacgggcagcagggagttaacgggagccactgcgaggacactgtgatctcagagctgcgtcatcgctgatggaagaggtgacgtcccctccacagaaagcgcctttgtgggcgaccctggctcgtccccctgcagcccccacgcaggtagtgggctgccctctccctctcccggagtcccctcggggcaccgagaacagacccctccttcatccctgctgtcagctcatgacaccggacaatttgggtcccaattatatctagagaaccaggggaaaggtcacgttgtctagacattaatccagcactgtggcattttttcctgggcctgtatcctggcaacaggagggcgagtgggggccccagctcctcccctcctcagaaccttctggggctggaggtgtggcatgtgcagggaaggcagcctggagaaggcggtgcccttgggctgggcctgcagtgggcagccatgcaggactccatgggaggagaaaccacagctctcggctgtgctggggtggggtgaacagtggcggggaaccttggggagctgtggatggcccaacctcattggaagctgtgcgtggccaagctcaggcacctgctctgcctctcccagtcctgcctgtgtctgtcctggtcacggattcctacctctgtcccaggagggtgtgaggacagtctgtgccactcacccgtgtctgctccgagccaggagactctggccacccccaccccacccagccctgcctcgaggtcctgcactggtccctgcccggtaccgggtcagctggtgcctgcctgtcctgccctgcactcctcaggctcctcaaggacagacggacagacaggcactctagagaagggaccttggccagacggctttgccgcccccacccccataggtgcttgctttgagccccttgcaaaggtgaagccagatctgggatcccagggcctggtgcggctggacatgggaggagggccacggtcacgcttgcacggggcagagactcccagaaccacaggcctcaggagagctgggaagggaaggagagggcactgcggtgcctggagagccagagtccgcccgtgtggaagtgttgggggctgtgttgcagtgacagccctggcgtctcaggagcggagcaggacaccgcgtttctggctgtgcaaggctccacgcgggtcagcagcccatcctggcttgtcatgctgttaattagattggaaaacctcggccttccatttcttaaattgctcactcctgcagtcctcttctcttgcctgcaggcctggaaggtgtggagcgggtcaggtggctggcaggttgccaggaaggaagctcacactgtttcagggttggccgggtacttgccgtgcctgcctggcacagagaccctcattcctgccacctcccaggcagtaggcagccaggtggaccaccgagtggagagaacctttgaacacctcagcacctgaggctcagggccctgtgacaggacacagcccggggtcccccagggccagttgcacccctctggaattcctgagcactgtgactgtgacctgtgtcatatgtgcggcctctcagcttgcaaccctccattcctgcctgtggtgtggtgccatcttcaccccattccatgccaacacactcacacagacacacgctcgggccgatacgcacacatggctgtcacacacacaggttcacagacacacaggctcacgcacacacaggttcacatatacacagctcacacaagctctcacacacacacgttcacacacacaggctcacacatacaggttcacatacacatggctcacacacatgggctcacacacacacacacacatgcaggcacacacaggctcactgtgaggtttaatctcagcaaagtctgagcacctggacttggctcagggaccctggcacacccgcttgctctctgtctgtagaggggcaggaggccctgggtttggtgggctctgtctgtagaggggcaggaggccctgggcttggtgggcaggcatttggagtgcgatggcggggcctcgcctgtgggcactgagggtctcacctcttcctgcagcttttgaagggatgggaggctccaggatagagttgcaggacagaatagatggcagaagccaggagccggggcctttgcgtggctgcctggcctgacgcacctcgcgccgtgccaggacccgggcagggcagcaaaaggcatctgtgagtcgccgtcctgtgcgggtctcagggcacagtgggtggcacgggctctcccagccgtcggttggtgaaaaacggggcctccgcccagcaccctgccaaggaaaggggaggtagcggccccaggtcaggccactgggtgaggcggggctgtgggcctcctgggtggaggggcctgttctttgggagaccacctggtgggtggtgtcaggaaggtccaagtggcttttttttttttgagatggagtttcactcttgttgcccaggctggagtgcaatggcatgatctctggtcactgcaacctccatctcctgggtttgagagattctcctgcctcagcctcccgagtagctgggattacaggcatgcaccaccatgtccagctaatttttttgtatttttgcccagctaattttttgtatttttagtagagacaaggtttctccatgttggtcaggctggtctctaactcccgacctcaggtgatctgcccgcatctccttcccagagtgttgggattataggtgtgagccaccgcacccggccgaagtggttttaatgtccccacttttgaccacttctccttctccatagggcaaatcaagcttggaaatggtgtcctggagcttaagggagttggaaaccatggcttatgttccatggtgacatggttcttgagggttagctggtccagttcccgcgtgttggccggtctggtccctgagtgttggctggtccacttcctgagcgttggccagctgcccttgctgtgctggggtacattccccgagcttccacagtttccctttccttgctgctgtattcagtgatttgcagagagaaaggcgtggagctccacaagcacctcggacggcagcaggaccctcccaaagctgtgtccacacacagctgggcgcccgccccccgccccccgccccccggagggcccggctccaagggtcatatgagtggatctggaggtcggcctctcttgaatcccagcctcctcggggtcagcccaggttgtccccacccccacctgagttactgcggaaccaaggggctcatggccattgagtgactccagttaatgctgaattaggtacctcaggcttgagtcaaatattaacagaggaggccggccagagctccccagtgtttggaggatagcttggttttctccctgagtgcattgcccataccgggtggaggcagttccgtcctgcagactccgtggttctgagttggagcccttactggccagtttaagaccctcttggagcagggttctgcagtgtcctgggggcagaggcctgacgcactcagctgctcgcccagggccctcctgttgggcatttggatttggaatctgaggctgtaggagcagctgcctcccagtgaattctgatgcacagacaggggcctgtcctgccagcaggtcctgcagacggagccgggccagggtgctgggcagtgctgcggggccctggtggaaacagtccctgcagagggtcccgggcactggtgctggggggagggtagggcttaaggaggcctcatgtcgggaccctggcaggccaccccacctcccgcagtgcccggtccgccatccacagtgacacagggacaccttctcaggtggaggaggtggcagtcacggcaattcaggagcaaacccaggcttcctgtgcctctgtggtgggccctggtggtgttggcaggcccagggcacaggcaggctcagggctctgctggggagcagtgggaggccctctctgcagggcggagagccaggtgaggaggtgtgtggcgcaggtaaacacgcctggagcgcagctctgctgtgggttagccgtgggtctctgggcgagggttcccgggatacagacacctgccccaaggtgccccacagaggatgacccccagggcagccgtgcctgagcctgcgtggtcacctcccacagtgccaaggcgctcccccaaggcccctgcggcccacctgaccagtggagaactcgcgagcactcggccagtggtgcctccaatttgcagcctccaatccctggtcagaggtgtgacctgaccctggaccagagcgctgggccaggtcctggtggcttctgcccttcagcttggaagctcctgaaaaccggctcccttccggggcagcccttggcccccactgaccctccctcagtcctaggtgtgcagtggcgtggggaccctgggaggcccgtggcgcagccccttcccgcctcctgcccgtcggtttccattgctcaggcactgcctcgcccgcgcctctttctcccagacctgagccaccgctgccaggatccttccccagctggttttccttctctttgatgtgtttccactgagggtccaaaccggtccaggcgcgggttccagaactttcttcagatctctcgcacctgaaaatttcctctgtagccattcgcaggaggtttctcagatgccccgggctcgggggccagtcagtctcatgaggacggggtgggtctgacttgtggcatcgcggcctctccatcggtgctgctgggcctgtgagccaatgggtgggcagcaccacccaccgcctccttcctcacaccagtcttgggctgcgcagagccccagccatgtgtgtgctgagtgcagtgtgaccgcgtccgcccgtctccccggacacgcctgttggagccccggccgtgtgtgtgtgtgtgctgtgagtgcagtgtgaccgcgtccacctgtctccctggacacgcctgtcagagccccagactgggctcccctggaggaccctggtgctgacacagagtcagcgggtccctggggtccctgcaactgtcccccaagaggtgtgcatggaggtggaccccctgcctcaccctcgggtggcccaaggcctctgaaaaccgtcacggcaggggtcacaaccccactcacccacaccctcctgcatgaacactgcacagctacctcccgtgggctgccctgtgaggtgtggagctgggctgcagacttgcacaaggtggggtcctgtgtctggagtcagagggtccctctcgtcgtccagcctccccggctcctcagggggaggttcggggcctttggtctctggacttgggcagcagaaaggaaacatccctgggggcctgtggtgacccccatcctccccagggtggtctggcaggggacactgttttccaaagcaaagccagagcgccaagggctctcgggattcacgagatccacatttatcccaagttagaacagcacatctgtgcgtgcaaacttcattctgacttcggccggctgtccttcttgcccaaagcaccgtgaggcctcatccctgcatccctgttgcttctttcatgtgggatgagaacccaggaaggggctgagtgtgactcctctggtttttagagagcactgcccccgccccgccccctcctgcttccccaccttttcacagttgcctggctggggcgtaagtgaattgacagcatttagtttgagtgactttcgagttactttttttctttttttgagacagagtctcgctctgtcgcccagggtggactgcagtggtgtaatcttggctcactgcaacctctacctcccgggttcaagcgattctcacatctcagcctctggagtagctggaattacaggcgcccgccaccacacctggctaatttttgtgtttttagtagagatggggtttcaccatgttggccaggctggtctcgaactcctgacctcaggtgatccgcctgccttggcctcccaaagtgctgggattacaggtgtgagccaccgagcctggcctggagttattttgggagagggcagcccctggttcagcgtggcgaggctgcgcttgctctcccgggcgggcgtccacaccctcctcgccgagatggagaagcccaaacccctgcagcgctcccccatcacgtccggccctggaagcccccggaaaccctgccacgccctgagtgggagagcgcaggtccctttccggccctggaagcccccagaaacccttgggtgccaggcctggccgggacagcagcgacactgcatgctcagcccttgcgtgagaccacgggagtgtccgccctctgcacgtgctgctgattgcccacttcgtccagcaggtttgggagcttgtggctgcatcctcctgcagacacttgcccattctggggcctcctctctgtcttttctcctctgttgaggggtctgggagggaggccttggagggtacccatgctgctgggactgatgctccccgcggtggaaggagctgcctcttgaacagcagggggctgagcagaggggaggggatgcgggggtgccgtgcacacaggtgctctcaggacgcaggggcttctcagccctgctgtcccagggctgcactccagcagggcagactcctgaggtgcagacaccccagcttcacgctcacacttctggaaggcgatgtctgtgcgtttgctttctgctgcagtttaaaaagccgggctctctccggagcgtgtgtagggcctggtcactggaatatctggactcagtgttaatggcagccacgctgggggctgggcccagctttctgttctccgtgtgggtgccatatccacctccatcgcagccctttctctctcgaccttttaaatcacagtgtcacctccccctgctgtcctgccagtggcccctggaggcttctccccacccctttcttctggggcaattcttaaggctggcattgaatcaggaggccagatgtggcccctagtaactcaccagcagtccctgaggcttctggctcccctggcccaccagcctcccatgtctgcctcaggcctcttgacccgcctggcactgaccagactgtgtgcccgggtgccgtgcccatgggctccgcctcccccaggcaggccccctcttgctccgcggccacccctgctcttgacctcacacctctgcggtgtgtctggacacaccagcaccacggcgggcggggagcggaattctccaggtggggtgggcaggccggcgggtgttgaggtctctgtgcatgcttgtgcgtaccctggactttgccgtgaggggtggccagtgctctgggtgcctttgccagacaactggtctgccgggccgagcattcatgctggtcgccatcacgtgactcccatgcgccctggccctggggttgggtctgcaggactgagaaccagcggaaggggggcgaggcctcgggaatgcgccggcaactggcgatgagctcaggcctgactaatgagcccaggtgactcatacacccggggcctggatgagtctgactgggtcaggacttccctgcttgttctgtcctgggagatgttgtccctggccctgcagagccgggaggacacgaggcctcctgggtcacagccaacgcagcctactcctgcccactgctcgcgccggccaaggcccgtcggcaccacctcctccatgaagccttcctgactgcccccatccctctgtgggcagctcgagtgtgcatcttgagtgctgtgcaggttggggtccggcgctcctgcaggcaggcggcgtctgggcctgggggctctcagagtttgaggagcgtgtggtgagggtggcctcgggcctcaaagacgcagcgctgtgggaaccgggagactggctgagcccgctctgaggaaggtggggccaggggcaccctcagctgacccggcgtgcaggggtgaccagccaggcgtggccaaggatggggtctctgggatcaggagacttcagtagcagccaggaccgaggccaccagtttccaccctggcattttccatcttttgaaggactggaaacgattggattctttaacttttttaagttgaggtgaaattcacaacgcataaaattaaccatcttaaagcgaacaattcggtgacatttagtacagccagaaggctgtgcagccatcaccactgcccaactctagaacattcacacgccggagagagggagccctgggccatcacgcagccaccgcccggccccaagaacctgcgagtccactttccacctctggatcggcggttctggacgttcatgcaggtggttcccgcagtgcgaggccttttgtttcgggctcctctcacaagcctcacgtttccaggtacgtcgtggtgttgtgcagacccacaattcatcccttttcatgggtgtgtaatagtccaccatagattctctacgttttaaagcatgttttatgtgcctgaaatgtctctgcactcgagactatagcttgctttctttcttttctttttttttttttaatttgagacggagtcttgctctgttttcaggctggagtgcagtggtgcgatctcggctcactataacctctgcctcccaggttcaactgattcttttgcctcagcctcccgagtagctgggactataggcgcgccaccccacccggccaatttttttgtatttttagtagagatggggtttcatcatgttggccaggatggtctcgatcttccgaccttgtgatctgcccgcctcggcctcccaaattgttgggattacaggcgtgagccaccgcgcccagccgagactacagctttctttaactgcatccctggagggatctgagagtctctttccctgtctcctttcctttggaaaacatttcagccagggctccccaagatgaaaggccagagtcccaggcatgggcgttgcaggtgcacagttgccacggggagctgtgggtgatggtcgctgtcagcgatggctgctgcaggtccctgtgaggaaggggcagtgcccacagcaggaggagagggagtcagcggacgttgattggcagtgcccgcccattccatcattcagtcacccactgtgcacccagcacccaggctcggctgcatagaacatggcccaggaaggctccacttcctgtctcctcttctcccctctccagtctcatgatggggctggaggcatcttctagttttgagttctgagctaatgaacatgctcatgagcaggcggcaggatcccaggacggtggagctgggagcctgactgcgggtgacggacaggctctggcagcccctgtcagcatcctctccagggcatgtgaaagccagtgtgtcctcagctgccagtgccccctccccacctcctctgggcccatgtgcacgggacctgggctcccccaaccaagcctgcccgccttggttcagcagaacggctcctgtctctacagcggtgccaggccaggagtgctgtgtctgtgaagcggggtcatggttttggggccctcatctccctcgcgccctctcattggggaccccccgtctccctagcgccctctcgtcctctcctgcatgtgctgtgtctgtgaagcggggtcatggttttggggccccccgtctccctagcgttctctcgccctctccagcatgtgaagtggggtcatggtttgggggcccccatctccctagcgccctctcgttggggaccccccgtctccctagcgccctctcgccctcgcctgcatgtgctgtgtccatgaagtggggtcatggtttgggggccccctatctttctagcaccctctcgccctctcctgtatgtgaagtggggtcatggtttgggggccgccatctttctagcgccctctcgccttctcctgagcgtgtggaactctgtggtggtcagagctaaggttctgaataggtcgaagcacctccccggtgcctctcaccctgaatgctctgggaggacacagccttttcataggctacgactgacatggcaggaggggcctgcctgccacccgggtcctctgctgcctgctgcttgctggggagggggctcgagactgggatcctgggcttctgctccagctgtgcccaagggagctgctgaggagggaccgggtggggcatccactctgggcaggttcagggtcattcttggtgaccccgggtccggttacaaaggctgatggagcgcgtgggtggctgcctaagtctctggaagcccaagaatgtggagatggcgcgtctcggcccggggtctcgtggctggtctgggagaacttgcctttatttctaggcaggaggctgcactgcaagggagcgtcagtggcccggctggctttccccggccctcagcccgcactcgtccaccaaagcaagctcctttgtggggctgccctgggaagccgggatcacgaggctctgccggccgtggtcaccccatgaggcagggtcagctcgggagcaaggcggatcagatggaacagaacacgtagaccacctcgcccgcccttagtcagctgggccattgaaaatcaagtccgtagaaagacctagaaataagtcccggggtgcccttgcctgttgacgggcgggccgagcaggactgttctcaggcaggcactggtctcttggcttccaggtggtttgtttgctggtttgaggctgggggtgacgctcctgtgcgggaggaggtcgcattccattcatagcggcttatctgggctgtcaggcaggcctgggagggagcctgcctctgtgctctccaagggtgggcgacggacagacagggtgtcccaccccttctgggccaaggacagagggtcagtgtttgcagagacctggggaggcccaggtgacctccaccgagcacctgctgtgtgcagggccagtgctggctgcagagacagcggagcgtgtgtggacccggcggcccaggggaggggggcaggcaggacccggcggcccaggggaggggggcaggcaggacccggcggcccaggggaggtgggcaggcaggacccggcggcccaggggaggggggcaggcaggacccggcggcccaggggagggggcaggcaggacccggcggcccaggggaggggggcaggcaggactcggcggcccaggggaggggggcaggcaggaccaggcggccctgggggtcaggggtggaggccaggcctagacggcccacaggagggtggactcattctgaccgattcctggaagcccccggaaagtggtgatgttctggagggcccagcagaccccaaggcccccaagacaatcccagctggctctctgcggctctcggtgtctgccatttgagacaatttgggcacaggcagggcaggccgtcgcggacggtctaagccgcgcgcattggtgggggcagcagagcccctgctctcagctcctcggggtacagcgggggtaccaggcgggtgagtgggtgggtggtcactgctcctgccaagggcagccctggtttggtttgcacttgctgccctggtgacggctgctctcattcctgccccattgctaacaagggtgtcataagctactttcccggcccacatcctattaagcccatggagaccctcccacagctgagcctgctgtgggctgcaggccctgggcggtgcccacctcggtccccactggcctccttccagcactttagagcagacacaggttggagataaggaaagttccagagcacagactggaacaagccccaggcctctccctgccccagcagggcctccctggatttgggggacaggtgccctcatggggggtcctgaaggtcagagctggggctggggctgggctggcggaggtggccttggcggaggccacattccagggtctcagtgagagtctgtggcaggcagccttgcagatgccgctgagggaccccccacttcatgttgtgggtgatgtggtccattgattgcctccaggtttaaatcaggtggatatttacctagcggcctcctctccctctgcacagggcctggagtgggatggactggggtgctcagctggaggctctgcagacacagccccctgggctatgcaggccctgctgggagccacattgccatttttcatcacccactttttgggtgagaaccccctcgagtcctaacatctgccgcatctcagagcctgtggctccagtcagagcatctggaccatactgctggggtcagagcgcggcaggacaatggccagtttctgtgtgattgctggcgggaatcttgagccattccgtgggtccgtgggctgggatctggaagcttccttgaaatgtctctgggcacgtggctctgtgggtcagggtgggacatggccccgtagcaggctgtcctacagcaaaagcctgctctgtgagccagccctgtgcaggcctccctcggtacagccgggaggggcctcaccctccacccacagaaatcaaggctgcagaagacagatgcctgtgccaacccctccggcagagttatgccaaatgtcccactaaattcacccctctagggagaggtgcctcctgcatctacttttcctagaataagtatgagaaaccccaaataggttctagaaaaaacagcagtgtacacagatgttaatcctcttcgaaacttgactgagtcatttagccaaagaaaacagcaacaatggcttcatttcgagagggtcacggacaccctttcatgtttgattccttctgaccttgtgagtttatagaaggacaaggagagagggacgcgctgggtttgttcagatgtggacagaaagtttggatgataggacagaacatttagttcaatctttccacttacggctcttaaaagccctttatttttataggtaacatgctttaaacaaactttaaaatttgaggttgctagtacccattgtgtgtggattggaccagctccatgagagtggagcccgggagcctctctggtcgtctttgtgtgcgtctgtgcctgtgcctggtagtagttctgtctggaaggtgagcagggccacagagcaccaagaaaataccagggactttgcaggtctcgggtggattcaggttgatccaacagatgccggcccagggcctgcaaggaggctcctttcgcgtggctgtcgtggcccctgtgagctgggcttgtcctatgagaagagctcctgcaagaacaccttttgaagtcacccctgggggagatgagctggatggcatttggagcccccagcagctcacattcctgagctcttggtcccatgtgggattcgataattttctttacactgacaggcagcatctctttggccagccgtgtgactgttgggtcatgtgtcttctctgtgcctcagtttttctcccctgcaaatgggttcactgaaagcactggccaggggaggggctgtggcatggcatgacaggctgaggggcactgagcaggtgccaggagccaggtggtgtcaggtgagccccccaggaaccccagtttttgtgcacggtgggaaagagaccatcaggggcggaggggaatgaacacccaccctttgggggctcaggtgccaaacagatgtgtgtgcaggtgcatgagccaggtgtgtgagcaggtgcatgggccaggtgtgtgagcaggtgcatgggccaggtgtgtgagcaggtgcatgggccaggtgtgtgagcagacacttcctgtgcaagcctgtgctcctgtggctcatgggtgcatgatccagaaacccagaggcagtggcttcaccggggggtggtgatattcaagctcttgcaggagggggttgtggcagggcaggacagaagcatctgaccagagggtgcagggccacagcatttctgccctcggggacaggcggcccgtgctgggacgggcgcaggagctcctgaaacctctgttctcagttcagaaaccaggtacctttcccatctgaccccccaggcagccattaacaggtccaggtgagagagtctgtgcatgagacctactttccttgctctctccgggggggtttgcagcagttctgagcatcaggccagaggctgggactccctgcctgagtcggggtgagggcttcccgtggctctgtgagcttcagaggcttggcatgtacaagcagggctgttacaacagcctttaaaaaatcatggagaagaacccagtgcatcttctcctcagagggtggcagaggctgaatgaatttgcatctggacgttccacttccacctccttcctaaccaaagactgtatatgcaggtggttcgtggatgtatctgggctgactggcagtggggagatgggggctcccccacgtcttggcgggggtcccggtgggttgcagcccccagagccgggcttcccggaaaggggcatcgcttctctcttttgggctgtgctggggtctctctggtgaggggtgacccagggcctttgaacagccggtcctagaccaggccctggttcctgtgatgctgacaggctgtggcttgagagcctgggtcgggaaagcccagtcagaggggaagccgggggctggttctgaccctgcatggtttcctgagggacgtgctcagtgggatttgtccctggagcaccaagggctgaaggaaagccactgtcctgctttctcgcagccctggtccccattcttctgtgggtgcaggtggggatggtggggtgaacccgccctcctggggacagatatagggatgccgggatgccgcactgcaggtgtgagtcctgggaagtgggtagggggtcgatgggaggaagagaggaaggtggggtgggggcgggaggagagaagaggaagaagggggtggggggagggaggaaggaagaggaggaaggtggggtgggggtgggcggagggaggaggaggaagtgggggcgtccccatcagagacctcctgcagacctccagctgtttggtccatgggtgggttggttaggtctgggttcagaagccccttcagtgtaggtgctcagctgggccatggagtcctggccttccctctgagcacagacccaccaggaatgggcagcccgttcttagtgaccctgggggctggggagcacccaccctctgagccccagctcggcctccatgtgtcaggtgggaggcacgggcagggccaggctgtgggagtccgggagggagtcagaggttggctggggcagaggtggggtcagggagcaggaagtgagcgtttgcccactggggtagacgctgggtggatggggagctgggagtcctatagggtgaagggtctgccgtgggctgaggcatgttggggcatcccgagtacctatgggccccttggacgtccccccggcgctccctggcacaggtctgctcggagggtgtcggcctcctctgcattcaggatcgtgggtctgtcaattgggacacctatgaacaaatgctcttcccatcagtaactccgtgtgcccctctcttgagcccctgtgagatgcaccctggggtcccagcctcacccactatccttcacagcagagctgtgggtccatggcccaggcagggtggccaattcctgcccactgcagtcggcaagggggacactggggcctcaggctcatcttctgggtgcgtttataaagccagcacaatgtgcagcgtttgcagacagtatcctctgtgagcaagagcatgtttaaagggggctcatttgaaaccctacctacagggctgccatccctctggtgaatgcccacgtgggtgacagtgattctagcccttgatttccttgagctgatggtgggcccctgggctgaggagaccctcagccaggaggtcccaggcccagggatgagtgagctgtacagcagtgtcacagcaaagcagccaccctcacccggggcccatccagcgtgtgcagtgggcagaagcctgcgtgagctgggcagggacgagggactgtgccgccgccccattgtgaatctgtgttcattttcctgacttccttcatttcttgtgattttaaagctggggagtggagattctacttcctgctctatctggaaggagagggctttcggttcggcaaaaaagtcgtctttgtgggcgcctgtgcctcaggccacgtggaggccacatggaactcccattggggaggggaccatgggactggatggcgggaaagtgccccacccctgcagccctggaactgtggctggggtggggctgaggctgggggagggggtctggtggggagggagctgaggctgctcaggggactgctggtggggggccctagaaggagggagccgtggctgtggggtccctgatgggagggagatgtggcttggcggggaagctgtggagggagggagctgtggctactggggagctgtggctgggggagtgccgtgcctgggggtctgtgactggggagttgctggctggggggcagccatggctgggggaaccctggctagggaggggctggctaggggcgagccgggctgcgcggggccctggctggggagcagctggctgtggcaggagctgtggctggggcttctgctgtctgcatccgttcctgtacatagtgaaggtgggttctattgccaaggttctgcaggtgagggtgtgtgctgttcacaccacagcatcacacaggcactctcctgcacacacactcacacacagacacacaggcactctccacacacactcacactcagacacaggcactctcctgcacacacactcacacagacacacaggcactctcctgcacacacacacacagacacacaggcactctcctgtacacacacacactcacacactcagacacacaggcactctcctgcacacacacacactcacacaggcactctcctgcacacacacacactcagacacacaggcactctcctgcgcacacacacacactcagacacacaggcactctcctgcacacacacactcacactcagacacacaggcactctcctgcacacacacactcactcacagacagacacacaggcactctcctgcacacactcacactcacacacaggcactctcctgcacacacacactcagacacacaggcactctcctgcacacacacacacacagacacaggcactctcctgtacacacacacactcacacactcagacacacaggcactctcctgcacacacactcacacaggcactctcctgcacacacacacactcagacacacaggcactctcctgcacacacacacacacactcagacacacaggcactctcctgcacacacacactcacacactcagacacaggcactctcctgcacacacacacactcactcacacacagacacacaggcactctcctgcacacactcacactcagacaagcactctcctgcacacactcacactcacactcagacacacaggcactctcctgcacacacacactcactcagacacaggcactctcctgcacacacacacacacactcagacacacaggcactctcctgcacacacacactcacacactcagacacacaggcactctcctgcacacacacactcactcacacacagacacacaggcactctcctgcacacactcacactcacactcagacaagcactctcctgcacacactcacactcacactcagacacacaggcactctcctgcacacacacactcactcagacacaggcactctcctgcatacacacactcacactcagacacacaggcactctcctgcacacacacactcacacactcagacacacaggcactctcctgcacacacacacactcacactcagacacacaggcactctcctgcacacacacacactcagacacacaggcactctcctgcacacacacacactcacacactcagacacacaggcactctcctgcacacacacacactcacacactcagaccctcacactccagggctgggcaggggaccccggacctggcctctggagctcatccctgggtgcctgggcacggagtgccggtcacactgtgcacccatccttgttttctcgatgttgggtttacttttcctgccggctgcacggcctgcccttctcagggctttgggctactctgcagggctggtgttcagggcaggaaagggaaaggggcagtggagagggagtgtgtgctgtagaggctaagaccccatttgcactgagcccttccatggctgttcaactctgacgggagtccactgaggctcaggacgcctctgcagggtgccagggccacgcaagctccacagcacgtggacaaaggcgcatctaatccttgcaggcagagtggcttattagacacgttagcaggtctgtctgtgcagccggaaggaagaaagtgaagttagatgcccacatgtgacttggcatccagaggcacattccagatggcgacccggggctccctggtgtggtctgggggccggtgggggccgaggggctgctgtgggtctgtgtggagatggataccgaaagccacaggacgtgcttagggacttgcatggcaatttggcagggccgttcccagcgcaaagaaaggctgtcggaggtgcaggccacgctcatcacccgcatctgaccccaccaggcatcccacaaatgtgacccttatgtgtctgttaaaaactacacttaacgttttttaattcgagaaaacctatctgttgctgttatgtacagtgctgtaatcagcaaacgtgttccttggtcatttccgcaacagaacacagtgggaggggcctgctcttccgcagcaccccaggcaggcctggaccgcccgagtggccgtggtccaggggcgcggagggcgcagcgcgttccgtttcggctcctctggtgcgtgcctcgtgtgcgtgtgagcagaggccgtgtggatgccgggcgcccgccggtcacgggctggtgggcagagaggtcatgaccttttactttctaggcctttacgtatcgcaacgtgtgcgttacgttcatcataaaaacgtccgacgaaaccaagagcaaagtgaacttattggtgaaagttgccattgggacttcggtgcctgctgagaaatgcctgggcctctggctccccctggcggccggtccctggcttgacggaagcgcgtcgcgcgggctccagacgtcctgggccaagtcctgtgcgcggggcctccgggtctgcgagctgcggccgtgttcagagcgtgttttgcccggagctgctgccagcctgggcggctttgggcgcgtgcagcaagcagggtttggatttggaagtgcagctcgtcctggcgccaagcacagagcctggcctctaagatgctcgggaaatgccgctctctgcgcccctgagtgctcagtgcgagcctgtgaagtccattacagtctccggctgtgaatgtagcaaggagtgggaactaggcctgggagatgggagtgtttgtctgatgacttcctgagcgaaagcaaactgggaaatctcgggctgcgcgctggtgccccgactccgcacctcccaccccttctgtggggccagcacccagaaagcgccagcggaggctggcaggccgtgggccgcatgggcggaggggccggtcctccgatgatggggcaaacgtctccggcctagcccccgacgctcggggatgtaagggcaagggctgcggggtcggaacgtcggctgtggctgtggctgtgtgactgctccgcaccagctcagcttcctcacctgtgcacacaggctcccgctggaatttgctgcgttctccaagctctgcaagattcagaagcagaggcctccctgggctctcacagccccttagcttcttgcccacccacggagagggtccagagctgccccttgctgtctgtgaggaaagcgggtgcttcaggcctgccaggggtccactgggagttgctgggtgggctcctcaggccctgcccagggctgacccctggctccaggtcctgggcctccgtgccatgttccccgcaagcagtcggggcctgctggggtttgagccacgttccccggaagcagtcggggcctgctggggtttgagccacgttccccggaagcagtcggggcctgctggggtttgagccacgttccccggaagcagtcggggcctgctggggtttgagccacgttccccggaagcagctggggcctgctggggtttgagccacgttccccggaagcagtcggggcctgctggggtttgaaccacgttccccggaagcagtcagggcctgcgggggtttatgtcacaccctggctgcacgtggggatcgtgtctaagctttttggaaatgtcgatgccggactccgccccagacctggagctaggaactggcccctggccatgggcccaggcagggtgaggtttcccagcaccctgggtgatctgaacttgggagcagggctggaacctgggggcaagatcagcacttctaggacgttatcgtgcgtgggaaccacgggacgctcactcataggaggctcagcagttctctcgctgtgccgaggctgatggagacctcactgcttgcccccgggatgcaaaccccggggacacccgcctttccgctccaagctctgcccaccgcctcacatggccctgggaattacaacagactttcccatctccccactatgggcggaatctgctgcagctgcccagacctggggtcttgcaggttctggacaccacagctcccctacacacagaggctgctcctgcgtggccctggtccctcacctctacttctggcacacgctcctccacctgctgcccttcagggttcatcgaggtcttattttggttctgtactgggagagggggaagcaatggggcaagacgctgcccctactgtccccagaagatgagggacagcacagatgcccaggtagagttttcctgtgttaaatcataaaacccccacatgcccatcccaggtgccccacctgccccagcagctgcctccaggcctcgggacgcttgaacccacctcgagggctgccagctcctggcctggaggtgcccccaccgggtcctccagtcctgctgcccggtggctctggccatggttcccgtcccgggctgttcatgttccccctgctcctctccgtgatctgccatctctgcttcaccagccggcgccttctacagaacacggccgtgagcttcccatgttctgccgctggctcttcacgccaacaggtctcctctgagcagggccagcttatggcatggcgccgggtcagctctcacctgtccccctcagacgcccacctctgatatgcaactatttccagcagaaaatgtcccatgtccttaaaggatggagcacgctgctgggaacacggctctctccataaaggagggactccccatgccactcccaaggccacgggaggccgccctcagcacagggtccatggggtctcggggtctccctgccaaagcacaggcctggtgaccccctgggaccctcactccagggagaggactgtgcatcttgtgtgcttctcacagtcactgtgtggggttcagcccaggggaggtcacctcgccctcatccacgcagtcctgcggggaggcccatttgccctgactgcacagtcctgcagctcggctgtgcccttgagtgggtggcgctgccctgttgcccaccgtagctgctgtggggccacagccttgagcctggacactggccatgactggataccaccggtgcacagggtgcacgtgaggaaaccctgcccgttctgtgcccgtgccttgctttttctcctttaaatcccacctgtgagttttatttttgtaactgcagagcatgatgaaaaccgtgaagccacagaggcacacgtcgtgtctgtggggagggcccctcactctctggctgcacatcacccatgtgtctcactcaccatgggtgtccctgcccctgagcccaccctcacctctgtcagctgggcaggcgctgccctgtcagcctctgcctccacttcctccactcctggacatcgtagtctctgtcgccgggtagtagcagggccggaccccttcggatgagcacgcccaggcccaagagtggcagtcctggtgtgggcggtggtgctggtgtgggcggcggtcctggtgtgggcagcggggctggtgtgggcagcggtgctggtgtgggcggcggtcctggtgtgggcggtggtggtgctggtgtgggcggaggtcctggtgtgggcggcggtcctggtgtgggcagcggggctggtgtgggcagcggtgctggtgtgggcggcggtcctggtgtgggcggtggtggtgctggtgtgggcggaggtcctggtgtgggcggcggtcctggtgtgggcggaggtcctggtgtgggcggtggtggtgctggtgtgggcagcggtgctgatgtgggtggtggtgctggtgtgggcggtggtggtgctggtgtgggcagcggtgctgatgtgggtggtggtgctggtgtgggtggcggtgctggtgtgggcggcggtgctgatgtgggtggtggtggtgctgatgtgggcggcggtgctggtgtgggcggtggtggtgctggtgtgggtggtggtggtgctgatgtgggcggcggtgctggtgtgggcggcggtgctggtgtgggcggcggtgctggtgtgggcggcggtgctggtgtgggtggattcctggaggacagctgggtcttgcatccagcacaggtcctggtgcctgggaggtgcttaccccatggccccaaccggcacaagtgtggctgtcacagctggggtctgggtaggtctggcagccccatgggaacctggctgtgtgagcctgccctggggccttccatgagaaaacccagttaaggagcaacctggtaaacccttgaaaaccaagtgggccttcaccagcttgaaaggccgcccgtgcctttcctccttggccctcacagcccagctcggcatcgcagcagagtcccggtggtggagatgctttgccactggccacccagagctaggagcctcggccaagggctccctccttgcactgtggtctctcgggacctaggaggtcccggggtgtggactgtgctgaactgttctccgacaggcggccctttttctcccacgtgggcgaaaagtgaagcctctgggtggtcctgtacctgtctgtcacatcccgggctgcagccgggtccccagggaggcctccgtgaaaacacaaatcaagtgccaatttcctggtgaagagtctttatgagagcaatgcggccccgtgcccctttacgcggctctgctggtggagaggaatagctgagctgcagcactaaggagagatgcctgctgcatgatcccctagatgcgtccgagggacactggacatctggtggccctccagactcctaggaaggggaccgtcctcccagtggcagccaggactgcctgtcctcttttgggtggccaggatgtcacagggcgagtaggtgtctggccctaccactggggggccatgttgccacgcaagaattcagtgtccctctgtggggaacgtgcttcccggctgccacgctgtcgctctctcttgtcttctgttcggccccttccccgttgcacatcctggcctggcgtggtcgtcccgtggcgtcctctaccctttcccatgtgacacattcgctccatggtacctcctgcctcccgaaatcacctctaagttcactttgtgccaggttttgttctccagcgcatcttcagtgctgcgagcaggctgggcttgcagcaggagcacgggtgtgcgtgtggagtgaatgaagggccgtgtgcccgagtaggtggcgtgcaggggtgtagtgaggtgcgtgcaggggtgtagtgaggtgtgggatgtgcagagtgaatgaaggacgttgtgctcgtgtgggtgatgtgcggggttgtggtgaggcgtagggctggggtcagctggtcgtccggacttttggttttctggctgtaaaatgcacatgccaggatagttgtgaggtgcacgctcactcgtgcatggagggtggttccacagtgctgtggacagaggagccctcgataaatgccagctgcgagcaccgggggccagcacgagagcagctctgagagcctgggtcgtgcagggcgagagaggctccggggagtggaggctgtgagccagggaggaaacactactccacgtgttaggaggaagccacgtgctcctcgaacatgctggtactaggtttgaaaaccaacattagcagcaaagatgactccgtgtccataccctagtttttaaaagttgatatagcccctctaaaaatgagtttgaaagcacaggaatttataagagaaaaactttcatcaaatacatgaaaaaaatcaatctcactcaaaatggaattaataagaaatcaagcagcattaaggattgcgtggtttggaaaatgtgatgtgggtctcccttgattgttttgaatggctttattgagatgtaattcacattccgtgcaattcactcgaagtgtacaatccagtggttttcagtatattcaaaaatctatgccaccatcatccccatcgaccgtggaacatttcatcactccagagagaagcctttccgccgccctccctccctccagtcctggccaccggtcatctcctttctgtccctgggttccgtcttctgagcttccatacgaattaaaccatggaacgtgtggtcgtttctgtctggcttcttcccctcggcctgtggtttccgggttcgtccgtgttgcaccctgtcccagggcttcattccttgctgtcactgaataatgtcccaccaggtggaggcaccatgctgtgcttatggattcagcatttggtggacttctgagcggtgtccaccttttagctgtgatgaacggtgctgttgtgaacacttgtgtacaagtttcagtgtggacgtgtgtcttcgtttctctcgggtatatacctaaggtggaatcactgggactatggtaactgtgtttactcatttgagcagccgccagcctgctttcccaagtgtctgcaccatctcacgtcccttcctgcagccttgggagttctgatttcgccacatctttgccatcacttgtttttctctgactttttgtttccagcccatgttgggtgtaaagcagtgtcttgtggttttcatttgcattttcatgatgactgataatgttgaacatctttttttgtctttcttggcgatctgtatttcttctttggagaaatgtctattccgattcttgcccacttttagttggattattgtctttttgttgttgatttatgagttctttacatcatctagatagaagtgcttcctcacatatatgattcgcaaatatcttctcccattctgtgagatgtcatttcactttcttgatggtgtcctttgaggcacaaaacttttaagtttttacgaagtccaatttatttttcttttgtcacttgggcttttgctgtcatatgtaagaatcttttgccaaatccaaggttatgaaaaagaaaaccttcaaaagtttttttattttagctcttttatttaagagctaaaataaaaattttaatagctgcatgtggtgtgaagtagggatccagcttcgcccttttgcgtgtatctgttcgttggcccagcaccgtttgttgaaggctgctctttcctcactgaacagtctcgacattcttgtcaaacatgagttgcccgtaggttatgagtttattccagaaccctcagttccactgcaccgatgcgtgtgtctgtccttgcgccactcccacactgtcctgttaccatcgcattgtaagtcttaaaactgggaatgtaagtcctttgacttttttctaatccaatactatgaacaaaatagatggcagatgaaattgaaaatttcctagaaaggtgcaaactactcaaactgattcaacaagaaatagacaatgtgaatagatatataacaagtgaagaggttgaattagtaatccaaaaacacccataaagaaaagccaaggaccagagagcttcccagctaaattctaccaagcatttaaagaattaaaaccaattctcacaaactctttcaaaagactaggagagtgggaaatgcttctcaattcattttatgagaccaatattactctgataccataatcagacaaagacattgccaaaaaaagaaaattgcagactagtttatcttacgaattatggacacagaaatccttggtagactactagtaaataaaatccagcaacatataaaaaaaattcaccatggctaagtgggatttatcccaggaattcaaggttggtttaacacttgaaaatcaatgtaatacatcatatcaatagaataaaatattaaaaacacccaatcatctcaatagatgcagagaaagtattggacaaaattcaacaccattcatgaaaaacacttaacaagctggtaaagagcatctgtgacagagcccacagctgacaccgtgcttgtggtggaggagcgaatgctttcctcctaagatcaggagcaagacaaggacgttccctattgcgccttctgtttaacattgtactggaggttctagccacgaaagttaggcaagaagaaataaaagacatccagattggaaaggaacaagtaaaactgtatttttagaggccagatcttatatatatatatatcatatatcatatatatcatatatcatatgtatatttaaaagtaaaagttctaacctctaaaaagttttttattgttcctctaaaattacagttttttctaagtaatccacaaaaaaactattagaaccaataaatgagctcaacaaggttgcagggtataaaatcagtatagaaaaatctattgtatttattttgcaatgaacaatccaaaaatgaaattaagaaagaaaaatctgtttacaacagcatcaacaagaacttatactctgaaaactacaaagcaacattgaaagtaattaaggaagatctaaataaatggaaagttatcccatgtttatggattggaagacagaatactccctaaatcaactagagtccacacaactcctgccagaatccccactggctatagaaattgtcaaagtgaccccaatacttaaattgaatttcaaggaacccagaatggccaaagcaatcctggagaagaacaaaatcgggggacctcttggctctcgaacttcttagagtctttgaaaatatctgctttgttttgggtagagcatggatggttcccttagagcctatagagcacattgaggtcttttggttcgccctcagtgaactttatcacatcaagcaggagatgtcggtgagcctcgctgccctgctgtgctccacccattggccccccttgcagcagcattcaggagaagacagaggcagcgtcttctgccagcctcctcggactggaaggagtaacaaggctttgaaggcatgcaggaataacacccacacagagccccaggggacatggatcgaggtctgaaaagcatttcttcccaccctctgctgagtcacctggactgccagaggtagagctggcatagggagtttgccagaagacatcaggaagaaacctctattttctctacaaacatcctttgagaacatttcaaacctgcattgacgttgatacgatgatcagaaaacgctcatacacaccttccattcgactcacaagcaaacacttgccacatttttcccaggcactccctttctctccatctgtgtccatatccacacacacgcatatccacatgcacaggtatccatgcgtgtgcacacaagaatatctacatgcacctccacatgcgtacatatccgcacacatccgtgatgcatatccatgtgtgcacatgtacatacccatgcacacattcacacatgctcatctgtatgcacacataatccacatgcagtccacacacacagatatccatgcatgcatgtatccatatccacacatccgtgtacacgcgcacacgtgtgcttctgcatacccacatgcaagtacagacgctcgctgaggtgagccgcagcatctccacacattgccctgtagatgcacttctgtgtgcgtgtcccaagaacaaggacattctcccacagagccacagtgtcattgtcacgcctgagaagtttacaatcattctgtccgtcctcctgtgaacaggtcgtcttcagatgcgctccataatgtcctttgccccactggcctgcgtatcttttgggcagtcccagagccgtcagggaccacgtgttgcattagtgtcctgctctgtagtctgttgactctggagcagccctgcccgcccccgctgccccaccgccttcttcctaacgtggcagtccagctgggtttctatgggggtgtctgacccgcagcctggactcacccacctgcctgctcgtgtttaggtgcaggctttgtggagagccatggcaggggactgtgtgtcctccccgtggcctcctgtcaggggcagaggtggcagctgtccctgggaagatgtctaaagtgtcttttccctgcggcgctttgatcctcttgctgctcctgcctcaggccccgctgcccggctcatgacccttcaccagtgatccatctcctgtgtctctggcggccttcccaagggtgggccctggggctgcggtggaggttgcaccaagcccgaggggagggcctggctcacatgggcttccagctgccgccggccaggtgcggggagaagaggcaggctgcccgctgagcgccaggctgtgcttggcattaatttaggagccaagaaggctcccaccactcgtgatcacccagtggaggattggggttgaagacctcaggctccccacctcatagtccccaggctctgccgagcggtcagagggacaccagagcctggggagggacacggctgagtccaggaatgtacatccagggaagagctaagagaagcctcgtcgtggaatcgggggacagaagcctccaccctgcccccaccgtgggggagagaatgggcttatggggcaccctgagcactgagcagcgggggaaagaggctgtaagctgggggtgggtgttagacagggtgtggccacactccctctgctaccgtaggtcttcaggtccatgtgtttggtgacaggggagtgccctccagggacctggacccaggcctggccacccggccctctcactgtgcggccacctccagccactgaatctgcaggtggcggcagctggtcatgccgctggccgggttgtgcccggtggccaggtctggtgagaggtcccggccaagcagcagagatgtcagggggcactctggaagtgccatgataaagctgcctttatcatcgtggtttgaaaaagtagccacaaaatgcagagcccaggaagcacgttcagagacttcagacaatcataaactagttgcgccacagaaagatgaaaagtcatgttttcatttcaaaagggctggagacgtgtctgcggcatccaaaccttgactggctgtgcctgcctgggggcgtgcccatgggcagtgggtactgggacctcagggcccaggtttcgctccctggaatctccaggagcctgcctgggcctgtccttggacagtctctggtccctggggaaggaggggagggaggccacacctgaggggtctctgcaggacattctgggctcgggcgagcatctgggggcaaggacaagctcagggaatgaagagggtggctcaggtggggtctgccctgctccctcatccctgtcatcctcccccagccttcagggtcgaggtgtgggagacccgcggagaggcagcccagagccacccgccacgggctgaggcctagggtggccagaagcaggagggacgcctctgacgattgaacagcccggagcctcaaagctacggttggggccttcagcccggaaatgagcccccctctttgccccctgatgaaccagtttcccctgttcacgtgtggatgtttgtacctttttaaaaaaagaaaataaaagaccacactatttaggaatttaaaccagacaggccaacaagacaggacaaaccctggctcggggcagggcggagacagtgggagggtggaaccttcccgaagaccagatggggtgcagggagtggggaggctcagttcttggcacctgtgttcatggtgggtggtctccctcgtcctctgaaactgcagccagtgcatgtgacctccccaccgcatctcaggcctccctcccggtgtgcccaccctgcaccccacagccagctgcttcaacgtttggagcccgtggctggcgtggcagtggtgagccctcgatggctgtgcggacaccagaggctgagggaggacacacactccatggtgggacagcacccccgggtccaccaaggccaggtggacgcttaggctccagggccctcgtggctgctccggcggtgccatcacctctggagacagggcccgactctgcaggacggcaccagtgggggacagcaggtcctctggggggtgtgaggttctgagctgttagcctcaggctcctcaggagcgggcaggtcatgataacaagagtggctgcgtgcgggtagcccatggctacagcttccaacgggcatttctagtgccctggccagatggccggccagcgggggccatggtaccacagcactgtagcctagcaacagaggagacccattttctcatcagggatagagcagggagtcaacccaaggtcaaactccacacgcactgggacaggctgtgatgatgtgcaacccagcagctgggtcagcttggcttccaggaagggagccccttggccctcctgttgtcataactgagagccagagaaaggggccccacaggctctggggccctggggacacagctgggtggctgtgttgtggggtgccgcctttccgggatcccacggggttggcgagccatgctcttccccagctcctcgctggccttcacagggatgatgcacttgtctgcgtggggtttgctgagggagtttgtggttaacgttgcctttgttgagtcgaatgaggacgccacgttctgcactcagcagcaggagcgctcagaggggaaggcggtgggatttgaaggctgcttcctctatgaagtcagactgggaaggtcgatctcaggcctcaaggcaatagggtgggggcacttcagactggggcactctcctgtgtcacccaggtcctgcgcacccccagggaggggtctcacctgtcctgtcaactctgctccatcgggatccatgggccctcttcctccttggctggggtcatctccagtgagctccatcatgggcctcccagccgccccatcagagccaagtggttcctgccttcctgcagaccccaaggtccctcatgacgacacgtgtgtcctctgtctctggcaggcctgaggccgcactcaccccaggaggcaccgaggagccgcagggaaactgccaactgctgctccttgtgcctcagcttctctgctccctccaccaaggggaagaggccatgccgaaaccctggtccgcactgctcatggtgccatctgggcacccagatcctggaacgagccacagtcgggccctttacacagagctgggcaggggctgggaaggaggcctggatccctggccatgctgctagcaggacttgggcaacaccagggtgctttctgagagtgcaagtacatggtgagtgtgcttgcctgtgtgcgtgtgtgtgtgagcatgcatggcagagctgagcatgcatatgcactctgtgacatgtgtaagcatgtatgtgagcttgtgtatgcatgtattcatgtgtgacgtgtgtgtatatatgtgagcttgtgtatgcatgtgagtactcacgtgtgacatgtgagcatatatgtacgtgtgtgtttctgtatgcatgtgtgtattcacgtgacgtgtgagcatgcatgtacatatgtgattgtgtatgcatgtgagcattcatgtgacacatgtaagcatgtatgtacatgtgggggcttgtgtatgcatgtgagcatttgtatctgacatgtaagcatgtgtgtgtgagcttgtgtatgcatgtattcatgtgtgacatgtgtgagcatgtatgtgagtttgtgtatgcatgaatattcacatgtgacgtgtgagcatatatgtacgtgtgattgtgtatgcatgtgagtattcactgacgtgtgagcatgcatgtacatatgtgattgtgtatgcatgtgagcatgtatgacatgtgtaaacatgtatgtatgtgtggggcttgtgtatgcatgtgagtattcacatgtgacatgtgagcatgtatgtacatgtgtgtgagtattcacatgtgacatgtgagcatgtatgtacatgtgtgaccttgtgtatgcatgagtattcacatgtgacatgtgagcctatatgtatgtgtgtgattgcgagtattcatgtgtgacatgtaagcatgtatgtacatgtgtgagcttgtgtatgcatgtgagcattcatgtatgacatgtaagcattatgtatgtgtgtgggcttgtgtatgcgagtattcacatgtgacatgtgtgagcatgtatgtgtgtgtgattgtgtatgcatgtattcatgtgtgacatgtgagcatgtatgtacatgtgtgtgcttgtgtatgcatatgagcattcatgtctggcacgtacgcttatatgtacatgtgtgggggcttgtgtatgtgagtattcacatgtgacatatatggcatagctaagcatgcatgtgcatgtgttcatgcatgagcaggagtgagcatacatatatgtgtgcatatgtgggtgttcgtgtgtgagcatgtgcgtacacatgcgtgcgtttgagtgatgatgtgaggaggcttatgtagtagccacccttgccaggtgcttcctggtgggaaccagatcccgggggctgagctgtggagccgtggcagagccgcactaggatttccaggaggttaaacgtgcgatgctgtggaggtgcttggaggtgagggaaccccaatggtggacaggaagctctcaaagcacttagaggtggaggagtcctggacagtgggcaggaagggtggggtcaggaatggagtgggcaggggaagggtggagggagctgggcaccctgcagatggcagggtgggtgctcagtgccatggggctgccaccatcctccaagtgtggccccgagggccggagctgctctccctccattgctaggcgtaatcagttccttgtgcctggctctgcccaggaggtgtatattggggggcatgaatgtagggccagcccagctggccagtgaccctctgagcacagagccttcgggatggggctgggggtgtcccccacaacagagttcccttcctgagatgcgctggtggaggagggggcagtctctggaatttctgtttggagactttccggaggcgtgttcagacataaaatcacagcagcagcagtcagttttcaagcaaagagacttctctgggcatctctgagacgagtttgagcagtgtggggattcgttttgggagcacggcctcactgacatgcagatgtttgcttgtggaatgcctgcgcctgccctcgagaaggaggtggcactcagctgcttgaaacaaggctgggtcccaagcagcccagccctgccctgtggacagcaatcgaccgatggctacagcatgtcctgacctggggacagctggggacaggttgtggggctgtttcgtcacagctgctgtcacattaactgaccccagccctgggggagggtggctgcaaccccagccgcacagcctggaggaggcagggtgacgagggactccagctgggggagctggcgtgcagagcactgagggggtgggtggattgtggggtgaaacctgggtgtgtgcgtgtgaggatgcacatgtgtgaacgtgtgtgtgagtgagcacgcctgtgtaaactgcctggctccacctctgatgggctccgtgatcttgagcggggtcaccaggctcatgcctcagttttcttcatctgtgaaatgggccgatggccaggctgcacacaggtcctcagagggcataaggcacactcagcacccactgctgtgcctgggcagctggcgggggggcacagcagccactcacatgccactcacatccctgtgggttaccggctgcctggaatgttccagtctaaccggatccttttgtggacggggagactgaggccgggaaggagtatgcattcctgccctggtcccgggctccgtctctgctgggtctcctgggcagaaggtcaggaagggctgagagggacacagtccaaggcaggtaaagccccagctttgaggggaggcacagcagctctgagagggtctgagcccctcgagaccctccccgggatgtttaacgacttgggcagccattgcaacagtggaattggcactgcagcaagctgagcattttttcggttccaagtttcccacaacacaatggctccaggccaggcgcctctgggcgttccaggtcagagggggagcaggggctgggggccgctgcctcagtgcttctgggatggggtcctggcttggagccccaatccagagactcagcagccctgccccggcagagcctagcggagcacgttgggaaccctgtggacactgcacacagcaccctctgtcctcacggagcctggggctgctgcagggccgtgggaaagaagttataaatccttgggtgctggaacccccgggtgctgggcaccttgattccaaggctggtgccttctttccttctgcaagagtggggggtggaagacagccggccagaggctgggaagcctgcacaggggagggcaggagggcgtgagcctggctagccccacctccaggcacagaggccctcccgccgcccgcagctccagccgcactgccccgatggctccctacccctgtggctgccacatcctgctgctgctcttctgctgcctggcggctgcccgggccaacctgctgaacctgaactggctttggttcaataatgaggacaccagccatgcagctaccacgatccctgagccccaggggcccctgcctgtgcagcccacagcagataccaccacacacgtgaccccccggaatggttccacagagccagcgacagcccctggcagccctgagccaccctcagagctgctggaagatggccaggacacccccacttctgccgagagcccggacgcgccagaggagaacattgccggtgtcggagccgagatcctgaacgtggccaaaggcatccggagcttcgtccagctgtggaatgacactgtccccactgagagcttggccagggcggaaaccctggtcctggagactcctgtgggcccccttgccctcgctgggccttccagcaccccccaggagaatgggaccactctctggcccagccgtggcattcctagctctccgggcgcccacacaaccgaggctggcaccttgcctgcacccaccccatcgcctccctccctgggcaggccctgggcaccactcacggggccctcagtgccaccaccatcttcaggtagagcttctctctcctccttgctgggcggggcccctccctggggaagcctgcaggacccagacagccaaggactctcgcccgccgcagccgctcccagccagcagctccaacgccctgacgtccgcctgcgcacgccacttctgcaccccctggtgatgggctccctgggcaagcacgcggccccctccgccttctcctctgggctcccgggcgcactgtctcaggtcgcagtcaccactttaaccagggacagcggtgcttgggtctcccacgtggctaactctgtggggccgggtcttgctaataactctgccctgctcggggctgaccccgaggcccccgccggtcgctgcctgcccctgccaccctccctgccagtctgcggccacctgggcatctcacgcttctggctgcccaaccacctccaccacgagagcggcgagcaggtgcgggccggggcacgggcgtgggggggcctgctgcagacgcactgccaccccttcctcgcctggttcttctgcctgctgctggtccccccatgcggcagcgtcccgccgcccgccccgccaccctgctgccagttctgcgaggccctgcaggatgcgtgttggagccgcctgggcgggggccggctgcccgtcgcctgtgcctcgctcccgacccaggaggatgggtactgtgtgctcattgggccggctgcaggtaactggccggccccgatctccccaccctttcctttttgccttgccaggtaagtgtgggcggggctgacgtgagcctggtacaggttccccccacatcgaatctctacgttcaggggcccgtggccctcgggaggtgggagagctgggagtgaggcctcctgtgtggggaggaggccggcgtctggacaggaagagggctggatgaaccgcagccgatgtgtccaggtgccacctgggcctggagctccctgagcattttagcgcatttagtcctcagcacggtcccgagataccctgccatgccccgagtcacagaggggaaactgaggcgtggggcagtggcgtgactcaccccagggagccgagattcccgctcaggtgtggctgcatcgaccttgctccggtcactaagctgcacggttcgatgcgcttcctgggagccccagcgtgctcgggccaagggtgctgccgcgtgggcagtgcagagaccctaccagcgtggggaccagggaggtctgcagggcccgtcctgagagggagcctttcatgtccccctccccatcctgaagcacacagcctccctgccacagtgggggccgcttctgggcccaggggacgttgccccatcaccgtgtggcctggccttgttgctggctggacagttgggggcaggaagaggagggaaagggggactctttaacctcctgggggcaggggcagcccagaaaggaccccagcagatccctcctctgtgtccgggagtagacggggcccctgagctgtgcctgccccattcagattctgcttgctatgtgcacctggcagccttggcccagaggccctatccccgcagggtgaggtgctctgtcctcctctgctgtcctccccatagtgccgaggggaagcagccttgctgtttgctctttgggctttgggacagggttggtgggggttagcagctgtgccggacctggaggtgggggtgcctgcagtggaaattctggtggacgcccacccaccaggctccgtgagggatgacgagcttggtgattccccttgagtttcaggccagtgaccgtttctctcagcaaagcccagagcctctgcagaccctgtgtggggcctggggagtggccggggggccacagacagggcagggacaagtgctgacaacaggtggtcccaggagtaaagcccacgtgggctggaatggaggggcagggagggagggagggagggagggctgcagcggggcctggctgagcctgaggggggcacaggaactgcgctgggggggcctggtgtgtgcaggagtgggggcccttgtggatgcgccccagaagcatagggctggagctctccgaggcaggggccgtgcccgcggctgttggcatctcgtagggctggagctctcccaggcagggaccgtgcccacggctgttggcatctcgtagggctggagctctctgaggcaggggccgtgcccacggctgttggcatctcatagggctggagctctctgaggcaggggctgtgcccgcgaatgttggcatctcagggcttagatgtcacccccagggcagctggcactgccacaagcagccagattcctgggtcccactcatcctccgtccctggaacacccaaatgcccagcaagcaccagccgccttgcaggcaacccccccggagccacaccccacctggctactgttccccaccaagcatgtgggtagggcagccttgcaggagccgtactgactggagggacccgggtccggtgtcctggagccccgggaggctccagcacagcccaccttgtcctccactgcaagcccacggaggcagacaggacagcggtgggctgggagggctgcagcctgtgggaggggaaacgccaggcctgcacacctgaccctgccctagccctgccagcccgagactgtctgggatcagctgagcactgtgagcaagcttcagcctcagggaaggtgccggtctcctgggagttggggcacagctgcatggcttgggggctggggtccgagtggggctgtgagggcgaggaatttctgcaactgcagctggcccggtcggtggcacagcctgatggggacttttcactgaacatctggacagcttggtagcgtccccgtgcgagggaggccgtgtcccgtgcagggtcctgggggactccatcagcgttcctggcctgcattgcctctggccaggggtgggcctcaagctttatcaaggagccccttcccaggtgtggcctggccgggagggtcctgccccctcttctggcctctcagctcctccccagcccaggctcctcttgggttagccccaactcctgccggacccctatgttgggctggacactcccagccctgggtgaggggcaggaggaggagggggagcccagcctgacccctcgggcagacttcgaggccccgaaagtgggggtgctgggctgtgatccgggcaccagaacagagccctcgaggcccacagaggtccctggctgcatctccagggatcagggagtatgtgcccctgaggggaggggagctggaggggtcctgctgcctcctgcccggctccatctccagcgccccctccacctcgtcctgggcactgccctgtgtgtccaccccgccggcccacctcgaggagagtgtgggggacagtgcagccgtgctggggcgtggggggcgctcaaagggagggtgaaccctgtggtcagcacacaagcagggaccctgtggagggttttgctgtgttgtgggcttgtccctcaggtccacgaggaagggagtgaggccccctcacacgggagggccggggtggggtagggaggctcccttgctgcagctgccaagagtgagcgagcggggcttgggcttgggctgcccgggacactgcctccaggaagccccctgggctgtctcagtgggactctgtgagtgacacatggagctcaggtcacaagggctgtgggagtgtcaccccacaacagcaacgggtgcctggccctctggactttgctctctacacccctcctgagctctcacaaaccctggcccctgggaccggaggcaggtgatgtttccaaggagtcctacaggcaagcatcctctgacctgggagctgcgtattgttcccgtttacaggtgagaaactgaggcctaggaaggacagacacgtgtgcgtgccgcaagtgtggctagcaaggagggagcctggaggagggcccagcagcctggccccagagcgctcttcagcatcgcagcagatgcaggacaagcaagctcccagccggggagcaccaggagaccagcaggcatccaccctcgtggtgcaggccatctgatgagggcagggaccagtgccgggatggatagtgcctgtgcacagagtggggcgcaactgggcacagctgccaccggggtgctcgggaggcaggtccacacacacgccggccaagtcgctcatctcaaatgcacgagtcccgtgatcttggaaagtggtgcacaggcccctgggctggggcttcctctgcctccacccccatcactggacattcggaggtcagtgggaggccacgggagtgcacgtgaaggtcatgtcaccatgatggccccgaggggctgctccttcatcgctcctccctaccccatgggccagccactggcacacaggtgtccttatatggtgcttacctcttgctcctttagtcaaatgcagaatttgagaaaatgtcccttctccttaaaatgctttgatttgtttgatgtttccatgtaactttggtttaagaagggagaagaccactctgggaaataactcatgcttatctctcaccgcttggcaacctacaaatattttttcgatgatgctggctaagcttctcgtaaattctccatgcctcttagatgcaccaagagtgactcagcatttaactcctactggagtgtcaagggcccagtgcattgggtgcagttgtctgtgggtacaagatcttgtgtgattctgaactaagcacagacagaatgaaaagcacagcactccaaacagggcttcctgcaggtccttttacgtatatttgggtttttgtatatatctaaggtcaagctagtggacatctatcacttcaaccagttaccgttgtgagtgtggtgagaaaacttaagatctactcaagtttgaagtgccatatgcgatacagtattctagctgtaatcaccatgtgtacattagacctctagaacttacttttcctgcataactgaaactttgtacccttcgaccaacagtcacatttcctcttctctgtgggctggcctcggctgtgccctgttagcattcccagataaacaaaagctaagggggttaattgccactagaccttccctgcaggaaatggtccagtagtccaacaggcgaaatgaaaggacactactcagtaacagtaagtcaaggaggcccccgttgcctatgcacagagtggggtggcagctgtgccccattgcaccccactctgtgcatgggcaccgtccatccggcaccagtccctaccccttatcagatggcctgcaccattagggtggacacctgctggtctcctggtgcccccctgcagggctcttccttgtcctgcatctgctgcaatgctgaagagcagtctggagccaggctgctgggcccccctcgaggcttccttgctagccacatctgtggcacacacgcatatttgtccttcctagacctcagcccctgacaaccaccattctactctgctcctatgaatgtgacttttttagatcccacatgtgagatcatgcagtatttgcttctatgcctgccttatttcctttagtttaatatcctccaggttcattcataaaaagtgcagttacaaactgttgttgcaataccagcttttataattgcccatgtatttacctttattgagatcttcatttcttcatgtgacttactgttattgactagtgtcctttcattttacctgctggactccctggaccattttctgcagggcaggtctagtggcaattaactcccttagcttttgtttatctgggaatgccaatttctccctcacttttgaaggacagttttactggatataggactcttggttaacagttttttttttcttttagtacattgaatatattggtccactgccttttggcttccaaagtttctgtgacaaatctgctgataatcttattaagaagcccttggatgtgatcagttgcttttctcttgctgctttccagattctctctctgtttttgaaagtttgatgataatgtaacttggtgtgagtctctttgagtttaccttacttggagttccctgagctcttaactgtttatattcatgtctcccaacaaatttgagaagctttcagccattatttcttcagatagtctctctgcacctttctttttctcttctgtttgcagcttccacggcatgcatgcttccttgtctcttgatggtggccacaagccccttaggctcttttcacctttctttcatcttttgtctttgaaaatttccattatcttatcttcaagctcattaatttattcttttgtctgctcaaatcaccttcagattcctctagtgatgttttcaatttcagctattgtacttttcagttctgtaatttctttctggtttctttcaaggtttttatattgatatttccatgttgttcatacatcactttcttgactttctccacaccttcctgtagttctttgagcatctttaagacagtcattttaaagtctttgtctagtagatctgccatcaggtcttttgcagagacagcttctgttaatttatttttctcctttgaatgtgctatattttcttattgctttgtgtgccttgtgattttgtgttaaaaagtgaacatttgaactcagtaatgtggctcttgaattttgcccttcaccagcgttcgcttttttttgttactttttaaaaaatgttttgtgtctgtgccagaaatctcccttaggtgtgaacttcaggtcttctcaggtcttttctgagcctgtccctttccctgggtgtgtgcagccactttctaattttcctcttacatgctgctgtttttcaatgtcccgttctttcatgtttggctcccaaaggaggaataagataaaaatgagggagaaaaaacagtgccagccctctaaatccccttcaagtcacttcagctggaaggggcagcttgcaacaacagagggagtgtaaaacaatggccccacctccctgtctgcacatctgtgatcccaggcaacctgatcagagcacaggttctcgatgtctgcaggacagggtcctttttgccgtcctgtttcccacaagctgtgtggctgctgctccaggaactcgtgcatggcacctgctatgggaatgggggtggaggatggatgtgtggctgctattgtgccaagagctggggtttagctaaattaaccacccgttaccgtccaagccttcctgtggacattgcaagctttcagtagactccagagttccaaaagagttctaagacaaattctgcccatgcacttgttaattagttggggagatggattcctggcgctttccatctgccatttaccagagtactccagaatcattttcaaacacgtttctttctgtcaagaaatcaagtcttggccaggcatggtggctcacgtctgtaatcccagcactttgggatgccgaggcatgcggatcgcctgaggtcgggagttggagaccagcctgaccaacacggagaaaccccatctctactaacaatacaaaattagctgggtatggtggtgcatgcctgtaatcctagctactcgggatgctgaggcaggagaactgcttgaacctgggaggtggaggttgtggtgagctgagattgcaccactgtactccagcctgggcaacaagagcgaaactccatctaaaaaaaaaaaagaaaaggaaagaaatcaagtcttgaggcatcatcattgttatatcatgtgcaggtgtctagcctggatgccacccagctatgccaaatgcggggagaaactccctatgggcactgtggctgggtccagagctcagaggctggagctttgagaactgggctggagccaaaccatgatggaagcctctagctctcaggaagagacacacatctgcgggggcagagtgaccacatttccaggttgcccagccctcgggagtagcacagtgcccaggcactggggcagaggtggatcccgtagtccctcggtgggagctccaaagcctcccgttttcatctcttcctcttcccaggatgggattttggggatgagatcttcctggtgggctggagtctgtcccagaagtcaacagcccaacctggggccaaaaaagaccctcttagataaggcaggccctcggcaagactccagccacacatgagagggtggaacagagctcctgagtcccactaaccacggccacctgcagtggtcaggtgggggcaccgtgtccatccccccatgggtttgtgccaatttgcatataggtatgtagcttcctattggcgactgtaagaaattgccacaaattcagtggcttaaaccaacacagctgtcttacctttcagttttggaggtcagagtctgaaaccagttcactgggctgaaaccaaggtgttgtcagggctgggtccctctgggactctggaggagaatctgttttcttgacttttccagcctctagaggctgccgcttcccttcgctcaaagccccttcttcccccttcaaagccaacggtgttggacaagtcctcatggtgccatcttttgtccttcgattttaaggctttgtgtggttagaagtggatcatctcccatctccaggtccacagcctgagtcccagctgcagcatccccttgccacgtaaaattacgcttgtgggttccagctgttgtgccgtggacatccttggggccatggctctgcccaccacagtttgtccatgtgcacggctgcacatgtgtacatatgcatgggagtcttactttgcattaatgggattgccctgtgtctgaaagttcctctttcctttatcctgcatctcaggagtctccataactccagggagatgctctgctcttcgtgttgttctggtcttttcctcagcccttcctgactgaagcactcgcaggtatttctgcttctctgtataacagatgaccctgcagacacctgctcagccccgactggcgggttcatcgcacagcctcgcctttgtttatcagacaccagctgagccaccccacctgtgcctggcgtgggttttgggtcagcgctgacggtggagagattgaatgttgtaaacgtgtccgagtgtcaacaggaagtctccacccggggacaggggcccgtttcttaggttgtttttagccttccgtgggggctctgcagccttgggatttggtggaggtgtttgttctgaggccgtttttctttgatgccaagatgtccccccgggcacttcactgcgtaagtgctatggtgtgatggagtgatgatggtggcgcactcttcaagctctggatcaggttccggaagctctgtgtgagtcttactgaggtggttattttctcttttccctggaaagtgggctgagagcactccatgtgggcacgagcggccctggctctgcaggactggagggggctgtgctggagggcggggggctggccaggcagccttggatcttgtcctcaggagcccttcaaaggggcagcagagactccaggccctgtgccccgaggagtcaggctgggctggttctggggagtgtctggagcacctgatgctgagcacaggcgggcgtccgtggagtgcacgtgtctgagggtctctgaggggtttgcccttttcttcggagccacggtggccgtgagggatgcaggacattgggtgtggccctcgaggactggcctgtctggagcccactcccccgtgggtgaacgcggctcttggtggagagcccagtttggggagaagggacggtcttgtcctgggaggtgtcagacaaagccgagcatgggactcacaggagacccccagtcaggccgtgtcagggtgaggctgggagtgagggtcctggaaagtccggcttctgggagagggcgctttggctcagaggctgccactgcagaagggatggacgtccccggtcccctaagataagggacccaaggggaggggcggggacgttccacactggtgtgagaacagcggagagtcccagccagaggtacccgctgctctcctgcggggaggatgctggctgcactgtctgtcctgggcatatttaaaggggcctctgttaacacacacaggcctccagaaccatccacacttctggctggcctgattcctgagggggaaatggtctttaaagaagcaagcaccttgatccaaagggaggtggtccagcaggaggggccgccccaccatacccaggaaggttgagctctcgcacccgggaaggctgagctctcgcacccgggaaggctgagctctcgaaatggggttcaggcatttgctgtttgattccaggacatctgagacagctgggcctgtacctcggggagtggaggctgcgccattctctgcccatccagcatcttagggccgggcatttggaagctggcttctgaagggagcccccaggagcttcgtggagaggagacgggacagctttggaaagggcgttgctgtcactggggtccctggggccgccggtgtagcgtgctggtaccctccagcccaggaaggtggcagctgccgcatcttgctttcccaatgacggaatgttctaggaagggtggtgggaggtttctccaaggtgaacgcgggggcagctgggtggctggcacggcctctggcccccaggccgagtcctgtttcctgatcttatcacagccccagcttggacatgtgggaccaggcacttcttatgagaaaaaggatcattgtaacagctgccatctggatggacgatcattgtaacagctgccatctgggtggacggcggcctctgtctgagggggatgtgaccgctggcccccagagcccaggctcagcccgttgggacccctctgcccctggcccagactgtggctgcaaagcccgggctctgcctggcacggcaggtgtgctgggaagtcactctgagcagggtctgcccttgagtgggtgctgcccccctcccgtgggcaggaaacgaggtgtgagaactctgggcaccggggctgcgtcctggcttgggctccctgggcgagggatggacagggctccttctgaccctgggctactgagtcgaagtgaagtcaagctccgcctgggcaggaatgagtggagtgagtcacccggcgctgtggggcatttgcacggagcagcggggctggtggggagactgtggcacgttggcaggtacgtcaggcatgcagcccctccaaggggtgattgtggccccgaggggaatcagcatgggggggatggggagatacagcttgtccttgccacatgaagcacctggcccagcaggtgagccggtgaccgacagcgctgggtgaaatcccgcaccgtgtcctcagatgccacgtggaaccccagctgaggcagccactctgggcgacgccccgtagccgaggcttcgaagaacactggggtgtggggtcagcctccctccttccctgtggtggaactgtggcttcacagtggaggccaggctggggtgccggcctgggctgctccagcagggtcagagtgggcgggcagggcacagggccgggcgggaaggctgccagccccagcccctcacagctccttgccccagcgggggtgccggccagtccctggtcccttctccccactggctctgcccatcaatgctcaaagcatggaaggggaagcctgtggacaccatgtctgctgtgcccatccctgctcaaagcatggaagggggcctgtggacaccatgtcccgtgcagacaccatgtctcctgcagacaccatgtcccctgcacacaggtttctgcatggagcctgcctgtcgtttgggaatgagtgaaccagggtggccgttgggtggctgagcccaggggatcagggcaggctgccaggcacgtggagagccctcccagactcagtttctcctttctgcccctgcctggctgcctctccaggccgcgtcggtggcccctggttccgtcctgcacagccacctcaccagctgtctttctttttgcagagcgcatcagcgaggaggtggggctgctgcagctccttggggaccccccgccccagcaggtcacccagacggatgaccccgacgtcgggctggcctacgtctttgggccagatgccaacagtggccaagtggcccggtaccacttccccagcctcttcttccgtgacttctcactgctgttccacatccggccagccacagagggcccaggggtgctgttcgccatcacggactcggcgcaggccatggtcttgctgggcgtgaagctctctggggtgcaggacgggcaccaggacatctccctgctctacacagaaccaggtgcaggccagacccacacagccgccagcttccggctccccgccttcgtcggccagtggacacacttagccctcagtgtggcaggtggctttgtggccctctacgtggactgtgaggagttccagagaatgccgcttgctcggtcctcacggggcctggagctggagcctggcgccgggctcttcgtggctcaggcggggggagcggaccctgacaagttccaggtaacccccactgtgccgtcgctgggggactggagcagctgggatggggtggggtgggggtggccactgggacagggacggagctgtggccggaagaggagagcccccaccccagctgtggtcagcccgggcctccagcgcaggcctcctgggttcttggctgctcagccctggcctccggcgcaggcctcccgggttcttggccggcctggctggggtggcattcactttcttggctctctggctcctgcgcccccaggaagggtagccctgggcttccatggtttctctgagaccccgaggcccagcccaggagggccctctttgaacgactttgtaactagacatccaccccagccgtgaccccgtgacccagagacacccccaggcctgtgccaagccctgtggtgaagtggggctcccggcctctgaccggccggtcgggtaagtggggaccgagtccaggcccagccacacgcctcgtggccccatgcagaatgaaagctggggtccttgttgaaaacgatgaacgatccaaagctggcggcagcagggtgttgatcccagcagggttctcctgtggtagctgcacacccgctgggaccaggggctcagggcggccctgcaggtcagcacctttaacaaagggtgcagcaacccacgcctgtgagactccactttggagcacgtggtgggagtcccccagcggtgaacgcacgtggccgcctccacctgagtctccgggaagtccctccagtgggccttcatttcttggggttgggggggtggacagatccctaaacccatgtggggtctgtgtccaaagcccctgcatttctgggaacctttggctgggaacagccacgtgggtgacctcagctggcactgtctcacaagtccctgaattctagcattcaagctggcctgcagctggacgcccctgccctggcgggccgcaggggacagaaggttaattattgcccagacaagggctgtttgtttgaagttgttctaagtcctggtgtctgggggttctgaaagctgacttttcacctttggcaggaacttttaaccctcagagctcaggagccgctaggacgttgacaccaaactgggcctctttgttttcctcttgatcacaaacatgattaccgggaaagaagtcagagtcaccccctccagtgagaggcaatttgttgtgtgagtccccagccgtttcttggtggaataaagtggcccacaagtgccgtacatctttaacactgttaggaaaagcggctgagtgccgagagctcggtacgtgggtgcacagctgtgccccgatggtgctagggagagccgggccaccgccctgcggtgagggcctcctcatcagcgaagtcccgtgtgtaggaagagggggtctgggtgtttaattttgcatttcttggactgtgaagatagactttcattttgtcacttgtttattgtctgtttgtatttcttcctttgtgactgaccggtttatgttctttgtggttttcaatgggcccaactctcagtgatttatacaaactccttatctttaaaagaaacttctctttggttttgcatgctgcagattttatttctaccatgtcatttgcctttttaccttgtctttttttttttttttttttttgactattgggattggatgtgtggtttttttgtgggttttttttttgtttttttttttttagatggaatctcgctctgttgctcaggctggagtgcaatggggtgatctcggctcactgcaacctctgcctcccaggttcatgcgattcttctgcctcagcctcccaagtagctgggattacaggcacctgccaccatgcctagctaatttttgtatttttagtagagacggggtttcaccatattggtcaggctggtctcgaactcccgacctcaggtgatccacccgcctaagcctctcaaagtgctgggattacaggcgtgagccactgcacccagctgggatttgatgtgtttatgtggttaaatctggcctggagaagacaccatgacttacaacagcccagtgaaaccttggaaggtcagagagctggaacaggagggagctagagggccctgggtctggccctgggctggggccctgctgggcgtgggtggcgtgcagcaggccgtgtgctgctgggcgtgggtggcgcgctacaggcttcgtgctgctgggcctgggtggcgtgctacgggcttgtgctgctgggtgtgggtggcgcgctacgggccttgtgctgctgggcctgggtggcgcgctacgggccgtgtgctgctgggcctgggtggcgcactacgggccttgtgctgctgggcgtgggtggcgtgcagcaggccgtgtgctgctgggcgtgggtggcgcgctatgggccgtgtgctgagggctgtgttggttgatctctgtgtcaggtccctgcaggcctcaggtgtcaggaactttctctttgggtcttagatgagattccagctggggagaggagaagcatgcttgtgtggtagaaaagaagacagacttgttcagcacaagattttctcagacttctgaattgagatacttgggaaagaaacattcaagttgtgtgactcataatttttggcagaaacaagcacagagctttgggagcagggaggaaaccgaggcttcctcctcctcagcctctccacaagactgcatcgaccctggcgctgccacagatggtgcctgggacccccggccgcagctgggtccaacagagccctccggagcattggttgtgttcctcgtcctaagagtccttgggcgttgttggtcttttcaggttcactttcttgagtcaggtttgtcagtggtcgtctcccgggaaatcatgcacccctcccagctgctgccgttgccttgaacgtcatttccagctgtgtcctgatttccagctgtgtcctgatttccagctgtgtcctgatttccagggcgctgaggctgcagcgtgtcgggaagcattttacatgctcttccctcacagaattcctgtgagctctgtttcaggtgtctccggatttcataactttcagtccgaagtcccttaaatatttacaatgggcctgtggcttttgcactagcgcctcctgccccacccccggagccagcggccaccacgggctcagagcttctctgccctctgtagtcgccccccacccaggcaccctgtagccccgtgcaggaggcgtcggcccctcgggggcactctcaggagagcgctgtggccacctgtgggggggtcagggcctcacgggcctctctggacagtgcatgtctgtgtggggatcgggtgtcaggaatgcccagtccctccccgacaccaagaccacccaagatgcaccccccgcccgggctgccccagtggagaagcgcagttttttttttttgttttttttttgagacggagtctcgctctgtcgcccaggctggagtgcagtggcacgattgcggctcactgcaagctctgcctcccgggttcacgccattctcctgcctcagcctcccaagtagctgggactacaggcgcccgccaccaggccaggctgattttttgtattattagtagagacggggtttccccatggtctcaatctcctgaccttgtgatccacccgcctcggccttccaaagtgctgggattacaggcgtgagccactgcgcccggccgaagcgcagttttctagaattcaaccccagctcctccctgggcctgacctgggggctcctgaatgtgaaggctcagctgctgggctgctgccccacccccacgcagtaggtcctggtggacagtggaccctggaccccacggtgctgcccctggccgacctgggggcactgtaggcaacgccctcccccgcagtgtgacgctgagagccgctggtgcgctctgtgaggctgagaaccgctggtgcgttttgtgggaaacctgtgggaaacccagggggcccacagggtccacacccccccacgcatgagctcacacgcgtgcatacgtgatctcatgtttgcacacatgtgtccatgcagatgcatgctctcacgcacatgtgcccacacactcagcactcacaccccgtcctgcaggctcagccccactcctgagccacctgcctgggctttgggggcccagccggcatggggagccccaggctccagctggcctcgcttggctctgaaatctaggccaggatgcagaacccgcagtgcggccagtggagcccctggtactgtgcgcagcccccacctggcagccccttttcctgtcaaagcccctcccagcgtcctctccccaccaggcaagctacccgcttgaggcttaggacgttgcgccctcctgtgtccttgcccagcatccccggcctgcatctcaccaggcaccgccggccgcgccagggcccgagagggcagggtcaggcaccctggcactcagcccaggactgaagatgccagagggagcggtgggtaggtgggtgagtgagtgagattgggtccggacggaatgggcgcagagatccaggaaactcccctacatctgcggcgtttctgtccttggcttctgggttttgtttttgatgaaaaggtgaagttcaaagaaagcaaagccatggtgccacctcggttggtccgagtcgggagatgaggccgcctggtgcttgcgtaaagctcccgggacttggggttgggggacttgacctgcagcccctcgaatctgcccgccctcccaggccttggatcgagccacacctgctgtggttctaaacccgtagccctcaggtggcccatcagctgcctcagatgagccaagtctgagggagcagcctccgcccagccgggtgctttccacatgaaagcgcccaggacgcccctgggtctcaccacttcttcctaccatgaggcataccgcacccccagggaggctgcccgagaccccttccctctccgagactctcctgccctttgtgggccccccgaaatctggagctcaagcagcaccggggttgccactgccacctcaggaccgctggtgacccctttctctgtctgcatttagggggtgatcgctgagctgaaggtgcgcagggacccccaggtgagccccatgcactgcctggacgaggaaggcgatgactcagatggggtgagtgacatctggggcacgggtggggtctcccctcaatccctggcacgcggagttcagggccaaggtctatgacaggaaaagtcccaaaatataccacttggggcactgggaagctgcgataccatttctgtgctctcctgtagcacctcagagcccttccttgccctgaactttcccataaaaacaaatacaaagcatgatataaacaccagaaaccaccctccatggcagctggtgagacagaggatgtgaggcagctcagcaaagtgtgtgtgtgtgtctgtgtctgtgtggtgtgtctctgtgtcttgtgtggtgtgtctctgtggtgtgtctgtcttgtgtgttgtgtgtggatgtgtgtgtgtctgtgtggtgtgtctgtcttgtgtgttgtgtgtgttgtatgtgtgtctctggtgtgtctgtcttgtgtgtcgtgtgtgtctgtggtgtgtctctgtgtgtagtgtgtctctgtgtgtggtgtgtctctgtgtgtgtggtgtgtctctgtggtgtgtctgtcttgtgtgttgtgtctgcatgtctgcatggtgcgtgtgtctctgtgtctgtgtctgtgtgttgtgtggcgtgtgtgttggtggggtgtgtggaatcacgtggtacccaaggggagaatcccccagccccaggtgtgaggaacagcagggaattctcactcaggggcccagatcacaacatgccccacgtgaacatggacccacagcctcgctcctgggggcgtgggcaggagacgccgtggacgtggacccacagcctcgctcctgggggcgtgggcaggagacaccgtggctggactgtgggcagtgtgtgaacatccatgttactttcatgctttttctttattttgcccaataagcccgttgtttttgcctggaacatgccagaagacgccagatcgttcacatggcggccatgacaaggctgcgccctgggacagcttgctgggtgcggggggtcgccgaggcgccgcacccctcccctggcctgtcttgccctcaggggtcagtagcggtccctgaggatgtttctcctccgggttttcctgaagtttaaaacatccagccgccttggcgcgtgttcggcccagccgggcgtgcgctggggaaacctgtgcggggagcatctgcggtgcggcctcctccagggcagggctctggccagaagagaggagcgcgttccccctcccgcctccgcatgtctgaccaccggccgaggcaggttcagaagcgtcactgtcctcgacccgattggacacgacttactgaagctcagatggtgcctgggcagggaaggccagcgtgcccaccccagcggccccccggagagcaccagagagggctggacgaggcgagagggggcctggaggaggcgagagcagcgtcctttgcttcccaggcctgccgggctcggggcctggcctggctgccatctctccagcctttcccttttcaaactcctcaggcatccggagactctggcagcgggctcggggacgcccgggagcttctcagggaggagacggtgagtagccggacggggcccagcccacgctgcagggtcccgggagagcccctcccagcagtggggtgacacatgtgcacacgcaggtgtggctccaagagctccctctatgccacgaagacatattcctggctggggacagggatgctgggctgggcagacgctcggagcctgggcacaggccccgctccggccctgcctggccgccgcgtgtctctggtgagaggatattcctttaaaacgaggtcctgccctgcacactccttggtcttcgaggcaaccttggccttcccttcgccccatccctccgttagctcgtgcgtggccatcagggaatgaacgcgtgtgtgagcctgacgaccaggaggagaaggcggcgcagggagcgcgcggaaggctttccccagctcgggccacctgagaaaacacaggaggggcggggagtggggaggccccagccgcgggactgaggcgcggtgctgtccgtgagagacgggtgcgggaacgtgttccctgcggggaccctctgcagattcacatcagcttcccagcatggcctgtcgggcgccgggaggcctctgtggtgacggcaggcgcggtcctgggtcctggggagccggggagcccacaggcggccacacccctgcggcccacggaaggaagcccctcgcgcacggccctggagcaccctcctgtttcagaggatttttctttatctttcttgcgatcttaagtatttcatttcacaaaccaagcaagtctccaccgggcatctgccggccgaataacaggccacctcccctctcgtcctccagggcgcggccctaaaacccaggctccccgcgccaccccccgtcaccacgccacccttggctggaggcagcagcacggaagattccagaagtgaagaagtcgaggagcagaccacggtggcttcgttaggaggtaagctcttttctggatgtggtgtgtgtgtggtgtggggtgtgtgtggtgtgtaacgtgtgtttgtgtgatggtgaggtatgtgtgtgatgtatggtgtgtgtagtgtgtggtgtatatggtacatgtgtgtgtgatatggcacgtgtttgtgtgaaatatatggcaggtgtttgatgtgtggtgtgtgatgtgcatgtttgtgacatgtgtgatgtttatgtgatgtgtatgtagtgtgtatggtgcatgcatgtgggcatgtgtgtgtgcagtgtgtggtgtgtgtattgtgtgtggtgtggtgtgtgtgttgcgtgtagtgtacgtgtgtggtgtgcagtgcatgttgtgttgtatgtgatgtgtagtgtgcgtattgtgtgtatgtgtgtgatgtgcatgtgtaatgtacatgtgtgtgatgtgtattatgtgttttgtgtgtgtgtgtgtgtgtgtgtgtgtgtggcaggtggggagatgccgaggcccggatggtggctctgggtacaggctctgggtgttcactgtgcttctcttgcaggatttctgttggttttcatttttattttaagtaaaagttaagagggaaaaaggaaaagggacaaagcatgctgggtgataagaaggcattctggggggccagggtctcttgtaacaaattcaggaagcatctcccagacttcagctgtcattggcttagatggccacaccggcctcactgttgattttaaattctgtctccctgttgcctttgcctgggagctggagctcaggggagtgcggcctgaggctggggatctgacagtgtccagccgggctccaggactgaaagcgtttgggctgccggggccgtctggggtgccgagagcagagctggggccacccggggggcgtgaccgtggccacctctgcttctcttcccagctcagacacttcctggctcagattctgtctccacgtgggacgggagtgtccggacccctgggggccgcgtgaaagaggtaaggccacctccctgtgctcctgaaccattctgaaccagagcacctgtggccttttgggccactcactggtgagccctgatgaagcccctctgtgcccgtgcctcctttgtgcccagcactcggtgccagcatgcgtccaccctgcgtgtccactgtgggaagcagcccagcctgggactctggagggcgcagcgggacacgtgggcagggtgtgtggggccccaccccagcccgagccctgtgttctgtttattcccagggcggcctgaaggggcagaaaggggagccaggtgttccgggcccacctggccgggcaggccccccaggatccccatgcctacctggtcccccgggtctcccgtgcccagtgagtcccctgggtcctgcaggcccagcgttgcaaactgtccccggaccacaaggacccccagggcctccggggagggacggcacccctggaagggacggcgagccggtgagtcctcacgtccccccgagtccggcccggtctggagggtgggggcttgggtaggagggggagaggctgcggccgacatgggagtgagctgagctgggatcggggcaggtcagcagcctccttaggcccaccgttgctcggggttggtgctggaaggtggtcagacgtgggaggcggagctgctcagacacagcccttgtgggtgtgaggaggctcctggcgcgggtgcgaggacatcgggggaaggcgtctgccgcctcgtggggacttggagcgtggggtgcatttccatgtagacactgtaggtggcgccggaggagtcatttcccatcactaatggcttctcttgcacacccagggcgaccccggtgaagacggaaagccggtgagtctgcttttctttctgacccctgtgttatctgtgatgtttgcttagaccccagggctttgttgccagtgacactctttttaaacgcgacccagtgaggagactgtacagcaaaaccattttgaaagtggaattttgtaaagaaaagatgagtgtaactgttgatgggaaatagcagttatgcatttgtgttgagacatttgggccacaactaccatgaagaaggaaaggaagtgagaaaaggcagagcttccaaacccttagagggaagacgcacagcaaagaaaaaggaagtcgggcggggcagggggtggtgcaagtcggcgggggagggaagcacggggcgacctgagactctgtgaagtccgagcttcgtcgcaaaacacgcagttcagtctttaaaaatcagcaaacaccgtttccaagcacagtaatgacgtgatcgactgcgaataaagacctgggaacagcctgcccagcaaatggtaacactcggcagaaagtggggccgtcacgaacgctggacaggagggttcaagttaaaaacagtctagaaggtctgaaaggacagggagggcatctcatggtgcccaccgaacggtcattaccgaccgcctggcaccccacagccaagctgcctgcgatgaggaccacggcagacaaaggacagtcggctggggggcggcacggggcccacccactgcaacagggtacacgcacgcgtgtgagtgtggggtgatgatccacggggcccacccacagggcacacacacgtgtgtatgtatgtgcatgtgtttgagtgtgtgaatgtgtgactgcgcgtgtgtgtgggggggtgaggatccacacgtacacataccacacatgcacacacagcacatatcacacaccacacattacacaccacacgtggacacatgcacacacattacacacatgtgtgcacacaccacacattacaccacacgtggatacacttgcatacacacactacacacacgtgtgtgcacacacaccacaggtggacgcatgcacacatgctacacgcacgtgcacacatcacacgtggacacatgcacacacaccacacattacacataccacacgtggatacacacatacacataccacgtgtgcacacatgtgcacaccatggattatgcacaccatacatgcacactcacacatcacacatacatatcacacatgtacacaccacactcctcacacacacaccatgcataccacacacacacacacatgtatgtaacacccaagcaccagctgttgtggaggccttcggggaacctgctgtgacctcccgagggatgctgcccgcagcttcccccaggcgtggctggcgaaatgggctcaggcgggagacagtctgctgggcctggcgccctcgtactttccgggccccagagactcccctgaagggctcagctcccgtccgtcccctgcttgggggaggagcactgagagtgctgggtgcggcccatggtggtgccttccctgaccgggcccccggatgttgtgttccagggcgacaccgggccacaaggcttccccgggactccaggggacgtaggtcccaagggcgacaaggtgagtctccgtggctgggtggggccccttcctgtgttggcccttggctcaaggtgggggctgtgtgcgtgcccagggtatgataggcttgtcttgtgttcccagggagaccctggggttggagagagagggcccccaggaccccaagggcctccagggcccccaggaccctccttcagacacgacaagctggtaagtcccgcccttggcttcctgcgacccggggtctgccctcctcaaaagcaggcactgcctctggcccagaagtatcagctccaccctcaggggcttgcgtggggtcttggctgagctgaggggtcacaggtgtggtgggagcccccatccacctgccttcaggcttctctgggggcagcagaggggccgtggtttctcagctccttgtagaaacagctcgatatgcagcttgcggggcaggggccaggagtaggccaggcggggggccgagctcagggcaacgtgtctctccggctcttttcctcagaccttcattgacatggagggatctggcttcgggggcgatctggaggccctgcgggtgagtggcccttaaactgcagcgctgcccgatgtctgtgcccatgaggaacaggccatggacccccaagattcagctggggtcctgtggggggtggggatgaggcccgttctgggggtggtggtcatccctggtgggtgccacatgggctgtgactatctgtgttcgcccacgtccagggtcctcgaggcttccctggacctcccggaccccccggtgtcccaggcctgcccggcgagccaggccgctttggggtgaacagctccgacgtcccaggacccgccggccttcctggtgtgcctgggcgcgagggtccccccgggtttcctggcctcccggtaagtcctgcctccaccgtcagtgtcgggagccctgtctgctgggagtgaggggtgaacaccccacatgggagcccctgccccgcctcaggcctccccagtccccgcctcctcacctcatctcctctaggagctggcgggcagttgctgactcggggccaccctggggtgtgcggaagcacctgagtggccaccccatggttctaggggtgctgaccagtgggggtgaccgcaagcaaggcctccgacctctctggccctgtgggtccacggactgcacagagagcgtctccatgagcaattcccatgggtgggtgtgggagggccgaggtcagcattgctggagggccaggggagggaggagcctgcttggccaacgcggctcgtagggtctcaggtccccacggcaggctccccaccagctctgccacacatgacgggcagcaggtcatgactggcagcaggtgcctgccccaccagctgtgccacacatgatgggcagcaggtcatgactggcagcaggtgcagacgtggctgctgtaattgggtcatgctgcactggcatcccgtggcctggggtcactcggtagcatgccatgacgtgcagggcagggagtgtggggttaggtcacccatgacatgcccctgcctccgtaacagtccctacctgagccagccaaccctaccgatgggcattcaccgtcaccatcggctctgaggcctctctgggtgccgcatggcaagtgctccccagaatccattctgaggggaatttgggcttaaagaacatgcctaatccatattcacgcatgtggccagactgcctctcagagggagcagcggctaccccagccctggtgtgcaagcatcttcccgccgtggtgctgtcggctctgccatctcatcctgccaatgtggccgcgaaactgcgggctacgcaggctgtggggtctcccgtgagccctgggactctggccctgtgtctggggaacgttctgtgtcctgccttctggaaacctgcggaagcccagataacctgttaacccagaaatcgttttagtggccgaatgccatcaagacccactatgctctgctctcccccagggacccccaggccctccgggaagagaggggcccccaggaaggactgggcagaaaggcagcctggtaagtcttccctcgagtccagggtgagtgggaaccagcaccacaccatgtggcccgggtccgggggtgcctggtgacgcccgtgaaggggaaatgccaggaatagccccccatcacagccccacagcctggggcctcgcgctctggaggtcaccctgacctgggcggctggggcttgggtagaaattcataaccctgtgatgatgagtggactcacgggttttaagaacatgggcaccctgcgagatctgagatcttactccaagcttccacgttggttacggggcagtggccatgagcctctgtcggactgacgcaaggagccggggccccaggcgtttgtgggtggacctggcgggagtcgcctgcgtctggccccctggggagcggtctccagcatgacctcagatgagagctgcactgctttggactgagcaggggacgcgggctgtaaatgcccctcactgctctaagcctgtggctgagctgaagggcccttcttggggaggcatccaggccccaggccccacgtgtagccaggtccagcattgggaccaggcttggcgtcccttgtggcttccctttcaggaccccaaccacaccagaaaggggggatgacagcggcaacagcctcagaaactattaaaccggcacaggcagcaaagcagggacccgggtcggggcacagttcctggcagggcgatgtgccttcctctgtccactgtgctgcaagtctgattttgtcataatcctgctcttttccgtacagggtgaagcaggcgccccaggacataaggtacaagcagaatccctggcacatcagtcccctgcccctggtgcccactcagtgctcggacccccaaagagggtggcagccccacggtcgagagagtgagctctcttggggctggccttgacccccactcctgccatctgtccatccgtcctgccggaatcgcgggcagcagcctctgtcactctggcgaggtggcttcggcccttgtcacttttgtgatgtggcttccgccgagctctggtctgccggtgaactgagagtagacgcgccctggaagctgagctcatctggaaacaagctccgtgtggcaagcgcgataaagcagctccaggagctttgggaggaggggctgggccacagcaggtggagaggctgcccgtggcctggggagggccctgagctgggccccccaacatccccccataggggagccccatccacccgtcccgcaggctcatgagcatctgggggcactcggaaggagcgctgaaggcagcccgggtgtccttggcggccctggcctggcccagagtctgctcagaccctctggactcggggcagctgctctccatggacccagccttccttcgggcagcctgaggtctgggccacagcctgcttgaccagacaatttatctgacacccccccaacgacccacttcctccttctgttctgcggaaattgagctggaggaggagctagaaccctgcagaggaggggctgggagccgggtctgggcctccagtcggcatctgtgccgaccccaccacagacgcccccggaggtgccctcgaggatccaggcttccgtgggccgcccactcgaatcatgtccaaaacgtcaggagctcctcaccttggctggacggggttggcactaacggggaactttccccagaacatggccaagctccaggatgggggtgatgagggaaggaaggccagtggggagaggagtgaggaagaggacagctgcgagtcaggtggtgagagcacttggagaggctgagaggacatgggctgggagtgaatgcatgtgcacatacacacacacacctctccagcatatgtacacatgcacacacacacctctccagcatatgtacacatgcacacacacctctccagcatatgtacacatgcacacacacacctctccagcatatgtacacatgcacacacacctctccagcatatgtacacatgcacacacacacctctccagcatatgtacacacacacacacttctccagcatatgtacacacacacacctctccagcatatgtgcacacgcacacacacctctccagcgtatgtacacacacacctctccagcatatgtacacgcgcacacacctctccagcatatgtgcacacacacataggcacacacatctccagcatatgtgcacacacacctctccagcatatgtgcacacacacacataggcacacacatctccagcatatgtgcacacacacacctccagcatacatgcacacacatgcacacacacatctccagcatatgtgcgcacacacatacacgcacacacacatctccagcatgtgtgtacacacacacacacctctccagcatatgtgagcacacacacacctctccagcatgtgtgcacacacatgcacgcctctccagcatatgtgcacacacacacatgcacctctccagcatatgtgcacatacacatagccagcacatgtgcacacagctctcatgtatgtgcacgtgtatctctagcatacatgcacacatgtatctggtgtatatgtgcaacacatgtatctggggcatgtgcacacgcatctcttatgtgcacatacacacacatgtatctaggtatgtgcccacgtttttctagcacacatgcacacacatctctctagcatatgtacacacacatgtatttgtagtgtgtgtgcacatctgtgtctctagtatgtgtgcatacacgtacacatgtaggctttgagttaagcaggggaggaatattttgatcaactttaaaatcagcaaaattagatatgcatgtatgaaaataatgaaagttttaaaaaaacaaaaatgtcaagtaacatgaatgagaattctagaaccctacaacctaattgtaaaccaaatagaaaatgaagaaaaaagggatgaaattagaaagaggttttcaacaaacctttttttggagacagagtctccgcagtggtgcagtctcagctcactgcaatctctgcctcccggtttcaagtgagtctcctgcctcagcctcccgagtaactgggactacaggcatctgccaccacacctggctaatttttttttttttttttttttttttttttttagtagaggcagggtttcgtcatgatggccaggctggtctcgaactcctgccctcaggtgatccacctgcctcggcctcccaaagtgctgggattacaggcgtgagccaccacactcggcctaaacaaacttttttataggcactttttaaagatcaaaaattagatgaggctggacacgatggctcacacctgtaatcccagcactttgggaggctgaggtgggaggattatttgagtccaggagttcaaggctatagtaagctacaatcatgccactgtgctctagcctgggcaacagagcgagaccctgtgtccaaaaagaaaaaaaaattagatttttaaagacgataaaaggatgccaggcactaagacagattaaagccaagaaagtaaaatctaagattctcatgaagttagccctcaagttaagtgggtggtacatggtgcccacctgttaagacccagcgtagctgttggagggtggctgcagtggagacccagacctagaagggaggagacaggaggcagtcgaggatcaccttggcgggtggagggcggggaaagctctggcttggaggcccagcccctgtgggggacatgggaagcaggaaggacccttccccacagagggggtttccttcctccagctgggcctgtgaccatatcaaggcagcgggtcacattcctgccccatttgtggacagtgctgggctcacactatctcattccgctctgtcccgagcctgggaaggaaccctgggcctctccgtctacagccacggaaaccgaggctcagggagcttgtggctgcgaggagaggggtggttcagctgggccacgtcacagcgggacccctgcctcagggcctccctccctcacgccccccacaccgggctctcacctcacactccaggtggctggggccttgggtcaccgatggctccagcacatgcctccgggctcgcctgcttctcacggctttcggactaatagagtcaccgcaatgcctgtgtctaccctagccccagtggtcccagggtcctgagcctcctctcctctctcctctcttctccccttgcctgccggggagccagggctggtcccagggtcctgagcctcctctcctctctcctctcttctcccctcgcctgccggggagccagggctggtcccagggtcctgagcctcctctcctctctcctctcttctcccctcgcctgcccgggagccagggctggtcccagggtcctgagcctcctctcctctctcctctcttttcccctcgcctgcccgggagccagggctggtcccagggtcctgagcctcctctcctctctcctctcttctccccttgcctgcccgggagccagggctggaggtaacgagggtgccctgtgcacctcccgctgtgcatgtgggcctccccctgtgcatgtgggcccaaccccgaccaagttcgggctccgtggctctctcctcagttgtgtttctgtgtggctgaaatcgtgtcgtaaagttagaagaaaggctgctgtggggcctgcgttgcttggcagaatgttccttaccttttgatttgcagggtttagaaagcatcataagaaaacgtgtctacgctggggttgcagggccagcgggggctgggctgggtcctgacacgctctcctcaccccacgcaggggagcaagggagcccccggtcctgctggtgctcgtggggagagcggcctggcaggagcccccggacctgctggaccaccaggcccccctgggccccctgggcccccaggaccaggactccccgctggatttgtgagtaccgcctacacctgaccccctggagagccgggggctgccgttgccccagccctactacccctggcatctcactcacagagcagcacgtcctgggcggtggccttgctggcactgcctcatcctgggattccatattccgcatggtggggctcgagtctctcgcccgtcgcccgtgccccacggtgctgatggggatcttggcccagccatgccccagcacccgtgccctgaccaagagcgaatgagctgacccgagacgggctgccccgggggggctccacccaggccctgccaccaggtagacagtccccatctgagaacggcggctccccaggccaccgtggccccaaagcatgtcccaccctcctctcgggcagtgccaccccagggaggggtccttccctaagaagggacacaggcccctacgtgtctcgtgtgtctcttccaggatgacatggaaggctccggggggcccttctggtcaacagcccgaagcgctgatgggccacaggtagtgttgtgagctgggcgtggccggctctgaggggtaagggggtgttgcctggggcaggagagtgtccctgagagccaccggccttgcatgggatcggaagccgccctgcagagccgtgaggaccacgtgtggcgggcgctgtgccccgcgggccacccttgttcttcggagatgccccttcattgaactaaagtcacggggtgagggcctggtctgcaaagtgggagacactgtgagtggtcaagacaaaggaacacggggccgcatgccccctgaaaggcctttctggggaaattcaagtcatcacattctttttgtggccccaatttttggtagtaacaaatgtttggcctgagtagaatctgaaattcctatgaaatctccactttcttctactgttaacatgtatactgctcagggttagagccagcaaggagtgaccaaaatcccaaaacaactgtgctcagacagctcagacgtgccaggggcagacccaggggccacaagctccttcctcccctgcccccactgtcccctccacaccaccagcgctctcgtggcgccagcatggaggagcccccggggccacagccctgcccaagagacacgtggggtggctgaagccacagcgtccagcttcatgctcagagactcagcctgttgagagcacgggtggctgggacacatttcttacttggagcaaaacgaatgagaaatttcaattaggcagaaactaattgattccatagtaagttagaatggctttaccattttaacttagtacatttccttttacacacgtattttgaagtcttgactgttactagcgggcttttcttgcggcagacgcatctcacagcagggcctccagctgcactaacactgtgtctcctctgccctgacagggacctcccggcctgccgggacttaaggtcagtgacggatatgtctgggtttctgtggttgctggcttggccctgtctcgacatcttggggctgggggagacagggccttgcctcgggttttctgatggcaggagtaggatgaattcatcctgggaagtttgcaaaatacagcaaaaaagcctgacagggaaataatcgcacaccaaccccaacctagacttccagcgttaaggggccattgtcccgttctctctccgaagcccaggaatcaagattcctgggttcacacacctgaagcatattctcagacttgggccgaaaagaggggcataggggaagaactcagggtccccacctcagcctcagggacaggtggactcctgggctcagggacagagccgtggtgaccttgtaggacccaggagctttgtcctctgctccccccatccctgggggacactagcccccagcctggccccgaagaccccaccccacccaggccccgaagctcccagggcaggtgcctgagcagggagcctggagcctcctctcctaggccctgggcagcagccgcctttcaccccgctgcgtgctcatcaaagcgtcctctgctgcgtgcggggccaagggcgcacggggcccaccctggggctgcactctcacgcgtcaccagcccctgccatggcacctgctcctttgagctttgctttcatttgcaagacatcgggacactcaaaaggctgacttatgggaagggccgtgtgtttgctttcttaaattgtttgaatgaggccgtctcagcggggttcctcttgcagtctgcagtcctagtgatggaatatgtccccaggttccgcagccgtcccggccgggtgccttcagccagcctgggcccacggggtccctgcacaagttgctcagtgtccctgggacccctcggctctgggctgggggagggcggtgagatgcatcctgggtaactcacccttcccttcacccggggtggacgctgcctgaggactgggctggccccagcaggtgctcacggagccccttttttcacttagggggatcctggcgtgcctgggctgccgggggcgaaggtaagcgctgtgcccgggttcagggacgtggccaggcagaggcagggagggcccagccggacacctgcggagatcagctcggggcggccttccccgctcttcctgccactgctttgtttctttataattgaagacgtgctggtttcaaaggcaacccccaggatacccacctgcagggcacccaaccccagggcacccccaggtttgactgcgtcaggaacatggccttcctccctcccggctgtctggctgtgcaggccccgtcggcccctgccaccggcctcccgcctctccctccttttccccgacttccccctcccccacactgcctcccccacttgcccctcccccacacctcctccccgacttccccctcccccacttccacctgccccacacctcctccccgacttccccctcccccacttccccctgccccacacctcctcccccacaccctcccccacttccccgtcccccacacctcctcccccacaccctcccccacttccccgtcccccacacctcctcccccactccccccgactcccccctccccccgactcccccctccccctgactcccccctcccccactcctccatccctccacagcccctgctcaggcccacaggggtgagagagagaagtccaggccatcgccacgtccacgggtgccccggactcctcgtgggggtccctgcattcctgggcgtgtggccaatgccctgcgtcctccatgtgaccctttcagggagaagttggagcagatggagtccccgggttccccggcctccctggcagagagggcattgctgggccccaggtgagttgccttggtgggcccagggtgcagggggggcgtggagccctgaagggactatgctaagatgaaagctggcacgagatgtgccctcccgggtccctgggtctccatgtgccctcgtgggtccctgggcctccgtgtgccctcccgggtctctgggcctccgtgtgcccactcccgggtctctgggcctccgtgtgccctcctgggtctccgtgtgccctctcaggtccctgggcctccgtgtgccctcccgggtccctgggccttcgtgtgccctcccaggtctctgggcctccgtgtgcccactcccggagcgccaggagttaagtataagtctccgtcagggctcttggtggctgcctccctcccaggccccagccggtcgggaaataaagaaccccacatcttcatcagagccatccctcacggggggccaggggctcctgtttctgttggtgatgaaccatttccttcctgtctctccaggggccaaagggagacagaggcagccggggagaaaaggtgagtgtccctggggcgggtggatggggatggggggcgctgggacatcccagaaggtttggcctcagctgccccaggtccgtgcccctgctgcccatgtgacctcagagactcagggcaaagaccctcaagttgacaggggtggctttcaggctgggggcagcgtgtgtggctcaaccgtccctgttggagcctgccctgcctggcagggggctccaaggccacagtccacagccccgggcgcctcctcacccaccgtgggctctgggcaccccctccagggctgggtggactctggggtcctggccagagcggttgagatgaaatgccggacgcgtggcctcctcttccagggagatccagggaaggacggagtcgggcagccgggcctccctggcccccccggacccccgggacctgtggtctacgtgtcggagcaggacgtaaggacgctgcgtgggtgggcacccaatctgtccagaccccccacggggtgcagagatccctccccgagccccccccacacccccacatcccccaggtcaggacaggccctgactgccagtctacactccacctcctcggtgggggctgcagacgccctcggtcagagacgcctggggagcccagctccatgtggtgttggagacaccgaggagaggggagggcctgcacaggggccagtgtttttacgtcaaaggctcccattgggctcactccctgtgtccttgacactgtggccccaaagctgcatgtagtcacccagctgccccgtcagaagaagcagatgcacccttggcccctctggtgaaggttgtgttggttccggaaccttcctcccccactgcggcccgtccatcaggcctctcagctgcaccctctgcgcctgccagcagtgcatcccactggtccctgtgccaccctggcctcacagaggcagacgcatctccgcccagccacatggaacacagggaccaagccccactctgggcagggagctgagccctgggcagatgcagggcccagggcagcagagctgggtgtggccaggggttcagatccctgcagagttctctgtggccaccagtggaaggggggctgcccggggcagagctgagagcaggcaccgtcagctgtgtgacactggacaagttacctaacccttgtgctccagctccccacctaggaggtgggactctaacagtcttgagaggaggggtggagttgggaacaggcaggagagggcttgccccagcacggctttgctaggagcaggcagacaggcatcgggaggcaggggcagcccgagaggccacagggacctcggcgtgacggtcaagacatcagaacatcagaaaagcctcccgtaggccgagccacctccgccggcaagcaagggagcgtctagcagaggcaggagcattttaaaacaaaatggaagtaaaaaccatggcccttagggcgtctggagtctgcatccagctgctctgagctgaggggcgtctgtgctgcaggagggatgccccaggcccaggaagactggaaagcaacattttccttgaatttcctggtttggtgttttgttgatctgtaagtcgctcgagtccagttgaattttaaacgcggctctttgtttccgatttttccttttgctcgtggacagggatccgtcctgagcgtgccgggacctgaggtatgtgcctgcccagcttctaagagacgggcctgcggggacctgggtacaaggctgggtggggtccgggcaggcgcgagggtgcgtgatgaccccagctgacgccgtccctctttccccagggccggccgggtttcgcaggctttcccgtgagtaacctggtgccagagctgcatgctgcccggctggggaggggtctccacctggtagcacagagcagcccggtcgagctggggtgggccttgtcaggcccgagggatagcgacagtcactgcccccaaggaaatgatgggagtgggatgtgggcgagagccgctggcaggccctgtgctgggtgggcacccgtgagggtgaggcagctccttgcacctgcagaggcctgcagtgtccagagtgaggctggggccgggaggtgtcctggtgggggtcacctgcggaggcctgcagtgtccagagtgaggctggggccgcgaggggccctggtcgggctgtcgaggcaggcatattgcggggggcagctgtcgggggagatggagcagccgtcggggatgggggagatgccagccgctcgggcctcacggcctggcctccattccagggacctgcaggacccaagggcaacctgggctctaagggcgaacgaggctccccgggacccaaggtaaggggctcaggtgctgtccctcaaccccctttgtgacccaggggtggctccagcctgcccagatgaccactgttgggagggacctgggaccccccggctgctgctgtgacacgtgaggggtacatccctgctcgggccgtccctgtggtcacctcccgtgaaaggacccagcctgcgaggcccagtcacagcggccctgccttcggggctctgggtgaggctttgtggggaaggagctggccctgactctgctggacctcctgccattccagggtgagaagggtgaaccgggcagcatcttcagccccgacggcggtgccctgggccctgcccagaaaggagccaaggtgagggccgggcagcctccttccggcaggcgtgggggctcctggggctgtggagacagcctggggagggtcttcctgagggtctggctcctgatgcacgagcctctcccaagcagggctctaccatccaggcctggccctggtggcccctcctttctcgcacccatgtcggcggttccgccggcccctcgtcctctccctgcccctcgtcctctccctacccctgagcccaccctgctgaggggaggttctcagtgggctgcagctctgagctcgcgcctccctggggcctggcctgtggggtgcaggagcccaggctgtaccagctcagcctcagcaggtttctggctgcccctccagcctcttcctgggggccctgatgctgtgggcagggcccggagtcagttcctcaaggggcctgtgcctgcgtccccacccccagcaggcagccgcccagaaaagccctcggggagggtcctggggagaagcctggatctttggagtgtgggccaccggctctcccactttcagagggagcagtgagccctccggggtgtttggggtgggcctcagacacaggatccccaggcccagtgagagctccactatcccacccagctgtgcattggagctggggcctgtggcaaccaggacactgcgtggcacatgccctccaccctccaccctccacccctgcttcagggtcccggggcatgcatgcacgcaccaacctggacgcaaaccccaaacccgaccctcccctcaccagtggctcctgtcctccccagggctgcctgcgccttggggacggcccagtgcacccaaagggaccacagcggcccttagggaggctatcaggtggggcacaagccgccacctaaccgtgccttcgccacaggggccctcagagaggctgccaggtggggcacaagctgccacctaaccctgtcttcttgtttttttgctcagggagagccgggcttccgaggacccccggtaagtcggtccctggctttctctgcactgagctcgggcatgacggcccccaaggacacggtcgcccgcggctgctgagcttgtgctgtgcggcccagggctcatctccctagtgcagttttaaagcgtgtggggcaggtgtcggcgtgaggctgcagtgggctcctccgagctgatgggtggcccagggtgctgtgctctgcatggcccctccccttccccaggaccccccaactcgtggtcaagggccagggtctgccccactaagcctggcccccttcctcttgcagggtccatacggacggccggggtacaagggagagattggctttcctggacggccggtgaggacctggggtctccagtgggggcggcagatggggtctggcaggtggggagcagcccaggcccacgggggtgacatgcccagaggggagtggacggccgccgcacccactgtcctcccccaagaaccggccctgcctgagcgcagctcttgtcctggatgtggctggcagtaccccacgaggggccagtacccaggaggaagccctggaggcagacagggcagtgggcctgtgtgtgctaggctcagtcacctcctcccaaaagggtccttgtgcaggaaaggggtgagaagggccggggtagcctgagagctgggaacgtgtgaggctgagcgtgggccggccgggcctggcgtggggctaacggcaggcaccctgcgggaaggtgtctggtaatcatcagtgcccagcagtccccaccccctgtgctccgccccagggtcgccccgggatgaacggattgaaaggagagaaaggggagccgggagatgccagccttggatttggcatgagggtgagtgtctctcaaggggcggactgggtggctgggagaccaggacctgggaatggcctggccacagcctggggtcctgcagctcctcccagaggccacttataagcagccctgccatgtggccacacagcactggtcatgccatacccatgcacagtcatacatgtccacacacgcacacgtgtgcccaaacatgcatgcacatatatggccgtactcatacatgtgtgcacatatacacatgcatctatgcacatacatgcccatacacacgcgcacacatacacgcacacacacatccacacgtgctcatgtgtgtacacatgcccatacactccacataggtgcacatatacacatgtattcatgcatatacgagcctgtccacgtgcacacccatacaggtatatacatacactcatacatgtgcacgtatccacatgtgtatccacatacatgactatgagccctccctggcccattccatgatgggcatacacactgcacatgtatactcatgcacacatacatatacacatgcatacacaccaatacacatatatgcacacatgtgcacccatatacacacatacaacaggcccctgtggattctcagcagggcatccatgggcctgggccatgccctccatgccctctatgccctccatgccctccatgccctccaagccctccatgctgggggttctcccgctcagcccaaaggtgtccactctgctgtcttttgagccaagagctttgtctccctgatgtcagcagggtggggcattttcagtcacctttttacctgagacgcagacccggtggcctcttcactcctcccgagggacgtctgtgcacgactccagcgtgggatgaggtggggccggggccagttcctgtcctcagggagccgtggcccgagtgacccactgcattctcggttttgcctggtcagaggtctgcctggtcaggtttctgatttttctgatttttctgaactgtctctgctcccagctgctgcctgacaggcaggccataagcctaacagctctctgccctccccacagggaatgcccggccccccaggacctccagggcccccaggccctccagggactcctgtttacgacagcaatgtaagtccccagggcacccactgtcctacagccacccttggctgtcacacagagccccacagaggggctgggccttcttctcccctggcctctgcgtctgggggtccttctaggatgtgccagtctggtgggcagtggattagcagctgagttcccacggaaggtgaaggcctgggaaagggagggctctctgggtgtggagctgcttccagctggctctgctaagggcctgagcccagggttgctaggggcacccccattttcccaggctcagcaaggtgaagtgaccaatgagggccaagtggcgtcaggccgtggctcctgctctccgtacccctgttccctcccgtctctgactgggggaggctgctatgtggcctcatacaggggctggtgcttctgggcttggggacccctgagtggtggtggcctccatttcagaacatcgccctcagcagccgcctctccccgttccttgcaggtgtttgctgagtccagccgccccgggcctccaggattgccaggtgagggtcctgggctcacagctggggacacaggctctgaagggatgctccagagccccaccttccttcccgtgccagcagcagtgagactcccccagtggcccaaggccagtgctacacgcccagcccacgccccagttccgatgaccttggcccttcctgcgggccctcccagcacagccgtccaggacctgaccttggggtggcccccatttgctgttctccgttgagattttgcttctctggccaaagcagggtggaagcagccccgtccctcctgttggtcagcacgtgccctgcaggtgtggcctggcccccacatggcctgctgacggggacccagggcgcccctgctctccagcagctcctaccctgactgtccccatgtccatctgatgcccccccatccaggcccccaggcactagggcatttcgggcaggaggggcaccaccctggagtcctccctggcacattcctgatgggcactgggtctctcttcctccagggaatcagggccctccaggacccaagggcgccaaaggagaagtgggcccccccggaccaccaggtgagcaactctggacatcccaggcaggagagccatggcgtggccagcactgaagtgtggtcacacctagagccgccaccacaagcaggtcctggaccctcactgggtggtgaccacctcaccctgcgggaggaaggaagccccttctgggttgatgggggcctcataggacctggatttgggggcgagggtggctgcagggcacaagcccagcaagatagccccatcacctcctgaggagcagatggctgcccttccatgctagacccaggtgggcactgcgcagagacacagcagcttcagtgtcctgagatgccccctcccctccacggggccgggggtcggcactggaggaccctctgtcgagaaactctccagggtttcatgtgggaaggaggcgttgcccgacaggccgtctggagggtgagcccagcacccctgctcccccaaaggacaagaattcccccctgagccccacctccattgagggtggcagggctgcttggatgtcctgccaagaccactgagaacagctggataaaatgtgagaaaaccactgtttgaggatgtctgggggctggcagagcagaagcccagagagccaggctagcctcgggcgcctttcaccaccagggtcccctctcgccgccacggtcccctctcgccgccagggtcccctctcaccgccagggttccctctcgccaccacggtcccctctcgccgccagggtcccctctcgccgccagggtcccctctcgccgccacggtcccctctcgccgccagggtcccctctcgccgccacggtccccgctcgccgccagggtcccctctcgctgccagggtcctctgcagaggaggccgccatacctgctcttgctggggctgcactctggggtgggaagggaccaggcaggcagaggccgagtctgggccgggacatccttaaggcctgtggaggcaaaggcaggcagaaagcaagcgggaagatggaagatgtgcccatgccagccttggatctctcagcgtcacacacgacgcccaggaaggagtgaatgatgcacagatgaccagaaaccaggagaagaggccagtgacacaccagaccaggaggcccagctcatggggtcatcggacccaccttgaactctgaaggtcacacattcaaaagccacaggaagtctggagatggcagcagagagctgggaagctcagaggtgtcaggatgaacctggggctgaaggcggaacagttggagattgagacctgtgtataggttttggtcgacgtgggattgcttgtccctgggagccagaacgagggctccgagggctctagagggaacagtgtttgcaggcggaatggctgatgctcttccaaagccaaggaaggctcagagcattcccctcattcgaaggatcaacaattagagtgacgagatttctcaacaaaacgggagaagccagaagaccataaatggtttccaaaatatccaagaaagtcaattgccagtgtagactccgacagccagtggtactcccgtggccttcagaacgaggatgacatgcaggccagccactccagacccgagctgtgtcggcagtggagggtatttcagggggaagacaaggccaagggaaaggagtgcagagatggggagagacaacgctggcaggaaccggcgtcccagcgacagggaggtcagaggctccctcgggaaccagcgtgggctgccccacatggcatcccaggaacagtggggtcagaggctcccgcgggaacccgtgtgggctgccccgcatggcatcccaggaacagtggggtcagaggctccctcaggaacctgtgtgggctgccccgcatggcatcccaggaacagtggggtcagaggctccctcgggaacccgcgtgggctgccccgcatggcatcccaggaacagtggggtcagaggctcccgcaggaaccggcacaggctgcacagcatggtgtcccatcgtcagtgcaattagaggttcccgtggtctcagcgccctggggagtggtggtagttctcactatattggacggtgaggttggagaggaatgcagagctaacactggtggagaggcaggagggcaggcaggacggcacacacacaggacgtttaaaacacacagagtagatccaaaagaaggcaaaacatgagagaaaaaggaatgcagaacacgtgggatgaatagaaactagggaataaacagtagatttaggtcccgatacatctacaggtgctgtaagtatgacgagggtagatacatccattgaaggacagacattgtcaatgggatatggctaaaccatgtgccgcttacaagagacgctccccgaacgtgagggctggagaggtcgaggcacccagaggctggtgtgggtttgggtgtgtgtggagtgtgtgtatgtgggtgtgctgagtgtgtgcagtgtgggggtgtgggtggagtgtggagtgtgtgcatgtgggtgtgtagtgtgggggtgtatagtgtgggtgtgtgtggagtgtgtgtggctgggttgggtgtatagtgtggaggtgtgagggggtgtgtggagtgtgcatatgtgggtgttgggtgtgtagtgggggtgtgtggagtgtatatgtgggtgtgtagtgggggtgtgaggggtgtggagtgtgcatatgtgggtgttgggtgtgtagtgtgtgagggggtgggggtgtgtggagtgtgtgtatgtgggtgttgggtgtgtggtgtggggtgtgtgtggagtgtggctatgggggtgctgggtgtgtagtgtgggggtgtggtttggtgtgttgcgtgtgtagtgtgggggtgtggtttggtgtgtgttgggtgtgtagggtgtggtttggtgtgtgttgggtgtgtagtgtgggggtgtggtttggtgtgttgggtgtgtagtgtgggggtgtggtttggtgtgtgtgtgttgggtgtgtagtgtgggggtgtggtttggtgtgtgttgggtgtgtagtgtgggggtgtggtttggtgtgtgtgtgttgggtgtgtagtgtgggggtgtggtttggtgtgttgggtgtgtagtgtgggggtgtggtttggtgtgtgtgtgttgggtgtgtagtgtgggggtgtggtttggtgtgtgttgggtgtgtagtgtgggggtgtggtttggtgtgttgggtgtgtagtgtgggggtgtggtttggtgtgtgtgtgttgggtgtgtagtgtgggggtgtgttttggtgtgtgtgtgttgggtgtgtagtgtgggggtgtggtttggtgtgtgtgtgttgggtgtgtagtgtgggggtgtggtttggtgtgtgttgggtgtggagtgtgggggtgtggtttggtgtgtgtgtgttgggtgtgtagtgtgggggtgtggtttggtgtgtgttgggtgtggagtgtgggggtgtggtttggtgtgtgtgtgtgtgtgtgcaaagtatatcctggagtaagaaacatggtcaaaaataaatgttcattgagacaacggagcaagtctaccagagaaattgagtaattctacatttctatgcatctaatgagatagcctcaagatatgacaagtgaaaaattggcaaagtgaaaaagaaaaacacaaatcaatcattatagggggactttcagcccagggagatctgaacatcaggtctgacaggcgtcacctgcgaaggtctccaggccacgtccccagcatcgggaccggggtctgccccagaggggcccaggctgggctgaaagcaggcctggcttccaggaactgtgaccccacgagtgcagtagaagcaagtgggaagtgcccacagggcagtggtcttccacgtggctcaggaatccaggagaagcaggtggaagtcagaaacccctgggagcttaggtgcgtccagggcatcctcagccctcacactgcagccgcaggggccttgccctgcacaatccccggtctcccaggtggtggggcctccacagccggtcacctccctctgcagaaggacccccaggggctccacagccggtcacctccctctgcagaaggacccccaggggctccacagccggtcacctccctctgcagaaggacccccaggggctccacagccggtcacctctctctgcagaaggacccccaggggctccacagccggtcacctccctctgcagaaggacccccaggggcttcaaagccggtcacctccctctgcagaaggacccccaggggctccacagccggtcacctccctctgcagaaggaccctcaggggcctccgcagccggtcacctccctctgcagaaggaccctcaggggctccacagccggtcacctccctctgcagaaggaccctcaggggcctccgcagccggtcacctccctctgccgaaggacccccaggggctccacagccggtcacctccctctgcagaaggacccggagcagggcccagcccgagagggagcacgggtcctgacagcagcagtgacctccaaccccagggacggctcctgtgggatggggggccctgggggtgtggagccacgtgctccaaagcttctgggttacagggcatgcctccaggggtgaggtggtccccaccccggtcacggtttcaggggaacagtcacaggagaaggtttgcccagggccgtctaaggtcccacctggaaggagaaggggttttgtcatctccgttgacaaaattacagctttaagtagtacctgtttctacacatcagcctaagatgttaaagaacaaacagcatttaaagaacaacaaacagttatttgatgaaaatagatgggaagaagtattaaacatcaaaaatgagtgaagagaaattgcgtatgttttatatataaaaatagcaaggatcaagaaagtccaaaaatccaaagttaattctttgcaaaggcgaacaacattcctgcacctctgccgggactgaggaaaaggagagaagcagcaacaagcagggatttcagcaaagggctcctccgtggtctggaaggagccacctggaactgccacagcttcacccttggagagggtggagggaccctcaagtcagggccaagacacagctgcctgcccaccctgggaggaggcagaggagagatgggaagggcaggacgctgggaggaaagaagcgcgttgctcttttctcagcacgtctcccacgtaagccccacaagtggatctgcaggtgaactctcaggatgagtaagtcaatgtaccgaagtcaccagatggaagggcagtctagaaaaaccaccaccgagtcctaagcaattaaaaatgaagttttaaaaaggcaccattgtgaataatgtcgcaataaacatacgtgtgcatgtgtctttatagcagcatgatttatagtcctttgtgtatatacccagtaatgggatggctgggtcaaatggtatttctagttctagatccctgaggaatcgccacactgacttccacaatggttgaactagtttacagtcccaccaacagtgtaaaagtgttcctatttctctacatcctctccggcacctgttgtttccttactttttaacgatcgccattctaactggtgtgagatggtatctcattgtggttttgatttgcatttctctgatggccagtgatgatgagcattttttcatgtgttttttggctgcataaatgtcttcttttgagaagtgtctgttcatgtcctttgcccactttttgatggggttgtttgtggcacatatacaccatggaatactacgcagccataaaaaatgatgagttcatgtcctttgtagggacatggatgaaattggaaatcatcattctcagtaaactattgcaagaacaaaaaaccaaacaccgcatattctcactcataggtgggaactgaacaatgagatcacatggacacaggaaggggaacatcacactctggggactgttgtggggtggggggaggggggagggatagcattgggagatatacctaatgctagatgacgagttagtgggtgcagcacaccagcatggcacatgtatacatatgtaactaacctgcacatcatgcacatgtaccctaaaacttaaagtataataataaatttaaaaaatttaaaaataaaataaaaataaaaaggcaccattaacaaaaacatcagaaagtatcggttaactaggaagaacctaattaaatacgcgatctctaccgcgaaatggctagaagggcctcaggcaaacccaccagtgctgggggctgcagagggaacccggcgctgtcagacaccacctcagcgagaccccgcctgtctctctcttgcagggcagtttccgtttgactttcttcagttggaggctgaaatgaaggtgggtgacctccctgtggggttgggggcccccaaggtcctgtacatcccgctgggtggctgctcccaatttctcgccccatccggcccaagcccccttcctgttcagccctgcgaggggcgctggctccagagggtgtcgagggcgtccctcaggatgttcctgtccccggctcagtttttgggggactcggctgatgcagtgggaggtggggagtcgagccctattctatgcagccagcagctcccaggcctgggctccggaagcttctgactgcccagccctggctcggggggatgggaggccacctgtggcttgtaggggttcagggctcccgtgtaacaagtgtttccgtccacagggggagaagggagaccgaggtgatgcaggacagaaaggcgaaaggggggagcccgggggcggcggtttcttcggctccagcctgcccggcccccccggccccccaggccccccaggcccacgtggctaccctgggattccagtaagtcccagcctgtgcaggcagagcccatgtcccaggggtctgggtgcaggagccgagggcaggtccagcccggccttcgacacccgcgaaggccggagctgcccctgcaagctcagcagccccgacatgtccctgtccccgtgtggggacgcagcaggccacatgggtgtgggtgcactgaccccggacaccccccgtccccctgcagcgttccatggcctgccctcctgctggggccacgtgcatccacctctgctcctgggccgggtcaggtcagatcagggtttaggcccatcagtcctgaaagactccagagagccatgggccccagctactgcctgggggcccacactgttgtcaggtctctgctggtctctcccccgggatcgcacccccagggaagaaggggtgatggtgtgggggtttctcaggctatggcgtgggcagggaggggaccggtgactcagaggctgcgctcgccaagggggtcttggcagctgcagccccacaagcttgcccgcccccagtccagggcacgaggtaaccaggaagcgtctcttgtcgccgtccgtagggtcccaagggagagagcatccggggccagcccggcccacctggacctcagggaccccccggcatcggctacgaggggcgccagggccctcccggccccccaggccccccagggcccccttcatttcctggccctcacaggcagagtaagtcagtggggagtgggccccgggcagaggccgcctcgtgtggcttcgtgttcccaccttggtttctctcctgcagctatcagcgttcccggccctccgggcccccctgggccccctgggccccctggaaccatgggcgcctcctcaggggtaagtgtctgggcagccggctgggcacctgcgtcccgtgccctggctggttctgcagcccctgcccctcagagacactctcccacggaccccacagggagatatacaggaggccaagatgcggtttccagggtggaagcggggccaggccatgggggaatcaggtggacccaggaggacgaccaccagccgggaagtgcccagggcctgtacattgtccacggaggcgcaggagctggcggcaggcaggggtccccatggtgctcatgggggcagccgcctcagtccacacctgtccaaagccctgcggcccctgcccagcaccctgaaacgggcattccttccttccgcccctgccccccgccctccccgccaagccccacacctctgcatttggtcccagcaggtgaggctctgggctacacgccaggccatgctgggccaggtgcacgaggttcccgagggctggctcatcttcgtggccgagcaggaggagctctacgtccgcgtgcagaacgggttccggaaggtccaggtgagcgctctgtgtgacgggttctggacccgtggaagggccgaagccgcctcctggggcttaaggaaggcgagaggctcaggccccggacagggatgggagcaggtggcagccagcgcttcttaaactttcaaacttttggtaaagtttagtaaaatacttttgtgagcagttttgggtttaaagaaaagtgagctcaagcttctgaaagtggatgaacacatggcgtgtgaggggctcctggtgggtcatgtcacagtgaacgtttacaaagataaatgtcacctcacacacccgataataagacaaggcgcctgacgggacgaggcggcaggggggctcaggccctccagggccacgtgacgtccacagcacggccccggctggggggcaggctgtcccgtggctctgcaccccgcgttataaacaccaaggtgggatgaaatgcatcctctctgcttagcacgggccttgctcaccagcctggctcctcagacacacctgggattgccccttccaggacaggccagcccctttcctgctttcccaaaatggtctgggtggcaggagtggccgctctgatccaggtgggtgcggccatgcttgcagggccccgggaaggtttaccttcgtgtggcaaaggtgaggacgggtagaagccccatgccgccgaaacggcctgtgacatccgtgggagcctccatggcagaacactgcacactgacacagccctgactcctggagccctcccaccttccaacacacccaccttccttctagagccctcccaccttccctctggaaccctcccaccttccctctggagccctcccaccttccctctagcactccctccctctcgccaccggccccctcctaggcctggccagcccctgcagcaccccagacagtgaatcccactccagtcccttcatctggccagggagaggctgccagtctcatagcagatgctgagctggtgcccactgtgtgccaggtgtgcttgtaggcacccggatgcagccccatcctaactttcaggggctttggtcctgacaggaggaggcaggggatggcatcctagcaaacgcgtgctgggagggctgggtgctgggcagggagggcaacctgccgtggactgggagggctgggtgctgggcagggagggcaccctcctgtgggctgggagggccgggtgttggggagggagaggcgggtgctgggcagggagggcaccctcctgtgggctgggagggccgggtgttggggagggagaggtgggtgctgggcagggagggcaacctgctgtggactgggagggccgggtgctgggcagggagggcaccctcctgtgggctggcagggccgggtgctgggcagggagggcaccctgctgtggactgggagggccgggtgctgggcagggagcgtaccctggcacaggcttggaggggcaggtgctgggcagggagggcaccctcctgtgggctgggagggccaggtgctggggcgggagagtcgggtgctgggcagggagggcaccctggctcaggcccagccgcaggtcctgggtgaccctgctgctttcttccagctggaggcccggacaccactcccacgagggacggtaaggagccttttttctgttgagactggtgggtggtcaggacatgagggggtatgtgctgtcccctgtttgaggaacaacacgtggtcctttggagtcctggagctgaacatgtggctcaccatcagcccctgctgcagaaactggtgcaggacaccccactacctctgtctcagcgctggccccccagtacctccgtctcagctgctggcctcacgagggagcccctctcatccctcaactttcccagttgtgtctgccgctcattgccctcctcaaggtcaaaatccttggggccaaaatccacatcttgtgtctttgccttccctcacccaaagtgccagacacaagaatggatatctctaagagtggtgggtgactgggtgggtgaatcaatggggaggtggatggatggatgggtggatggagaggtgggtgagtggatacgtaggtagatggggaggtggatggatgagtagatggtggacaggtgggtgagtggatggatggtggtcaggcgggtgagtggacgggtgggtgggtggatggaaaggtgggtgagtggataggtaggtagctggggagatggatggatggtggacaggtgggtgagtgtatgaatgggtgggtggatagtgggtaagtgggtgagtggatggtggacaggtgggtgagtggatgggtaggtagatggggaggtggatgggtggttgctggacaggtgggtgagtggatagatgggcagatggatggtggacaagtgggtgagtggatgggtggatggatggtgggcagatggatggtggataggtagatgagtggatgaatgggtggatggatggtgggtaagtgggtgagtggatgggtggatggacaggtgggtgagtggatgggtgggtggatggatggtgggtaagtgggttagtggatgggtgggtggatggatgggtagaaatattttcgttttcctaagtgttgcgtccagctgctgtcggcccctccttgagtagaggtcatgattccttaattggctcaggagtgaggcctgatgtggagcagtgtcaggggctccacagcggcctgtctcctcacagggttcagcccagtctgctctcactcatttgctgattcattctttcattcagccagtcaatagtcatggcccctcctgtgtgccgggtggccatggatattgccctgggtaacacacagcctggccctgtggagcagacagtggggacagccatgtggacagggtgcaggtggatggcaatggcagctgggtcaggaggggctgagggccgtggggaaaggtgcagaatcaataggggcatccggactggggtgcaggcctgggggctgggatttctagggtggaggtcacctctgagggagacagagcaaggccctgggagattagaaggtcgaaggtcgccgtgttgaggtcaggggccctgaattggagccgcggcaaaggagagggcaggtcagggcacgtggtgagtgattgctgcggcttctgagcacggctgggtctgtggggcctgagcagaggtgacccgcgatccggcgccacggcaggcaggactccccacccttgctgctgcctacacccccagggcagccccagagtcgggggcgcagctccctgcttgccagttcagagcccagcccctctcacccagcccagaggaggacacagatggaggaggggcacccggagggtccccccgccgacaggccccacgtctcccacctgcaggacaatgaagtggccgccttgcagccccccgtggtgcagctgcacgacagcaacccctacccgcggcgggagcacccccaccccaccgcgcggccctggcgggcagatgacatcctggccagcccccctcgcctgcccgagccccagccctaccccggagccccgcaccacagctcctacgtgcacctgcggccggcgcgacccacaagcccacccgcccacagccaccgcgacttccagccggtggtgagtgcccccccaaagtgggcttggctccatctagcccctcggctctcggcagcagaagagggcccagcccctgcagagctgctgggggtcccaggcttcggccatgggtgggggtctggcggctcagggccactcagggcggcttggctggccctgggacttgccctctggtggccaagcagtggtcatgaaagtccagccgctgtcacatccttgaggaaccggcgtacctccgcctacagcggcagctgggggcacccacgtggcccggggctgctctgacctggcagcgtatgggggctgctgcctgggcccctcagtgtgtcacttgcgcgcctcccgctcagcgcccctcggccgtgcctgtccacacaggtgcggggccggggtggtgcgcccggggcctgggtgcagggggcagcgtgggacacagcccgtgacgcgcccctctccccgcagctccacctggttgcgctcaacagccccctgtcaggcggcatgcggggcatccgcggggccgacttccagtgcttccagcaggcgcgggccgtggggctggcgggcaccttccgcgccttcctgtcctcgcgcctgcaggacctgtacagcatcgtgcgccgtgccgaccgcgcagccgtgcccatcgtcaacctcaaggtgggtcagtccagtcctgagggcgcgggctcctcggcccccacttgacctctggggtgaactcccagcggggagctcccctctagggcctctggaggccaccatgttacagacactggcgcctaggctggcgacttcagggcaggctccgggtgggtcacacccctccaggctcaggccaggcctctgcatccctgggcactgccacgtcccccagggcatcccatgaggcccccccgtggccccctgaccccccgctcccccggcagtgcccctcagagggtcccatgctgctggaccaagtgtccacacaggtgatagggctcacatacaagcctggaatcaggaaccgtcctttgggcctctagtgccatgcgggctggtggcccctctgccacagcacccatgtggctttattctgtggccccttttcgtgcactgggctgtggcttctgggtgccccggggagcacccacattccccagaaccaacagcagaggggtcagagacccagggctgggagcaggcggctgtggcctggcgttaggggacagggtcccctgccttagccaaggcctcttggggtctgcagaggctgcctggccaggcctggctcccccacgcttgttccctggcaggacatgcccaggggctgcagaaccccaccccccaaaaaaacacacacccacaacaccccacatacacccccaaacaccccccacaccccacacacacaacacaccccccccccacacatccacaccccacatccacacacccccccacaaacacccacacccatccacacccccacacaccacacacacatacacacggtttctcttccaggacgagctgctgtttcccagctgggaggctctgttctcaggctctgagggtccgctgaagcccggggcacgcatcttctcctttgacggcaaggacgtcctgaggcaccccacctggtaggttcccagtgccgtgtgagcagctctgagagccccagccagggaaggcgggcgggcgggctcctatctgcagtttccccccgagtttttggacaaatcttatacatgctcattactttaaaattacaaaatccaaaagagcattgagaaaaatgagaactgctctgagaagtcatcattagcaatgcgtttgagagccaggtagttgtaagaaggccccgaaggtgcccccggccctctgctcatggcggatagactccatgtctcccggatgtcaccaagcctgtggtcagccatgtaagcagcgcagcgagtttattcaccgagaataaactcctcaaagggcaacacggagtccgagcatgtgtgcccttaaaatgttgacagaaatttccagggtatctagaagaacgcttcgtcccaaatgtcgctgtgccctccccacgtgagcgccgcgattcttccaacactcatgcatttaggggtgtctcggggtgccacacagcgtgtccccagcagtgcctggccatctgctgtaacggagatgcacctgccaagggtctctgacaggagtgctgtgggcagggctgggccccagggaaggcctgaaagccaggagcccgggaggcggagctggttcctagcgaggcagccacaggaagcctctgctcagcaggcatgagggccaggttcacccagccaggccaagccctggcccctctcccctctgccgtgggtgtgtctggcagaagcagcatggggggcagtctgggagatgcagccccctccacaggcagccagcagggaggccatgtggccctccaggttgtgggagcctctgcagccccctggtaaccccagggctggcctcctgcctccacctttcctgcccggggagcggcctctgccctaagcagagcaggtctgggtttgactgacggcccggcgcgtcttacaggccccagaagagcgtgtggcatggctcggaccccaacgggcgcaggctgaccgagagctactgtgagacgtggcggacggaggctccctcggccacgggccaggcctcctcgctgctggggggcaggctcctggggcagagtgccgcgagctgccatcacgcctacatcgtgctctgcattgagaacagcttcatgactgcctccaagtagccaccgcctggatgcggatggccggagaggaccggcggctcggaggaagcccccaccgtgggcagggagcggccggccagcccctggccccaggacctggctgccatactttcctgtatagttcacgtttcatgtaatcctcaagaaataaaaggaagccaaagagtgtatttttttaaaagtttaaaacagaagcctgatgctgacattcacctgccccaactctcccctgacctgtgagcccagctgggtcaggcagggtgcagtatcatgccctgtgcaacctcttggcctgatcagaccacggctcgatttctccaggatttcctgctttgggaagccgtgctcgccccagcaggtgctgacttcatctcccacctagcagcaccgttctgtgcacaaaacccagacctgttagcagacaggccccgtgaggcaatgggagctgaggccacactcagcacaaggccatctgggctcctccagggtgtgtgctcgccctgcggtagatgggagggaggctcaggtccctggggctagggggagccccttctgctcagctctgggccattctccacagcaaccccaggctgaagcaggttcccaagctcagaggcgcactgtgacccccagctccggcctgtcctccaacaccaagcacagcagcctggggctggcctcccaaatgagccatgagatgatacatccaaagcagacagctccaccctggccgagtccaagctgggagattcaagggacccatgagttggggtctggcagcctcccatccagggcccccatctcatgcccctggctgggacgtggctcagccagcacttgtccagctgagcgccaggatggaacacggccacatcaaagaggctgaggctggcacaggacatgcggtagccagcacacagggcagtgagggagggctgtcatctgtgcactgcccatggacaggctggctccagatgcagggcagtcattggctgtctcctaggaaacccatatccttaccctccttgggactgaaggggaaccccggggtgcccacaggccgccctgcgggtgaacaaagcagccacgaggtgcaacaaggtcctctgtcagtcacagccacccctgagatccggcaacatcaacccgagtcattcgttctgtggagggacaagtggactcagggcagcgccaggctgaccacagcacagccaacacgcacctgcctcaggactgcgacgaaaccggtggggctggttctgtaattgtgtgtgatgtgaagccaattcagacaggcaaataaaagtgaccttttacactgactcttggtttgcaagcagccttcactgtcacaggaaggacacaattctccaaaaggagttctcaggagtcttttatccctggactgccccactggcagatcccgagtgtgcacaggcacgcacggttacatggggtatgcatgcatggccatacacaggcgtgcagttgtacacaggtgtgcaggagcatccatagtgtgcacaggtacacaggcatgcacgggtgtgtggacacacaccaacactcttaggtctctcctcacagcaggacctgacttgctcccagcaacactacatcctgacagccatccctgtcctggtggacgggtgagtgcaggactcagaggcaggcaggcagtgggtgcagtgagcaggctgcggagggagcaggccctcaggttggggaggcgctgggaggaggattctgatggcggtgtgggcctccccagtgacgctctagcccatggcacaggcccagcccacctccacccatcacatcctgctagatctacgagcccaggaaatggctggtgcagacccccccccaagcagggtccccagggtggccatgacagagcccctggatgcacctgggaccatggccctgtctgactggcaccatccactgactcgggccatcttccacgtgcagcctctgcctcaacccagggtaccccaagatgcctgctcccctgagccacctcgggagacccctgggtccagcagctccagcagcccctccccagccagagattctctccccagctctccgtgctgagcagccagccattcacctggggccgctgagatgtggcagaggccccacaggatagggccgttgactagggttgtgggggtgctcagctcatgggcaccaaggccctgcgtgggctggaggcgggagaaggctgggacgcctctcctggcctcctcactgactgctgaccctcaacccccaggccaggccggccctgaatcagaagccctgcgcacactcacttaagtgtgtttaatgtatgtgggaagagtattcacatcacatcagatggtcccgcacctgtgggcaaggcactagcgctccttagaccctgaggccgctgggacgtacttccccagcgcccaccacaaaggcagcccccccaaggctgcccagcccaggcaagcctggcacataccaaggccagcacgtccgcggtgaccgggaccagtcccctccgggctggcacaagtgtgggagcagctgaggacccgcaggtcaggatggacacacttcagaaggacagacaggaccatggagggctgcccttagggtgggagagaggaaccagctccgaggaccagagccgctgctcccctctgatgacaatgtgtctgccgccaacctgagatggcttttccacagagacagagaagccacatgcagttcttcattctacgtcagttaaaaaaaaaaaaagcatctttcaaaaaagcaagagcaccaaggatgaccagcaatgtcacagctcagctacacctgagggtcccggctcccaccctgccctagagggctcacaactcctgtggggccagtgtcccctgagctggtatccaagaggccacttcactagccctggggggcagaaaggatttgtctcaagccccccaaggggcatgagccagtgaggcctggtggacgcagaagcccaccacccacctcttccagcaacaaagcccgcggggcacagtgcagggacagcatggccaggcagctgccctgagtgtcgccagcacgctgtggccaccgccagagtgcggcacagggcagggggaatcctagggggcctgctagcaggataagcggaggcccccattgctaaggcaggcggccctcgaggcaggggtcgtggggatgcactgagggccgcctgcaaagttaccacaggggcgcccgagagtcactggttcacattctgaacaccgtcgcttggaagacactgcaaacccagcttgctgacaccaggaggatggacagccagctggggacaagtctcatctgcagcctcagggcctgaggcttgggcggagcacagagtgcagggggaaggggttgtcactgggctcaggaattcagctgcctgcggggccggggcctgggccaggtatgggtcgctctgtctctgctccagggaggctggccccacagcccccaggctgtcttctggggaaagcggcgggctctgggctggctgcaggcctccgaggcccttgtcctgcacgctcagtgcctgtgctgccttctcctccgcggcactcctcaggccctgggccgggggctgccgcgggtggtggccccgctggcagtgccgcaggccatccagcatggcccccaagaagtagatgatggacaggatcaggaagtacacggagtataactggaactggaaagagaggccgggtgaggcgggtggggagggcctggctgggacactggcaccctacaccccgacgcctgctcccaggctcaccctcctccagctcagaggctgaccctgaacactgcacagcggtcagaggccagccccaggagcaggtgccacagtgctcaccacagcccccccgacctccaccacctggcacaggcctgaaggggggttcccaccatttcccaagaacccctcggaacctggcaggtggcctgcttctgcgtggcctgcggtgtctgctcccgagtcccctgcttggtggtgcttgctgcccccccatggtgctgagacagcggaagggtgcccatgagggccagaacgtcccgcctggcagagcagggtgaggagagccacagcaggtgaccaggagctgatccccagggcttcgcgcccagagcaacccccagcagcctgcacatggagcccgtctccatctcggcagcggaagctgtgctacgatgaccagaaggagcagcaccagcgttggccacatctctcctgattctcgcagctgccaggggcaggagggactggagatgtccctgggacaccagggagggacctgatcattcccggaggtgcagagggttcaggaggctgcagtgccctcaggacatccgtgggcagagcccagtgagtcccgcccaagacccctgaggccccagctccacatccgcaggccagaatccctgcagcccatcggcaccggcacccttccaggacagctgtttttaaagcaaactgaggaagatggggctgacacgcttctccctgctcttctcctacccaagacactgagataaacacctgggaagactctgaaagcaggagcgaggaggacagactgaccaggccctcggggtctggggagctgtgccacacaagggcagactggccgggccctcggggtctggggagctgtgccacgcaaggacagactgtgccacgcagagctccctgggggcttttcttttcacctcagatattttgaaactgaagaaggcagcaggctggaaaagacaacagatgcagaaaaaagagcccatggaagcagctctctctggcctaagacccagggaagggtcagcccaacatgaggaaagacctttcgacaggaatcgccctgctccccgcaaacaccagacctcggctccacccaccatgtcagcaaggaccccccaccctcgccagcctgtaacaaggacccccgagtcccctgcggggtggtgtcagacaacaccagtgggcactagagctttcactcccactggttggtaaagacacccaccctcacccccaaggagtcagcagagaccacagggaagcccaagatgtcacccccaaagcctcatggagtcagtggagaccatgtggggagcctagtcacccccgaagcctcacggagtcagcagagaccatatggggagcctggcctcttatcctcacccagtagtaagagcgtgcctgtcctgtccccctccatgctggggggtgtcagaggaggtcaagcgggagtccagactttcacctacccagcaataatgagaatgtcccaaccccaggggcatcaagggggccacgaggggagctggactcccatccttgcctggcaacaagaaggagcccccacccagccacccaccctccctcaggtgtcacaaaggctgagtgagagcctggacttccaccccacctgcctgtagcgaggtgcacaccccgcttgacctgcaggagttgcgtcagccacaacaggatgctgaaattacatcatacccaaaatgcttgcatctcactaaaaaatcccttggcacactaaaccacaaagatctcaaactgaaaaacaattaatagacaccaacactaagacaacacagacagtagaattcgccaagaaagatcttaaagcagccaccataaaaatgcttcagtgaacaataacaaacatgctggaaacaaatgaaaaaacacagtctcagcaaagaaataggagaaataaaaaaaatttagaactgaaatgtacaataatcagaatttaaaaacttaatgaatcatctcaacaacaaaatagaagaggcagagaaatgatcaatgaactggaggtagaacaatagaaattatccaacctgaacaaaagaaaaaatggactgaaaaaaaatgaacaaagcctcattccttgtgggactatacaacatgatctaacatttgtgacatgggggatctagaaaaagaggagaaaaggagtggggttcaaaaagcatttcaggaaataatggttgaaaacttcctaaatttggtgagatgtacactgcagattcatgaagctgagcaaaccccaaatagaaaacccaaacaaaatcacaccaacacataccatattcaaacttctataagctaacgataaaaataaagaaaaaatcttggaagtggccagagaaaaatgacactttacgggcaagcaatttgaataacagtaattgctcatcaaaaatcctgaaagctatgaggaaggggcaccacatttctcacaggctaaaaaaaaagaacactgtctacccagcatcctatatccagtgaaaacatcctttgagaataaaagagcaatcaagacactcacagatgaagaaaaactaagagaagaaatttgtaaccagcagatctgtctaaaataatggcaaaaaacaaacaaaaaacaagttctctaaacagaaaggaaattactaaagaaggaatcttgaaataacaggaaagaggaaataccacagtaggcaacattatgggtaaataaaacagactttccttctttagtttcctaaaatatgtttgatgattaatgcaaaaattacaatattttcttatgtagcactaaaggtatgtagagaaaatatttaagataattgtactgtaagcgggagatgacagtgacataaaggcaacgtttttatacttcactcaaactttatgtattaatgtaatccataaagcaaccaaaaaagctatactaagtacattcaaaaacacaatagataaaccaaacaaaattctaaaggatgtacaagtaacccactggaagctgcaaaaaatgtaaacagaaactaaaaacagagaataaatgaaaaattaaaaacgaaatggcagacttaggccctaatatacaaattatcacattaaatataaatggtctaaatacaccaactgtaagacagagattagcaaagtcgatttaaaaacatgactcaactacgtgctgtctacaagaaactcacttcaaatataccaagataggaaggttgaaagtaaaacgatggaaaaagatgtatcatgtgaacattaatcaaaggaaagcaggggtggctatattaacatcaggtaaaataaacttctgagcaaaaaaaaaaaaaaaaaaaaaaaagaccagggacagcagagacagagaaggacattatataatcccactattacacaattgacaagagggtcagtccaccaaaacaaatttcaatccctaacgtgtatgcaacaaacaaaagagctgccaatatgtgaagcaaaaacacaacagaactgaaaggagaaacagatccacaattatacttaggagacttcaataccccctctcaataataaaactagacagaaaatccacaagaactgagaggaaatcaataccatcagccaacaggatctgatcagcatttacagaacactccacccaaaagcagaatatacattctttcaaagtgtccacagtatatcaaaacagataatattctgggtcataagacaaatcttaacaaatttataaggactgaaataataatgtgttttccaatcacaacagaatcaaaaaagaaattaataacagaaagataacaggaaaatctcaaaacacttggaaattaaacaacaaaatttgaaataatgatgcatcaaaaaacacactgaaatgaatgaaaatgaaaacacagcctattaagatttgtgggatgcaactaaagcagtactgagtggggaaatttatagcattagatgcataaattagaaaagaggaaaagtctcaaatcaatatctcacctcaagaacctagaaaaaagaagagcaaaataaatctaaagcaagcagaaagaaggaattaataaagttccagccagtgcactaagtcaagaaaaagaaataaaagatatacagatcagaaaggaagaaatatttgcagatgacataattatctacgtagaaaatctcaaggaatttaaaaaacaaaggccaaaaaatggaaaagcctcctacaacaaataagtaatctcagcaaaattgcagtatacaagataaacacacaaatatatcaactacatttctatacactagcaacgaacatgtatacactgttatggaatgaattgtgaacccatcacccaattcatatgttgaagccctaacccacaatgtcactgcatttgaagacagggcctttcaaaaggtaattacggttaaatgaggtcacaaggatggcatcttactccaacctgactggatgtccttataagaagacagacactagccgggcatggtggctcatgcctgtaaccccagcactttgggaggctgaggcgggtggatcacctgaggtccagagttcaagactagcctggccaacatggagaaaccccgtctctactaaaaacatgaaattagccaggcatggtggcacatgcctgtaatcccagctacttgggaggctgagacaggagaattgcttgaacccaggaggaggaggttgcggtgagctgagattgcgccattgcactccagcctgggcaacaagagcgaaactccatctcaaaaaaaaaaaaaacaaacgaaaaaaagataccagggaggaccatacacagaaaaaaaagaccatatgaagacaaagggagaagatgccaactgcaagccaagaagagaggcatcaggagaaaccaacctgccaacaccttaatctcagacttcaagcctccggaactgtgagagaatatatttctgttgtttgtcacccagtttgtgatattttgctatggcagcccaaacagactaatgcagataacaaatttcaaaatatggtttgatttacttaagaaaaagcataaactaaaaacatgtatagtactcatatgctgaaaactacaaaatgctgaaagaaatcaaagatctaaataaatggaaagatataccatgttcatggattggaaaacaacacagtaaacacgtcaattctcccaaaattgatacactggcttaattgcaattcctaacaaaatctgagcaggaatttttgtagatatagacaagattactctaaaatgtatacggaaaggcaaagaaactataatagtcaaaacaattttgaataaaaagaagttggaggaatcaagtctatccactttcaaaacttgctgtaaagcttcataaccaagacagtgtgatattggtacaagagtaaacacatagttcaatggaacaggataaaaaacccagaaacagactcacataaatatgcccaacttttgacaaaggtgcaaaagtaattcaatggggagagctaagtcttttcaacaaatgatgctggaataaatggatacgcacaggccaaaaaaaaagtgacctcaacctaaacttcacatcttatacaaaaattaaagctggtcagagacttaaatgtaaaaacacgaaactttaaaaaagaaatttgaggaaaatcttctgaatttagggctaggcaaagagtttccataaaaggaaaaactgttaaatcagagctcatgggagttaaaaaacacttgttctgtaaaagaccacattaagtagatgaaacaaccagctacagagttgaaaaaaaaattgcaaactgtatatatccaacaaaggactaatatctggaatacacaaaccatgcttaaaactcaagagtataaaaatgaacaatccaatgagaaaatgggcagaagatgtgaagattttgcaaatggaaaataaggacataaaaagatgttcaacatcattatccaccagggaaatgcaaattaaaacaatattatgccccagggaaatgcaaattaaaaccacaatgaaatatcactacacctatcacaacggccaaaataaaaactagtggcaacacggcataccaaagacgctgtgactggatctctcaaagtctgctggtggtgatataaaacggtacgactgctatggaaagtgggctgcttccctgcttctttcctggaaagaaacaagcaactacctggtgacccagcacttgcacttctgggcgtctgtcccagggaaaggaaaacctatattcacacaaaaacctataaaagaatgtccatagcagctttattggtaatacctcacactggaaacaagtctttcaacggtgaataaataaagtgtgctgtacctacaccctggaacagcactcagcagcaagaaggaatcagccacagccacagtaacaacatggatgaatgttcagagaacagtgttgagtgaaaagagccaatccctaaacgatacacaatgcatagccgtgtttatacaacactcctgaaatgacaaactcatacaagcggagaagagggtagtggctgccaggggttaaagaggacgtgaggctgggagtagggtgggccttggctataaagagcagcatgagggatccctgtggggatagaatgttctggatcctgactgtcgccatgctggttgtgatgtgctacagaactgtaagacgtgaccactgtgaaaactgggtacggggtacatggatctccctgtattatttattaaacagcatgtgaatataagattacccaaatataaagcttaatttaaaaagcaggcaaacccaggcaagctctagccctgtctgtccccccatgctccatcacggctccctcccgtctccagactctacccccgaccaagcctgaactcctggcccagctgttctccccatgctggaggaaagagagtggacactcggcacccagtaacaggcacgggggcaagatgagcccgcaccacctcctctagacccaacaggatgtccagccatgagcaaaatgccccactagttaactttttaacctagaaatcaaaccagccagagaaaagtccatgtgttttttttctatgtgacaagaggcagccaggaaccacaggccagaacctgcctccacctccccagagctgtctcccccacagcctccacggccacaccaggaccaggaccagctaaggaagggaaagggcttcctcgtgaccagctctctggggaagaactgctccaccccctgcaccaagcccccatgggcccttagaagcccaccgtgaggggtcccctccacagggcagctacaggggagcacacgcacagagtccctaaagagccctcaggcatctgcccctccagctgccaagggctgaacaagaggcagtcacagagggatggaggtggggcggcaacggtagtcaggggcagtcagcacccagaggcaggtcagaagccagttccagcctggctggggccacacagggccctgagggtctccctgggacgggcactccctgcccatacatgctggcagccactgctgtctggggacagaggtaactcggggctccaagaatggggaggacctcctcccgggtgctggagcccctccaaagccagctggactgctgccagcaccccgccctggggccatgcattcaacagaagccttctgggccccctttctgcagacctgagaccagcccggccaccaggaggctgtgtccacccaggccgggcctggacacattcacccgtgggccttggagactcacctgtcctgagcgttcacccctgggcttcggaggctcacccgccctgagcgttcacccctgggcctcggagactcacctgccctaagcgttcacccctgggccttggaggctcatcaccctgagtgttcacgcctgggccttggaggctcacctgccctgagtgttcacacctgggcctcggaggctcacccgccctgagtgttcacacctgggcctcagaggctcacccaccctgagcgttcacccctgggccttggaggctcacctgtcctgagcgttcacccccgggcctcggagactcacctgccctgaacgttcacccctgggcttcggaggctcacccgccctgagtgttcacccctgggcctcggagactcacctgccctaagcgttcacccctgggccttggaggctcatcaccctgagtgttcacgcctgggccttggaggctcacctgccctgagtgttcacacctgggcctcggaggctcacccgccctgagtgttcacacctgggcctcagaggctcacccaccctgagcgttcacccctgggccttggaggctcacctgtcctgagcgttcacccccgggcctcggagactcacctgccctgaacgttcacccctgggcttcggaggctcacccgccctgagtgttcacccctgggcctcggagactcacctgccctaagcgttcacccctgggccttggaggctcatcaccctgagtgttcacgcctgggccttggaggctcacctgccctgagtgttcacacctgggcctcggaggctcacccaccctaagcgttcacccctgggccttggagactcacccgccctgagtgttcacacctgggtcgggggtgttgtacccagagggctctgtggcacagggccacgtggcctgccagcgtggacaggccctaatgacactcttgggctgaagaatgcatttcgatgagtgagcaacagccatcctcacctaacaggcatttgtgagccgaaggggatgcctgctattgcccgggccttaccctgagctctggagtcactgaagctgaacagactccgcaccctcagaggatcaggactaaccctgacagtcctcctgcccagtgagacctgggccccaggtggacaaagcccttgtcccacccgccaagggcatctgtctagctgcaggctggggcagtcctgaggagcctggaaggacctctcacaccacgcccaccatggctgattccagctcactcggagacccggccttggctgggaccctcaggagttaaatgtgtgttttccagctcttctcagaagcagcagaggcccgcgagaggtgggaaaggggagggcacccgcagaggcctgcgcactgacactgctgagtggctctgctcagctctccttcctgaagaggacaaaggtcacgtggcctccagccagggctcaaggacaccaagttccggcagccacaggcagagagcggagacaaggacagctccgccgtggcgagcagaggctcagctgctcccactgaggcccagggcctgacggaggctcccgcccacaacaactgagccccgctagggtctctctcacttcctgctctcgctggcctggtgtgtcccactggaagccccaggcccgcaccctgtgcccccagcccacagtgggctccacatcaggcgggcaccaggaggcctcaacaatgtccccacaagtagcttccatccccgaggacgcaggcctgaaatgggctcacctgcttgcggaccgggaggcccaggccccgcacgtccgagacaatgaaagtgatgatggtcttgacgatggtggcaaagaacgtgttgaccccgaagaccagggcacagagctctttagacagagaagatgcaatctgaaagctgaacgggaagagcgggcagatcaggcgctgctgggagaataagcagcagccacagggaaaagcctgcagcccggctcccaccagcccatgacccgcccggcagccacggggtcccagggcacgcacaagccccccaccaggcccccatctctcccacacatgcccgcccctgccaggcaggagccagcacccaggccaccctcgaggggccattctgggagctgccgtgtccccctggctcagtacagagtgagggtcccttatccaaaatgcctggggccagtagttttggatttgggaatattcacatgtccataatgagatgtcttgaggatggaacccaagtctaaacacgaaatgcatttatgctcatatgcactgtacacacacagccagaaggtgattttatataatacctgacaaacatttgcaagccaaaggggttgcctgctactgcccagggcctcaccctgagttctggagtaattttgtgcatgaagaaacttttgaccgtgttctgagactcgtcaaacaaggtcaggtacaggattttccaccgggttgtctttccggtgctcaaaaactgtcagattttggagtatttcaaattctggattttttgttatttttttttagatggagtctcgctctgttgcccaggcgtgcaatggcacaatctcagctcactgcaacctctgcctcctgggttcaagcaattctcctgtctcagcctttcgagtagctgggattacaggcacgcgccatcatgcccagctaatttttgtatttttagtagagacagagtttcaccatgttggccaggctggtctcgagctcctggcctcaggtgatccacccacctcagcctcccaaagtgctgggatcacaggtgtgagccactgcgcccagctgaattctggctgttttgattagggatgctgaacctatacaatgggtgtcacaaaacacaaactcgagaagatacctggaagggctcccatgagctctgggacagaccaggtcacgggcgtctcaaaacattcagaaaatcatcatcaagagaacctctgggcacagacagaaaagtctagaatgaaagtctttcacggttaaatgtttgataaattagaagagcagtgaaaccacagagtcggtgaatgagcagcagccaggcagggcaggccctggagttgagtggcagctgggcagagcgggccctggaggtgagtagcagctgggtatgcccgggagggccctggaggtgagtggcaattgggggggaggggggcctggaggcggggcaggccctggaggtgaatagcagctgggtatgcccgggcaggccctggaggtgagtggcagcgggcagggtgggcccaggaggtgagaggcagccaggcagggcaggccctggaggtgagtggcagcaggttaggacgggccctggaggtgagtggcagcgggcagggtgggccctggaggtgagtggcagccaggcagggcgggccctggaggtgagtggcagtcagttactgcgggccctggaggtgagtggcagccgggcagggcgggccctggaggtgagtggcagccagttactgcaggccctggaggtgagtggcagcagggcagggtgggccctggaggtgagtggcagccaggcagggcgggccctggaggtgagtggcagtcagttactgcgggccctggaggtgagtggcagccaggcagggcgggccctggaggtgagtggcagtcagttactgcgggccctggaggtgagtggcagcagggcagggtgggccctggaggtgagtggcagccaggcagggcgggccctggaggtgagcggtggcatgaacatgtccaggaatgaaggcaccacattcctgacatggagaggtgacacgccaggcttctggtgctctgcaaagaaactagtcttccgatgcagttccaattaaaatctgcaaagtgcttaaaaaaaaaaaaaaaaaagaactggacaaaaaatgtcctaaagttcacctgaagaaaaaataaacaaaaatgcccaggaaccctttggagaagggcagaggtgtctgtgctgctgggcactggagacggggggacagtggggacagtggaggctcgggggcaggcaggcaggccggcagcagggaggacgagagaagcacacagaggtcccggtgagcaggtcagtgggatgaagggcagacgaacaacagggagaactgagcacaaacacgagcttctggatgccagcgctgggcagggcagagcccaggccagcccccagggtgcttccaaggacactcagaaacactgtgagttgaattaaaggcagacgagtgtggggcgtgatgggggcacaggtgattgaaaatacatgatacagatgaatgctccccagatcagcagggaggaaagcgagtcccaacagagtcaggagacacacaggggccactcagtccacagcaggccggccggcctcactctggttaaggaaaggctgggagcccagccggcccgtcaggggctcagggagggtggggaggccactccaccatcctgacggggaggaagcccgcatgccggcctgcagggtacctgcaatattgacagaaacctgctttcaaaagcacatactctccaacctggccattccccttccaggaatccacctgagggtcattattagaatttggaaacaaaaatgtaggtagaagggcattcatctcagtgttttcctcgtgtaagaaaaatggaaatggtgactttacccatagactggggatgggttgtaaggcccaccactcatgaccgggagtgaccacctgcatctgtgagtgaccatctgcatctgtgtctggcatcaacccaacacagacaagcagaaaatgctgggattccccgtagcaaacagcagttttctgctttgcacgctgcggcaccgtgttggatttttttgcgatgggcatcaatgactttataactaaaacctttcaggcgttgtccccctggctgcagcaatgggacagcacaatggcagaggccctggccctttccacagtgctggcaggtcagtgggggggcccaagcaagatcacgctgggccttcacgagccagggacggcaagagcccagtgtgggcctcggggagcctggagaaggcggccacacaggagcagaaggggccccgagtatggcaggggcgggagagaagggtgggccgggctgcccatgccgggagactgctgcctgcatgtggggaggatggggaagtacagggccgggcacatccaggcaggatgctgcaggggtgaggccactgacacagagggcccaatgcaagggtcaggagggtgctctcagctcaaacaggctcgtgaccagcataaggcccagggggatgacccacggagggagggagatagggctcggaggccaccctggaggggaagcccaggaaggggtactgagctggggccaaagtcctcccagcgggcaggaaagagggggcaggtccagggagcaggaccctgtgagcacacagggtcagtgtctgagtgtgtcagtgtgtgtggtctgagtatgtggtgggagtgtgtcaatgtgtgggtgtctccatgtgtgagcgtgtgtccatgtgtgaacgtgtccatgtgtaaacgtgtggtgtgtccatgtgtgaacgtgtggtgtgtgtccatgtgtgagcatgtgttgtgtgtccgtgtggtgtgtgtccatctgagcgtgtagcatgtccatgtgtgctgtgtccatgtgtaagcatgtggtgtgttcatgtgagtgtggtgtatccatctgtgagtgtgtggtgtgtccatgtgagtgtgtggtgtgtctgtgtggtgtgtgtccatgtgtaagcatatggtgcattcatgtgagtgtggtgggtgtctgtgaacatgtggtgtgtccctgtgagtgtgtgtgtgtccgtgtgtagtgtgtgtccatgggtaagcatgtagtgtgttcatgtgagtgtggtgggtgtccgtgtgtgtggtgtgtgtccatgtgtaagtatgtgatgcattcatgtgagtgtagtgggtgtccatctgtgagcatgtggtgtgtgttcgtgtgtggtgtgtctgtgtggtgtatccatctgtgagcgtgtggtgtgttcatgtgagtgtgcattgtgtgtccgtgtgtgtgtggtgcgtccatgtgtagtgggtgtccatgtgtgatatatccatgtgtgaacatggtgtgtgtccgtgtgtgtggtgtgttcatgtgcgatatatccatgtgtgagtgtggtgtgtttgtccatgtgtgcacgtgtggtatgtgttcatgagtgtgtggtgagtgtccatctgtgcgcatgtggtgtgttcatgagtgtgtgtgtgtccatgtgtgagcgtgtggtgtgtgtgtggtgtgagtgcctggtgtgagtgtaagctgaggatgaactcacacaggtgcaagctcccgctcctgcctggatggggtctcagcagcccggggcctagagggtggggttgggagcagggcaaggctgtgagcccagcaggcttcagagaggagcgtggagggcctgggggagcagcaagacggcacaggaagggacgcccgaggtcccagggagaggcaagtggggaccctggtcagctccaggtggctggcggggccagcagtggcacagccgctggggcgcagcaggaaggtgggagcacccagcgaagcgcggggcttgatcctggcgcctgcccgcccccggcttcccacccttctggaactcacgtggcgatgggcacgaggaactggtaggagccgcggaacagcacgaaggccgcatagcacagccagatgctgctcgggtggcgcgtgtgcgccagaaggaagaccagccccgcctgcgtggccgtgacgcccgcgatgagcagcttggaccagcgcgcccagcggatcttcacgaagcccgcggcgaaggacgtgatggcgcctgagaggggagggatggggcgttgcagcggccctggggggccacggggcagggggaggtagcgggagcttctgaggaaaggtatccacggggcagggggcggggacggggagcctccggggaaggatccacggggcagggggaggtggcagggagcctccgggggaaggatccacggggcagggggcggggagggggagcctccgggggaaggatccacggggcagggggcggggagggggagcctccgggggaaggatccacggggcagggggaggtggcggagagcctctgggggaaggtatccatggggcagggggcgggagagggagcctccgggggaaggatccacggggcaggcggaggtggacgggaagcctctgcgggaagaagcctcggggaccagggcatgcgtacccagcagcgtggaggcagcatctgccgcgccgttgtagacccgcgcactgttggtggtggggtccacctcgttccacaggatgtgcacgtagtagaccaccaggtagtagccggccgagttgaagacccaccagagggaccacaggcgcagctgcggccgccgcaggctgtcccccagctcccgcagcatccgcgccagcactgagtccccacaggccacccgcagggcgtgtcccagcttcccgcctgggccaggattcatgcgctccagctccgaagccgaggtttcgcaccgcccccggtcgtcgcggttgaagaagaggctgcgcttggggcgcttcaggaagagggcgaggaccacgctgaaggtgaggaaggccagcgagatgtagttgagcgtggagaaggagactcggcccacagtgaccagcagctggcccagcacggagctggtgaacacgcccagcagcaccgcagcgcgcgagtagccggccacacgctggtagcgcgcgggccgcacgagagagaagatgtaggaggaataggcgatgcgcgcggccatggtgacgctgtagaagagctccatgagctgcatgtgcgccaccgagtggcccagcagcagcagcagccacaccgacacgaagctgagcccctgcagcagcagcaccggcgtgtagcgcaggtagtcggtgagcaggaacacgggcaccagcacggccaggtaggagtacgacagcaccggcgtgatctcgttcgtgacctgcggacaggcgggcgtgcgccccaccaggtgttagcaatgctgccgctgcggcagacacagcccgcccgaggtgatggctgctgacggcttcctgccccaacactgcctggtgggacccctctccccaacacgcccctgtcccatgtcccactgcatcgtcctctctgaacagggacctctggctcccgaccgtcccggcagcctgggagcgttcgcctgcggaaagctggcagtggccacagaaggaatcgttattaacaagcctgttcatctaagcttctctatttttatctctttcttgggacagagtcttgctctgtcgcccaggctggagtgcagtggcacgatcttagctcattgcaacctccacctcccaggttcaagcagttctcctgcctcagcctcccgagtagctgagattacaggtgcgtaccaccatgtctggctaatttttgtatttttagtagagatgggggtttcaccatgttgggcaggctggtctcgaactcctgacctcaggtgatctgcccaccttagcctcccaaagtgctaggattacaggcaccagccaccacacccagccagcttctctatttttaatagaatcaaaacatggttttatttcattttaaacaatatggaaaacacagctgtaacccatacacattcacaccagcacaagcttcttccatccttcctggagagagacaaaaacagaagacacagaaaggaagggcaggatcagggacagcaggttcgtgggagggactgttcgtgggggaacccggcaggggaagaaagacaggaaggggaagaaggggaaagagaggaagtggggtagggcagagggccctgggctgtgcactcccatctcacacttgtccccagagcaaggtctttaaggccagactccaacccaggagcagggaggggggcaaacgcccctgtagccgccctgcaccctcccaggagggggagcacaggctgtcagcctgcccacccccacctcctccatcacatgttatgtgggaacccagctccacagccttggccactgagctgctggtggacactccaggcctggcttccatgcctgtggcctcaacacacatccaccttccatgggaacgtggagctgggcacggggctgggggtgctacctcctacaggacaaggtcagaggacactgccccagactactacaggcaggcaccaaacgtcctcagctgtcttggcaggggccagggctgctgtgggcacacctgggcacacctgggcacagtccagaggaagaggccccacccctgtgaggccaagccgcttgccttgcccctccctggggactgatgtgggagccaccctatgcttggagcctcccctggggcccaggtgcattttcagcaggtggccccgcccacaggccccaccagaccccacctcagatccactggaggttggtaccagatgagccagcagggccctgctggactctgggcctccagcaggccccacccgactcaggcctgaccaccagtaaccccacagccccactcgtgctgccccaggtgacctcagcccctgccagccacacttggcaggaccaaaccctgggtcagcacgtggggtgctgcgccgagccacgccgcctccccgggggctctcagcctcgtgtctggcacacccaagatgtgtggcccgatgtgctcagagcccggccaccggctactgtgaacagctgggcaataggaccctgcagccaggccggcatgctgagaagcttcccaggggctcaggggaaggctgcccagagaccccacctcagggcaccctgaggtcgcaccctggagcctgcaccctcatggaggccaggctgacccaaaggctgtggtcccagcagcaccaggcacccaaggtccctccggcactccgtcctgctcaggacattccgggacactctgagggcaggttatgtgccaggaggctgagtgagcccgccgggtcacagagagcctcagggccagccatcggcttctgcactgtgtttacagcaatgtcctggggacatcaaacagcccctctgtgggcaagctctcctggctgatggcctgctcgactgggggaggctcctcctcagggccagcccagggaacccctgcagattccgaaagaagcggctcagaggcaggggtcctcctaggacctcagggacccccgacccccagacacaggaggctgcgtgggggcatgacagccccagcccctggccggggcacaggttctgcccacagcccagagtcaaaatggtagacagccagcagagaggctctccccagaccccacggctctctggaaaagggcggccaggggtcctagaagcctcacccacctccgaatgaatggagcatgcctcatttcctcttccaccaggagctggctctgcaggctggggcctcatcaggcacctcctggtcttagttgagggtctgagcgcagagctcccccttggcagccacccagagccctcccgctcctctccctgcacctcctcaacggcccctactccctcttcctcagccttggcaggcagacagcagggaggctctgcccagagctgtgacctgcgtcccacttacaaggctgctgggggaggggccctcacaacggtcccagcagggaggtggcatctgtcaggcggccacgactctgacacgaggacagcctcctgctgcctgagcccagcgtcggccctgctctccacaggtcttggttggggtccaggctgaatgggcagagtgcaggcagctgcgcccaaatctacgtccagacggcctcagggcggcttctctgaacagggaggcgggaaggtgggcaaggcccgaaggcaggcaggacgcgagggcagggccaggcgtggggcagcaggactggatgccacagaagggcacccaacaggggctggctggggacggggcatgggccgcaggtcaggagggactgctgtgcacagggtcctgggccggggggtctccctggaggagggcgggggctgcagctcccaccacacagcacagttccagcgggggcccaggcaacctcagtgcacccaggagcacctcacggactcggccggggaaagcgctctcagctgacactcaaagcagaaaccctggagggaaatttggccaaattcaaaatgactccagagaaacaccgtatgtaacacacaaccagtccaatcccaagggcacggggtccccaggaggcagaaaagggaaccaggtccgaggaggacagcaaccacagggctgccaggaaacactggcccacggcgggagaaatggcggcagagcaaatgtgagcaaaggaaaccacgctcctcacagcggccagacggccggcgctcagcagcccacccgagctggtgaggggaacgtgggcagcccgtggcaggctgcagaggaagcagcattcgccccaggagtgaactggaagtgccagcccgggccagctgggtcaaggcccactgcctgaggctgccagctcgtgctctacctgcagccatcacctgcagtgggagaagccggaatcccctaatcacctccagcaaagcagcagataagcaccttgtagttcaacccaggaggcgcagcttaagaacagcctcgaacccacgtggaacgtctctcaagtcagattgggcaggagagcaacttgcgaaagctgggtcacaagacaccacttacgtgaacttcctagacacaagcctggcaacaacaggggctggcgagtcctggcaggctgggcctcccttgcccccgaagctgctccccgcccacctactggtggctgcccctgcaccccggcgcccacgtgcctgctcccgcgtgaagttcttgtcgggccccaggagggagggcgtgatgaagctctccccgggcctctcctgcagccagaggggctgagatcgggggccccaccaagtggcaggtgcgcagagcacctgcacccatcgtccctctgatgatatccaaggcctggtggaatggcttaatttctggaatctactttttaatccgttaatgtacaacatgagagggcaggcagatgggatttaaacatttttgctctagagacttttcttattttgttattttaagggaaacgccacacataatgctcacccctataaataaccttggcggtggacagtggccctccactaagagcagagatgccatctggtcagtgggtggcagggagagggacggactggccaggagcagaaggcatttcatgaggggtcaaggagatggctccgccgctccagccccagccccgccaccgacagccggagccagggcaagaccctgtcctcgcctagaaagtgacccagcctggcggttagcagtgctggccgtgggacgagacacaatcacaccgcacggtgctctgagctgggcacgcgggaagggcagcacctccactgtcccaatagcacactcctcagctgcacatcagtttcacaattctagggtctgggagggttggggtccggcttccggccaggagacacagggaacaagaggcatgccgagcgtcagccatgtgggagcagaggacggggtcagcggctgggatgggcaggtgagcaggcccagggccctgggatggggtgtcggggtgaccagctgggccggcagcctgtgagagcgcttttccaggctcttcctgtgcagatgtgccttatggacaaggaccccacagctccaggaggaaactgcttcggatacggccgctcccgcctccaccgctcatgtgacctgagagacccgtgactgggcataagcctattagaacagtttcaataagaccctttgtcctcatggctgagtaaaatgaaaattccttcaataatctctttaggtaaatagccactaagtctctgtggaaggcaggtgcccagcagggttggacgtgggcttcctcaccaggagggccgatgagcacggcctggcgggtggggtggggcaggctctctctctgcaggacacaatatcactttttatctagcctggttactaggccgaagccaggcccctccatctgatggtgcccgctgctgggagtgtgagaccccagccgggttccctccaggaccatattatcagctgacacggccactcacccgctccagcctcaagtgctcacacatccaacaggaaaagcgccctggcccctgaagctgctccccgcccacccataggcggccgccctggcacccagcacccacgtgcctattccagaagctgctccccgcccacccacaggcggccgcccagcaccccggtgcccacatgcctattccagaagctgctccccgcccacccacaggcggccgcccggcaccccggcacccacgtgcctattccagaagctgctccccgcccacccacaggcagccgccctggcacccagcgcccacgtgcctattccagaagctgctccctgcccacccactggcggccgcccccgcatcccggcgcccacgtgcctattccagacgctgctccccgcccacccacccacaggcggccgcccggcaccccggcacccacatgcctgctcccgcgtgaagttcttgtcgggccccaggaggtagggggtgatgaagctctcccctggccgtatctgcgccatgaagccgtagaagcaaaggtagcacacgaggtgccgccaggaccggagctcggggtcaggcccaggttccacgggcacctgcttctccaccgctgggctggagggcaccatcctgctcaggccacgtgcagctccggaggggacgaaggtgacgctgtgcctggaaggaggggtggagtcagggcaccttggaagatggtctgcaggcctccctaccccgcaaaacgaggcccagtgccggcctcctcgccactcaggaccaaacgccaccctggagacgaatgcagaccccagacccatcctcaccccgtagcaccaaactgggagccacccacacctgagctgctccggagtcccccaggccaggctgtcaccacctccagggtctccgaggctgagggaagtctccagccacatggagtgatttaagtgccaatcaaaaccaagttaattaactaattgacttactttattaactaaactaacaaaatttagggtttggggccacactagactcatggcactgctgggcagtacctgtggcggtcagggggcacacctcaccccacaggcctgagggcagcccacgtgcctgctgctgctctagcggcacccaggtggcccagggagggcacaggcaggaacggacgctgctggaggccggggtcacaccacaggtggccagcggcgggtggctgcaggtaccagcctcaggtccccatcagccgcgtgccctggcaggagggcgtgcaggccaagcccacagtgagggaagggcagagggaaaagcaggtgtccttgagggggctgagagcagccagggttgaaacacgcgtgggagggaggatgggatggagccgaggcccagcccctgagcccagggaccccagcatccccggcggcaggttaccctagacgaaagcagctggcaggagccatgagtggacctgacacgttccagatggagcaccccagaccacaggacttcatccacgaggcaacatgcacccaaccttggggaccatcccgccagcacccccgccccacacggccagggcacgtggtggagcagcagcagcacgaagcacactcgagggcgtgtctctttcagtcctgattctgcccaggagaaaggctcctccggtgcgggcaagggcacgtctcaccaccacaaatcgtgcctttcagctgcggggcaaaagcctgtccacttatcagaatcatgtctccaggtgccacgtggccctggttttccattaaggcctcggtgtaaagttctccttcaagtaagtcaaaagtgaactgccataaacaagtgtgtcagacgcccacaccaagccaaccccgtgaggccaggacctggccctggtcccccacaggtgcacctcacgtctgtatcagctgacctctgctcccggaggccaggcctggcagagtgcacgtggaaaggccatctgctgctcaggtggggtggggatgcagcgcatgcagagggcagctgagcagccttgtggggcggggtcgccgtcccatctgcactgggctgacagttggacaattgtgcctcgccacagggccggcttgggagggtggcagggggtctgcagagggtctggatttgagaagtctcctccaaccctccagcaggggctcagagcatccctcgatgtggggccagctttgggggtccagggacccctaggaaaatctgccccaggctctcagcattcagtcttcacgtatcagagaccactcaggctggaagtgctccctgaaccgcccccaacctgacacacaggcttaggaaaaaggtggccttcagggaccagagagagagaccctccccaggccacttaggcaaagccatcagcatcatctggggtcccgtcttgacacctctacacactcatgtctgtgacaaaggaacataggtgatggcagggaagcccttaagaggcagaggctggtgggcttgcaatgggggccgcagggaagagggggaagggttaggggaacctcgaggtttccggagctccacggcagggcacagctgggaagaagatgggaccagcaccctccattggaggcagccaggaccctagaagttctcaaagggccaggatgaaaacagccggccaggcaggaggaagcgcaggcaggggccactgccaggccgaggcagatctgacggtcgcctgcctcggcctcaccttccatgcctcctcagggcctgtcaacagctgggaagatcagtgcacaaaggttgggctccatcaccagggaccctgatgcccagagaggccacgggtagagctggacatacctcagaccgcacccactcctccccactgggagacccatttggccctgggactccctgtcaagttcactttcccacctgtcagcaggtttagacaggcgcaccgatccccagacaaccagagcaaccagatcgccgcagacaacggggagccatcaggagctgaactaagcccagggtctgcgcccacagtccatggccgcaggagtcagatccccacccacaggacccccaggggcccgggagccctgggtacttgggccccctgttctgaaaggtgccacctccagaagcgaccagaacattccttccttggagagacagccagagtctccgccagcaaggggctgctgctggtcttaacagtcagcctctgctgccagcatactcaacttatgtgccgtgaacgtagcccactgacagaggcttggccatcacggcccagaccacctccaagaggaaagatagggaacttggtcaccatcatagaaacgcagccccaagccaggggacgcctagactccaagtgtccagaccccagcccagtcccatacagcttgaggcctcttcccggcatctgaaggaagtccccgaccagacaggagggccacggggaagcagagagaatccctgccttcaggagaaggttgtaacagcccctgcaaatccccggccccactgtccacagtgaccagccccacccaggccctgtccttccaagcaccagagaaggccagagacccgcaatcaaaacacaagcaaacgccacctatcattccgtgtttaaaccagctcctactctggaaggctaaccaagaatgttcgttatgttttttagaacgcctgctagtttaaaaagaagaagaagaaagcattgcacaccctcccacccctgttcagatgaccaagttcagggttcctaacagcataattagaccctccggctatcactgctgcaggcccaaacacccgagaagcactctttctcatctgtgtccagcagagataactgtactatctggaattataaaaatccaccaaagccccttcggaaagaaagcaattagcaattgcaacaagcagtgcacaggtggcacccaggcaaaggcggccagtgagatgcagcctggctcccaggcctggacagggcaggcaggtgcactgggccagaggcacctcggctctgctgattgaatctgggctgtgcggggatcctcgggtctccgtagggggaggccacctctttacagggcggccaacaggcgcctccaaggactttatcccaccttccctctggatgcattctggatttcggggccagcttagttggcctgtgtcctgaggccaggcaggccagactccccaggacaggagtttccgatggacaggaccctagggggatggctttcctgctgtagcggtgttggaaggacccactcgggaaaggctccagcggctgtccaggctctctctgagacgcctcgggattgctccgctggatccgcacccacagctgctccaaggggaagttgcacctacaaagcttctggcacaggagacaatggtctggagatgtgccaggggcccgccccacgcgtggctggcagggttcacccaccggctggcccgtcccgaagcaacacgtgcctgggcgcgaacgccggatccacgctttcctccagacccgggggtgggacttggcgccccaggatgacgcggagggcaggctgggggccgggactccccaccccattcgcaggctgcggcggaaagcgagcggcgggaaacccgctgcacagcaacggttctgccaggcgcccgggccaccgcgacccccgcggagaccccggcccacgccccgcaccctccccagggccccccagaccccaggctgcagaccgcagaccccggccacgccccgcaccctccccagggccccccagaccccaggctgcagaccgcagaccccggcccacgccccgcaccctccccagggccccgcggaccccaggctgcagaccgcagaccccggcccacgccccgcaccctccccagggccccgcggaccccagcgccagcccccacactcacctcacagggccctgcaaacctcggcccgcgccccgcactcaccccagggccccgagacaccccgcagcccccgacacgcggccccgtggccccgttccccaccggtacctgcgactcggcggggcggctgccctggggctcccggacccggccccgcgcacgcggactccgggactacagcgcccacaaggcggcgcggcgggcgcgcggctgcggggtgggcgggtccgtcccgccgaacgcgtcctgagggcggggcctcgcgcgtggccgggcgctgcggcaggagcgtccccacggggcaccctcccacccacggccgtctcccagccccggcgccggcctctccccacccggtcaccgccggggtcacgcggcccctcgtgctgcggccctacccctggggccgccccctgaccccgaccgcccctcgggcccccacccccgccggcgtcagcatcctggggtgccactcgcggaggtgtcggtccctcgggcgggcaccctgccatccctctcccccgcgttcttcccacccccggtcccctcctgaccccccctcctcgacgaggccttgtgcgttttccttttggcaccctggaacacctgcattcctggccgcaagctggatccgggacgcgggtcgggcccacgcgccctcaggggtggccctgggccgccttcgtggggctccaacagggacacgcacagcctgctcttggggaccgcacggccccgaactcggcgcccccgggaccccgccgcccgccctcctgcctgaccgtgacccgtacgggcttgtaccaaggagcaagccggatccaggacgtggcccggggccaccagtccccatcccagcagggacagcccgggggagacccgcgcaggcctcgcagacggcagcgcagtcacactcaggaaggggggcctgggccactctcccaggaaggcgtggggctgcggcagacagcaccgccgaaagcccaaggcctgtgcaggacacggggagaagtggggggcctcagggtcactttcccctggagttacccagggcctggctatggggagggaagccaagccgagggctgtgggggccccaaggctaaggaggagccaggaagtccactgcacagaacagaaggggacggccaccgtggtacccacagctcaagagtgcgggtcccaggcgaggggtgagtctggggcagcagcccctggaatgtaccccttccggagtgtagacagcacaatccgcgacctgcctcctggtgttgcgggggtgctcttggtctcccgcccaccagcagggcaaccccaccaggaagccaacacagggcccttgccctaaatggccgcctgcccaaagctctggcctgggccttctttccagagtcctgagtgtagcaagccacacgaacaaatctcaaaggaacttaaaaaggatttgttggctggaaatgggggatctggggtagcttgcagaatttaagggaacactacaggatggagcgcctcacctggagggaccccctgctttgtgggagccctggctctctcccctgtactggccttctccacgggtgggcagaacctggccctgctggaagacaggaggggcaacgcggaggaggaggggcccttccttccctccaggcagagaggagccagccatggggccagctcgccagggcagcctgctccctttacacgcaggacaggccaggaagccgaggggaagtggggatgaacagcagcggggctcctagaccccttcccacagaaggatggctcccacccccttcccgcctggagacagcaaggcagggagccacagccccaaggggaccccgcaggacccacaaagaccagtccctcacctgtctctccggtcaggtgtagccgagcgaatccgcccccggccgcgaggggcctgcccaagctgccctcgggtccccctgcgtggcaggagtcctgggagttccccagccacacaaggcccaggtttcctgcaggagctgcttcggagtggggaggtagggcttctgccaccaacagcacttggcagttgtaatctagaggcagctgctctgagggaagagccaggagactcgtgaagaacttacagaaacctccattgaggactgcgaggagtggccacagacagtggggcgtgggcttccagagggctccacccaaaatagagatttacaaacgcaggtgacttgggagtgacactggcatctgggaatggatcctgtgcttgggccctcacgagcctccagcggtccccgtccttgcgtgtttcattatcggtttgtcaaatagttaagtgcctgagcgtcagggatggcagggagagctggtccctgggagaagccctgggttggagggatcagcaggggcccagcagtgtggatcccggccctccagcctgtaggctccagccatatacagtgatgtctgggggctgcaggccgcagagaccccttcccctcctggaggggctcaggtgggctctgcagcccaccccacagcagtgccccatccccagctcctgggcccccactccccggcagccttagcacccatagtccaggcccaagaaatctctgccagagaatgaggaccctgcccacccactgccttctgagaccaaccggccagtcctctgccttggctggagagacgcagggctgtccctgtggttaaggtccccgtcagcatagggaggcagtggcattcgagcagccctttccctcagctggtgctgttgtggtggctgtggctctggaagcaaggcttggaccaaatgctaatacatggacacacatgcacagagacacacagatccatgcagacgtgcagagacgtgcacatgcagatggacacagacatgcgcagacacgcacacacactgatgtggtttggattctctgtcccctccaaatctcatgttggaatgtgattcccagtgttggaagtggggcctggcgggaggtgttggatcatgaggacggatccctcatgaatggcttagcaccatcaccttggtgatgagtgagttcttgttcagttagctcactcaagagcaggttgtttaaaagagtccgggaccccccccttgccctcccctcctcccactcttgctatgtgacgctggctccccgtcaccttccaccatgtgtggaagcttcctgaggcctcaccaggagcagatgctggcaccatgcttcctgtacagcctgcagaaccgtgagccaattacacctattttctttatgatacccagtctctgtgttcctttatagcaacacaaaaacagcccccctcatacgtacacacacgtacagacaccaccaagacatatgcacagatacagagacgtaaacatacagacatacacatgacacagagatacagagacatacacatgcatgctcccgtgcagacggcaccccatatgcaggaagacgggcgcggaccggcctgccatgccccagcatgtgcagtgaactggcctgcacatggcctcagccagtttttcctcccacatttccagacgtctccccagtctcaccttgctgaatgacaggtgcttctgctcccatctgaatctgcttggtagaggtgcggtgcgccctgtaaatgccttacctggcttgctggccagtgggtctctgctgcagctgcccctctctccagcccccactcccgccaggccttcgcccccactttttccacgagctgacctcctaacactcccagcggccaggggtagcccatcacaagggcctaggggcccaaaggtctggagaagggggactgacatggatgcccctgtgtcaggcctcccagcactagccccaagcccaggcctgcctgcagctgtggcccccatcctctcagaggctgagccgggccaccgtcctcagcaccttgtctgtgaagccagaagccagaagccctgtggcagctgagcggagaagcaaagcccagaggaagaagcgttgtccctggcctgcctggagccccggagctcctggcttccgcatcccccaagtgagcgcaggtccctcacagcctgtcacagccccacagcagtggggctaacctgggcctgtgcctgccacacttcttccctggaagggtgtcccacctggtcctctgggcatggagttgaattctgagccccactggggccccggacagcggccctagcaggcccagcccctcccagttgagccctgcctggcccagcagcagaacactgaatcccgatgcccccaagtctccctatagccagactttcacaaaatcatgcttaaatagcccatctttactagggaaagggggaggtttgaacctctttggaatcacaggcagctgtttagaataatgtcatctaacgaaagagtgttcgaaaaacattaaaataaccagtggaaatctggcctactgcaaggtggagtttgaagcctacactgcctggtcctcatttccagaacttggaggtgataaccctcctgcccacaggtggagtgatgtccggctacaggaacatcctgcggtcggaggaggtttgcatcaagctccgccacaatcacaggcatgcatcttggttgcaagcaagctatccgagaaacctaagcgtgacattagaagacaaaatgattgggaaggaagcggcagagtctctgttcacagatgatgcaattgtcagggcagtaaatcctaacaggttatcaaaaatactagaaataagggcatttagcaaggtcatgagatactaagtctatatacaaaagtaattgtacttctataatctagcaacaaataattggaagacagaatttgaaaaacagtatttacaacgccaatgaaaatcagaaaatatctaagaatgcatttaatgaaaaatgtgtaagttctctataccgaaagctgcagaacattactgagagaaattagtgaagagctaaacaaatgggggagacagaccttgttcatggattgtgtaaaccaaaaataaacttctaagcccccaaccgtctgaacagaccactcctctgggcaagggcattccaaagttaacctgaaaaactggttcaggccatgaggggaagggagggatggatactcgtcattatacctgacccccttttggaattcagggaaagccgaccaactttcaacgtcaacacagaccttaagtctgataagaatcatttagaatctagtctttgaagcctgcgacccagagacttcatctgctgctaaaactttgatctccacaaccccttacttaacctagacatccctttctattgataataactctttcaaccaattgccaatcccgacatgtttagctttacctgtaacctggaagccagcccccaccaggttgtcccacctttccacaccagagcagtgtatatcttacatgtatttgattggtgtctcatgttcccttaaatgtatgagaccaggctgtgcccagtcaccttggacgcatgttttaggatctcctgagggctgcgtcaagggtcatggtcactcatatttggctcagcataaatctcttcatatattttacatagtttgactcttttcattgacaattggaaggctcattattaaggtgaacattctccccaaattgatccatagattcagtgcaatccaacagagatctcacaggcttatttcttagaaattgaaatgttgattcagaattgagatggaaatgcaaaagacttacaatagccagaacaattgtgactaagaaaagtgacgtcggagagctcagagatatggagaccaagggaagctggtggagtccggcaataggaccacccacatggaccacagatttccaacaagggtgtccacgtaattcatttggggaaagggtggtctctagatcacatagttcaagaacagctggatatccacaggggaagatgaacatcagactttatcacgtccctttcacaaacactaatttgagacccaaactaaaagctaaccctgtcaaacttgtagatctgtgtccagtgacacaggaagcaaacaaaatgccacacctgggaggaaacattcatattccttgtatctgatacaggacttgtatccagacacgtaagtgacgcttacaactgagtaataagaaaatagcccacttcttaaaacacacaaaagaggccgggcgcagtggctcacacctgtaatcccagcactttgggaggccgaggcaggttggtcacttgaagtcaggagttcaagaccagcctggccaacatggtgaaaccccacctctactaaaaatacaaaaatgaggctggtgtggtggcgggtgcctgtagtcccagctactcaggaggctgaggcaggagaattgcttgaatctgggaggtggaggttgcaatgagccgagagctcacctctgcactccagcctgggcgacagagtaagactctgtctaaaaaaataaataaataaataaatatatgcaaaagatttgaacacttaaataagacgtgaaaatgtacctaatatcataaatatcataatcctttgtcattaaggcctgaagtaccaaaccactcctactataaaggctaaaatttaagaagctgacaatactaagtgttgacaaggctgtggagtagtatatggggatgtgaaatgttacaaacactttggaaaacagtggggcagcttcttgtggagtttaacacgtgtctactttatgaaccacagttccactcctaggcatctgttgaagagatgtgaatgcatgatcccacaaaagcccatgcacaggggttgtaccctgttctcatgtaactgctaaaaactggcaacaacccgaatatccattatgggatgaaggataaacacgcagtacatccacataacagggactactcagactaaaaggaaataacaactgagtgagtctcagcaccctcgtgctggaggggccagagtccagcctgggaaagtccatctgtaggggagggaggctccgtcctggaaggaggcaggtgagcaggtgcctgtggtggaggctcggggtcagtggaattgttctgtgtctgatgggggtagaggttaatggttgtgttcatctgtcagacatgtttaacaactgcttctaatgggtgcaatttatggcatgtgaattgcacctcgataaaattgttttttaaaagcctgcactgctggaagtgggggaaaggcctggaagcaagtcgaatgctccaagccctctcgtgtctcttgggagacaatccaggcctcagttggttacaagggagaacccagaacagcctcagcctcgggagaaaagggcagtgatgtggcaggggaggggcagggggacaggtagtgggtggtggggagggggacaggtggtgggggaggggcagggggagaggtggtgggtggtggggagggggataggtggtgggggaggggcaggggacaggtggttggtggtggggagggggacacttggcggattgtggggaggaggacaggtggggggtggtggacggtggggaggggacagctgggcgcacactgtggctcttggttgcagatggggtacaggtccagtatgctccagccacgtaggtctccatgtgacctccttcacatcttgtccccacagagaccctcatctctgccccttcttagccccagggcagccctcccaggctgcagagccccgaactctctggcatcttgggaactgtctctccccggccaggctggcacatgcggatgttgcagcattggccaaaagtggacagtgggggtcagtgtggggtaccgcccaccccatcccagcccctcctgggctgctgtgcatcctgctcctgcccacccagcccaggctggcacctcctcctggtctctcccacaccccatgcaccgccctggtcacttctgtggtttggggtgtttccctcctggggaggcgcctcctgcctgatgagacctctgagccccaaagggtcacatgagactgtgtccccaggtggcagctgttggttctctccagcccccacagacacctcaggccctcgtatgccagaccgcttggagatggggtcttctgtgctcccttcttcccatgggccacctgccaccccgtccacaagcacaagtgaacgtttccacgtggaaagggctggttctccagctggaatttccttgactacacggtcttattagatccagaatggaactgcatgaaataaacagggagatttgggcaggatggagctcagttctcccagccaaggggagaccacagccagctctccattcacggttcaggatcacagcagccccgccgggaggcttggccttgcaggccccgggcttccgtggttttgttgcatgcagatttcgtcgtcttcttctgaatgtttcagtattcatgtgttcctggatgactggcgttccctctcaattttcacacgcagtagtgcaggggcgtgcagtctgcagacccctctcctctcctccaccttctcaacctcccttacctccacacccatctcccctccctgcctccctcctctgccttcctcccctctcctccgcctttctgtccccttccctcccaccaccgccccccaccctccccccgcctccccacaacccttcccccaccctcctcaaccttcccagcactggcccccgcctccattctcctccccacaacacccacttcctcctctaccttcccccttgtcttagtccctttcctgttcttcacagtcccagctacgcctgggttggttgcactctctgttcctcttattttctttcaaggaactaccttttggatctaaaaactcaagttttacttaagaggctgaggcaggagaatagcttgaacccgggaggtggaggttgcagtgagccgagacactgcactccagcctgggcgacaagagcgagactccatctcaaaggaaaaaaacaaaaaaaatcaagttttaattgctttccaattaattaatttctgcttttctcattattttttctttttcctgttgactttgttgttcctttcctgttctagtttctgagttaactgctatgttcctttaatttgaataaaactaggaataataaaccatttaataattcattcctctcacggggcacctttggccaggcccatggacgctgtgtcactacacttgttgctgtcagcctctacgtaggacgtgatttttgcttgatttcctcttggactcatgactcattacagagaatgattcaaacgtttccagtaggcagatgttgttgtttgttggtttaatatgtcgttttataaagttcagatcaaagaacgtggcctaagcaggtattcattttgtgaaattgttttgagcttcgatttgtggcttggttttgggttatgttttaaactttttcatgggctttcgaaaaatgcatattctctatgcacatcgtgttttatatgaataaaatctaaattgcaaatagtgggatttcaatctctgatagcctcattcatgcattgtctggggtatgtgtcaagtttgccagagtgaagggccccgccgtgactggggttcgcgcctccctgcatgtccacgcctttatgtccgtactttagggcagtgtggagatggacccacaccgcctgcgtgttctgccgccacgctggcctgagacctcggcttcctgtgcggcctccttatggctgtttcaggtgcgttcctcagagcatggggtggaatttgcttttctacaaaaggtgtctgcccgagtgtctgacccactgtctcgccgctccatggggctggctgtgtggtggggactgacggcctcctcaggaggagacagtgatgaccccagggagtgggtgaggccactgtcagaccagagagatctgcgatgggccaaagaagaggctgggctgctgctgctgcatctgtgtctgcccaggggagctacatcctggcctcaggacctccctcccagcctgagcagcaggggtcaggctggtccagctctcaggagtgtcccagggaaagaacaaaactgccctcctgtccactccagggagacccacaggctgtgccaccagcaggcagtgtggacatcggtggctgttgggtcgggggccccagggagagcccctggggagagcgacacccacccggaggctcaggccaggccaggaccgcagccctcgaatgtgcagagaccccgggtcctacccaggcccgggtctcgggaccacgtggaggagggattagcgcgtgctataatccgcagtcaccagcagagcagacagcctctcgcccagaacagggcacccgggacagccccagccccagcagagaggggctggtctcagcgaagtggagcgggtcttagtgggttggggccagtctcatcctggccctgggtgtgtcccagacccctaatgcggagcctgcaggtcattcctggcccatgagtctgacctgacacgggagtctctgggctggtccgcccgtccaccctgtccctgcgtttgtgctgataggaggacactgctcaaaacacacgacggctgtgtgctataatccacggtcaccagcagagcagacggcctctcgcccagaacagggcacccagggcagtgccagccccagctctccgtggcgccccccatgtgctcacttttacacaagacctcgcgcaatggaagctcttcctcctggcaaatcgcagggggcagattccactaaaacaagactccaccgggcggcaggtggccaggctcagggctggggcaggaccggagcgggggcctcgctggaggctgggcctggagggcaggggcctttgctgccgtgggtgcagttttgtaagcagaggctggggctgggtcctgccctgcaagctctactggtccttccaggcaccgcgcatccctcccaccggcctaaggggacgggagccgctgacctttaggacctgtgcaagggtcatggtgctgtgtgaaggacacgactccaggccacatcctccctccagcccatgagggtccccgggataaagtccagaggagccacaggggacacggctcagtgggaggcagcccggcccatcacagtgccagccctaggccttgctgttattattttgtattttttttgtggtaaaagagacataaaatgtaccatgttaactatttttaactgcacacttcaatggcattaaggacattcacactgttgtgcggccgtcacccccatcatctccagaactctttcgtcctgcaaaactgaagctctgcacccaagacacactcacccccaatccccccgcgcccccctcctagtccccccgcgcccccttcccagtcccccacaccccatcccagtcccccacgccccatcccagtcccccacaccccctcccaatcccccacaccccctcccaatcccccacgccccatcccagtcccccacaccccctcccaatcccccacgccccctcccagtcccccacgccccctcccagtcccccacgccccctcccagtcccccacaccccctcccagtcccccacaccccctcccagtcctccacgccccatcccagtcccccgagcccccctcccagtcccccgtgcccccctcccagtcccccacgccccatcccaatcccccatgctcccccaatcccccgcgccccctcccagtcccccgcgccccatcccaatctccccgcgccccctcccagtcccccgcgccccctcccaatccccccgcgcccccctcctagtccccccgcgcccccttcccagtcccccacaccccctcccaatcccccacgccccctcccagtcccccacgccccctcccaatcccccacgccccctcccagtcccccacgccccatcccagtcccccgcgccccatcccagtcccccacgccccatcccaatcccccatgctcccccaatcccccgcgccccctcccaatctccccgcgccccctcccagtcccccacgccccctcccaatcccccacgccccctcccaatcccccgcgccccctcccaatccccccgcgcccccttcccagtcccccacgccccctcccaatcccccacgccccatcccagtcccccgcgcccccatcccagtcccccatgcccccccaatcccccgcgcccccctcccaatcccctgcgcccccatcccactttctggccgggtctggccaccgcggggcctctgagtggaaccacgcacagggggcgtcctcttgtgcctggccaggggcactcagcatcgtgtctccaggtccctgcacggggcagcggcgtggaaacttcctttcaggccggcgatccttcctgtgtgcgtctccacattttgatttttcatttatggatggacatttggacatctccttccgcttggctgtggtgactaaagctgctgtgctatcatttttactattattgttatgacaagttgacaagtgaatctttctcttacggtttcggtttttcccatcttatttgcttttaactgtccagattcattgagtcccagcagcgggccctgttcccggcttcagtggcgaggcccctcgccttctccccagaagcagcccctttgacgacatcggtactttcggtccattccctgggtcgatgtttccagaaccccgcgcccaggagcacgtccaggttatgcgtggggccgccctgtgcgcgcgcctggaggcctcgggtttccccgacgcaacgcggggagtggccaccagggggcgagcggcgcccggagcctccgcgggtcccagcccagcagcctcgcgacgcagggggcggtgcagggggcggcgggggcggcgcagggggcggtgcagggggcggcgggggcggcgcagggggcggtggggggcgccggggggcggcgcagggggcggcgcagggggcggcgcagggggcggcgcagggggcggcgcagggggcggcgcagggggcggcgggggcggcggggggcggcggggggcggcgggggcggcagcgctgcaggtgggggtgggggttgcaggggcggcggggacagtatgggaggcaggggcggtgtggagagctgggggccgtggggggtgttgggggcgggagggggatgggggaggttgtggggggaaggggaaccggcttgggtggccatgcaggcgacgcgggttgcagggaacggaggtgcagggggcggcggcgggggcggcggcgaaaggggacgggcttgcgtggccccgcgcgggggctaaggggctgcaggccaacccaccgtcccgggcacttgggactcaggagggcggggcggggcggggcggcccgcgtggggagtgcctgaggctggcctaggccctgggaccgtagcctcccgagcagggtgggctccacgcgaacggcgggcgctggcagaaagcgacccacgcagagttccgcgccagccgaggggcccggctgccgcccatgcgcggtcctggaggtgccgggagggggtcgcggaccctgaggcaggatccacgtggtccctgcgggcccagtgagtgacatcaccgcgacgctgcgcatggagcaagctctacacccgggagatggccacggtgcgcatgcagcaaggtctactcccgcgaggtgaccacgggacagacgatcctctgaggtttccaggaagacccccgccctaatcctctgaaggtcggaggtcacaggtcaaagccgagaacagaagctggggtggggcacacagaggtggaaagaggggcctgagcatcgggcggccaccagcagggtcccctcctggccacaaggacgctcccgttccagtccccggaagagggtggctgcagccaccccggggatgaccagcagaggtcctcacggcctgcggcccggggagacctgagactcctaagctgagcacgtcagcgtctctacctccaccgcagacagaaagaccgggcggacccaagactgcaagctcaagccctggcggcagggcagcggggcctgtgagggccgagggtggacgctgctctgagccagacccgctcgtcagcagctcggcctcccccgctgctccccaccagcgcccgggcttgggtgtttggtgcttccaacttttcaagagaagcttgaaatctgtaattcttatgtgaaatcctgcctttcttaactaattaaagacttaaaattagctagttaaaattaattaaaattgattaaatttgtactaattaaaactaactgaattcttctcaaaacaccgtgcagacgaaaccagtcagtgacacacctgtctgcagccatagcaccaggagacatggggtgggggccagggacatggccggagctgccacagacaggacagaacaggacgttgtcaagcgctctgtggctgatctgtctctgttgcaccaaagtattttaaatgttctctcacgtcctctggaagatcttggatggggagagaggcggggtggagggtggcatgggagtcctgtggccggggcttcctgggggccctgcacagcaaccggcctgcacgtgtctcctgggacggcgactcagatgcatgtgtcacctgggacggcacctcagacgcatgtgtctcctgggacggcgactcagatgcatgtgtctcctgggacggcgcctcagaggcctggctactccgagaggcctctggacaccatgtaacctcccctgggctcagccctggcctggccagtgccctggtaccaggacttgggcaccagccactgcctccccacgtgtcagctccttgcacaatggcacccgctgcatggagctgcccaggactcaggaagaacggagctggaggctgggccctggggctgctgaagccctggcagcaggaagggatttgagatagagaacccgaggccagagcactggggctcagacagcggcccgggagatgggtcttccctatcagtggagacagaccttggcctcgtgacaccctggagtccccggctttgaccccgtagcccgtgccacattctcctgaggcttctcgtctgctctgggtgaaccaggtgctggcctgtgccttgtggccccagcctggccctgagccccgggtcctgcacaccttgctggtagtctctgtcacagagacggttgggcccggaggctgctggcatgtgagtgtccgcctggagtgtcctgctccagccacagccctgcagtggttcatggccagagcagaggagcgagggctgggggtttgtgcagtgaccaggaccagggtgcaggggcccaaaccaaggccactcactgccctgaattgagcagaagggatgctctgaggctcccggggagcctcaaccctccaccacactcagacagtgtgcctctcttggaccgtgtcctgcgctctggtgactctcggggatgctagtgaggagcttgtcccggctcaggctgagccctctgctcaactaacagcacagacgcagcccagacagttgcggaggggaagcaggtgtgggggtggccgtgccctcggcactcggacttggcctcctgagcccagtggcgtggggagtgatagtgtgatgctcacctttgcctcctgcgtgtctgacggaatcattcctgtttagacatgagctccattcttcggagggcatgaccaggaggccacctatttggggatatttttagagtcatgccatccaaggcagtctgtgccgagtggctccatattcagacagcggcggcatcgtctccaagcctgggctcagtggttagcacgtcccgtgctgacgagagactggaggcggcttctgaaaacccttcggggccaaggctctctagtcggactccacacggctggtgacagatcaggccagacaagtgcatgacacccaccatccaagacgacaggctgagaccccccaagtccaggtgggccacggctggctggacctcagctgggactcggacatgctggctctgcagcctggccccagggtgtgggcctgcagctctggctgctgagaaatccccagtgggcccttcaatctttgaaggattcgccccattgtcactgcagtgagaccccctgagaacccgggaaggcagtggtgccgcagaaggggtgctggccggcgagccttggggatcttcccagggatgcagcaggtggggctgtgaccaggctgcagagggtgtttcttcttcgtatgtggccagtgtgacttgagttcagccccagaaataaatgtgtgagaggactgcgtttggtttgagcgagggcaggcacaggtagggagcggagctgctacaggaagccctgcggctgggaatctgagggagtcggggcagccttgttgccagggcaggacagagtacggccacctggttgcttggaacaaggtggagctgtgttccaatttctcagcacacagggaaacacatttcagttaaattgaattttctttttcttttttcttttttttttttttgaggtggagtctggctaggtccccaggctggagtgcaatgctgcaatctcagctgactacaacctctgcctcccaggttcaagcgattctcctgcctcagcctcccaagtagctgggattacaggtgcacaccaccacgcccagctaatttttgtatttttagtagagacggggtttcaccatgttggccaggatggtctcgatctcttgacctcgtgatccatccacctcagccatccaaagtgctgggattacaggcatgagccaccgtgcctggcctaaattgaattttcatgtggaagtcaataactacataaatttgggaatgtcagtggcagaaatcacaaaggaaaagatgagtagatgtgcttgcatccaacctaaaaacatctttaagtcaaaaagcaccatgaagaactgccagcccctcagctgtgtggaaacatcgcaacgttgaggccgggtgagtgtcggtgtcctgggtccatcagggaattgcccccatctgtgtatttaggtcggtgaggtgtcaccacgcaccgacaaggagacaaacacacacactgaaaatggccaggggtgtgggcgagtcccccatggggaccagcggtaggcagcatcctccggagaccacgggaaggccaggtcttccagctccaacttgcaaagatttgctaagatttatatttttttccagttgtttttcagtctttattttattgaggcccctgcaggtacctgtggattctgatttgcagctctgtccagggagcatccggccaaacctggagcccggggcgtgcggatggacctctggacgtggggccacacctgtgcgcgagttttctcacttactggctcggaggtggttccacatcagcacacgcagagcttccgtgttccttattaacagcagtgaagaactagtcattcaaatgcgcatcattccctcacacagggtatttttaagagaaattgctagacatggagtttgctgtcaaaatggcccccagtgtgacaagcagatttatttttactgtgacatccatttctgatgatgatgggggcagacagccctccacatgggcagtgggcacagctgaacctcaggcaatcggccacagccccagagacaggatccgcatgtgaacagaccaccagcaggggccaaaacgtcggaaatgcagcttactctgcagaaggcagcacgtcacaccccccagctcccaaaatgtaggaaactggctcgtgccaggtgtggctagaacgtgggcataggggagccctggggtcactcatggagcataaaccgtgcagccttcctggggagcggcctggccctgagaggtggggacgccagggcccggcaaagtcctctccaggatccaccccccaaggactcctcccacagccacacagggcccacacagggacgtgcccacggctcaatgaggccagcaggagcgggacactccatgtccatcaccttgggagggtcaggcaaagcgcactgggtgcccactatggcccccacaggagctaatccaccatgcagcagggaggggtcttggagacgctatgtgggaatgggatgtggcactggcacccccgctagggtgcccacggtggcgcccacaggagctaatccaccacgcagcagggaggggtcttggagacgccatgtgggaatgggatgtggcactggcaccatggtaggaagcgaaatcagagtccaaacaaagagacacacactcctccagaacaggagggaagagacaacaccagcaaggacggccgcacacggcggggcaggggagcggaggttggagttgggaatgaggatttgaaggaccaagaagaggaatgacaaaggtgaggtgccttgcggagtggtgacaacagtggccaagtgccaatgaggaggacgaacccaatgctgggctgaggccaaacagacaaacaagaagagcagcacccaggcttggagctgagggaggcccgagccccggagaatcggcgctgtcctctgagctggcctctctgatgctgctttctccatgataaagaggcgctctcacggctggcggagggaatgctcatggcctggctcagcctcagctgctgctcttacaactgctgtggtcattccctgcccttagaaacgaagctgcttcccagccacccatgtgcaaaggaagaaggaaagaacgagaataaacgaccaagcctaatccactttccctgccttgcgaaccacagtattttctgctgccgtgcacttggagagagcaaatgtcaccgagtcttgttgagaagacaagagaggcaagaggtctgaacaacacccagctgggggcaaatgccttcagacaagcacaaccaaagtaaaacaggaacgagcaatgaccctaaaagatgtgctagaaataattgaccaagtataaaataaatatttgagtattctattgcagtaacttgccatgccattcacttgtaataaatgaacctctttcaagttagaacatgttgcgtttgtgcagccaggattaaatatggtaggtctggggcccggagcgtctcccggtgttcccactcctggcctggtgggttccagctgcaagtgctggactctgcattggaagtgagggtgaggccgggcgcggtggctcatgcctgtaatcccagcacattgggaggctgaggtgggcagatcacctgaggttaggagttcgagaccagcctggtcaacatggtgaaaccctgtctctactaaaaatacaaaaattacccaagtgtggtggcatgcacctgtagtcccagctatttgggagtttgagacaagagaattgcttgaacccaggaggcggaggttgtagtgagccaagatcatgacactgcactccagccttggggacacagcgagactccatctcaaaaaataaataaataaataataaataattaaaaaattaaataaaaagtgaaggtgggaacctgcacagcaaagaaagataagacttccaggctgggtgcagtggctcacgcctgtaatcccaacactttgagaggccaaggcgggcagaccacaaggttaggagatcaagacaatcctggccaacatggtgaaaccctgtctctactaaaaatacaaaaattagctgggcatggtggcgggcgcctgtaatcccagctattcaggaggctgaggcaggagaatcacttgaacccaggaggcggagtttgtagtgagctgagatcgcgccattgcactccagtctggcaacagatcaagactctgtctcaaaaaaaaaaaaaaaaaaagacaaatccagaaatgcacactaactccaaagggtttccttttaatcttaagacagttatcagtcagagagctcaggcatgaaccaaaatctatgtttgtggaaaatgatacacagacaacactcaccacacaggtgcatcacactgacacgacaccacacgcattcaccacatcggcatcgtaaagggaagccccagtgactacggaacatttgtgactgtctctgggaagtttttcaaaaggccagttctgaaaacttccactaacagcctgggaggaacagaacctagactcactctcccccatgaaacaactgaaaaaaacaggcaaatatgtgaagcaaaatgttttcagagcctggtctccggcagcgtggtgcagtgctccctgagagacgtgaaacaaacgggttgagacctagagctgccggagctcatgaccaggagagagtttccaggatgcagcacagggaaaaggaatccaggcagaaccacggtttcctacagctgaggaaacacagctgggagcctgctaggcaaagatggccataaaccacaggacggagtcccagacagaaaggagctgtacttacggtagattccaacaatccgcagaagatcctcctccggtatctaggtgtgaatggatcagaggggaaggagctgaatttacggtagattccaacagtccatggaagatcctcctccagtgtctaggtgtgaatggatcagaggggaaggagctgaatttacagcagattccaacagtccgtggaagatcctcctccggtatctacgtgtgtacggatctgtgcaggtgtgagaggcaaatactcaaggccagggaaagaccatcagaaagagaagcagaagtgacccttagagctcatgcacaggcaggaatgttgcctgttccgccagtcagagcagagatctcatggcccatgggacgtggagtggagcactcagaaggctttgccacagtaggggagataaactcgttctaggctaaaaactgttctgaccttgcctgaaacgttcaaagcaagcctcgggagaaacaaactgtttccatgtaacttaattgcattccagaacaaagctcaagaatatttgtaggaagacaaaaatgtcaattatttaacaaagtaaactcagaatatctggcatgcaatcaaaaattagtgggcatgcaaaaaagaaaaagaaaacgtaacccaaaatgaggatataaattaatccatagaaacagatctagaaatgacaaagaaggtagatttagcagaaaaggacattaaaacaattattgtaactatatttttatgttcaaaatggtaaagaaaagagtgagtattaggaggagacacattgaagatttaaaaaaaaaaacacaaatcaaacttctagagatgaaaactacaacgtctgaggtgaaaagtacactggatgggatccccgcagattagacattgaagaagaacagatgcgtgaacctgaagacacagcaacagcaatagagactgtacaaaataaaacacacagaaaaaaatacttaaaaaatggacagagcatcagtgagctacaggacaacttaaagtgccctaatgcgtgtgtaatattaaggcactttaagttgtaaaacaaggatttgaacaaggtaaacccacaaatccaagaatctcagtaaaccccaagcacaagaaatattaagaaaacaacaccaagtcacattataatctaactgctcaaaacttgtgttaaagagaaatttcttaaaaccaactagagggagggaaaacttcacatacagaggaatgaagataaggataaggatggatttctgattggaaacaatgcaagtgagaagaccatggagcaacctctttaaagtgccaacagattctttttctttttttcttttttcttttttttttttttttttgagacggagtcttactctgttgccaggctggagtgcagtggtgcgatctcgggtcactgcaacctccgcctcccaggttcaagcaattctcttgcctcagcctcctgagtagctgagtctacaggcatgctccaccacgcctggctaacttttgtatttttagtagagatggggtttcaccatgttggctaagatggtctcaatctcttgactttgtgatccacccgcctcagcctcccaacgtgctgggattacaggcatgagccactgcgcccggccgaaagtaccaacagatttttaaaaagtgttagaattctatacccgagaaaagcatcttttaaaaatggaggtgaaatagacttttttaggaatccaaagactgaaagatttcatcaacagtagacaaatgtcatatgacatgttaaaggcagtcgtcggacagaaggacaatctgaagctggacaaaggaataaaaagtattggaaatggaaaatatgtggacgaatattaaaaacttacttttaaaatatccttaaaagataaccaactgcttaaaacgaaaagaaaaaacctaatgatgtattgtgaggtttaaaaatgtgtgaggttggccaggtacggtggctcacacctgtaatcccagcactttgggaggccgagacgggcggattgcttgagctcaggagtttaagaccagcctgagcaatgtagcaaaaccccatctctacaaaaaatacaaacaattagccgggcatggtggcacatgccatagttcctgctactcgggaggttgaggtgggaggacctcctgtgcccgagaggtcagggtggcagtgagccatgatcgtgccattgcactccacaatccagcctggatgacagagtaagaaagaccctgtctcaaaaaaaaaaaaagtgtgaggtttaaaaacgtgtgagttttaaaaatgtttgacaacagcaaaaaaggtgtgagaggggatggaaagatgctattttaatatcacattactgcgtaagttaaagatacatactatttatcttaaagctacaaataaaagaaaaaacaagaattatagctaataagccaacaaagaagataaatggaattaaaaacacaatgcaaaagaaggcagaaaaaagaaaaaataacagatggaacaaatataagaagaaaagtaagataatagatttaaacccaatcatattaataatcacagtcatgttctaattgcccaaacaattcaactggggcagagattatatgattagataagaaagccagactcaactttatgttgctgacagggaaaaacactttaaatataaatatataaaattggcttaaaatcaaaagatggaaaaatatataccatcgcactattcaaaagatggccagagtggctattacaatatcaaagtagatatcagataagtaacattgtaagaaataaagaggattttttataataataaagggattagttcatcaagagatcttaacaaccctaaccatgtacgcacctaataaagcttcaaaatacatgaagcagaaacagctagaatgtaaggagaagtacacaaaccaacaattacagtcagagagttcaacacctcatttcaataactgatagaacaaattgatagacaacttagtaaaggcagacaagacttgaaggatactatcagccaaattaatatttatcaaatatgtcacccagcaacaggagaatacacattcttttcatctgtacacaaacaatttaccaaaataggccgtattctgggtcataaaacaattcccggccgggtgcggtggctcatgcctgtaatctcagcactttgggaggctgagttgggtggatcacgaggtcaggagatcaagaccatcctggctaacatggtgaaaccccgtctctcctaaaaaaatacaaaaaaaattagccgggcgtgtggtgggcacctgtagtcccagctactggggaggctgaggcaggagaatggcatgaacccgggaggtggagcttgcagtgagccaagatcgcaccactgcactccagcctgggtgacagagcgagactccgtctcaaaaaaaaaaaaaaaaaaaaattcccaataaatttgaaggtttcactgcatcatggtatgttctctggccaatcggaaatatatcaggtattaataatacaaagatttctgaataatctctaaatatttacaaactgaaaacagatatctgaataacccaccagtcaaagaaacgacgaacaaggaaattagaaagtattttaaactggttgaagatgaaaacacaatttgagattctttttctgccttctctggttttaactgagcatcttacatgattctgtacacattccatgtatttcttttctttgcatatcaatttttattaaaaaatttttaaggtgttttcctagagtttgcaatatacacttacaactaatctaaatccactttcaaataacgctatgttgctccacatacaagtatcttgtaacagaatattcccagtcctctcccatcccttaccacattgctgtcatttgttttacttacctatatgctataatcacccaatatcattataattattacttttaataaatagttgtattttagatcaactaagaataagggggggaggattttatatttattcatcctcaaacacttagtttctttatatagattcaagtttctgacctatataatttccttcttcctaaggaacttcttctaatatttctggtagagcatgtctgctggtgattaattctctccatttttatttgtctgagaacatttttatttttcccttacgctgaagaataattttactggatatagaactcgaagttggtggagttctttcaacattttaaatatttcactctgctctgtccttagttaaatgtagacacaaaaattctcaaattatgcccaacaacatataaaaaagaaactccactgtgacctactggtgtttatgccaagaatgtaaggttggtttagcaatggaaagtcaatcaatggaattcaccacaataaacataaggaaaaatcatgtggtcaatagatacagaaacacattcctgataaatcttaaaagcataagactcagtgaaagaagtcaggcagaaaacactacacactatataaccccaatgatgtgacattctggagaaggcaaaaccattgtgctagtaaaaagatcagtggtaaagagtttgtgggaagggctggaggactgaatagctaaagcacgggagattatttagggcagttattctgtatgatagtgtattggtggatatgtgatattataaacttatcaaaaacctgtgaaactttacagtacaaagaatacaccccattgtatgcaaatttaaaaaccatttaggaagctcaaggacctcaggatggaatccagaatgtgacaaaaccatctaactgtattacaaacgcatggaacatcctcactgaagggagtgggggaacagcactgacctagttcagaatgagtggagtctttaagactaaaggcaaaggaacagtacgtaagcactggactctagctgacaaagttgtctcccagtgaggtgtgaattaacagttctgacactaccataatattgtcttagtctgttttctgttgctataactgaatgcctaagactaggtactttataaagaaatctatttcttaccattctggaagctgggaggtccaaggtcaggcggctgcatctggtgagggccttcttgctagtggggaccctctggagagtcccaggtggcacagggcatcagatggtgagggtcttacaagagatggccagactcgcttttacaacagacccattcttctgagaagtaactcactcactcccggcataacccattcatccatgaactgattaatccaatcacctctcaaaggtcctgcctctcaacgctgcttcactggggatcaagtttcaacacacgaacttttggggaacacattcaaaccacagcacatgtatactgaaaattgaacaattaaatacatggatagcagatggtaggagccaggtttctcactattaggaggttacagaagcaagaggaggcagctgggatgacccacatggtgctagatttgagttggagacattggtatgaactgatgtttagccctgtatagatttctacggctacctagagaagtattttagatatgcatatatacatggttaatatatgcacatatattttctcctctgtgagctgagagggtttggcagcaacaacacctcaatagctataagcacatctcatgctcagatctcggtttccaatatgcttcttcaatgaaaggaaccagggttccttggagaactggtggattccagagctggggccagtaatatacaagatgagactagaacatcttgtactaaaatgtagtaataaaatgccaaaacaaacctcagattgatgggctatgtcaaagggctacaggagttgactggaagagctcctaacgggcaatgctggaacagtgtgagcaacaaaatcaagaagtgttattgcactgtgacccaagtgtaaatacccacaagtccacgccaatctaaataaaggatgcaataacatatccacaaataaatgaaggagaagagacaaatctgcatggaggaatgacaaataatttatgtagacactctgcctcagagggggcgtaactccccagttcttgcgtgcaggctgggcacagcaacttccctccaagacggactgttccggaaggggaaagaacactctcagcaaggaagcggacaagctgtcttagccaggtgatgaaagtcctcatcaatggtgacaatcatgctggtcatacggatccttgacatgattgtctgaagatggtgggttacctcaatggtcttctttcaaaaccccatattcccagtttaatcatgagaaaacctcagacgccagcagatcccaactgagagacactctgcagaatacctgcccagtcctcctcaaaactgacaaggccatcgaaagtaagaaaagcttgagaagctgtcacagctaagagaagcctatggggacgagataactaaacgtagcatgggattctgaacaggatcctggggcagaaaaggcgccttagagaaaaactaataatatctgaataaagtggggactttggagagcgacaatgtatcagtattggttcatgaattgtaacaaatgtatcctagtaatggaagatgtttatgagggaaactgtgggtaccaggtatgtgggaactctctgtaccatcttcacaatttttctgtaaatctgaatctgttacgaagagtactttaaggtggctcacacctgtaatcctagcactttgggaggctgaggtgggtggatcacttgaggtcaggagttcaagaccagcctggccaatatggagaagccccatctctactaaaaatacaaaaattagccaggcatggtggcgggtacttgtaatcccagctacttgggaggctgaggcaggagaattgcttgaaccagggaggcagaggttgctgtgagctgggatcgcgccactgcactccagcctgggtgacagagactccatctcaaaagaaaaaaaaaaggatttaaaaataaataaaaggaaaaactacactagaaaaaataataaacagtttagttatggcaaataagcacatgaaagagtgtcattattcatgagggaaacggaaattaaaacccggtaagatggctggggcgcagtggctcacgcctgtcatcccagcactttgggaggccaagacgggcggatcacgaggtcaggagatcaagaccatcgtggctaacatggtgaaaccccgtctctactaaaaatacaaaaacttagccgggtgtggtggcgggcgcttgtaatcccagctactcaggaggctgagacaggagaattgcttcaacctgaacctggaaggtggaggttgcagtgagccgagatagcacccactgcactccagccagggcaacagagcgagactccatctccaaaaaaaaaaaaaaagaagtaaatgaccaatccgcatgacttggtgaaggagtgaccggcccgtgcaatgctgtgaataaatgtcaaagcaattgtgctcatgactgaggccagtctaacaacagagtcttgctctgtcatccaggccgcagtgtggtggcacaatctcggctcactacaacctccacctctctgattcaagtgattctcctgcctcagcctccccagtacctgggactacaggtgtgcaccaccatgcttgggtaatttttgcaattttagtagagacagggtttcaccatgttggccaggctggtctcgaactccctacctcaggtgatccgcccgcctcggcctcccaaagtgatgggatgacaggtgtgagccactgtgcctggccccctgagtccatttctatacaactctagaaggtggagatccatcagtagctctggaaacagaccgacagctgcctggggacaagggagcagtgtaagagaatctgaggcggaggaagagattttggggtaaatatgttcatgacctagattttagtgacagtttcagaagtgcctacgtatcatattgtgtactttaaatgtgtgcagttaatctgtgctctcaataaagcgaagccagggtgcgggaagcaagtaggaaccccagagttggaaatatgggttttagagtaaagtctgtggattgttggtgttacagagggaccacagcactgtctttagcattcaccccggaagtgtgtgggttttttctggagtttaaaatgattaattctccagtctataaacacagaccgtccacagtggcacattccaacagaagccctgtcatcggagcggatttcatttcacccaatcttgttacacaacaaacagcttgcattgaataagtcataatttttaagacaaatatgtcttctaaattctcttagaaagcgtctcatgtttaaaaaataacactgctaatagctgacttctcctcagcaggctgagtggaaacatgccccgctgaacttcttggcaggaagatggcagcccaagttgctgtcctgatggggggaacacatttggtctccagcactcagatggaaatttccagagacctttttatcccttcgtcacatctttaatttttcaaataggcctctctcttgctccagttgccaggttaacaaagctgccaaggccaagcagaaactggcaagcgtccccagagacgcatcttagtcttcaacataaaccagacctgattccgcccgctctgctgtctccagccacctccgtccacgggcagccagcacaggcacctgggaggcctaatcggatcgcggctcccggagggtcactaatcagattgttttgcctgccgtgttcctgtcaaagcgaatgtgcagcgtttccagacggacgctctctttaaaagcacacgctcccctcctcactccagttagaaaaaaacggagtgtgcaggtgcattgtgactcatgaaatcgctcttcgctcaaaggtctgttaacagactttgttttgggtcagattcggttctacaaactgctacctgtgaccctgacagcatgatttactctctctgggccccaacctcccgcgccctgtggtcgaagcgtccccttcctatctaccatcgtggggctcttcggactctgattcggtgtttctacaaagtacacgaaaaagagaccgtttattttctatcgtgtgaaagaaagaagcaactgcagaggacaccagcaaggctgcaggtcttgtgtgggtccctgcagctttccttccagggagaacaggtaaaagtttcctccagcatgaacgtccagctgtgcaaaagtcaaaggccagctattaggtacagcagacagagcagccccagggactgctgtgagaggagggaggagacttgaaccctgggctgagagatgtgttggaggatgacttaacactgtggaaaggacagaagctggcgaagagggaggagacttgaaccctgggctgagagatgtgttggaggatgacttaacactgtggaaaggacagaagctggcatggggggctggaggaggcaaggccctggctcagccctgaagtcgtgacagcttgtggccagcccgatgcctggttcctacctggggagggggctgcatggagtctgggtttgcaggccaactgcctattcttagggtgcagcgacttccccgttatgctgggtgcgcacactcccctgctggaggggtgccctgatgctctgagccagtcagcacagcctcctcactgatcccagcttccaggggatggcccttcagccattagggcagtctaggacagaagcttgcgctgtcgctggtgtggggtgtgggtgtgaagcctggaactactgcagttacttttttatttttgacacagagtctcgccctgttgcccaggctggagtgccgtggagcgatctcggctcactgcaacctccgcctccccagttcaagcaattctcctgtctcagcctccccagtagctggaattaaaggcacatgccaccacacccagctaagttttgcatttttagtagagacggggttgtaccatgttggccaggtggcctggaactcctgacctcaagtgatccgcccaccttggactcccaaagtgctgggattataggcgtgagccactgtgcccagctactacagctactttgataccaggagggaaacaaccctgagaataagacagatgggtgaagcacggcatggcagagatttgtagataaatgttactggaaccctgatcacattgtacctgaagcctgctctcctctggactttctagttatgagtcaatattaatcaacaaattcatgtttaagctggtttgagttgggcattcttgaaacataaaagtccccatctgatgccagcactaaatggaacattcttagtactagagaggacatcaagctctcaggttgctaaagttgtctttctgtgggctcatacatgccaatgataacaatataataatacagtgcctgaccgtacctggggtagtgccaaggtctccacgggcaggaacttgcttcgtcttcccgatagcattatgggcgggagctgtaattagctccatcttgcagaggaggaaacaggcttacagaggggcaagcttcacgcgcttccctgggtcctgcttttctttcttcccacgaagagacaacctggggtagggcagggggtgggggattgaggacaggccagctttggtttcttttggtaaactttttccgtgttttttttttcttcttcattagacacacgtaggatgtttccaaaatccgtgtgattcaagtgcattcccagcatgtgtctgtgtttctttgctttgactccttaaagcaacacagggcacgtccccatctgcgtcaacagatccttccgaggcctgaggaaaacatttccacttatgttttcagttatttttctttccattcaaatgtttttgtttattcctcaaaaatgtctagagcccttacttgagtgggactctgtctcctccaaggatgttggctgctttcactctccctcggtgcagtgcgacatctctgccttggcctccaggtctggtctgtgactggctcccaggaagcgcctcctggccttgtgacctgcatttctctggaactcagctgtagcccttgctttttatctcactcacttcttttcgtggctttttgcttcattgtggtggatgccgaggcttccggccctcgcccattctgtttgtcacagcccagaagttttaggtgggaccgccttctacctgctgggctgaggggccttcgaatggcctcatggtggtttattctctgcctttcaatgtttttccattttgcttgttcccacagtgtaaaggccagcagcggccgcacaccctgcgtttcagtttctcagcctctgccgggctctcctcgctggccgcatctccccctgcagagccacccgtgctaacaggccagactggcggccgcgccgaccacctgggagagacgtcccacacctgcgccctggcaggacaacgaagccaaagaggcggtgggcgttccagtgggtgctccggccaccctcctccccctccggactccattcttcccagggctgtgtcctgggcctcacttcctgccctgagcagcctgccccaccccggcccggctctcacggcccctctgctcacgtccagggcctcggactgcccatgtgtgggaggggtcggctctatcaggtggttctgacctcggtgagccctggggctgtgggatgtcacccctggccccacaggaggccatcggttggggcctgtttttctctcttggctccaagtttcagggcttgcgtgcttctttttcacaatgttaaactgatcttggggggaagctgcagactccctgctgtgccctcctgagagagtggtgaacagtcccaagttttagattccatcctttttcccgagagtgggggaaatccactaactgcccagcgcttcttatggggaccagggcctgaggaggacttggcgctgttcttgggcccggggctgtgggtggccagctggctgcagctgtgtgggccgggaggacctccctgaactctgtgctccctgggggtgcgcaggcgcccggccccacccccacttcagtgagcagccaagtatcgggcagtgcccctcatcctggggcagagaacaccgacgagggccccacccccaggcagaggcagtgggcactgtttggagagtcgcagggccacagggctggcaggaagcgggtggaggccctgccccagcatgacaagtgtgtcttccacacaccccccaccacgcagtctcccctggagtgcctggctggatcacttgatgcccgcaggatgaggagtcagcccagctcctgcctctggtgatggggactttcaggttgttggtggttcaggtttttctgttttagctcctacctcattaaaaattataagaataatttaaaagccctctgggtttctgtaggttggtggacattctgtgcggaaaacacctgcctgaccgtaagcacttctgaggatgacccagccccacgaagcagcatacagtgtgcaccactgggtcccttctgtctccttagggaacaaagaacccccgcattcacaaggtggccccaaagcgtgacccgctccagaaagcagcacccccccagcgggtgggagaggccctgccccgtgtgtcccggctggccctgtgtgtcctggctggccccgtgcagacgggcagacgggcactgcagatgggcagccaccgcctttgctggacgagtacttcccacgtccacttagctgggcacaggagctcacctgtgccctccagtgggggcgtggtgcgtaagcagtgcccgggggccacggtggggggctcctggatttgcctccagagacaacaggatggaaatttggttccgagaattttatgtacatgtgggtagttgaggttaattagcttctactaaaatgcacaaaccaggtgtctacttctgggttctgataacttcatgcacgggggcacccaccacccagagcaggccgggctgtttccccacgaagctcctttcccaccagttccccacctgctgctggacgggccccaggaggattcttcgcttccctcggtgggtttcttcacttccctccctgcaggtgggtttctgttcctgatgtggggatagtggtcttctcgctgctgagagggcttcgaatgcaccacagctagatggacagacatcagtgaaactgccgccaacagacttggcccttgcagcatccatccccaggaggaacttgcagcctccaccccggccccctgggccttctcccagtgcctcctggaggcccctgcccggcgcccctgctcatcctgcccttgtctacagctgcgtgagctgcagatgcaggaggaccctgggacgaagctccctgccctgcccccttgccccctcacgtggcaccctggcccagctcattcccctgcctgcagggccggtgctgtgagcagctctggggtcatggcttggtttctccctggcaaactggtgccttcacagctgatttatatttcaaacatggacgccatctccctggcccctcacaccgcgttagcggcccagcctgtattccattagctgattaagccttttcttgtccttcatttgttagaaatagaagttggctgaaccccccaagctttcaccaataacatctttttttgtcctttgtttccgtcttcctctcgttgacaataaaagtcttctctccttcttcagagacactggctgtccttctgccccacccagcccccggtccctgccagggaaaggtgcgccccccggaaccacctgggaaggacactgcggggcctgtgagcttgttcagctgctggctcagctcagctggaacctccaaaatgaggctgaagctgcctggggtatgctcctggtttccatgggtcttcggggccatcaacctacaggtcgattttgagggtgagacaacccttgagttccccctggggcagggccaggggccgggaataagaggtggcatctggggagctgcccgtggcaagggatgctgcagagagagacgaaaggtcagttcccacctctccccagacagcctcgggctgtacaggaaagcgtgccacggcaccaagcaatgcttgacactgattcacgcctctgaacacatgatgccatcccttctcacggtgaggaggacccgtcagagcgacccgggcccatgcaccatcccacccctgacacagggcagcccgtgccttcctgccagtggctgcagtggtctgggcgagcagccctcacctcgcaggaagcagtgcttgcctgcctcttatggcttctggcccaggggttacatctctctggaccacgtggcactgcctgggcactccttggaggggcttcagctgtgcagacacccctgctgaggacgcctcctcactagccccccaggcactcccagggtggggggctctgtttagtgctgctggctctgggccacaagccacccagctggctggcagctccaccacaccagggagtgattggcacttttcggcaggaagaagagggcagctgtgccggatccgcaagatttcacggaatcagaaagtccttcctgaactccgttcaacaagaatccagacgctcaattggacccatgaggtttcaaagttgccaaggctgtgagccccaggagttagagggtgagggtcctgcccagctgggaagccacgtggcccaacggccaggacacaagatgccatggggcaagcactctgcctctgtgggccctccctccacaaaacatcaaaaatcctgttttacgtctgtgttgataagaagcccaaatgtgctaatattatatatgaaaacattttatttgatctaaaatttcttttttcttttcttatgatttaaaagtaattacaacagtgttgtgggctctgagttggcctgggggaggctgggggtgactagggaggtggctactgggggcccctgaaggacctggaggagcttggcgactccggtggtgagaaccagggcaggaggaccaccgggtgacaggcaggagaggcaggacaatccacctgctcagggggcccgggtgggctgcgtggggtgcatcccggcttaggaaagggcctcgacagctggccattgcacagccccgtggcaggtgggtggagggttgctgatctgaccctcagatcctgcccacgtgaccctggatgcctggagctagggcacagccaggccccgccatggggctggaggtgagctttgcacgtgcttggactccccagggtcaggtgagtggtgacagtgaccaagtctgcacttggggtcatgtgagtggtgaccgtgatgtctgcactagcttttggggaaggtgcgtggtctcacacccaaggtggggaagaaggtttggcatggcctggaaagttcctgagccttcactgcccttcagggagcctgggaggggcctgggggactggggctggtgtggtctccactcgggacctgcacgcgccccaggcaggcagcgaggccagcaggcagaggtgggtgagtgtcctcgccgtgtgactctggcccgtccttagccacgggggctcctgtgtgggtagctgtcgcaggcccactcctcctttccgaaccccagaatcgatttcctggtggaggtgtgaggacgcgtcgcagctgtctctctctgaacctgctgcaggttctggcccgagtgcctggatgccagacacccgcgagctctgcatcagacccgcctgcctgggcagcctggggctcacctcttgtttgtctttcaacctgagctggccctgagccagtttgtacaaagagtctgtcgctttgatgggacttttccctggcactggctggatgtccaatcaccaccctgcacccacatccctcccactcagcctggagctctgcactcaagtgctgcgtcttcagggtgtctctgccaaactccactcgaatcaggactccagctgccacgatgtgcattcccagccctggtccctccctgccctgacagggttccccccaccccgctcccaatccagacagggttccccccgccccgctcccaatccagacagggttccccctgccccgctcccaatccagacagggttccctccaccctggcctgcagttcctggagaggagtgcttccgggggaggagagggtcacctcttgtgcacagcacccctgggatgcgggtgcccctgggatgcgggtggccctgggatgcaggtacccctgggatgggggtgcccctgagatgcgggtacccctgggatgcggtggccctgggatgggggtgcccctgggatgagggcagccctgggatgcgggtacacctgggatgggggtacccctgggatgcgggcgcccctgggacgtgggcggccctgggacgggggtgcccctgggatgggggtgcccctggaatggaggcgcccctgggatgcgggtggccctgggacacgggtgcccctgggatgggggtgcccctgggatgcaggcggccctgggatgcgggtacccctgggatgggggcgcccctgggatgcgggcagccctgggatgcaggtgcacctgggatgggggtgcccctgggatgggggtgcccctgggatgcgggcagccctgggatgtgggtgcccctgggatgggggtgcccctgggatgcgggtggccctgggatgccggtgccctgggatgggggtgcacctgggatgcaggtgcccctgggatgggggtgcccctgggatgcaggcgcccctggggtggaggtgcccctgggatgcggatgcccctgagatgtgcttgcccctgggatgggggtgtccctgggatgcgggcagccctcggatgcggttgcccctgggatgcgggtgcccctgagatgtgcttgcccctgggatgtcggtgcccctgggatgggggtgcccctgggatgcgggtgcccctgagatgtgcttacccctgggatgggggtgcccctgggaggcgggtgcccctgggatgggggtgccccgggatgcgggtggccctgggacgcgggtgccccgggatgcgggtgcccctgagatgcgggtgcacctgggatgtcggatgcccctgggatgtcagatgcctctgggatgtcggtgccccgggatgccggtgcacttgcctctgacgtccttcccagtgagcaacttcagccacttgacctttggccactcgtgcaaactctggccactgcttcatttccatgtgagccaaggagaccttcctggtggcggggactgggaaggcacagtggaagccctgcacactgcgaggttctgcctggagatgccagcactgaatggagagtcgaggtacatgaacagtgggtatgacggcatgcaaagccagcagccctgttccagaactgtcttcaggttcctgcacaggcccaagacctctggtgccagctgcaccctccttgttgggcatctggccattgagggggggcagttggaatgtgaggctggggttcagctgcaacagacacgtgcccagtgccggccgccagcttccacattcgctcattcgttctacacactttctcggaggtcctctgtgctgccagggcaggctgggtgtgtgaaaaacaggccccaaggtacaaaagggctcaagcataacagtggttatggggtcccagatggggtccctggctagctggtggctgagccctgctgtctcctgagcctgacggagacacagctgcctctaaaagcctctgaaagcggagtggactgcgtctctcctgccaagtgctgctggtgaggaccagtctcagggccacacatgcccaaggctttctggatggcagtcatatccctgccagactccccacggggcgcaggaggagctagtcacggtctccaccccattccaggtgctttagccgccctgcagctgtgaccgcaggatgagaagggcaggatgccgccccaggaacgcacgcctggcagggggcaaatcccagacggcgaggacggggcaggaggcccagcagcgctgggagggtggggatgagccgggaggaggtgacgcagcaatcccagtgggaatctctgtcggagacaggccggtgccccacgccattcagtgagtgcgaagccaggtgtgaactgcagcagacatgaagggaaggcagtgacgaattctcacctccctcgtcaggcgcctgcttggatttgaatgtgggctcagagaaggccttgggtgagcagggtcaacacgaggtgggcgttggacctgcactgtctttctggcacagcaaagccactgactgggcctccggggtgatcaccggcggcctgcgcccagacggatttcagaattgctatgggctggtggccactcgcacccgtgcccctcttgggagtggggagtgctatttgcagctactctgtcccattgtagactagggggatccacacctgtgaagcctcagcctcacctggaccccatgtggatgaggagatcatgaactgggagcgatattctgggggatgcggcaccggggcttagagcagggtgagtgcaccctacgtgccggcacatgattcactgtggccagtgtgttccccagagatagctgccacagccctcaccccataacgtggccccgagtccggtgtgccccacggctgggctgatgggcagcctgcaccagagccacctgtcctcgggaactggcttatggccgccccttcctgctgtctagaagctcctgccacgcaggaagtccatctacccgagacccccctactgggtggagcccaggctcatggagaggcctggggggtgggcttccatgtggggagagggagcccagggttggggggacaccagacaagcaagaaggaggccactttggaaggggactgtcagcccagcccagccgtttgtttttttttatttttttggagacagagtctcgctctgtcgcccaggctggagtgcagtggctcgatctcggctcaccgcaagctctgcctcccgggttcatgccattctcctgcctcagcctcccgagtagctgggactacagatgcccaccaccgcacccagctaattttctgtatttttagtagagacggggtttcaccgtggtcttgatctcctgacctcgtgatccgcccacctcgttctcccaaagtgctgggattacaggcatgagccaccgcacctggcccagcccagcctttttaactgagcaagtccctcagctactttaggggtcaacattatgtgattagggacaataggagcccctgggaaggacagtgacctcgtacagagcaagcaggaggggccccgagggcctcctgggtactctgcacagacatgaggtaaccaaggcttctgactctgcacagtctttggtaaacccctggtatttttctggagagtatggcgggcgtggctctgggaaggagtcatggccctcagagaaggtacctggtaacaagggcaggtgcctcctttctaaaaccaagatggcgtgagtctctgtaccctgaggtggggcaactctgtgtgagtcactgcaagcaggggtggtgtgcaccagttccattgacaacaatagggtctaaggatccctttatcttaactcacaccaccaaacttggaaagataagaccaggctgtgaaaattatcagagataaagaggtttttgaatggaagtggtagagaattcacacacaccttctcccccctggaaggtttgtcatagattggtacacatttcagttttcaaaataaatagaccaatgttcaaaaactgtgttccttctctccattgaaaatagactggggcgagtatttctgtcaccaatttgacttgacagcacttgggaaaccagatgaatgccttttgcagggacagttaatcagattttttaaactgacttttttttcttttccttctttttttttaaaaaggtataatactaataagtgtgcatgacaaaatttaaacataagggaagtaaaatttgagatacaagtttctctttccccatccctacaaactctgcttccattccccactggaaccttgcagaacatgtacgtgcagaaccaaagggcatgtgtgtgtgcgtgcatgcctgtgtgcacacctgtgcacatgtatacttttaacacatcaatgagattacactatgcaatactgctctgcatcttggcatactgaataaataatatgttgaagagatcttttcaaattaatacgaacagactcaactcattcttttgtatcctaattttttgttgttattgtcttgtcattgaaagagacatacaaaacttcttgagattgtggactcacagttccgttagtgtttgctttctgtgtttggaggccatgttcttaggtgcatatgggttcatcacagttcttgttcttctccatcacagtcattcctcatgtccacagtttttgtccatcacagtttttgtcctgctggtgagtcattcttcttattttctttaacgttcatgatgctttttgcctttaagtctatttcatgggacagtcatagcaattcagcagctttctaatgggtaatattggtttaatatatcttttctttcattttattttaaatctttctgtgtcctatgtcagcatatctcttctaaaaaacacacatttataaaatattaaaggtacatacatacaatgtagaaagtgcaatcaacacaggagaagtaaagaattctaaccaccctgagcttccctccccatgcaataaatcgtaacagcttcttgcagatccctctagaaaactctgtcaacaaaaacatataattttaggtactataaagcagtggtccccaaactttttggcactaggaaccagtctcatggaagacaatttttccacagatgaggggtggcagggggctatggtttcaggatttcaggacaaaactgttccatctcagatcatcaggcattagattctcataaggagtgcacaacctagaacccttgaatgtgcaattcacatagggtttgtgcccctgagaatgtaatgccaccgcagatcggacaggaggttaggtcaggtggtcatgctcgctggcccaccactcacttgctgctgtgcaggccggttcctaacaggccacagactggtactggtctgtggcccgtgggttgggggtcccttccacaaaggcatcatgggatgccttcatgaaaggagtgtcctttttggccataccgctacaaacctggatgtacttgggctgttgtccttcagtgtcagcacgttacctgctgtcctccacatgtgagcgagaacttggatgggtataaaactcccagagcccatttccaccctaactgtgtagaccctgctctgtctccttctccacaagagcactcagtgggagttctgaggtggcctcttgtactctccttggtatgcaacccgctatgaagagctcatagttctttatctgtagtgtgcaggcaaatgtttaccaaccagctttcttcggggaaagccctgattgtagcatttgccagtttctggtaaaactcccactgtggtggatttccagctaccaaatgtcactgaatgcagagttggaaagagatacacagtagccacctttgtgtagcaactccatcatacaggtacagttgtcataagcagcctccagggcataaacagtagcaaaacaggttaaaaataattaggaagaaatgagtgtggagtatctattaactttgtttttgatataattgatttggttgtaaatttgttaatttgatgtacgataatggctgggattaacaactggctcacactattcttgataatttaacagccagctctaagggctggtgtgagccatctccagcacaccctcggtctgtatgtcattcttgctcatgatgcaccttttgcctaggatgtactgtgccctttcaacccacgttttctttatttcctttaagctatttgctgttatccttgtgagatgaaagccagggctgggacacactgatacagaaatgggccctggggtgccaggcttgggggagacgaggggcaccacagtgaggacctggctttcagcttgcctgtgcagcttacacttggggctgctgaagtgcgccggccctgcaactgggccagggacttccctaatatctgtttttctagagatgttgagcctgaagtgaggcagttgagcaaacaagtggacagcatattaacatagcagggatttctgaaaacccagggtcctggccagccatgggctgcagctcccttttacctctgggtggtcatgacggtaagtacaccaggtgatgaggaccatagtacactgttgctggagtggagtgccaggaagcccatgatctagcctgaggggactgcaaatattttagggacagacttcaaaatataccaaattaattgttaagcttttttggttaatgtcagaaaaatggaatgtagttaaaatgcaataatgctaaacagcttgattttattgaagagtgtcctaaaaagatatagccacttatgtcattttataattctatttgttctaataatgtatcttttttattcccccactgggaaaatttcatgctgcatgaattcattaatgtctcttcctctgcatgcttatcttaggctaagaatgaatgaattttctactttgcctcatttgactgtgtaagagggtcaagaaatagacccatctcttcaggatgtagcaagttcacgttgaagaacatgtgggatggaaaaccattgctgtggccaccttagaaaaataacataatgtcggccaggcacggtggctcacacctgtaatcccagcacttcgggaggcccaggtgggtggatcacctgaggtcaggaatttgagaccagcctgagcaacatggagaaaccctgtctctactaaaaatacaaaattagctggacatggtggtgcatgcctgtaatcccagctactacagaggctgaggcaggagaatcgcttgaacccaggaggcagagattgcagtgagccaagatcatgccattgcactccagcctgggcaacaacagcgaaactccgtctcaaaacaaacaaaaagaaaaagaacataatggcatggtctactctttggctacaggcattcctgtcctttgcatatgcaaaatacactcacctccttcaccaaggcctccaacatcccagcccattatggcatcagcacaaagtccagggtctcatcatctatgtcaggtctgtaaagtacccccagtgtattcctaagatgcatttactcaagcgcaatccctcccagcgtgaagacctgcaaactaaaggggtcaaattccctcttccacacacccaacattttaatacaatggggaggaaagaaaccaggatcggtctttctgactgaaaagtcagaaagctggcggcacattagcagtcaatgcccacacagctaaaatccagctgcagggcaccaattcccctgctctagaggtaggaagtgtaccttaattagagctgagtgtttgttctatgctcttgcctctccctccatgctcttgactccaccctctgagtcacccttcctttcccccgaaaaacggtccatattttcatctgattacctctcttagtcatcttcctggacatagaagatggatgtcccagagacttcttctaattttgaattgtccctttattcagagctgacagtgcttccaccaatacaattctcttaaaaacttggtggatttcctacaaatcttaagggggtctcactccattagacaaagatatcatcacaagtctctcagtctcactgaaagagtaaatgaggcatgccttaaatctttctcaagtctcaataaaaggtatgaaatccacacttttaatctgaactttaccccacagccatagttgacttcaaacacactgagttccatctttgccacgcagcattttcttactgtgagaatatttctttgtctgaaagatgcatatgagaaaccacttagagaaacccagccaagtcctgacacctttatattttctttaaattttgctcaaaaatgggacattccttcattattttatctatattacacacagctaaaagaaagcagttgccaattatgacagtctgcctcaaagtctcttcagtcaaacccacaagctcatgtggtatattttttggtgtcctggtttccccaaaggatattttaactaacgtttctgctgctacatgacagcagtcactcttttccatctttccaggtgttccctcactgaactttgagactttactatcagtctcattgaggtctcttagcccacacttccatccctaagatgatttccccagttttaggcttttgtttcagtagcacctcatttcaaaggtgccgttcacttcccaagtagtgcacctgcagtgttgggcaacagagaaaaagtccctttctaattcatacaaagggctggtggaggcccaggtccctcaaagaaattctccactgcttcacttgtccaaatgccccatcatccaagcccagccaaagttcctcttctgctgtgtggccagccttgacttctcctcgcctctgaactccttctgtctcatgttaatcttctcttgcagcactttgtgtagagttattggtttatatatctcattattctcatcttggtaaattctgggttgcacagtacgaggttttactctgaattttcagtacgcatgtgataacagaatgagtaagtcagtgaatgagagtccactccctcttgctcccaacttcattctaaaatgataaataaattaaagtaatggttacattccaagggggataaacaccaggcaggttgtaatagatgctgttaccacatttcaccaaaaatttaaggtagcaccacttttaagatgtaccactattttatatgctgttaaggaatgttggcaattgttttatgttcattgaaaaagaacctcttcatcacgcccatgccttcttctacctttttgagcatatgaaatctagttagcactgcctcactgttcttgtatacaaatcccattgtatctgtcttctctgggtctgtttctattgatggattttgaccctgggtatgaatcatattttcctgcttctatgtgtgatagtttttgattgaatggtatagacattgtgaaaggtacatgggtgggtgctgaatttttggtattactttgaatattcttgggttgtgttggaatccttttgaggattgcttagaagcctcgttagtgtgggtccttcagcctggggctaatctggccccattgctgacacactaccctgctgcagcctccacgatgccctttgaattaggaggtctttccactctggcttgtgggaacacgaacaatcccagccctgttcgagctcctccggatgttctgcctcctcctttctagtggttcttttcccctcaggtaatttcttcataggcatgcgtagatcagtgctcagccacagttctctgggtgggtctccctctcgccttctctcaccccatctctttctctcctcccccatctctttctctccttccccatctctttctctctctgtagctccctcttctcttgtactcagccctgaaaattctggttgccttggcttcccccaacttataactcagtctctgccgcagcaagaccccgccttatctgggtaccccctctcaggctctggcctggagctcctctccagacagtagccaggggctggaaggtctctcctcattagtttctcctctctcagtaactgctgcccaattctgaccgctgtcccatgtctcaaaagacatttttgcatatattttgtccttctttctagttgtttaaggtgagagagtaaatctggaccagttattctgtcgtggctcaaagtggaagtcttagtttttgtttaactacaaatgcttttgttttactctcattcttgaaaggtatatcatgggatgaacagttcttgttgaaagctgtttcctcccaggtatttgagacctctgcttctcacggcttcccctattgctgtttaggtgttggtttcagtgccgttcaacagttactcattcttctctccagttgcttttataatctttgtctttgagaatctccagttacaacaggtgtgtccagatgtggttttcttcaaacacactctgcttagattctctgaagcttcagagtctgagaaatggtgcctttccattcacatctcttccctattaccttggcccatttaatccactttttttcctcctagagccccagttaggccacgtggggcctttttactccatcacaatgctaaccactaaagagaacttatttttcaccctttgtctgtgttgcactctgggtgacttcttcaaatatatcttccagttcgctaattttatatgtatttgcatctaatttgctgcttagcctattcattgttttcaaattcatttattcttttttattcctaagatgtttctcatatctgcctcctcaattctgacagtgtggcagggtgcggtggctcacacctttaattccaactttgggaggctgtggcgggtggatcaactgaggtcagcagttcgagaccagcctggccaacatggtgaaaccccatctctgctaaaaatacaaaaattaggcagccgtggtggcacgtgcctgtaatcccagctacacaggagggtgcaggaggctgaggcaggagaatcacttgaacccaggaggtggaggttgcagtgagcccagatcgcgccattgcactccagcctggcgacagagtgagactccatctaaaaacaaaacaaacaaaaaaaacagttctgatggtgtcccgtccacttatttttaacgccacgttttagttctttaaacacatgggtcacgatactcccaggcccaggttgggccgctctcttcctcgtctccccttgaggccggggacgtgtaggagtggggccttcgcacggagttctccagcggacttcttcctttcttgcctttccgtttttttttttttttttaatttttaattttcccgttccacccagacccctctggggcgcgaggaaggtccccaggctgcgggtcccgcgccggcccggccgcgcttctaaggcaggactgccgcgtgtcggtcacggtgtcgcgtattctccgcgggacggacgtgtcttcaggtccaacccgcccggtgggaagcgcagacactgattttccagaaaaagtcctccttccgtttcccgcactggtaggaaagctggggagagagaaggagtctcaccgtcctggaccagtcggaaccacagaggccgctccgggtccgggggcgacttccgagtgggggaaggaggccggagggcgcgcggccgagcccagacccagcagagcgcgcggccgcccgctcccaggtttccctccatctcggccccggccgcctctgaggttctggaccaagcccagtgcccgctgcccgcagaaggcctcactctggagccggcggggagggcggggacgcggctgtccagagctccgtgcccgccccgggagttcgaagggtgctggggccgaggggaaggctctggtcggcggcgtcagcggcagctcccagacgacctaggactgcaaagggcccaggacggggggcggggcggagacaggaggcggggcggaggcatgggggcggagacatgaaggggcggggctggggcggggctgaggcaggaggggcggggctgaggcaggaggggcggggctgaggcaggaggggcggggcagagcctgagacaccccgccccgccccccacctccacctcgagcccgcccctctcccaggctcctgctccagggcgaacccgggggtcctctcccatggctctgtgggggaccccggggaggtcgccctggcacgggacactgtcgcggggtaggacccgagagggtctggggcggtcaggcttcatcctgagcaccgcccgggtgcagggagcgctgggtgctgggtaagcgcgcgcctgcgggagaggcggaggcgggggcgggggcgggggcggcagggagcccctgggcacccacggcgggcgaggcggcggcttccactcccagggagcgggggtttcgcgcaggggacggcgcccggcttgaaatttaggaaattccggtgtcccgcccgcgcaagaggcgctggagcatttccaggtcgttatagggcccggccgcgtggggaccccggggcagatgcgcaccaagcctgggacgcgcctcccaggccctgcccgagaaacccttgcatgcgtgggcacacacacagagatacacacaacactccatatggacacacacacacacacagatacacataacactccatatggacacccacacacactccacatagacacacacaacactccacatagacacacacatagatacacaccactccacataagacacacacacagatacataccactccgcataggcacacacacacatacacaggtacacacaacactccatatggacacacacacagagatacatactacacatagacacacaccatgcacaaaccacacacacatgcaacactccacagacatacacacagatacacagatacaccacgccacatagacacaccatcacaccacacacacaaaacacatcacatagagacacacaccacacacatacaagatgccacatagatacaccacacacaaaccacacacacacacctcatagacacacaaaccatgcacactatgcacaaaccacacacacgcatacatacccacaacacaccacatacacaccatgcataccacacccacactccacatagacacacaaaccacgcacacatacatacacacaacacaccatatgcacaaatcacgcaccagccacacacacaacaggccacatagacacacacaacacgcacaccacacacacaaaacactccacatcgacacacaactcacgcacaaaccacacacacacaacatgccacataggcacacacaccacgcacaccacacacacacaaaacactccatgtcgacacacaaatcacacacaaaccacacacacaaaacactccacatagacacacataccatgcacaccacccacacacaaaaaaacacaccacatagacgtgttaggtagttagacacacatcagcagctgggagagggtaaaaaggagaacagagaagctgtcattaagcccctggcccacctaagttcagccccgagcccgccctaactccaccatgagggacggagtttgaagtgaaacctgtggccagcatgtcctgtggaaggggaaaccagggcacaggtagaaatccctagagcagcatgtgcccagtgacctaaaactgtaataacatttacatgtggcccccccacactgggcttttcttaatgaattatgggtaaaaatatgcacagtttaattttagctgtgtcaccataagctgccaaatgacatcagcctgtcactcagcccaaacctcagctacttctcacaccccacagaagcaccttgagctctgtaaccaggtgctgatgtcacttctcagaaatcagcctgcacaccctctgagacagtattactggaaatttcaatcaaccttgttttaagcttacattttggtgtttgcagttctttgctcactgtcacaagaacccagattgctggttcagagctctggctctgtggatcttgtcggttaaaaaatccatccgaacacagaattctcggtaacacacacacaatacaccaggtggacatacaacacacacatgcacaaggatgttcacgatgacagtgcttgaaatagaggaaaacaatgcgtccacatttccgtcagtcaaccgtggcccgcctatggccacccgtccatagggtctggatgaggtcaaacgggggccccgtcaacagcacaagaaaatcatcagccaattttgcttgggaacaagggtgcaaaaatctaaacttacagaaatcactacacaaatctgacagtgatttaaagataacacccggtgatcagataggagtgcaggagtgcagagcgggctgacagggaaacctgcgcctgttgaggcaggaaaattgggtctggaggcagggagcataaggcagttcacacttcagctaccacaggaaatatcctctccatagggcatgggccaagtaaatgactttgtaacttcacttcatcctctccagttacatagggtgtacccccaagaagccccatggcgccatcactccacggccccatcaccccacggccccgtcgccccacggcctcgtcgccccacagccccgtcgccccacggtcccatcaccccatggccccgtcatttcagcactggcggctgctctgccctgggatgcgcctgtcacgtgcagtgatttaaacatcagtgaggtgattgattcaaatactgcgtactcttgctagtattttccttgcatgctgatatggtttggctgtgtccccacctaaatcccaacttgaattgtatctcccagaattcccacgtgttgtgggagggacccagggggaggtaattgaatcacggggaccggtctttcctgtgctattctcgccagagtgaataaatctcacgagatctgatgggcctatcaggggtttctgcttttgcttcttcctcattttctcttgctgccgccatgattctgaggcctccccagccatgtggaactgtaagtccaattaaacctttttttcttcccaatctcgggtatgtctttgtcagcggcatgaaaagggactaatacacatgctttattggtgaccaggagatgttttaaatttttctatatgattgtggatttctcttcttctttcttggactctgcaactttgttttctgtagtttgaggctggcatcttcccgtgggctgggccccatgccaccagctgaccctggtctgctgagctccttgcccgtggttcctctgcttggtgttaatgcagccaccccagctttccagacctccctttccatttatctttctgtggccttacattgagggtgtgtctcctgcaggatccagtgtatctttatctttgaattgaactttctggttcttttgttttgattccattatctgcgtttgaattctggcattatgaattgttttctgtttttcctacttgttccctgttccttcttctcctcgtggcttcgattattttttattccatgtttatcctctcttagcctgccagttatgaattactgttcattcagtagttatccatgttaaagtccagtgtaaattcttcctgctatctcttaccagaccaccaaagatttacatcacccctttattccatcccaccctttgttctgttgttcttatgtattttaactctacttgcatgtcaaactctggaaatcactattgttattattttctttttcattttttcgggtcttgctctgtcacccaggctggagtgcagtggcaccgtcacaggtcactgcagtctccaactcccaggctctaccaatcctcccacctcagcctccccagtagccagtactacaggcatacacaaccatgcagtctaattttttaaaatttttggtagagacagcgtcttgctgtgttgcccaggctggtctcaaactcctgggctcaagtgatcctcctgcctctgcctcctaaagtgctgaaattgcaggtgtgagcccccgtgccggacacattatcattattttctaccatgtatgcgtctctttattcacttccctttcccgggtctgcgttccttcctttatccccaagctcccaccccaccctggggggtcatttcctttccaccctaagagcccctcatcatgggtgccggtctctgggtggtcactccccggcccgtccggggtcacctccctcccactcccctgcctgcctggggccacctccctccactccactgctcatccagggtcaccttcctccactcccttgcctgcctggggtcacctccctcccactcccctgcctgcctggggtcacctccctcccactcccctgcctgcctggggccacctccctccactcctctgcagcttctctgcattgcttcttctccttcaccttttttggttgattttcatcttgtacccttggcatttttggttgagtgacagatgttcataggacaggtctcaggccaccagtggtgccgtctccagggagccgagtggcgctcgctcctgtggtcacccagggagggaggcccttgtgacccaactgcagactctgggagggtggggtcaggctgattccccttcagggttcccaccaacagctgaggggcttctcggggcccctttgtttcctttggccccatgagtgctgagagctgagtccggctcccatggctcagctcagcttttgcttccccagttattggtcagcccggatccacgccgccccaagcatcagcccatcatccttactttccccgtctttcagaccttggcccccaaaattgtcactgctttaggagttcttcattgatttcgaacagacattttaagatagttttttctagcttgtgttgtgtttttaatgggagagttggtcagcgtctgctggaacagagctacgcctatggaaccgtagacttgttcgtgctttattgtaagtttcagtcgctcctgtgtgcatgtgtgcatgtgcctggtgtgtgtgtctttgcatgtgtgtgctcacatctacatgtgcgtctgcacatgtgcatctgtgcatgtgtccgtctgtctgcatgtatctgtgcatgtgtgtgcacatgtgcatgtgtgtgatctgaggcatcttcccatgactgctgctttctgctccagttgctcctggctgagcatcagtgcagcatcagtgcaccccctcagcacctggacaccactccagagacttctgagcagaggctgacagcgcaggggggcttactagctgcctttcatgctggccgtggtgggtgagctgtccagctctcctctcccagatcttccaggggccagcaggcttccactaaccacagggcctgggggcacttcagtctaccagggcagatgcttgccaggcccatggggaccagcaggctcccgcaggccctcccaaagccacatgcagcagtgcggctggcaagccccacttgggggagaccctgctgttgccggccaggcctgtgggacaagtacagtctgacatctttgccgatggcctggagatgagcaccccctgctctctcctcgatgttgcagcagaacccacgcgtagagagggttggggcgagcagtccaggcagacccccgggattttcctgccgtattgcacaagcattcatgcgttcatttaatcttgcttttttaggcaatactttaaagacacaaagtctcaacaaccatcttccgcttgacgagacagatcattctaatttgagcagaagctactatgtcctgccctttgaacgcggcggcccggacagctgacaaggacacactgtgtatttccattccaattctgggagtgctctgaggcctctgggggagaaggacccatgaaatattcaaaacataagtgaataaaatatctaggtgctagatatgggccaggaagagccctcggccctgcaaagtgtgtgtgatggtgagaagctaccggaagagatggtccctgtgcttggttcattccttggacatttatcaagctgacgaatgtagcagaggtgcttcagtcggctgtaattccacgggtggagtgctggctggagagttacctggggctgtcacactgcatgggctccgggacactgtggctgcccttatgtggtgtccccggagggccctgcaggtgtcacaccgctgctccacactgccacctgctgtcagcatctgtgcaacgtatccaggtctctgggggctagaatgaaaaacatgcatctcgtaaccaatgaaatcgggcttgtcctgaagacctcgtgcattcatccattctcacactgctataaagacatacctaagactgggcacttcatgaagaaaagaggtttaattggctcacggttctgcaggctttacaggaagcatagcagcttccacttctagggaggcctcaggaaacttatagtcatggtggaaggtgaaggcgggacaaggcgtctcacatgggagcagtagagagagaaaaagagggggtgccgcacactttgaaacaaccagatctaacgataactcactatcatgagaacagcaccaagaagctggcgctaacccacttgtgaaggaccaccaccatgatccaatcccttcccaccaggtcccacttccaacgttggggattacacttcacggtgagatttgtgcagagaggacacaggtccaaaccatatcacctgctgtctttttatttatttatttatttatttatttattgagacagagttgcttcgtcacccaggctggagtgcagtggcgtgatctcggctcactgcaagctccgcctcccgggttcgcaccattctcctgcctcagcctcccgagtagctgggacaacaggcgcctgccaccacacccagctaattttttgtatttttagtagagacggggtttcaccatgttagccaggatggtctccatctcctgacctcgtgatccgcccgcctcggccttccaaagtgctgggattacagacatgagccactgcgcctggcctattgatttatttttgagatggggtttcgctcttgtggcccaggctggagtgcaatggcacgatctcggctcactgcaacctccgcctcccaagttcaagtgattctcctgtctcagtctcccaagtagctgggattacaggcatgcgccaccatgcccagctaattttgtatttttagtagagacagggtttctccatgttgttcaggctggtctcgagctcccgaccttaggtgatccacccgcctcagcctcccaaagtgctgggattacaggtgtgagccactgcgccttgcccacctgctgtctttttgcatcttccaagtagacatcaaagattggtttgctatcagtgtcacttctataatccgtggttctatatgaagaaaacaaaatcccaattggggaaaatgaacccatggcattttgtttcttactctggagccgtttctggcagtttgccagcaagcacacagacccacaggacaagcttggttcatggcctggagtgctggtcttgctcatggacacgcaatcagaagcagtattttgatacccctgtgctcatggcaaggagctgcgtgggctttcagggtggaaccagggcttcagggaaccccttcatcccgacaggcatcacccagagcacacccagagcagcctgcagcggcgtggaaggggcttgcactggccccaaggtgcaggggagccctgcctgcctgtctcctgctaggcttgcctgggctcccgcctacagaccatgagaattcttctagcatgggaagagagtctgaccaaagtgacaacagccatcccctgactgcccagcactgttcacttcttcccagatactcctaccagaccaggtcagcccttcttttactggggggccagaaaggtccccccaatccagtccaggactccagatgatgcccatttctctgccagtcccagcaatctcccttctcagcatctggcatcctgggatgtaccctaaagttcactggctcagagcaccctaactatggctgcggcgaggggggagggcgggatcaggtcggcgtgctgcacatgggtcctggggcgggaacagtattctggctatgctcctgcagctgggccctcacaaggggcagcgtctgcaccctctcaaggctttgcagataagggtttattgaagagggaggtgacccacaccatccccactgagggatctggttagggggctccccccagaatgtaggcaagagggcagcatcttgatagtgagggttggtcacccgggaaccacagtaacgtctgcagggaccttcccccagtggcacgcacttcccagaatgctcacggtcaccctcagctttcaactgtggggacctaacgcgtctcctggtagagtcctcactcccttggctaaaacttctgaaagcagcgaggccgggctccctggctaggatggctctggccctgagcaggtcatttgcgtcaagtttcaccacccagcaccctgtgctttccccagctggctgcacgctgggcctccgggaagccggcaagcccacctgattctggatcctccctccgagcctgggtgacgctgtcatgaaagaagctgccagaagcccacagcagggcagttaggcagggaatgcgagtccgtgtccagagcaagggtgactccagtccctccaggacggagaagccagtgcgacccactgtcccaggcccccatggccctggctgctcctggcggacagaggggcatgttgcccacgctatgccttgttccctctgggctgccatggcccctggaacaattcctgggacagcctggggaggaggctgacaatcatgcaaggtggatgcagcttggcccctcccagtcacctatgtgttccttcctcagactcccgtggggctggagtcatgattttgctccccatcccatctgtaggccgcccctgcctggatgagaccacgctgacactcacacgcctccctccaggaggaccttgcctccactttctccagggccacctgtgatgcaccaggatccatcctgtaatcccagctacttgggaggctgaggcaggagaatcacttgaacctgggaggcgagaggcagaggttgcagtaataagccaagattggaccacagcactccagccttagcaatagagagagacttcgtttcaaaaaaaaaaacctatgcaaatcccaattacacacgctgagtggcatgttcagctgagccacctgcccaaggcgggaccctctcttcctccgtctgcaggtcacatggagatggcagagcacctgcacgtgcacctggagaccctctcaagcctcgtctcctggcactgcctcctcctgacattggaggctgctgggagtaccagcctgtaaccctcgttgtgatggcacctgcctggtgctataattcagacatttgtctccccaacctcatgttgaaatttgaaccccaatgttggaggtgggacctgacagaaggtgcctaggacatgagagcttggtgctgtcctcgcggtcatgaatgcattcatgctttattccttctcacaagaactgattgttaaaaacgcttggcacctcctctgcccactctctcttgctccctctctcaccatatggtctgcatgcacctgctcccatcgccttctgccatgagtggacacttcctgaggcctcaccagaagcagatgctggcaccatgcttcttgtacagcctgcagaactgtgtgccaaataaacctcttttctttataaatcacccaacctcccaacacaaatcgtccaagacacctggtgtcccccaaacagctccttggtcaacctcagattcaggaccaatctgagagctgtttccgtgaagggaggagaggagagttgttagctgaagaggacatgggtttgctcaagatccctgcattctccactatggctctctgattctcctctctgagcttgtggcagacacggcagatacctcaagcatggctgggcagcagatgctggctgagaggaagtggctgagcccaacttgtccctcctcagaccccagaattgccaagaccagagtcctccataaagacctcacaaacaggcaatcactgcatgcttttccacaattaaatatgtgcacatcttaaggaaaggacctaacatccttcagcagtatctctttccagggcagggagtgactgcgtcagcagcctcaagtacctggaaactgtccacatcaggcaaagtggtgggagagacacagatgtttccaccagcatttaaaagaaaggaaagaaaattattgacaagaagcctccatggtggatcaggcttcaacgttttgatggacctggcctctcttggaagcaaatccctggatggagcccatgtctctttgggcccccaaaggcagcctgaccttgacacggagtgcaaagcagactcagctgcttgtgtttaatggggattcgcatagttggtttttggttttgtttttgttttgttttgttttttgtttttttttgagatggagtcttgctgtgttgcctaggctggaatgcagtagcgtgatctctgctcactgcctgcaacctctgcctccccagttcaagtgattctcttgcttcagcctcccgagtagctgggatcacaggcacgtgccaccatgccctgctaatttttgtatttttagtggagatggggtttcaccatgttggccaggcaggtctcgaactcctgacctcaagtgatcctcccaccgcagcctcgaacaatgctgggaaaacaggcgtgagccactgtacccagctgggatttgtgtagttttgtccgtgctgttatatggtgcactgggcagagccagccagtcccgcctcgagccccgttactttggtctctgatgcagatgttgtgtggcagtggaacggcctcatcagccccacctgggacctggcaggggatgggtctgagcagccctagaggagggtccccagggcccacagcaagggtgacatgacccacaccatccccactgatgggacccacacagtgaacctcctcccacaccccctccccagccggccacttggaccagagagacgttatcaaagtgccctctcagaaacgtcgccttcatccaccatcctcttttaacccactgggcttggtcaggaagccgttggtcagcagggggcaggtggggttggggggcacccttatgtcctgtgagaccctagcaggcactccagcttgggatttccagaggctctgaggtggctaagaacaggatgacaaatcgactccaaggttcaactcttcccctcatggacactcctccctatgctgttctcatctcaaattttacctgtttttctcaaagtagctcaccagaggttggaaatgagatcaaaggtcagcgtggatctcaacattattattcatcagggaaatgcaaatcacaccagagatgagacgccatgacactcacactagcagggctaaaatttaaaagtctagctggggctgggcatggtggctcatgcctgtgatcccagcactttaggaggccaaggcaggaggattgcttgaagcccaggagctcaagaccagccccggcaccaaagcaaaactgtacctctacaagaattttttttttaattggctagatgtggtacacatgcctgtggtcacagctacttgggaggctgaggagggaggatcacttgagtccacgagttcgaggcttggtgaactgtgatcatgccactgcactccagtctgggcaacagagtgggacctcatctcttaaaaataaagaaaaggaaaggagtggaaaggagaggagaggaagaaacttgatatttcaattattttaaatttgttgagacttgttttgtggcctaacatatggtctatcctggagaatgttccatgtgctgaggaaaagaatgtatattctgtacagctgttggatggaatggtctgtaaatgtctgttaggtccatttggtctaaaccatagtttaaatccaatgcttatttgttaattttctatctgatgatatgttgaaggctgacagtgtgatgttgaagaccccaactgttactatattagagtctctctctttagatctaataatattcactttatatatctggatgatttggtgttgggtgcatatatatttacaattgttatatcttcttgctgagtcagtccctttatcgttatataatgaccttcatctctttgtagtttttgacttaaagtctgttttatctgatagaaatatagctactatcgctcactttgggttgatgaaatatctttttacatcccttcccttttagtctgtatgtgtatttataggtgaagtgagtttctaacaggcagtatatagttaggtcattaaaaaaaaatccattcagcgagtctgtatcttttaagtggggaatttcatccatttaccttcaggattattattggtaggtgagggtttattttataattttgttaattgttttctgattgttttgtatatcctttgtttctttgttcctttcttccttctcattatttatcattgaggttgggtggttttctgtagtgataaggtttgattcttttctttttctgttttggatatttgctttaccactgagttttatacttttgtgtgttttcatgatagtgattgtcattttttcactcacagatgtaggattcccttgagcatttcttgtaagatcagtctaatggtgatgatttccctcaatttttgcttgtctgggaaatattttttttttctctctcatttctgaagaatatgtagtatagtattcttggctgactttttttctttcaatactttgaatatattatctcattctctcctgccctgtaatgtttctgtgagaaatcttatgttagtctaatgaggattcccttatatgtgacttgatgattttctcttgccatttttagaattctttgtcttttacttgaaagtttgactataatgtgcctgtaagaggacattttggggttgaatctacttggggactttgagcttcttagatgtcagtgttcatatctctccccagacttgggaattttttagctcttatttcattaaataggttttctttgcctttctccttctcttctacttttgaaattcccataacatgaacatttgttcacttagtagtgttacatacttgtaggctgtcttcactctttttcattctcatttctttttctctctgatggggtaatttcaaataaccagttttcaagttcagaaattcttttttctgcttgatcaagtctgctgttgaagctatctattgtaatttttatttgattgcttgaaatcttcaggtatgggacttctatttggctctttttattatttctagttctttgttaaatttctagttcacataatgaattgttttcctgattttgttgaattatcttatctacctgtatctcactgagtctccttaagattattgttttgaataccttttctggcagttagttgatttcctcttcactggggcctgttagtagagagttattttgttcctttggtgatatgtttcctcgtctttttatgtttcttgtgtccccgtgttgatgtctatgtatctggtggaacaattgcttctttcaaaatttctagagtggctttcatacagaaaggcttttacctgcagtggattttagtgtgccatttgggaagggtatggtgactgcttctggatcagtgcagtggtatagtctctgcagcttcttcagccatgttcaacattagcaataactgtggacccgtcagcagcctaggttgtagaagttcgtgacactggtggggacagtgtaggctgttaacatcctcagttcaaaggctgttggggttcttctagtctcattttccccataatgggaagactagcaagggggattcctcagactctagggggctagttcagctctagggaagcaggcagttgagttgttcggcctgtaaggtgggatgtctgggctcagctactgctctgtttctctgggatgtagggcactgcgtcagctcagccagggcactgattccccttgcggtggtgtgtcgcttccgctcaggcctgagggacgggactgtcctgggtggcccaggcatttccctggatgcagagtgcttcttcagcttgggttccaggaggcatgactgctctgagcagccaaggtattgttttccctggaggccgtttatggctttagctccagcctgagggggcaagagcgggtagtggagtggccccacctttgcttggccccacagaggaggtgtaacagctgcctgcagcttggctgggggatgtggggccactgggctggggtggttgggcagcggcttagcttcaggggtgaaggggagctggggctgctaccccaggaacaagatacactccagcagtagttccagttccaagagggcaccgcgagggccacgggggcaggcacagtgtcgattccttctccggcgggagcacagtggtgtggcctccaggcagctcactccaccctgggcttcgtgcctgtgaggactgcaagggaccccaagggtgagggcggtgggtgtccacggtgttggtggggtctgctggggtcctcttgattacctcctcactgaagggaggtgttttcctgggttctagctgaccctggttaggggatggggtgccaggggcccggcatttccttctgttctttttgtgactgtcatgaatttctgggcttgccagggttgctgtcgctcctctgatgtgttctggagctctctgtggggactttcattaacatttcatggctcatggccgggtgcggtgactcatgcctgtaatcccagcacttttggaggctgaggcaggcagatcacctgaggtcaggagtttgagaccagccgggccaacatggtgaaaccccgtccctactaacaaaaaaaaaaaaacaaaaaaactagccaggcatggtggcaggcgcctgtaatcccagctacttgggaggctgaggcatgagaatcacttgaacctgggaggtacagactacagtaagctgagattacaccattgcactctggtctgggcaataagaatgaaacaccatctcaaaaaaacaaaaaaaaccatttcctggcttgtttactgttctgggtctttgtgagggacaccagtgctgggggcttccagtcagctgtttcactgatgtcactactccctacttttttcttttattccatatttttactgtaccttttctatgtttagacacacaaatgccactgtgttacactcgcctgcagtattcagtgcagtcacacgctgcacgggcgtttagatacacaaatgccatcacgttacagtcgcctgcggtattcagtgcagtcacactctgcacgggcgtttagatacacaagtgccaccgcattacagtggcctgcagtattcagtgcagtcccacgctgcatgggcgtttagctacacaaatgccaccgcgttacagtcgcctgcagtattcagtgcagtcacactctgcacgggcgtttagatacacaaatgccaccgcgttacagtcgcctgcagtattcagtgcagtcacatgctgcacaggcgtttcgctacacaaatgccaccgcgttacggttgcctgcggtattcagtgcagtcacacgctgcacgggcgtctggctacacaaatgccaccgcgttacagtcgcctgcagtattcagtgcagtcacacgctgcacgggtgtttagatacacaaatgccaccccgttacagtcgcctggagtattcagtgcagtcacactctgcacgggcgtttagctacacaaatgccacggcgtcacagtcgcctgcagtattcagtgcagtcacgctctgcacgggcatttagctacacaaatgccaccccgttacagtcgcctggagtattcagtgcagtcacactctgcacgggcgtttagctacacaaatgccatggcgtcacagtcgcctgcagtattcagtgcagtcacatgctgcacgggcgtttacacaaatgccaccgcgttacagttgcctgcagtattcagtgcagtcacacgctgcacgggcgtttagatacacaaatgccatcgtgttacaggcacctgcagtattcagtgcagtcacacgctgcacgggcgtttagatacacaagtggcactgcgttacagtcgcctgcggtattcagtgcagtcacacgctgcacgggtgtttagatacacaaatgccaccacgttacagtggcctgcagtattcagtgcagtcacatgctgcacgggcgtttagatacacaaatgccactgtgttcgtcgcctgcagtattcagtgcagtcacagactgtacaggtctgcagcccaggagtgatacgctgcacagcatggcctaggtgtctcacagattctaccgtcttggtgtgtgtgagtcacctctgatgttctcacaacagcaaaaccgcctaccgatgcatctctcagaaagtctccctgtcgttaagtgacgcatgactgtagcactcagcaacaaaaagggaggaagtactgacgtgtggacttcaggataattctgccaaacgaaagatgtcagatgaaaaagtctacacagtataatcccgtgtatccagaatcctacagcaaactcaccaacagtggcaggaagcagacctgcgcttgctgtagatgcaggacaggtaggagggaggaaggagaggacagagggaggagaggacagaggcaggagggaggggaggagggaggggagaagggaggtgaaagggaggagggaggggaaaatggaggagaaagggaggagggaggggaggagggatgagaaagggaggacagagggaggggaggagggaggggaggggaaggaagggggaggagagaggggagggagggaccacgagaggtgggagggaacgctgagagccacagagatgggttcgggtgtcgtgtcaaaactcaacacgctgtgcactttaaacacgggcagctttaactacatgtaattgtgtatcaattatgcctcactgaagctggaggaaaaaacagaagacaatggaaaagtcagagtaaagagaattcacttacgaaatgccaaccgtttaaaaatactccacaccgaacatgatgagccttttccattattaatgcctcagggagaaatcaaagtccgagccgcagctatccctgctattctcaaattaggagaaatcaccgtgtcctacttgacttcagggtgggtggcgggcgttcccgcggcagctgcagcctcgcagtgcctgcgtgagccgtgctccgctgcgccccgggcagctccgctccgacccacgcaccgcaggttgcttatatacttgtgcatgttagtttggactttgaggggtgcttgctttattttatgttaaggtgcagtttacaggcagtaaaatgcatccattgtaactttacagcacagtagagctcacacatatatgcgctcatgtgactgaccccctgagcaaaatatggagcatttccatctcccaggaagtcccctcctgccccttcccaggcaacggttccccaccctacccctaccagacactcacagcctgatttctagcttggcgattcgtttttcctttctcaagcgtcgaataaactggagtccctcggtgtgtcctgtgctatagaatctgactgttccactccatctgagctttgagacttggacagtgtttgtgcctaccacagtactctttccctttcccccgggttgtaccccaccccgtgcgtggaccctgatttgcgtggaccctgatttgcgtatccattctcctcttgctaaatgctggcactgtttccagttcggggtgtaatgcaccaggatcctgtgaagactcaagacttgttgtggacagatgcctccatctcttgggcacacacctagaaggagcattgctgggccatagggtggacatacgtttagctttattagaaattgtcaaaatgattttcaaagtgattgtaccgttcacactcccacagcaacatacagaacttcctactgctccccgtcctcgccggctgacgcttggtattgtcagtctttttaatgttcgtcatcctggtgggggtgtggtggtatctcactgtggtgttaatttgcattcctctgatgaatgctgattctgtgcacgtgttcaatgcttagaactgcccggataccctctcctgtgaagcacctgctcaaggcactgtcaatgtttagggctgcccggataccccctcctgtgaagcacctgctcaaggcactgtcaatgtttagggctgcccggataccccctcctgtgaagcacctgctcaaggcactgtcaatgtttagggctgcccggataccccctcctgtgaagcacctgctcaaggcatgtcaatgtttagggctgcccagataccccctcctgtgaagcacctgttcaaggcactgtcaatgtttagggctgcccggataccccctcctgtgaagcacctgctcaaggcactgtcaatgctttagggctgcccggataccccctcctgtgaagcacctgctcaaggcactgtcaatgctttagggctgcccggataccccctcctgtgaagcacctgctcaaggcactgtcaatgctttagggctgcctggataccccctcctgtgaagcacctgctcaaggcactgtcaatgctttaggactgcccggataccccctcctgtgaagcacctgctcaaggcacagtcaatgcttaggactgcccagataccctctcctgtgaagcacctgctcaaggcactgtcaatgctttagggctgcctggataccctctcctgtgaagcacctgctcaaggcactgtcaatgctttagggctgcccggataccccctcctgtgaagcacctgctcaaggcactgtcagcgatttagggctgcccggataccccctcctgtgaagcacctgctcaaggcactgtcagcgatttaggactgcccggataccccctcctgtgaagcacctgctcaaggcactgtcaatgctttaggactgcccggataccccctcttgtgaagcacctgctcaaggcactgtcaatgcttagggctgcccagataccctctcctgtgaagcacctgctcaaggcactatcaatgcttagggctgcccggataccctctcctgtgaagcacctgctcaaggcactgtcaataccttccttcggttgttgctttcttaattatttgtaattctttatctatctgtacagaaatcctctgccatataaatgtattacaaacatcttcaccagattctggcttgctctttcattgtcttgacggtgtctcttgatgaatttgtagtagatatagtattgtcatagatattcagagtttttatatttgctgtgtcagttttggtaggttgtgtttttcaaggaatttatctctttctttcttttttttttcttcttcttcttcttcttttttttttttttttgacagagtctcactctgtcacccaggctggagggcaatggcacaatctcagctcactgcaacctctgcctcctgggttcaagcaattctcttgcctcagcctcccgagtagctgggattacaggcatgcgccaccatgctccgctaattttgaatttttagtagagacgggttttcaccatgttggccaggctggtcttgaactcctgaccgcatgatcttcccgcttcgggcagatctcccaaagtgctgggattacaggtgtgagacaccgcgcctggccaaatgtgtctattccatcttgcatgaaattgcttttaatttttataaagtccaatttgtcagtgtttaattgtacatcggtgggatttttcagacctgcccaagaagtcctcaccagtgcctggtccagaggcatgtcctgtggtttcctgcagaagtgtcatcgtgtttgtgcctccttgtgccccatcccctttggatctatgacctgcttcaaattagctttcatgtgtagcacaaaagaagggccaacgtcccttattttccctattgacacccagttattgcagcagcactgagtgaaaatgcttcctctctccaggcaggtggccgagtgccggggggtcttcactatgaagttctgacgttaactgagggttttccatggatatccttcaccagactggggaacctcctgcttccagtttgttgacagtttttattgttaaccaattgaattttataaaatgttttttctgaatccattgagttgatcctatggtttttgttctttattttaccaatgacgttgattgatttttgaatgtcaaaacaatcttgcatttctgagatagattttcttggtcttggccttttaattttaatttaatttatttatttgtcttcgagacagagtcttgctctgtcactcaggctggagtgcaatggcaagatcatggcttactgcagccttgaactcccaggttcaagcgatcttcccactcatcctcccgagtagctgggactgcaggtacgtgccaccacacctggctaaattgtaaacatttttgtagagatgggatcttgctgtgttgcctaggctggtcttgaactcctgggctcaagcaatcctgccttggactcccaaagtgttgggacgacaggtgtgagccaccgcgcccggctaccttttcatatgtcactgagtctgatttgctggaaccgggtttaggatttccgatcacggtgctttctgtgggaacacgggcaacactgcatgcattcttcatccttaagggtttgctgcagctcatcggtgacttctcagggccaggagttttctctgtggaatctgtttaattacagattaaatttctgtaatggatatagtatggcagtagctatgtcagagtttttatatctgtgtgtcaattttgataggttatgcttttcaaagaatttgcgctttcatctggcatgaaattgctcatgagagcctcgtcttaaccttctggtgcccgtcagacccgccgggtgtctgcacccccctctcctgagaaagcagccgccattgctcatttttcccctctgtgttttctttatcaattttattgatcatttcagagaactgggtttcagtgttgttggctttctccattgcacgtctgctctctctcactgatgtccacgttttgcttttcccttccgtctgctctctttgggtttagtttctccatccagctttggctcctcgtgatggtccactgctcacctcgtccctctgtccatctgccggcctcactgcctcttcactccaaaaacgatacgagatcgccacagtgttctcctgagagtcgcaggctcttgtgtagagctggggagaagcagctggtgttagtgagcgagctcgtgctggaatggcaagtacgtcactgtgcagcactggggagagcagctcctgggcagcgggcccaagatgtgcatccctgtcaggagcagcctcggcgccaggacgacgcattgcccttctgagcaggaaggtagagcggccgtctgatgccctgaggttgccgtttcaggtgactgggggtgtgggggaatctgaggcttacagagcgtaggaagatgacattcgagttcttctcagacagttattagctggggacatttcacactaggagcatcggactttaaataaacctggaagtgactcaccctcagtctggcagaggctgcctcctaaaacctcctagggcaaaaatgagatgtaagtcagaagtcttcggaatcccaggaagctttggggtttgggtgcatggcttggtttttagggagtggtgctgtgcttctgtcccagacccctgggctctcccagaagggctccaaggaagagcagagagaaggcactttcttcctcactcattcgcacagattccctcggcaccagcccaagaccactttctatgggatgttggagaagaagacaccaggtccagctgcagggcctgcatgtccgttaggatctagagtgagaccaggtccagctgggggcctgcgtgtctgttaggatctagagtgagaccggtccagctgggtggtctgtgtgtctgttaggatctagagtgagaccaggtccagctggggggcccgtgtccgttaggatctagagtaagaccaggtccagctggggggcccgtgtgtctgttgggatctagagtgagaccagatctagctgggtggcctgcgtgtccgttgggatctagagtgagaccaggtccagctgggggcctgagtgtctgttaggatctagagtgagaccggtccagctgggtggtctgtgtgtctgttaggatctagagtgagaccaggtccagctggggggcccgtgtccgttaggatctagagtaagaccaggtccagctggggggcccgtgtgtctgttgggatctagagtgagaccagatctagctgggtggcctgcgtgtccgttgggatctagagtgagaccaggtccagctggggggcctgcgtgtctgttaggatctagagtgagaccaggtccaactggggggcctgcgtgtctgttaggatctacagagtgagaggaccagagctcctcctgtgtggacatgtttactctccacccgtgaggaaggaagaaccccaggaacactccacatcagcctggcaggccgagtgtaggagggtgccacgtcacacaaggtgcacaccatgcctgctgagatgggcagaccccgctgggcagaggcctggccagcacccccacctggggcttccctttcaactcagtttgaagtcctgcagtttccctggggctgggccaggatatctatgggtcagtcagcgtaactggtactgtacattatgcatgtaacaggcaagtgctttaggttagtggggtaaagtatgcaagagacaaagactagaaactgtgacagagagaaagggcaccagccacagcaggaggtttcacatgtgggatttgagtcctggaagggaaggaatgagagtatgagcagaagacatatttaaagaggtaacgactgatgattatgtaaaactgataccaaacccgagattccagaagccccacacacaccacgcaggataaactaaaaggaaacgtttcctcaccctcacctcgagggaatatgtggaaaaaatgaaagtgaagcaaaggacagttgagtgaggcattgagtcttctggccaaatgcccatccgcagagaccagctgagagccagacccacccagacacgtgttgtttgaaacctctgagttgaggggtggttcattatccagcaaaagccgactgataaaatccctgtttcatcccagcatccaaagtgaaagacaaaacaaaattttcttttgagacggagtcttgctgtgtcacccaggctggagtgcagtggcgtgatctgggctcactgcaagctccacctcccgggttcatgccattctcctgcctcagcctcctcagtagctgggactacaggcgcccgccaccacgcccggctaattttttgtatttttagtagaggcgggttttcaccatgttagccaggatggtctcgatctcctgactttgtgatctgcctgcctcagcctcccaaagtgctgggattacaggcgtgagccaccgtgcccagatgacaaaacaaaattttctaagaaaatatagttatgaccttgagatacacaaacgacaccaaacataaaggcaaagattgataaactggtaaagttagaattcagaccttttgttgtctagtggatgccattaagaaagtaaacaggggccgggcgtggtggctcacgcctgtaatcccagcactttgggaggccgaggcaggtggatcacctgaggttaggagttcgagaccagcctggccaacatggtgaaaccccgtctctactaaaatacaaacattagccgggtgtcttggtggatgcctataatcccagctacttgggaggctgaggcacaaaaatcacttgaacccgggaggcggaggctgcagtgagcccagatcatgccactgcacgccagcctgggcaacaaagcgagactttatctcaaaaatattaaaaaaaaagaaaagaaaagaaaagaaaagaaagtgaacagacacaccacggagtgcagggtggtgtttgcagtacgtgcagccgtggaggtcttacagaagtcctgcaaatccagaagggaaacagcacagtgggaaaggggacagacacatccaacttcaccaaagaggacattcaaatgggtgttaaaaagtcagaggatgaaaagcctcaggacccaccaaggaaacacaggttaaatctcagtcagatgccaccacgcggcagaatggctaaactatgacattgtcgatgaccatgtggagtgacaaggaccccagcagacggcgggcgggaatgtgaactggctctgcctccttggagggctgcctggccccccgtcgttaaagccaagcacgtccaccagtgccgatccagcaattcatgtcctaggtccataccatagacaggtgcacacgtgtgtgctcagacgtgggaaaacggggaacagccacaggctcaccagcagaggggagataaataaatagagatgacacagtaagcaggcgtgggaacgagcaggctgcagctgcactcggtgacggtgacgcaggtaaccactgcgtggggagcagaggaaacgacgcgtgggaaactcacccagatgaaaaacagagcagccccgggggggcagggcggggcgccaggagggctcgttgatgtccagagttctgcttctctgccaggcgttgtggtaacttgctagccatccccttctgctctgtgcacttctctgtatgtaacactgtaacgaaagttaaagaataaagagtgcagacaggccggccgcggtggctcacgcctgtaatcccagcactttggaaggccgaggcgggcggatcacgaggtcaggagatcaagaccatcctggctaacacggtgaaaccccgtctctactaaaaatacaaaaaattagctgggcgtggttgcaggcacctgtcgtcccagctactcgggaggctgaggcaggagaatggcgtgaacccgggaggcggagcttgcagtgagccgagatcgcaccactgcactccggcctgggggacagagcgagagtctgtctcaaaaaaaaaaaaaaatgcagacaaagacagcgccaccaccacctctacggctgcagaccttccacggatttgcgaaagccatggagcttcatggaacaccacagagcctcccccagtcaccccactcctgcactgtcccgaaatgaggacaatgacataacagagcctctcccccagtcaccccactcctgcactgtcccgaaatgaggacaatgcgtgtattccaaagttactcatactaacgggcaccactgcagaacacacgtgtctggcatttctcatgacacggtctgcacatcccccacctcccagcagccccagtcggcagaccccgtccccgctggcctccccagtcccttctgcccctcaggacttgcactgccgagtctgtcccaggccaggcggagggtggtgaggaccacatggcagctgtgccccagccaacagctgcctcgtcctggataagctggctgccctgcgcatactgaccgtatgcaccacaggctgcccaggagcccgcgtctgcctcacccacccagaggagccaagtctctgctgaaaatgccccctcgtcacctttcccacacaggatcccggtttcccaccagcccctccccgccgggctcccggccgagatccacgcctacccacagttttctgtgcatgccaggtcaccttaaaggatgctgagtgtcacgaggcttcaaagaagctgaatatttaaactatatttacatcacatttttaaatggttaagacgttattaaagttttggtatttagaatgagttttggtttctgtaagttatctacatgggtgcaaaatgccttgggcagaggtaaccagacccatgtcccacgaggcatcatcctggctgtgtggtcttgggcaggtcactccctcctgatgtctagtggcccgggggtctctgccctttcccatcagggcctgcagacatggctagtgagggtgggtcacggggggtgggttcctccaggaaggtggctgctggggacatggagctctggaccaccattggtgttcctagaatcattgctccatcagctcagcggaccagggggcggacatgcacacacatcctctgcacagggcatcagcccagggtgggctccccagcagggtctgcacgcactccactccccgctgcagccccagggccaggacgtggctttgtcctcctgtggattctgtgctcatctggggcaccccatatggatgagagatgagggcacttaatgaggcctcacagcagtgcagagaatgctgtgagaaccagccttggtgaccctgacccatgggaaggagccgcagggtctgccccactcttactcctcaccctcccacaagcagaagcctgcagcgatggcagaggcggtgcttctgcaggccctggggcagccactccctctgcccgggcctctcctcctttctccctgttcccctgctctgctctgcctctctgcttccccgcttttcttcactcttctccacaaggttttttcaagagcctgctggacacctggcgctgtggtttaaccagagccacagaggtgtgtgctggagatgggaaagtggaggaggaagcttttggacaggaaggttgccccgggccagctccctctgctgctcagcccggctgctcgctggacagccagcagccagcgctcaggtctgcttaaagcaccttccacagcctgcaatgccatttggttctcacagtcaccttgagaccaaggcaggacgtggatgtccttgtcttgcatgtagagagagaaacggaggcccagagacagtgggtgctgagcgaggcagctggaggtgctcatgtaggggagtgtccacccaggcaaacctgaaccctgacttgggagagtgtgcgtgcctgggaggagaaggacaaggagttttgaggtcccactcctggacttgggatatcactgacccagggatgtctataactcttaacaaaaacagtgcaattatacccacaaggtaagaattatcttatgtaggccaccgagcagactcaagtttcaaccccgaggtggtgtccgggccatcctgagggctcagcagcctcatctgaacagcctggccttccttctgtaacttctcccagaagcaggtcactcggagggggacagatttcccatcactcaggaaataaatgtctttgctttgtaaaatcactctcaagcaaagtatgtgctgggagcttaaagagaaaaaataagcttaagccaaatactttggtttccagtgacaggcagcaggaagtacaatgccctgcgtctcgaggaccaaggctttaatccgaagcctccccgcacggagataaaaactctcaggaaggatcagtcacttcatcctcgtcagaatcttccccagatttttctcccttgaacattttaatgcccagctttgtccaagatgagtgtcgtttgtcacggaaagtgatgcaacgtggcagggtgccagggcgccgggggttactggctctgcgaggagtcctgggggcctcacatcctgggaagggcgtcacaggacattacagggtgcagctgtaacactgagctgataatccaagggcttatggggacctgtcctagctttggactgattaaaattctgcttttaaagtgctttaaaggagcaggggcatctgggggtgtgtggcttattttgctgtttcttttgcttgtaagtaaaatgtggtaatgttcctggaacagtgctctcagcaaggtgatcaggtgaccaaggtgaccagatggctgggagtgggcaggggtccggggatgggagctgggtagcctcctctccttggaaaccaaggtcaccagcctcacagatgccactatccaatttcccttcagttcttggggactgtaagccgtgtggacgggaccccgcattacacatccttgtcttcccagggctcggtgcctgggaggtgcttcagggtctttgctgagtcagtgagaggtaacatcccttctcattccctcaagccccctcacaggctctccgtggaccaagggcttgtgaactgggaagcagggtacccatgtagttttggtgtttctcttcccaggcagggccccaggcacaaaagctgcccctgggctggcagcagaggctgcagcattgaccagcattgtagtgactcagcaaagctacttgtttcagttaccaggattgggtaaccagcagcccaacacctagtggcttagagcaatggcaatggtgtgtattcttgtctgtgttggttctgtgttggcagggctcagctggccggctcttgtgtgcactgaatggtgctggggaacctcggaggcttgttcacctgtgcctgggactggaactctaactgcccagtgggttcaccttgcccactgcctagacagagctgatttatcaagacaggggaattccaatggagaaagagtaacacacagagctgactgtgcaggagacccgagattcattattgctcaaatctgtctccccgagcattcagggatcggagtttttaaagataatttggcaagtaggggcttatgaagagaaaagtgctgattggtcaggctggagatggaatcatagggggtcaaagtgagtttttcttgctgtcttctgtttctgggtgtgatggcagaactggctgatccagatgaccggtcgggtagtgtcagctgatccatcaagtgcagggtctgcagaatacctcatgcactgatcttaggttttacgatagtgatgttatccccaggatcaatgtggggaggttcagactcttgcagccagaggctgcatgtccccctaaaccataatttctaatcttgtagctaatttgttagtcctgcaaaggcagactggtcccaaggcaagaagggggtcctctcaggaaagggctattatcaattttgtttcagagtcaaaccataaactaaattccttccctaggttagctcagcctacacccaggaatgaacaagagcagcttaaggactagaagcaagatgcagttggtggggtctgacctctttcactgtcatcatttcctcagttataatttttgcaaaggcggttttagaacaaccaggtcctgtggagccccatctacctccactaggtctccagcctggctcacttcaggctagtggatgttttacatggcagctcggggctccagagggattagcccctgagagacagagccaggaaaaagctgaattgtgttttctagcctgacctcagaagtcacagggcatcacccactccatcttctgaattgaaacggcccacaagtccagtcagggtcaaggggagcggacacaggccttgcctcttcgtgggccagtagcaagttctggaaggatgtatgggcaggacatctatgccaggaaacactgcatttttggaaaatacgagctgccacgttcctctaatgcctccatgcctcattttcctcatctctgccattgggagaatgatgaatactgatttgtaggtcagacagttgaacagtggcaagttcatacagttcaacctcatcagaattgcagcctttatatagcaattgccatgtgctgggcactaatgatttatgtctgtttgctcatcctctgaccagccccagagagggactgttattatccgtgttttccagttgggggcccgggcagggctttactttgtacgttcattgtgggaatgaatgaacaaaaacagcttctggatgaaactcctggccgactgcaccttcttctctgctgcttccgatttctcctcggcattttatgtattttttagctctttaaattttttttttcctaattcttcagcttgatgagtggtctttaaactttttttggtcatccagctcatcagtaaaaagcatctgagcaaatttccccaaatatatgtaatccaattaaaaatacactaaaaacatgcacaaacatgagaaaggatgagataaaatgaaataaacaatatttccaaatgtttcacttattattaaaaacattgtgtactcaatttaacattttactaatgtaaaattaataatcataattctatttagtgaattaatgtcggcttccttaaatgccttgatttagcacgctgtgaaactgcgatttcaagagtctggtctaacactagcttgtttgaatagttggctattatagctaaaaagaacacctcaaaaatttgcaaattcaaattaaaaagtggattgttggctgcatgtacagaatcataatattcttggtttcaccccatctatcaattatgcaccagcttttggtgaaattcagctggtaaatttccgtcttccctgataccaatccccgttcttgcaaactaattggaaagagttgcattcatatatttttaacaaatggcttcaagcctcactgaaacctttgatttagaatacttttttttaacaggttagagaaaacatttctatattttaaggatgagcaaatatgagagttgttacaggtgacaagtttaacaggttttggcaagaaggtcacatgacattcggaaaccgttccaaatgtctgcttccccagcagcctctcccagcacctgcctctaagggcagctactttttcagtgattgctaaaaacttcgtttttacctggaagggagagagattatgtcagctcttttgctttttgttaagactgccagcagcgccccgatctcaggcctgcctggagtgtgaggacagtgcctgtgcgggcatccacaggctggagagccagcagggtcaatgccttctcttccacgtgtggcgtgagctgcttgtctccaggctgtggggctgtgtgtgtgtgtctcttaaagccacttatcctacccaaaggattataaatcatgctgctataaagacacatgcacacgtatgtttattgcagcattattcacaatagcaaagacttggaaccaacccaaatgttcatcaatgatagactggattaagcaaatgtggcacatatacaccatggaatactatgcagccataaaaaaggatgagttcatgtcctttgtagggacatggatgaagctggaaaccatcattctgaacaaactatcacaaggacagaaaatcaaacactgcatgttctcactcataggtgggaattgaacaatgagatcacttggacacagggtggggaacattacacaccagggcctgttgtggggttgggggaggggggagggatagcattaggagatatacctaacgtaaatgacaagttaatgggtgcagcacaccaacatggcacacatatacatatgtaacaaacctgcacattgtgcacatgtactccggaacttaacttaaaaaaaaaagccacttatccacctggagggggatagttactgaaagcagagtgagacgtgtgtgcacccatgccatcaggctcatgtaacctggatctgagggattccgcccagagcctgtctggtctgacctgcctctcccacagaaggacaggaaatctgtggggccaacggggtgtctccacctggatcccacactcctgccctggggaaccacatcctgggtccccgaagcctggaacttcctgacaaacaatctaggagagctttcaagcccgtgtgggcccccaaggcagatctagctgccagcctgtggccaaagggtggctgtttccaaaacgtggcagacaggccaccgcaatgatgcttcacggccctagggtcaggtcgaggagtgacggcaagaatccccagtgtcctcctgcagatgaggctctgctgtctcagccccgtcttccccgcagtccccacacccctcactgcatggctcatctcatgccccaggcttattcaggcttcgcgctccaggccctgcatcccacggcttccttctgggttcagtttccttcttgctgggccataacgttcagtggtcactctgaaccgacactgaccccagctcccggctggatgacagttcagctgggcccgttctcaggggcccgctcccctcctgggcccgtgctcaggggccggctcccctcctggcggggaagatgtcgctctttctctggcatctgaggcactgctggcccctcctgtcgctctggtccttcctccttgacggcatttaccttttctctccagttaccttcaagctcctctccacttttgagattctgtgttttaatcttgccaaagcctcagggtgctgctttcctctttttctgtctttagtcattttctgttacaggctgaacggtgtcctccccctccccaaattcctgtgttgaagtcctaatccccagacctcagaatgggactgtatcaggagatgggtcattgatttaaaatggggatgttagggtgagcctaacccagtgtgactgatgcccttagaggaagaagggatgaggacacagacacgcaagagggatggccctgtgaggacacagggagaagatgccatctgcaagcccaggggagaggtcccagaggaactggccccatggcaccctgaccttggacttccagcctccgggacaatgtgcctcgtttaagccgccccgtctgtggcacttctcatggcagcccaagtagacaaaagcatttcacattctggagaattttgagtcaccatctccttgaacctcaccttcttccctctctcatcactgcctgctgtggttcatatacgtgtcccccagattcatgtgtgggaacccgagctagcgttaagaaatggggcttttggaggtcattaggccacgaggactctgccctcaggagtgacatttctttccttttcctttttggagacagagtctcattctgttgcccaggctggagtgcattggtgcaatcctggctcactgcagccttgacctcctgggttcaagtgatcctccgacctcagcctcctgaatagataggactacagcacgcaccaccatacctggctaatttaaaaatctttttttttttttttttttgagagatggagtttcattcttgttgcccaggctggtgtgcaatggcaagatctcagctcactgcaacctccgcctcctgggttcaagtgattcttctgcctcagcctcccgagtagctgggattacaggcatgcaccaccacaccctgctaattttgtatttttttagtagagacggggtttctccatgttggtcaggctggtcttgaactcctgacctcaggtgatctacccgcctcagcctcccaaagtgccgagattacaggtgtgagccactgtgcccagcctaattttaaaattttctgtagagacagggtcttactatgttgcccaggctgacagatgaggtgagtgccttataaaaaggctgaaaagaactggctgggccctttttgcccttgcatcatccaccacatgaggacgcagccacagggcaccgtcttggaagcagagacagtcctcaccagacaccaaacttgccggcaccttgatcttggacttcccacctccaaactgtgagccataaactcatgctgtttacagctcgcccagcctcaggtgttttgttacagcagcgggaactgacagatgctgcctctgctacatggctcattctgcttttcacatctcgtcctgacccagatcctgaatattttaaggcttttctctgctgttttctggataattttctcatctctgcattctagcttgtttgttctcatttctacggtgtctcatctggttgtcgcctttcctttaagttctgtgattatgttgttcatttctaaaccatttgtttattcgtgttgcccttgattttattattgttttgattctttagtgcatctttagctctggaggacacaaaacttacattcctcaacctgtgatgctttctcacgtgtttctctccctcgcggagcttggacatcgttagaacaagcccgtctttcaggttgcaggagtttccttccagggagacatgtatttgcttccttccaggcaccagagacttcaatcacattaaacaagttttcattttactttcttcgctgagatttccacacaccaagagtgagtggaaattcagatttcatattgtcccatgtcacacaagggtgagtggaaattcagatttcatgttgtcccatgtcacacaagggtgagtagaaattcagatttcatattgtcccatgtcacacaagggtgagtggaaattcagatttcatattgtcccgtgtcacacaagggtgagtggaaattcagatttcatattgtcccgtgtcacacaagggtgagtggaaattcagatttcatattgtcacatgtcacacaagggtgagtggaaattcagatttcacattgtcacatgtcacatattcatttatctctttggggagctttttttttttcattaatatctctaggcagagggaaaatgtctttgctgatattttagagcagagggtgaaacttacctagtctttttttcatggatgagatggcccttcagggtcttgaccttgccagtatccttagctgggtgcggtggtgcacacctgtggtcccagctactcaggaggctgaggtgggaggatcgcttgtgcccaggaggtcaaggctgcagtgagccatgattgtgccactgcactccagcccgggcagcagagcaagaccctgtctcaaaaaaataaagaaagaaaagaaatgtcatggatgagggcagagccctcgtggcctaatgaccatataggaggctgctgtccctgctgtggcagccagggccatctcttttaccccatctgaaataaaacccaaccctcacccctccagggcctgtttctgatccctcttccctgagggctgcttccagcatcagctcccatgacaactggggctgtgacatcttgcttagtttgggcactaatgaagttctctttctttttaaatcttttttattttactttaagttctgggatacatgtgcagaacatgcaggtttgttacataggtatacatgtgccatggtggtttgctgcacctactgacccatcctctagcttccctcccctcgccccccaccccccaacaggctccagtatgtgttgtttccctccctgtgtccatgtgttctcattgttcagctcccacttatgagtgagaacatgcagtgtttggttttctggtactgtgttagtttgctgagaatgatggcttccagcttcatccatgtccctgcaaaggacatgatctcattcctttttgtggctgcatagtattccatggtgtatatgtgccacattttcttcatccagtctatcattgataggcatttgggttggttccatgtcttcgctattgtaaatagtgctgcaataagcatatatgtgcaggtgtctttatagtagaatgatttgcaatcctttgggtatatatccagtaatgggattgctggatcaaatggtatttctggctctagatccttgaggaatcgccacactgtcttccacaatggttgaactaatttacattcccaccaacagtgtaaaagtttcctatttttccacagtctctccagcatctattgtttcttggctttttaataatccctgttctgactggtgtgagatggtatctcattgtggttttgattttcatttctctaatgatcagtgatgtagagcctttttttaaatatgtttgttggctgcataaatgtcttcttttgagaagtgtctgttcatatcctttacccactttttgatgggaggttttttttcttgtaaatttgtttaggttccttgtagagtctggatattagacctttgttagatgggtagattgcaaaaattttctcccattctgtaggttgcctgttcactctgatgatagtttcgtttgctttgcagaagctctttagtttaattccatcccatttgtcaactgtggcttttgttgcaattgcttttggcatttttctcatgaagtctttgcccattcctatgttctgaatggtattgcctaggttttcttctagggtttttatggtttggggttttacatttaactctttaatacatcttgaattaatttttgtataagatgtaaggaagggatccagtttcagttttctgcatatggctagctagttcttcctgcaccatttattgaataggaaatactttccccattgcttgtttttgtcaggtttgtcgaagatcagatggttgtagatgtgtggtgttatttctgaggtctctgttctgttacatttgtctatttgtctgttttggtataagtactatgctgttttggttactgtagccttatagtatagtttgaaatcaggtagtgggatgcctccagctttgttctttttgcttaggattgttttggctatatgggctcttctttggttccataagaaatttaggccgggcatggtggctcatgcatgtaatcccaacaatttgggaggccaaggtgatcggatcatttgaggtcaggagttcaagaccagcctggccaacatggtgaaagcccatctctactaaaaatacaaaaattagccgggtgtggtggcaggcacctgtagtcccagctacttgggaggctgaggcaggagaatcacttaagcctgggaggcagaggttgtggcgagccgagatcacgccactgcactccagtctaagtgacagagcaagactcgtctcaaaaaaaaaaaaaagaaagaaagaaaaaataaatttaaagtttttttttctaattctgtgaagaatatcaatggtagtttaatgggaatagcattgaatctataaattactttgggcagtatggccattttcatgatattgattcttcctatccatgagcatggaatgtttttccatttgtttgtgttctctcttatttccttgagcagtgggttgtagttctccttgaagaggtccttcacttcccttattagctgtattccttggtattttattttctttgtagcaattgtgagtgggagttcattcatgatttggctctctgtttgtctattattggtgtataggaatgcttgtgttttttgcactttgattttgtatcctgagactttgctgaagttgcttattagcttaaggagattttgggctgagacgatggggttttcgaaatttaaggagggaatcctccctaactcttttggtatcatcctgataccaaaacctggcagagacacaacaaaaaaaggaagcttcagggcaatatccctgatgaacatcgatgtgaaaatcttcaataaaatactggcaaaccaaatccagcagcacatcaaaaagcttatccaccatgatcaagtcggcttcatccctgggatgcaaggctggttcaacatatgcaaatcaataaacataatccatcacataaatataaccaaagacaaaaccacatgattatctcaaaagatgcagaaaaggcctttgataaaattcaacatccttcatgttaaaaactctcaataaactaggtatcgacagaacatatctcaaaataataagagctatttatgacagagccacagccaatatcatagtgaacgggcaaaagctggaagcattccctttgaaaactggcacaagacaaggatgccctctctcaccactcctattcaacatagtattggaagttctggccagggcaattggcaagagaaagacataaagcatattcaaataggaagagaggaagtcaaattgtctctgttttccgacaccatgattctgtatctttctttcttttgaacaaggctggatagccaacactttattatggtgtttgtatattgttagcctagctccctgagcaaacagaacctgaggcaaaagtcttgtgcctgtatttttctggggagtgcaatcccaggaaacaggagtgggaagaggggactgaggcaagaaagggaggaaggtgactctcagggaggtcactgtccactgccggctgacgtctggctccatgcttctcctcagggactgcgtgaagctcctgcatctctgatcagtggagcagggagaggagtgggacagggcggacatgccagttcctgttgctggcctcatttcacctcagactctgcgtgcaggtggcagacagcttccgatgcatctcccccatcacaggcaataagagagccctgagaaactaagcaagaggcctccagcgctatcggagctgggtgttgttgggtttgttgatacctgatgggtgggcccagaaacagctctccagggacccaggaactggccatggctgcaggagcaacagcagccacctagctgtgcacacaggagccgggagggatgttcgcaatggctgctcaagccggacagcaaggcgaccatgccagcctcagtgacctgaacggaacccgagacgtgcatgcaggagccgggagggacgttcgcaatcgctgctcaagcccgacagcaagacgaccatgccagcctcagtgacctgaacggaacccgagacagtccaccccgcaagtctcacccaggaacagatggccctggaactgatgacagcctaccctgcgtgtctcacctgggaatggatggccctggaaccgatgacagcccaccccacgtgtctcacccgggaatggacagccctggttcctgaggggtggtgcaagtgcaatttctccaggggttctctggttgtaatctactgaaaagccattaaaagggctgccgcatcaggctatggtccctgctgacaccgctaatcctggggccaaaccccatactatcctctccttgccctccccacatcctagactggcctccctcagctgagccttggtctgaactgttcgccccatggcacccaggcctcggtcatcctgcattggatgggccatggttgctgtgattacagctgccactcagtgcagatcccgaagtgccccagcaagctgtcagctgcaggcattcccctcgttggccccgtggtacagaagcaagcctcgatctccacggtgttcagagcctgcccactccccatctccatgttgttcagagtctggcccccccacccctatctccaccgttttcggagcctggcccccaccatctccatgatgttcgaagcctggccccctcatcctgatctccacagtgttctgagcctggcacccccccaaccccagagatctccatggtgttcagagcctggccctttcacaggtacggtaagtgcatgtgtggcttgcccactggcacgaggaggccaaagtggccaaatggtggtcatggcttctagtcttgcagcaacctgtgtacgctggcaggagcctcccctcaaccagggggtcaagggttccagtccaagagagcctcagacttcagccccaggaagcacagccatgcaagccgttcaccgtgtgtgctggggaggggccaaactggcttctgtccctggggtcctcagagctttgtatgcaaggtcccagggacacgggatcatttcctgaccatgggctcagcacggatcctacgtcctggagtgcagttcctgggccagacgggcccaggctttcttagagctgccgcccatgccgggccattcgcaagtctcccttcactggtaggctgactgcttctgggtgatgggtctgtggtaacgccagtgaattccatggtcaagtgcccgtcatcagaccttctttaccttgaagaggtctctgggtgcaaggcaggtgctttgtgaaatactgtcataaatgtttaatgcagcataaggagccacctacgaacttagtggcctgaaaccccaatgtgttatctctcactgtgctgggggccggcaggatcagcccggtgttctgttctcatgttggtccttcacatgggtgcagtcagatggcggccgaggctggaatcatccgaaagcttcttcactgggacgcggtcagatggcggccgaggctggaatcgtccgaaagcttcttcactgggatgcggtcagatggcggccgaggctggaatcgtccgaaagcttcttcactgggacgcggtcagatggtggccgaggctggaatcgtctgaaagcttcttcactgggacgctgtatctgctgcagggatctctccttctatgaagcccctccctttgtccagctggggtttcctcacggcatggtaaggccagcacagttggatcttatgtgctggctggcttttcccagagtgagcaatcccagagggaagaatttgaaggtcgaccccagaaatggcacagcattgcttctactatactgtattggccaaagaacccgcccagtttcaaagacaaggaacacaggtttcaccttttgatgggagggctgtcaaagaatttgtgagcgtctttaatcttctatgtcagcaagtcagtgaggttcaaattctgaaagccactgccaggggagctggaagacacagggagggtgggaagacagccccacaccccgagtgcgggtcaagttctgtaaggatgagttgccctctcctccaaggcgagaggagtttgaggtcattggtttgcctccacgaggcaggctggtctcccccaagagcagggccaggtcagaaacggtgctggtccgtgctctagcaagccagccttgatgaggagacccatgctgctgggcccaggccaagctttcagcctttctctctggtgtgctctgttcctggctcagttggctgatggcacaggctggctcgtggccactgtccggccatccagtcagcctggtggcctattgcgtcctctgcaggagatgcttcctggcgtgtgttaacgtaagacacaaatgcctccatgtgtggggccctcttttgtaggaccacctgcctgcctcttccctcacatttattatttccaatgttctgatcttgctccttttgggttgcttgcctaggagcctgtgaagatacttaccatgcggtgtttagcatttgttccacagaactgtggccttgagtgctgtgtgcacagctctgaccaggaggacttcctgcacccagaggggtcgtagggtggcagcatccatgcccagctggaaccaacatattgtgctgctgcatctgtgtttctggctagaaacgtggcagtgtttccgtcttcctctatcagttaccacagggaacccccgcgagagtgtggctataatcagacaaagagtaacggtgcatgggggcagacagcacagactccgcagcacccggaatgcacctgtgtcctctgaacctgctcaggctgtttcccttgtgcgctgggctgtccctgcagtcacccacctgtggctcggtgcactgatgatagccagctcacatggcagctctgctcacacagtcacttgaccgttgagttgcgtagtcagtctctgctaacgccaagcatgcccacagttgcttttgaaatggagggtggttctttggcactgaaggcacggccttgcttgataactccaagggatgttctgtgactgtcatatcagtattcaccagaagcactgccatgctgttctctccacaggaacttccagaaccattgactctgctgatcccacagaacaagtggctcaacagcttgcactgtggcctggacctgatgcggagccttcccttgctctgcgtcccactggaaacaggtactttctggctctgatactaggtgggttggaactcgttccagttgtggcatacgctatctctgaaatctagaggcccaccaaagccggtgcctccttcttaaaggaagaagattcaaggtgcaacaacttgccatttacatagaagacatgtcctggcatgccctgagtcactagatcccccaggtcttcactcctgggtaggtccctgagtcttcctgggggttggctcccagtgtcccgtgcacaggtatttcctagggcagataggacacccccgtgttctgctcaccaggcccagttaggatgcagcaatgcagcagcccccagccttcaaggccctgtggactacaccctcggtagtccgagagcagcgcggggctgggagcctgtgctgccgttccggccacgccggtgaagcgcttccggtccccgtgctggtgggactgaggagagcgccgtgctgccgttccggccacgccgtgaagcgcttccggtctccgtgctggtgggactgagaagaacgccgtgctgccgttccggccacgccggtgaagtgcttccggtccccgtgctggtgggactgagaagaacgccgtgctgccgttctggccacgccgtgaagcgcttccggtctccgtgctggtgggactgagaagaacgccgtgctgccgttccggccacaccagagaagtgcttccggtctccgtgctggtgggactgaggagaacgccgtgctgccgttccggccacgccgtgaagcgcttccggtccccgtgctggtgggactgagaagaacgccgtgctgccgttccggccacgccggtgaagtgcttccggtccccgtgctggtgggactgaggagaacgccgtgctgccgttctggccacgccgtgaagcgcttccggtctccgtgctggtgggactgagaagaacgccgtgctgccgttccggccacaccagagaagtgcttccggtctccgtgctggtgggactgaggagaacgccgtgctgccgttccggccacgccgtgaagcgcttccggtctccgtgctggtgggactgagaagaacgccgtgctgccgttccggccacgccggtgaagcgcttccggtctccctgctggtgggactgaggagagcgccgtgctgccgttccggccacgccgtgaagcgcttccggtctccgtgctggtgggactgagaagaacgccgtgctgccgttccggccacgccggtgaagtgcttccggtccccgtgctggtgggactgagaagaacgccgtgctgccgttctggccacgccgtgaagcgcttccggtctccgtgctggtgggactgagaagaacgccgtgctgccgttccggccacaccagagaagtgcttccggtctccgtgctggtgggactgaggagaacgccgtgctgccgttccggccacgccgtgaagcgcttccggtctccgtgctggtgggactgagaagaacgccgtgctgccgttccggccacgccggtgaagcgcttccggtctccctgctggtgggactgaggagagcgccgtgctgccgttccggccacgccgtgaagcgcttccggtccccgtgctggtgggactgagaagaacgccgtgctgccgttccggccacgccggtgaagcgcttccggtctccctgctggtgggactgaggagaacgccgtgctgccgttccggccacaccagagaagtgcttctggtccccgtgctggtggggattgaggagaacacgggtacagctccacagctacctttcccgggccagaggctgggcggatctgccccagggaagaccccacatctgctgcggcggctgcagtccggctccttgaggctggtttcctgtcccctccttcccactacgtccccttcccaccaaagcagtgacatcagctccatctagtttgaaaacagaggctggtttgagggctggagccaattagttatcacattaaaatgtgtgctatccctggggaacttcttgcaaggtttcacttcttttcttttttcaaagaatcgcactcttgttggcggggaccagcagaagacggagacgtttttccataaccggctgctgctgtgggagccgtgggctgggaatgcagccgagtctcctctggggcatgtgggtctccgaggctggagttctcagacggtgtgtgtgcatgtgtatgtgctgtggaatctgtgtggagtgtgtatgtgtgtgatgtgcttctgtgtgatgtatgtgtgtgtggtgtgtgtgtatgtatgtgtgaggtatgtgtgttgcgtgtgatatgtatatgtgtgatgtatgtttgtatgtgatgtatgtgtgtggtgtgtatgcatgtgtggtgtgtgtatgtgtgtgtgatgtgtatgtgtgtatggtgtacgtgtgtgtgtagtatatgtgtgtttgtgatatgtatttgtgtgatgtttgtgtatgatgtgtgtgatatgtatgtgatatgtatgtctgtgatgtgtttgtgtgtgatgtatgtatggtgtgtatatgtgtgatgtatgtgtggtatgtgatgtatgtgtgtgatgtgtggtgtgtatgtgtgtgatatgtgtgtggtgtgtgtactatgtgcgtatgtgtgtgctatgtgtatgtgtggtgtgtctaattcatagtatgtgtatgtgtgtgtggtgtgtgtgatatgtgtgtgatgtgtttgcatgtaatgtgtggggtatgtgatatacatgtatgtgtgtggcatgtgtgatatgtgcttgtgcatgtgtgcagtgtgtggtgtgtgtgtatgtgaatgtgtgtggcgtgtatgtgtgtggtaaacaggtgtatgtgtgtgatgtatgtacacatgatatgtgtatgtgtgtatgtgtattcatatgatgtgtgtggtgtgtgtgaatgtgtgtgatatgtgtgtgatgtgtatgtgtatatgtgtggtgcgtgtgcatgtgatatgtgtatatgtgtgatgtgtgtggtgtgcatatgtgtgatatgtgtaaatgtgtgatgtgtatttggtgtgtgcatgtggtgtgtgaatgtgtgtgatgcgtggtgtggtgtgtgaatgtgtgcgatgtgtatgtggtgtgtgtgatatgtgtatgtgtggggtggtgtgtgtgtgatgtgtgtgtggtgtgtgtgatgtgtgtgtgacgtctgtgtggtgtgtgtgtgatgtgtgtggtggtgtgtgtgtggtgtgtgtgatatgtgtatgtgtgtggtgtggtgtgtgtgatatgtgtatatgtgtgacgtgtgtgtggtgtggtgcatgtgatatgtgtatgtgatgtgtgtggtgtgtgtgtgatgtgtggtgtgtgtgtgtgtgatatgtgtatgtgtgtgatgtgtgtggtgtgtgatgtgtgtgtggtggcatgtgtgtggtgtgtgtgtgatgtgtgtggtggcgtgtgtggtgtgtgtgatgtgtgtgtggtgtggtgcatgtgatatgtgtatgtgtgtggtgtgtgtgtgatgtgtgtggtggtgtgtgtgtggtgtggtgcatgtgatatgtgtatgtgtgtgttgtgtgtggtgtgtgtgtgatgtgtgtgtggtgtgtgtgtgatgtgtgtggtctgtgtgatgtgtgtgtgatgtgtgtggtgtgtatgtgatgtgtgtgtgatgtgtgtgtggtggtgtgtgtgatgtgtgtggtgtgtgtgtggtgtgatgtgtgtgtggtggtgtgtgttgatgtgtgtgtggtggtgtgcgtggtgtgatgtgtgtgtgatatgtgtatgtgtgtgatgtgtgtagtggtgtggtgtggtgtgtgatatgtgtgtgtgatgtgtgtggtggtggtgtggtgtgtgatatgtgtatgtgtgtgatgtgtgtggttgtgtgtgtggcatgatgtgtgtgtggtgtggtgtgtgatatgtgtatgtatgtggtgtgtgtgtggtgtgtgtgtgatgtgtgtgtgcgatgtgcgtgtggtgtgcatttgtttgggggagggctgtgcatttctgctctcagcttggcccccagcagccagcagggactgctctcctctgggcccccacacacacgcagtggcgccccagctccacacctctttcctgcattcacgctgccccctcgcagccctcccaaagggccgccaggcacagggccatgggcatgctggtgaccgggcacagcttctccagcctggagccttcccgtccttggtgccgtcctgcacccgcagtctgtgccggggagctcagcgccctgccactccgtgtgtccagtagcccccggaccgcggtgctggcatgctgctgctccaccgtggttgtggtttggacaggactgctcacaggatcagcacagcatgctctgcctgccgcagagggatagcgacccgagagagaaggaacagcagtagcatcgtgcgtgggtgcagcagtggagcctgctggggtggagttgaagctgctctctggcaggccctctttgagcagctgacaagcaccctccgtgtagtgtccataccagcagagtgagtgccaccagctcctttgggggcctttaggccagaggtgtgcaagggtagacctgctgagctccaggagagagcctgtgtgggccagggctgctgacacggcagccacagagctggcggttagtggggcagctgtggcatgcggtggggccgaccccacagagcctccctagctggagcggcctggagcacccctggctctccacgatggccggccccgggactcgggagtggacaagctggagcgcccctggctctccacgatggccggccccgggactcgggagtggacaagctggagcgcccctggctctccacgatggccggccccgggactcgggagtggacaagctggagcgcccctggctctccacgatggccggccccgggactcgggagtggacaagctggagcgcccctggctctccacgatggccggccccgggactcgggagtggacaagctggagcgcccctggctctccacgatggccggccccgggactcgggagtggacaagctggagcgcccctggctctccacgatggccggccccgggactcgggagtggacaagcagactcctccacctccacctgtcctttcagtatttaagtggggacccgcaacgggcgggaaaggagagaccagtgctgacggagctagggacgccaacagatgtgagagccacgtctgtgcatttccaggaggccccatcatctggatgtcaggcagggaggaagggaacctgccgtggcaacccacctgctgggtgcatcctgttctctgggtgtgggacttctgactcgttcacctgggaggccagagggcagtacacacaagccctcctgaccttggctttgttcccagcctttgatcataggtttgcaaactcctaggctccccaggtaccataaacgcagagactggcctagtcctaggtggtccggggggtggcaattgggagagagggggctaaaaagaagcctctgtgagccagactcagttcctacgctccccatttgtgactgcagctacagtggacggttttgcccccttaatttacattttaatggtgtatttctcatgatttatgttcttgaattttcaacataaaacacttatcagaggtcgttggttgcagggagactaaatgcatgtgtatttattttccagtccagtaaagtaggaaggcaggtgcttgctaaactgtggcagaggtgggacaccaagaaatttggggtcctaagtaaataaaggcttggtgggctgggccaagcctgtcccaccactctctttctcttacgggaatactctgctgaacagctccacatgtttaaatccatctctacactctacagatattacagaggattactcatgtcaacagagaggtttcaggtggccctaataaaaaagcagcaaatggatataaagtcagtcttaaggtgttacttgtcggtaggcaaagcaagggcatctgcagcacgccccacctgtgctggtctgcccagcagctggtgggctttctttgtgggatttggaagctttgcatttccccctccagtctcttcctgagaacccagcagaggttggagggagggtgggagtgacgtggtggctcggcaccaaaacaaagagttgttctaattttagagtcttaatggtgcccgttgaggcacacagagaaggggcggaattctggctacctctgagctgaaagtcttcccaaaataaaaggaaggtctggatgacccgtgacgtttctggtgcatgtgtgaggtgtgtgcatttcttctttatgcaaaatataagaaaacttacatataaaaaagacaaggggggagtgctctgtgtgcagtgggggaggggcccagagcagaggaggactgctccccagggctgagaggcacctgagggcgccagggtggcagcaggagctctttcctccctctctgtctctgtctctctctttctctctctctctgtcagcagtgactcatggaccccagggcctgagatgtctatcccagttgtggagatgccagtctgaggggcaggccaaggattcatttgcttcttagcgtgaagagctgagaggacacaggacccatccctcgtccattagggatcatgagggcaactgggggagttctgggtgcttctccacagccagatattagagaccctgtgattattttctgctaaaaccagggcacactgccagagaagccgatgggctgctctatgtgagactccatccaattcacttccaggatgttttaccctttggggcagagccatctgcttccgtgcatggcttgaatccagcttaccaacattgataactttttgtgcctatgacagggacagatgtcactgccagcccctcatgtcggcagagcaggcactccccatcctctctgtgttcattctatgctggggaagggggctggacactgaaggagtggccgggatgcagaagcagtgcagagtgtgcttctgggagacacccggaaatcagggcagctgtggggcacagggcaagggttaccttgccagccccgaagaggagaggtggctgcagccccacctacaccagatgcctctctccgtccgtcctgggtgtctctttccatgctccactcatgcccactgcccttccagatcacatttccaggaagtgccctgttctgggtgtcaccatcacccaagctgggggcaccttgcaagccttctggccatggcttgctgtctctctgcagggtcccaggcccaggccaggggccagtcaggcagtgccgcatgtgggagctgcctcttcagcagggggacaggggagagggcatgaggggacccctgagctgcttcacctaatccaagtacaaacaccacagcaccaggtaagttaggtcaggtgcacttatgatgaggctgatataaaaaggaggaagcggaagtgggaactatttttagtttctgtatttccctaaccagggcagctggcacagggattggcttcttggtctctgatttccactccagcactttggccatcagaggatcctgtgtgagctcagctgagccagccccaacaccccccagcagcttttggtgggcagtggcagcggtccctgtgcagggcaggagcctggggaagcaggggctgggtgctgctggtccctggaagaaggacttctaccccagtgctttgtgaagaggacatgagggcaaagtactaatttgcccctaggtaacatgtgtgctggggttgtaggctgaggtaagggtatgaattctgcctgaggaaaggctcagcctggagtgtagtcctgctgaaggccagagaccacacactccacccagactccggatctccctccccagcagggggatggaggccctgccgctgggagtgctggtgttatgtggaagggctgggcttctccagggctcctgggaggcctaaacatcttgcaaggttttgacgttaattactattatgattgctttctgtgtgttactgttttccccacactttagccagctaatgtggagctacagaaggccctcgcccctacccctccagatgtcccagcccatgacaagcaggaaggccgggtgctgggagacttcctggggctggatctgacatcattccaagcagatgataacctgccttcccgatttccaaacccacagcaagacaccctggagttatttataaatgcgagcccctgggtgcacttctgacgggaccagcaccctgacggccatgagagggtggagacagcgcaccccgagctcagggaggcaggaaactctggacctggaggccgggcaccatgagggacacgctgcaggcccagctgctgccgcctggggcggggctgccctgcaggctccgggaaaacccagaaccaggccggatcagcgtgtgtcaagaggcggggcgtgagagatgagctgctttttttcttcacagggttggcaggaactgcaaataatagaaagtctttagggtctaacacgctgccctgaaaacactatcattactttcctaatgactaactgtgtctttcagccggcggggcaggcagctgaggccgcaggctcccgcagaggaccgggggaggctggcagcctgtaatctgggggcgctgacagtgctctgcccagaccctcgcgccagctccagctccagcacagcagccctgggtccctctggccccctgcccgcagagtccaggtgtggcagaggccgcccagtatcccttctcctcctccttttctaaaaacagagtctcacgatgtttcccatgcgggtctccaacgcctgggctcaagcgatccttctgcctcggcctcccaaagcgttgggattaaggggcgagccaccgcgcccggcccaccttcccttctggttcatttccagtaaggtcctgtccacagcgtccttcccagcattcccaccaggctgcaggccttggcctccctcccctccattctcattctccccgaaaccgccaagcgcgtccaaagcacgggttcgccaagcgccccccccgccccactccacattcccttccccgccgactcagcctccgtagctcgcggacggcccctcctcacgccagcccaggctttttttttttttttttcttctattttaaggttgtcttttaatgacacaagcgacatttggagacaaaaggacacatctcttcctgacccacctccaaccccagctgacggccgccctgagcctggcgtagacggcccggaacgttccctgcgtgggttccgtccatcccgaacccctgtccccgcgccggctccgggggtgctcggggggccgcgtggggtctgtgacgtcgcctcgaggctgcatcccggtgacccggcagcccctggcgctcgcgggaggcgggcgggcgcggaccccaggctttagggcgcgattcctgcagctggctgccggcccgaggttctggggtgtctgaggtctcgggcggggcgaggacgtttctccggctcagcccccccacctcctgccctgccgccccccacacccagctccccacggacgccaagaggcgcctcccaccccggcgaggacccgcggggaaacggggcccaggcgcggcgactgcggaggacgcgcctcggccccagcgccctggtcctcggggcgtccggctgcccttgcccgaggccggggcgggcgctcagcgccgcggaagaaacgcccgggcggggacgcacagcgaggcgggctccgcgggaagtaccgggaaaacggcgcggagcggaacagcccggagccagcccagagaaagggcggcctccccctgcagcccccggggcccagcaacgccccgccccaggccacggcacgcgaacgccgggcgggcggaggggacagggcggcgggaccagcgcggggcgggcagcgtctgggcacaggctcacgagccgctcggggcccctgcccgccgggcgctgcggccccagcctccgggccggggccaggcccacagagaacgggaagcgggcgctgcagggggaccttcggggttgcggcacggctgggaattcaacggccattcccgtcccgtcgggcccacccgcccgcccgccaaatccccgcccaccgcggatccgccccgtccaccaaggtctcgctcaccaacggcccgccccgcccaccacaggcctggcccgcccacgaaggctcgccccgcccatccacggccctgcccaccacaggcccgccccaagcctgggccccgccccagcaagggcactaatcccctaacccccgagccccgcccactgctcttgcccttctcccgcccgccccgacttaggcctctccccggcctggcctcccgtactcagccccgcccctgccccgcccccaccccaccccaaatgtgacctgcccctcccactgcccgtcccctccccgcttcacttcattaggcccccgccccgattcttgccccgcccgctcaatgtcccgcctacgaccccgcccactactagtgaccggcccgcccgttcgaggccccgcctcctccccgcccaatgctcggccccgccccgcgcgtcattgggccaggtccccgccccgcccccagccccacccccgcccctttgactggagttggctttttccagagaactttccgggctcggattggccgcgccggttgatgttccgccctttcattggcccgcggcgcccgctttcgcgagcctgcccttgggcgggggcggggccggcggcggcgcgcggcgctagattggttagcggcgcagaggggcgggcccgcgccgcgcgcagcgctcgggctggagcgcctgaagccgcgaccgccgcctcagccgcctcagccgcggtcgccgccgcttcggctgacttaggctccgccgccgcctcctcacccgcctcgccccgaccccgcccgggcctcccggcctctccccgccggcccgcgggctcgccgtccggcgcagggcaggtgagtgagcggtggcgggcggggtcggggtcgggcgcccttgcgggttacggggacccagtccccgacggaggccgagtgacggggcgaccccgggccgcggcaaacttcgcccgagccggggcgggcgggggtcccgggctgggtcgcgccgtccccgaccgccgccggcgcctgcggcggcccggggcagcgaggggactcgcgctccctcaaggtgcggtcgccaggcctggcccgcccgcctccgccccctccccaaattcggaagttgcggcgggaagccgagaacgtctcggatgtgggtcagaaaacgtctggactacttgaggcttcagtttcaaaacggcacaaatttcatctcttgattgagaagagatctggggaacaccccggagcggccgcggcggctggagggcggcggggcggggcgcggggcctcctccccctggacggccgccgggagagcgcggcctcacccctcggtgaccctgcggagagccgcgcgcgggcggtggggcgcgcgcaggtctctcttgttgctcgctgtgttttattttaattttgggggtggttagaacgtgtttcttattgtccccacacgtgttctaattggaagtcttgtttcgtgaaagagtttttttcttttttttgcctggtgatgttttccaattccctccgcgccactctgaagtatattactggcataagaaatttgaaagttaaccaaaagtcgggtcctaaatctcgtggctcggggttggttatcttccaccgtccttcagagcagcctggatttgcaggtcttgttagccctccatgtgagccagtagcactcttagttgttgagtgtttgtagagtgggattcgccagaaggaatcttgagcagcagggccttgcggagaggcctttagagattagactgggcaacttatagactccccccatttcaaaaatattcctctggcacaggccctcacatatccctctgaaattgaactcactttcaggggcaaactgttgccctttttcttttctttggactttctcagatgtggatcccaaaggagtgtgcaagggtgcttccctatttaagagaactaactcccagtcctcctcatattcaagaataattcatcatcttaaagcgtgtcagagatacctattttggccccaaaaggagtgtttgtagaacagtggcactctaaagggatcatttgcaagatctgaaaggacctaattgatcatcacacgacagaagcagaaatagttctggtgttttcaggcttggagatctgtcagaaaacatggggccttaaaactaacaagtgcagtgaccgactaactgatgtctcactttcgagcagtattttttttttttgcttgtatgtagatgctgttgtttatacagtgcaagttcattacgaatggtttagaacttacgtagcttcacgtattttcttagttgataatattataaggttttgaaaaagttttgatgataaatggggtctttataactgaaaaaaatggactctgtctagaattcagggctttttggctggcgttgccccaggtgctgctgattagtggtgcttttggacctcaaaacatcactttcccagatatctttataatgctcatggtgggggaaaacccacacagctttgtggttacgtttttagctatttatgcgaaaaagttcaacatatagttgtattttgctagctgttttgaagaagctattctttaccctattgttctgaggaggctgacagcatgctgcatttataaatttgaaaaagcctcacgagcttcttgaaccaatctagctattcagatttggattctgtgtatcagttttgattatttcagttcctgtgtcaatggcagaatcatttctatttttacaaaagtctcatggctttattgtaaaggtgaacactgaaacagattttagtagatgtaagttgtgtatcctctcagtgaagaaggcagtgctttgggccataaccaaggaaaatacttgctcatgtattggaattgccccaacttaaacattagaataaatgctgtagattttggggcagctctgatgtctcagctctcatccctggtggcagtgactcagaggcaaggcgtcatgggcccgctgtccatggtgctgaatccgtgtcacctgtttctctctctctctctctctctctctctctttctctctctctctctctctctctctgtgtgtgtgtgtgtgtgtgtgtgtgtgtgtgtgtgtgttttggggcagggggagctcaaacttcctttccagtgtactttaaaattaatttcagaattcatattattaaataaaatttgatcagggaaattatgttgaatgggagcgtgtcttgaaaacacgccattttattcttctttttaaggaggataattatgctacaacattcaatttcctttgcttagtcttcactgtctctctaggtgggagttttgttgcttgagtatgggcatcaagtaacaaatcactgacattaaatgaaaccctgttttcttaacaaccattcctttaagaaagtaccagtttgttttagtttgttttcttttgcttataacagaatacctgaaactaggtaatttacaaagcaaaggaatttatttcttatagtcatggaggctgagaagtctaaggtccgggggccaaagccaccagctccactcccatgacaacccactaatccattaacccatgaatggattaatccattttatgagggcagagccctcttgatccaatcacctcttaaaggtcccacctctcaatactgcttctgcattgaggattacatttcagcatgagttttggaggggatattctaatcatagcacctttattacaatatagacatacatctgtaggcatatatctatgtaggggcaacttgttcccaaaagggttgactctagcatgttttgcattctccagcatgttggttctcagcctttcctggcgatgggatctgtttatgtgttgggctactgagtggttgccaggcattcctgttgtgttagagctatatctactctcttttctctaatattgaggacatctttgtaaatcattttacatgaatcttttctttctcttgaggttaatgttgtcagttactttagaattgccccacaggttagcagtaaaaaaaaaacaaaaaagatagatgtcacttgtggtacagagatgtcacatggtagtaagttgtatatcaagctaagcagtggattgttgaggtgctttttgttatgatcatctgaactgattctgtggccccatttgttgtacacttaacccaggttactctttgacatctcttttgttgacagaaactcaggaaaacttccttctgcctcatccaagcttcagaaatactccctgattccctactgtttgccatttcctatgctatgatctgggaacccatgagggaatgagacagagttcttattgaagggctcacctgttcggattgaggaaggaacatgtaaacagataattacagggggccatactcagtgctgcagttgggatacatagaaaaccaggcaaacgtgttgaggggcaattcatttgggccgagaatcagggaaagctttagagaggaggtggcctttgggctggaccctagggcatgagttataattgggcatggattgggtatacatttattagaaaaagactggaaggttggaataaccggagtacagagtgtgtagtggtgtggaggctggaggtatggaagcatagtgaaggagttgggaccctgctggaagtgttaggggcattgtgaaatggttggaactttgttggagatggaggggggtgaaagtggaggaggagttgcatggtaggtagaataatggctcataaagctgtccacatcctaatctcaggactatgttatgttacatggcaggggagttaaggcagcagatggaatgaggttgctaatcagctgattttaaaatagggagattatcctggattatctgggtgggctctgagtaatcacaagggttcttaaaagtagaagagagaggcagaatagtcagtgtcagagtgatgtgaggtgagaaagactctagctgccattgctggctttgaagatggaagggtgcactagtcaaggaatgtgggaagcctttggaaaaggcaagaaaagggattctgtcccctagagacttgggaaaggaatgcagtccttggtttctagcccagtgagacccttgtctgacttgtgacctccaaaactgtaagataaatgtttgttgtattaaaacactaagtgtctggaagtttgttccaacagcagtaagaaaccgataaaaactgggtctcttcatttggcagtcttagctgacaaaattaaggagggaataacatgattagattggttttagaagataaaatgatggagctgccacttgggtataattcagcccagataagcatagttctattctctatttcacctcctaggtaagactggcatctgatattgtcttatttggcccaaatcccacttccagtctctctcagcagcttccacagcctataccactcccaattgccgtgtcccactgggtcatctttcctctgtgttggacacttgagaaagagtagaccaggtatgcacttaccactgagattgtggtgtcacaggctaggcccaattccaacctcatagctgttgtcagattactttccagaggtttgtttctttacatcctcactaatccttcgtagcttcagatgttttaattattgccaattgagtagatattaaatatcttactgttttaattagcatttccttggctagtgagtttgaggattttctacccatactttggccacttgagcttcttctaaaaattgtattcttatattgtttgtccacttattgtctggattatcctttttatagctttttagaagttctttacatattctggattctatttgtatcctgttctttatccttttaaatgtgctgttttgatgaacagatgttcagttttaatgtagtcagatttatcaatattttccttacagtttatggtgattgagtctgatttaagaaatcttgtgttactacaaggtaattgttttagtccattttcatgctgctgataaagacatacccgagactgggcaatttacaaaagaaagaggtttaatggacttacagttccacgtggctggggaggcctcacaatgatggcggaagttgaaaggtacatctcacatggcagcagacaagagaagagagagagcttgtgcagggaaactccccttttaaaactatctgatctcttgagacttactcactgtcacaagaacagcatgggaaagacctgcccccatgattcaattacctgcttactgggtccctcccataacacatgggaattcaagatgagatttggttggggacacagccaaaccatatcagtcataatatatcctcctctttaaaaaatatttaaatatttgctttttatagtctacttagaacttatttttgtgtggggtatgagatagagatccaattttaaattttttccaaattcataaccaattgtaccagtattgtttattgaatacagtcctttccccagtgatctgcagtggtacctctgaaacacatcagatttcacaaatgcatggatcagtttctggttgcttcatgtacctaatgataatttaatttctttctccctagttcttaaatcttttattgatctttttttgtcttttttcctttgcttggaccactagagaaagttgtatggagattgtggtaagattatccttatattgtttttcatttaaaagaaatgctgtgaaagactgaattatgaactttgttattttttttttggtagattcctttattaggttaaggatgatcactttactagtagtttaataaaagctttttaaaaaaatcatgaatagattttgaattttctcaaatggttttctatacagtgtacttatttagataattttaagctttttttaaaaatcgtgattgagatgagatattttattcttttaatttaagccatcattgatttcctgggagaaactgtgatgtactacattaaaaaatattaccaggccaggtgtggtggctcacacttgtaatcccaacactgagaggctgaggctggaggatcatttgagcgcaggagttcaaaaccagactgggaaatatagtgagaccccatttttacaaaaaaaaaaaccaaagaaaaaaaattagccgggcatggtggcatgcatctgtagtcctagctacttgggggactgaggttgaaggatcacttaaggctgggaggttgaagctgcaatgaactgtgatcatgcctctgcactccagcctaaattattggacccaatatgcaaatatttgggattttggcatatatattcataagaggtgttgaccagtgataatcttttcttgtatcacccttattcagatttggtatcaacatgatacttcatcatctttgtaataatttctttcttttttttagagacagggactctctctgtcacccaggctagagtgtagtggtgctatcatatcctactgcagccttgaagtcctggactcgagtgatcttcttgccttaacttcttgattagctgggattataggcgcaaaccaccatgctcagataatttttaaattttctttttgtagaataagggtcttgctatgttgcccaggctggtcttcaactcctgggctcaagaaattctcccatcttggcctcccaaatgtcatagttttggaaagggaggaatttttatttcctggaaatttggcaaaatcgattcttaaatggtctggatctggacctttttaaatatggagacacttgcagtagcaattaatcactttggaagggtcgctagtccattctgctcacatttcattggccagaaggagtcattctggccatacctaatttcagatggggcggggtggtagaatcttcctcatcctggaagcagggggcactcagtccaatagcacaaggaaacaaattttgtcaataatcttgagtgagcgtgggaacagattcttcccgtcaaggcttcaggtgagaacacagcctggcaaacactttgaatgcagctttgtgagaccctaagcagaggacccagttaagcctgcttaaattcgtgactcacagaaactgtgagatattaaatacatattggtttaaggtgttaaatttgtgatagcttgttatgtggcaatagaaaactgatgtactgatctctactgacctccccttagaagtggatttgggttgatgaagggtgttcgactctatttaaggtaaccagcttattatttattttcttttatacaacgttttttctatttataaaagtaatacaaatgttttgtgtagaaaaattggaagaaacagaaaattataaagtagaagatcaacattatccttaatcttagcacaaaaggatattcagtgttttttcctacttgtatttatgtatgatatgcatatcctaaagttgggattcattccaaagtatgttttttgaaccaatatttttccttttactagatcatgagcatttccttgtctcataatgtgttcttctaaaatatgatttcaaatggctgcatactattccaaagagtgtcccagtttattgaaccatttccctatagctagacatttatgttgctttaaaatactcatcatgataaataatgctttgaaaaatatcctatacaaaaatcattgtgcgtatcactgattgcttctaaatttctaaaggtagaactattagctcaaaggttgtaaatgtttttaagtccttttctacctaaccatctattttccaacatttctaaaaaataatgtaagacttagacatctgtttctgtaactcaccaggttgggataggacagaactattgatttttgagcatctaggttcctgttttcttaaccctgtttgcagagtggttttaaattattcattaaagtgcaatatggattctatttatagacgcatttgtgtatgagatcgctcctttaatgtttggggaaaagcctacaaattgctattatcacattcctatctttgtaaatccttttctactcctattcaccctttctttgttctcagtcaacccagtagagacactgagacaaataaagccttgtatccttatattattcagacagaatggctgttctgagccagcccttgttcttttcttcttgccatttattaattagttgatctcaaaaagatgagagatcagaatattaatgattaattcaaaaatatttttcctggtccctaaagtaatggatgtttgtgtagaaaatttctaaaggaaagattagcataaaaagcagaataaaatcttgataattctactacccacagatgactactatttaaacataacttgatcatgccagcttattcttaaaatatgtgactggattctgatggcttttttttttttttttgagacggagtcttgctctgttgcccaggttggagtgcagtggcatgatcttggctcactgcaacctcctctttccgggttcaagcagttcttcatgcctcaggctccagagtagctgggattacaggcacgttccaccacgcctggctaatttttgtattttttagtagagacggggtttcaccatgttggccaggctggtctcaaactcctgacctcaggtgatctgcccgcctcggcctcccacagtgctgggattataggtgtgagccaccacgcccgccctgatgactaatattttgtttggagtttttgcatttgtgcctgtgagtgaaattggcttgtaattttcctttcttatagctgttctcttttctaatctgagatgaatgcttaatttattaatttgcagcttttcctttttttctaatatgtgtgtttaaagtgatatattttcttgtaaacaatgcctcaactacatcatacaaagtttgatctaaggcattttcattattgtttgttatgctttctaatttccattatggttttttcttggattcctaggtaatttagaagaacgtttaaacatttctaaacatatgcatattttcttgttttattattcttcagcaaaattatattgcccaaagatcctgctttctatgattttaatcctttgaaatatgctgatttgccttgtagcccagaatatggtatgtaagttttctcagatattcctatgtgcctggaaataattgggttcaatgtactatactaaatattctgtttagctgagttggtaagcatgttacatctgctttcttactagttttttttggttgttatattcattactgagataattacacaatttcatgatgattatggatttgtcttattttttctagcagttctgccagtttttatgtataaatttttgagactgtgttgtcagggccacacagatttaaaactattaggtcttcctgatgaatggagactttaattattatgactggttctctttatatctagtaattaatatttgactttatgatatggtatgtctgatgttaatattaacatagccatgctagatgttttaggctcatatttacatactatctttgttttttatcttattctcaaccttactatagttttatgctttaggtatgtctcttgcaaagagtatagttagatatttttttcattcaatctgacagtctttgtcttttaattggaacagttcatttacattaaatgtaattactgatctatttgggtttaaatttacgattctattatgtatttgtcttgtcctacattttctgtgtttatttttctctcttttcttgcattattttaatctgataatgtgattttttgaaaaaatcattccatttttccaccttctccagtagtttggagattgtcctattttttgttcttttagtggttattgtgtaaattgttactaacttatccagataatgtagttatacctttatctttctcctagacagatcatagtttcttagaagacttgaactctatgacccccctccagattcatatgtgcttattattatgcactttaattctatatattctttttaaattcagtgaaataaattaatattaacggtattatattaacaatattggtattaatagtattattactggtaacattaacagtattgtattaacagtaatattaacagttagtgttcatttagatttattcagatacttgtcttttctttgctcttcattgctccctggcatttctaacttattctgggatgatttcatttctgcccaaagggccctctttagaaattcctttattgcaggtcagctgatgtagacattgcatttttttttttttttttttttgagatggagtcttgctctgttgccaggctggagtgcagtgacgtgatctcagctcactgcagcctccacctcccaggttcaagtgattctcctgcctcagccttcccagtagctgggactacaggtgcacgccaccacgcccagctaatttttgtatttttagtagagacaggatttcacgatgttggctaggatggtctcaatctcttgacctcgtgatctgcccaccttggcctcccaaagtgctgggattataggcgtgagccaccgcgcctggccaacattacatattttttaatctaaaaatatttttatttcatcttttaacaaattctttcaatttacttaaacgttttgtgggatataattcacacactataaaattcacccttttaaagtttacaattgagtgttttttggtgtattttcaaggtcatgcaactgtcattactacataattccagaacattttcttcactttaaaaagaaacctcatacacagtaactacctgtttcttcctccccaaaggccctggcaactgtgaatttagttttcatctctaagaatttgcccattatggaaatttcatatgagtggaattatatagtatgtggccttttgtgtctggcttctttcactttgcataacattttcaagctttatccatgttgtagtatgtatcagtatttcattcctttttgtggctaatattcagttgtatcgatatatggcattttgtttatccattcatcagtagatagacatttcggttgttttttggctgttatgaacaacatgctatgaacagtagtacgagttttcatatgaatatatgttttcacttgtcttggtttacactagaagtagaattgctgagtcatacagtaactctgtttaactttttgaataactgccaaattgtttcccgaagatgctgcaacatcttcgggaaacaatttggcaatgtaaaattccaaacaatttggaatgtaaaatgctgcaccattttatattcccatcagtaatttatgagggttccaatttctgcacattctattctctcaaacacttgttattttccagttttttgattatagccatgtagtgggtgggaagtagtagatattgtggtataaattagcatttctgtagtgactgatggtattcagccctttttatgtactgcttattggccctttttgttttttctttggagaaatggctatttaaatcctttgcccaagacttcatgactaaaacaccaaaagcaatggcaacagaagccaaaattaacaaatgggatctaattaaactaaagagcttctgcacagcaaaagaaactatcatcagagtgaacaggcaacctacagaatgggagaacgtctttacaatctatccatctgacaacggtctaatatccagagcctacaaagtacttaaacaaattttcaagaaaaaaaaacccatcaaaaagtgggcaaggcatatgaacagaagaagacatttatgcagccaacagacacatgaaaaaatgctcatcataactggtcattagagaaatgcaaatgaaaaccacaatgagataccgtctcacaccagtttgaatggcaatccttaaaaagtcaggaaacaacagatgctggagaggatgtggagaaataggaaagcttttacacttttggtgggagtataaattagttcaaccattgtggaagacagtgtggcgatttctcaaggatctagaaccagaaataccatttgacccagcaatcccattactgggtatatacccaaaggattataaatcattctactgtaaatacacatgcatgcatatgtttattgcagcattgttcacgatagcaaagacttggaacccacccaaatgcccatcagtgatagactggataaagaaaatgtggcacatatacaccatggaatactatgcagccataaaaaaggatgagttcatatcctttgcagggacatggatgaagctggaaaccatcattctcagcaaactaacacaagaacagaaaaccaaacaccgcatgttctcactcataagtgggagttgaacaatgagaacacatggacacagggaggggaacatcatacaccagggcctgtcggtggtgggggcctaggggagggatagcattaggagaactacctaatgtagatgacgggttgatgggtgcagcaaaccaccgtggcatgtgtatacctgtgtaacaaacctgcacgttctgcacatgtattccagaacttaaagtataataaattaaaaaaaatagctgaaaacaaaaacaaaaataaataaatcctttgcccatttaaaaactggattgtctttttatcgctgagttgtaagtgttctttatgtattctgtatgttagtcccttatcaggtatatgatttgcaaatattttccctccaactgtgagtagtcttttcattttcttttctttctttcttgagacagagttttgctctgtcgcctaggctagagtgcagtggcgcaacctcggctcactgcaagctctgcctcccaggttcatgccattctcctgcctcagcctcccgagtagctgggactacaggtgcccgccactgcgcctggctaattttttgtatttttagtagagacagggtttcaccgtgttagccaggatggtctcgctctcctgacctcgtgatccacctgcctcggcctcccaaagtgctgggattacaggtgtgaactaccgtgcccagcctcattttcttgatagtatcctttgatgcacaaatgatttttattttggtaatactgcatttatctatttttttcttttgttgcttgtgctttgtcatatttaagacattgcttaatcctaggtcacaaagatttacacctccgttttattctaagggttttatagttttagctctgaaatttaggtctttggtgcgttttgagttaatttttgtctatggtatgaaggaggagtttaacttcattcttctgcctgtggctgtctagtcctagtaccatttgttcaaaagactacctattgaatggccttagcacttctgtcaaaactcagttgaccataaaatatgggtttatttctgaactctcaactctattccatggacctatatgtctctctctatgccagcagcacacagtcttgattattgtagctttgtagtaagttttaagattggaaagtgtgagtccttcaactttggtctttttatttattttggttattcctggtcccttgcattttcatatgatttttaggtttggtttgtcactttctggaaaaaaaaaaaggcaggtagaattttgatggggattaattgaatctgtagataattcggggagtattgtcaggttaacaatattaagttttccaatccatgagcataggatttagtagctataatagttttttagtggattcctgaggattttttatatgcaagattatattatctgcagatatagatacttttaattctttgcttctaatctgcatgcctttttaaaatttttctcatgtaattgccctggttataagctttaacacaatgtttaattgttgtggcaagggtggacatcattgtttgttccttatcttagggggaaagcttttagcctctcaccagtaagtataggtagctgtgaatttttatagatgcccttaattaggttgaggaatttcccttctatccctattttgttgagtgttattatcatgaaagcgtgttgaatgttgtcagatgcttttcctgcatctatactgttatttttgtcctttattatattaatgtcatgtattacattgattcagttttgtatgttgagccaactttgaattccctagataaatcccacttgtcatggcatataatcctttttatatattggtggattcggttttgcaagtgttttgttgaggattttttgagatggagtctcactttgtcacccaggctggagtgcagaggtgcgatctcagctcactgcagcctctgcctcctggagtcaagcgactctcctgcctcagcctcctgagtagctgggatgacaggtgcgtgccaccatgcatggctaatttttgaatttttagttgagacagggtcttaccatgttggccaggctggtcttgaactcctgacctcaagtgctctgcctgccctggcatcccaaaatgctgggattacagacatgagccgccacacccagccttgttaaggatttttaagtttgtattcttaagacatgttaatctatagttttcttgtgatctctttgtctggttttggtattagggtaatactggccttatagaatgagttggcaagtgtccgtttctccttgtgaaggattggtgttcattctttaaatgtttgatagaatttaatagtgaagccatctgtttctaatttttccttgtgggaaatttttaaaatactgaatatctttacttgttttaggtttttttcagatgtactgttttttaagttttgatagtttctgtctttctaggaatttgtgaatttcacctaggttatctaatttattggccatcagttgttcataatatttctttatagtccttttatttctgtaaggttggtagttttctttctgattttagtaaattgagtcttccctctttttttcttggtcattctagataaaagtttgtcagtttcattggtctttttttaaaaaaaaaactttggtttcattgttgtttttctattttctgtttcatttttgctcgaatatttgtttttttctttcttccacttgcaaaggtttagttggctctttttctgatttcttaaggtagaacgttaggttattgatttgagatatttctcttttaacataggtgtttacagctataattttgtaagaactgcttttactgcctttcataagttttgatatgttgtgctttcttttactttcctttttttttttttttttttttttgagacagggccttggtctgacacccaggctaaagtgcattggtgccatcacaactcactgcagcctcaactttgagtctcctgagctcaaacgatcttcccacctcatcctcctgagtaggtgggactataggtgcattcccctacacctggctaattttttaattttttgtgagacacagtgtcttgtcatgttgctcagactggtctcgaactcctgggctcaagcagtcctcccgctatggcctcccaaagtgctgggattacaggcgttagccactgtgcctggcctcatttttaatgatctcaaagtattttctaatttcccttgtggtttctcccttgactctggttatttagcagtgtattgttaaatttccacaaacttttgaatttcttaaatttttatctgttactgatttctatttttttcccttgtggttggggaacatattttatattacttcaatcctttaaaattttgggacttattttcttggctaacacctggtctgttctagagaatgttccatgtgtatttgagaataatgtgttttctgctttttgaatggagaattctataaatgtctgctaggtctaattagtttattagtattgtttaaatcttttgttttctttctgattttctgtcttgcattccatcctgtattgaaaacggacttttgaagtttccaactgttactgttgaactgtctgattctcccttttttctcttaattttttgtttcatgcattctggggctttattttatatgtatacacacacacatatatatatgtatatatatgtatataattgttagagcttcttgatgaattgacctttttatagttataaaatattctttgtctgtaataacaatttttgtattaaagaccgtttttttctgatgttaatatagccattcaagctctcctttggttactgtttgcattgtatatatttttccatgcttttaacttatttgttcgttgtatttaagtgtctttcttgtatactacatataactgaatcattaaaaaatccatttagacaatttctgtgcttatattggaatgtttaatccatttacatttaatgcaattttgacaaggtgaaatttatgccagccattttgcttcttgttttctctatgcaatgtctttttgaattttctattactccattactgactttgtgttaaatagatattttcatttattttactattttttattttcttaggggttacttggggtcttactactggcaatttgtaacagtttagtttggattagtaccagtctaatttcactagtatacagaaactttgcttctgtatatctccattccctccttcttcctttgtgctgttattgtcatacaaagtacatcttgctgggcatggtggctcacacctgtaagcccaacactttgggaggccgacgcggacagatcacttgaggtcaggagttcgagaccagcctggccaacatggtgaaaccccgtctttactaaaaaataacaaaaattagccgggagtggtggtgcatgcctgtaattgcagctactagggaggctgagacaggagaattgcttgaacccaggaggcagaggttgcagtgagctgagattgcaccattgcactacagcctaggagacaaaggaaaactccatctcaaaaaaaatatatatatatatcttgtacattctgttcacttcaacacagatttgtaattactggcttttacagttatctgtacttgttacagttttgtttttaataatttttatttttcaatttaaaaatagatttagagggaacaagtacagttttattacatgcatatattgcatgctggtgaagtctaggcttttagtataagcatcacctgaatagtgtacattttaaccattaggtaatttctcattccccaccccctctcaccctcccacctttccaaatatctggtgtctattattacattctgtgtgtccatgtgtatatattacttagctcccatattctctcgtaagtgagaatatatggtatttgactttctgaattatttcacttaagataatggcctccatttctatccatgttgctgcaaaggacatgatttcatttttttatgtggcttagtagtattttttggtatatgtatactacattttctttatccagtcagctgttgatggatacttaggttggttccatatctttctatcatgaatagtgctgtaataacatacgagtacaagcatctttttgatacagtgatttcttttcctttgggtagatagccagtagtgggattgccagatcaaatggtagttctatttctatttttagttctttgagaaatctccacactgttttccatagagattgtactaatttacatttgtgttccttttctctgcatacttgccaacatctgtcattttttgactttttaataatagccattctgagtgttgtaagatgatatctcattgttgttttaatttgcatttctctggtgattagtgatgttgagcactttttcaaatgttttttggccatttgtatatcttttgaaaaatgcctgttcatgtttgcttacttttaatggggttatttttttttcttgtcgagttgtttgagtttcttgtagatcctggatattagtcttttgttggatgtatagtttgcagatatttctcccattctgcaggttgtctcttcactctgttgatgattatttttgctgtgtagacacttttaagttattattaagtcccatttgtctatttttgttattgttgatctcggttcactgcagcctctgcctcccaggctcaagtgatcctcctgtctcagcctctcaagtagttgggactacaggtatgtgccaatatacctaagttttttttttttttttttttttttttttttgtagagatggggtttcaccatattgcttaggctggtcctgagctcctgggctcaagcaatctgcctgccttcagccttccagagtgttgggattacaggtgtgagccactgtgcctggcctgcatttgcttttgaggtcttagtcatgaattatttgcctaggccaatgtccagaagagtttttctgtgggcggcaagccacccaggtgctgaggcaagagactgagggcacgagctgttccagtataataaaatatataaaataacaagagttatactagatatagatcatagatatgattatatgtaagtatcactaatcattagtttgtagtaattactctttattcaaataatataataatccccgctctacaatcataacctagaaaaaaccgggccatacagaaataggagctgaagggacatgatgagaagtgaccagaagacaagagtgtgagccctctgtcacacctggacagggccattagagggctccttggtctagcggtaatgccagtgtctgttgccaagtggactgtggtttagtggtagcgtcagtgccaaggaaaagcacccgctacttagcagactgggaaagggagtctccctttccctgggggagtttagaaaagactctactacaccacctcttgtggagggcctgacatcagtcaggcctgcccacagttatctggaggcttaaccgtctccctgtgatactgtgcttcagctgtcacactcctggtccgctttcatgttccatcctgtacacctggctctgccttctgacaacagtagcaaaattagtgaaagtactaaaagtctctgatatgcagaaataatggcgtaagctgtctcctctctctctctctctctctccaccttggctgccaaacagggaagggccccctgtccagtgaacacgtgacccacgtgaccttacctatcattgcagatggctcacactccttaccctgcccccttgtcttgtatccaataaataacagcgcagcctggcattcggggccactactggtgtccgcgtcttggtggtagtggtcgcccgggcccagctgttttttcttttatctctttgtcttgtgtctttatttctgccatctctcatctctgtgcatagggaggaaaacccaccgaccctgtggggctggtccctacatctttcctaggttttctggaatttttatagttttaggtcttacatttaagtttttaatccatcttgagttaatttttgtatatggtgagagataagggtctagttttcttctgcgtatggctatccagttttcctagcatcatttattgaatagagtgtttttccccagtgttttgttaacttttcaaagatcagttttctgttggtgtgtggctttatttctgattttctattctgtccccattgatctatgtgtctcttttaataccagtaccattctgttttggttactgtagccttgtagtataatttgaagtcaggtaatgtgatgcctctagccttgttctttttgatttggttatttgggctctttttggttccatatgaattgtatgattgttttccctaactctatgaaaaatgacattagtgttctgataggaattgcattgaatctgtggattgctttgggcagtatgttcattttattatactgatttttccaattcatgagcataggatgtttttctttttttttctttttttttttttaactgtttccaacttttattaaaaatacaaactcacatgtataataaactcagtaaaacccaaggagagtaaatacacacacgcataaatcacacctagaaatagcatagtgaaactgtttgaactaaaaataaagataaaatcctaaaagaagtcagaaagaaatcacatatatacagaataataataatataagaataataataatataaatcacaaacaacttctcaccaaaaataatagaagctagaaggcaattgtacaatatttttaatgtgatgaaagaaaataaactatcaacctagaactccatatttaacaaaaatatccttcaaaactgaaggtgaaataaaggcattttcagttcaattgaaagcaaagagaattaattgccagcaaatgtgcactatgagaagtgaaaaaaaaagttatccaagacaaagtaaaataataccatacagaaattcaaatatacaggatagaatatttcaaggggactaaaattataataacattagctaaatatattttcttaatttctttcagagacaaagagcttttattttttttaattttttttttcttttctttttttattatactttaagttttagggtacatgtgcacattgtgcaggttagttacatatgtatacatgtgccatgctggtgcgctgcacccactaactcgtcatctagcattaggtatatctcccaatgctatccctcccccctcccccccaccccaccacagtccccagagtgtgatattccctttcctgtgtccatgtgatctcattgttcaattcccacctatgagtgagaatatgcggtgtttggttttttgttcttgcgatagtttactgagaatgatgatttccaatttcatccgtgatgtttttcatatggttgtgtcatctacagtttctttcatcagcattttgcagttgtccttgtagaaatctttcaccttcatggttaaatgtattcctaggtattttattatttttttgtagctatcacaaatgaaattgagttctttatttggttttcagcttgattgttattggtgtttagaaatactactgctggggtacagtggttcatgcctataattccagcattttgggaggccaaggcaggaggatcacttgaggccaggagttcaagactgccctgggtaacatgatgagaccccatatctacaaaaaaataaaaataaaaaattagacaggcatggtggtacatgcctgtagtcctagctccttggggggctgaggtgggagaatcacttgagctcaggagtttgaggctacagtgagccttgatcacaccattgcaccccggcctatgtcacagagtgagatcccacctttaaaaaaaaagaagtgctactgatttttgttagttaattttgtatcccgaaactctactgaattcatttatcaaatccaggaatcatttataagagtctttagggctttctaggtacaagatcatatccaaacatacgaccttccaaggttgaaccaggaagaaattagtagaaatcctgaacagaccaataacaagtagcgagattgaatcagtaacaaaaattctcccaataaaacaaagcccaggaccaaatggaatcacagctgaattctaccagatgtgtaaagaagaaccggtactaatcctactgaaactattccaaaaaattgaggaggagggccttctccctaactcattctgtgaagctagtattaccccaaaaccaaagccaggcaaggatacaatgaaaaagaaaactctagagaccaatatcattgatgaaaatacatgcagaaatccccaacaaaatactagcaatcgaaatccaacaacgtatcaaaaagataatacaccacaattaagtgggttttgttccagggatgcaaggatggttcaacatatgtaaatcattaaatgtgatttaccacataaacagaattaaaaacaaaagccatatgattatctcaatagatgcagaaaaagcatttaataaaattcatcttttcatgaaaaaatcctcaataaactaggcatagaaggaacatacctcaaaataattcaaaccatttatgaaagacccacagccaacatcattctgaatgaggaaacgcctaaagcattccctctaagaattggaacaaaacaaggatgtccattttcaccacccttattcatcataatactggaagtcctagccagagcagtcaggtaagagaaagaaataaaaggcatccattttggaaaagaggaaataatactatttctgttcatcgatggtatgtagttatcttttaaatcaagtaggaggaaagggttacaaacaagttacatttatactgtcttttatatttaccattatagttatatctttactggtgctgtttattcattcacctggattttctgtactatctagtgtcctttaatttaagcctgaaggactccttttactgtttcttgttaggtaggttttctagtgacatattctctcagcttttatttgagagtgtcttaatttctcctttgtttttgcagaataatttttctggatatagaattcttgtttgacagtctttttctttcatgattttgcatatgttatcctacagccttctagtttctgtggtttctggtgagaaatccgctattgttcttattgagaattttttttttttttttagatggggtcttgctctgtctccagactggtgtgtaatagcgcgatctcagctcactgcaacctatgccttccgggttcaagtgatttgagaatccctttttaatgagttactctcttgctgctttcacaactctttgtcttttgatagtttgattataatatatttaggtgtggatgtctttgagtttatccttgaagcttattgaggttattgaatgtataattttttccatcagatctgggaggttttcaattataatcctttcatatattctttgtacccctttattttctctccttctgagagtttcattatgcatctgtttgttctttctttctttctttctttctttctttctttttctttctttcccccttcccttcccttccctttttctttctttctctcattcattcatttattcattcattccatttttgtagagatgagttctcactatgttgcccaggctggtcttgaactcccaaccttaagccatccttccacctcagcctcccaaaatgttgggattacaggtgtgagccaccatggttggccatctgttggtattcttggtggtttcccacagggctctgagtttcagctcattttttttttaacttctttactttctgttccttagattggttaatctcagttgatctatcatcaagcttactgattctcctgcctgttcaaatatgatgttgaaccactctaatgaatgtgctatttcaattatcatattttttaactccagaatttttatttggtttatttttataatttgtttctttattgatatctgcttggtgaaacaacactgccattctttaatcctttagacatggcttcctttagttattcaaatatgtttaaaataggttatgtaaagtccaacactggggcttccttgggaacagtttctattgattgctttttctttccctgtgtatgggccatattttcctgtttctttgtatgtgtcatagtacttttttgaaaactttatgttttaaataatataatgtggcaactctggaaatctgattctcctttcttccattttttttgttgttgttgttgctgctgcttgttatagtagtttctgttcatttgtttatgtagtgactttcctgaactaactctgtaaagtctgtattctttgtcatgtatcttcactgactctgtacttgaatagtttagtggtcagctaataattggacagacgtttccttaaatgcctggaatcagtgagtctcatagactttcccaagagaccccatgtgtgtaacctaccagtttataagtgccttagccttcattttctgattgtgcagagtctcaatgtcagctcagtgtgagagcttagggctatctcagggcactccagtttcttttctgggcattcgcacaaccttgagtaggtgcatagctctatgtatgcaccatggccttctagatttccagaaatatacagtttttaataccctgtgggcatctcattccccagattttccttttaagcttttgagttaatatattatttgttccaactgttgtccactgtctcaggtagtcacaaaattaaacaattgtctttgttttgaaagatacctctaaggaaaatacttttcagtgagctccgtgtcaggtcaaataaatgtaacctggcaagtggaacctgttagccataacaaataataagactttgaaggagctctaactctgttttgtcctcttctgttgctgccaggctgttggttttcactctgattgtaggtggttggttttcaagactactatagagctggggtagggttgggggtggggggatgggaatagggcaggttaaaatattacaaaatttatgttcttaggatatttaaccatttttctttaagaaatgttctccagattgtggcaagcctttggttaaatttctagatttctaaaaaaaaagttgatttggccaatttttggcatttaaaaattgcttttgggaaagaagggatttttggaagttcttactttactattttcactgatatcacactctcatgttattcttaaaagattttgtttccgtatattgaatttaatgttggcattattttttttcagcacattggagatatatttccacagcatctggcttttcttgttcctgttctgaagtaaatgtaactgctatcctctggaggtaatctattgccataaaggattttccaattatccttaggtttctgtggtttcactaagttccatgcatccctgcctgaggtatgttggcttcttgtatctatgacatgatgtctttcataagtctggaaaattcactgccattttcttcagctattgcttctgcatcatctcttttctttctttctgggactctgattaaatttgtgttagatttctcaccatatattctcatgctctctcttatatttctggattttggccactccactttactttgaatattttattttattttgacctagtttccagttcaccaattctttcttcagcagcactcaatctgctttaaaacccattcatgactttataacttttcagttttagattaaaaaaaattgaaactgttactttttgtagcttctaatttattgtttctgtttttaactatagcaactatagttttaaaattttagttaaacatatataacataaaatttgccattttaaagagtacattttatgtgtacaattctgtgacattaagtacattcatgttgttgtgcaaccatccatctccaatactcttttcatcttgcaaaactgaaactctttacacattaaacaataactccctctcccaaacccctggcaactaccattctactttctgtttctatgaatttgactactatagatacttcatataagtgaagtcataaatatttttccttttgtgactggcttatttaatgtagcgtactgtcttcagggttcatccatgttgtagcatgtgttggaatttcttccctttttaagactgaataatattccattgtgtgtgtgtgtgtgtgtatatatatatatatatatatatatatatatatatatatatcacattttgtttattcattctttgatggacacttgggttgcatctaccttttggctatagtgaataatgctgccatgaacttgggtatacaaatatttgagtcccttgcttttacttaatttgtgcctatacctagaaatggaattactagatcatatgctaatacttttcttaactttttgaggaatgactgtattgttttcatagcagctccgcattttacatttctaccagcaatgcacaagggttccagcttctccacatcctaaccaacacttattattattttgataatagctattctaatgggtatgaggtgacatctctttgtagttttgatttgcttttctctaatgattagtaatgttgaccattttttcttgtgcttattgcccagtagtatgtgttattgagagaaatgtctattcaggtcatttgccagatttttaattgggttgtttgggtttttgttattatacaagtgtagttgttaaaatagactatgttgggtaattccaacttcttgtctttgtagatatgtttttgttttctgtgatttctactctttcttcctcaatgggtcactaatttcttttaggctactagacatttgtatttgcagaatattttgaggaataatttgaaataatttgggatgattattgtttttagagaggttttcatcaggtactgctaaggttcttaaaggagcaagcttaatccagtgtagtcttaaggacaaccggatgagtagaacaaaggctcagtgcttgggagggctgacttgcttctgaggacttattctttaccttgaggggttagccctttgtggttccagtgcaaattgaggggtggtttctcagtatctgattcatgcttttactctgtatctcttccccccaatttttggatattttggttaactttcaatcccacaaatttcagggccttacatggtaaaatttacttcttgctcatgtaacagttcactgtggatgtacctcatcagtgatcaggtttcctctgtgtggtgattcggcccagctcctcacagtgggtggtcatgccatctgctacggaggtggcatccttatcctctaggcccagcttcctgtcagtccagctggcagatgagagagcacacatggagaaggcacacatgcttctcagccatgttggcccaaaagtgacgaggaccatgatctgtatctcttcatactttccactggcaagatccagtgatggggttctatctagatgcaggcatgaaatctgcagtgtgttgtttgtggttgacagttgcttcccagtttcaatgctgtcctgggaaaggggagcacagttctttatgaacagttagttatctgcctcagtccttcgccttggcacacccttctttcacgactgtcatgcactcatctctccagggacacaatccagagttgccccagttactgtgtcttgcacaaaggatggatttctagcattgtgtggtctttatcaaatccagttgtcgctcttgtcgtttgatgactgaactgacacacaggttgtctgctgttcacactgtacaatagtggagccaaaccaagccaattgcaatttttaaaacttccattttggaaggggagaatggaagataaacatcagttcttggtccacagttagagcaacatcccatgggcaagtattatgaaggcatctatcaatgttttctaagcaaaggccactagacactcacctgggaaccatggggtgttgtggtaagagggcgttagaaagaacctgttacaggatttgggctttggttaggtgatttgggggagggttcaagaaagtgggatggtatcagtaagtggggacaattttttgatgagtgtctgtaaatcttatctacaaggaggttagactggagtgaggttaaagctgtgattggtaaagaaacagtcatcacttatgtcagtggggagagggattttgacacaatcttgtttttgtcttcattcatcatggtcagtgtggcgtgtctgattctttcaccttctattctgggagtgggggcaggagaaactggtctgttgtcctccaggcctcctttctctgtccctccatctggctaggccttgggagtgctatggtttgaatatttgtcccctccaaaactcatgttgaagtttaatcttaagatgtgattggatcttgagggctgttcccttatgagtggattaatctattcatgggttaatggattaatggattaatgtgttatcaggggagtggaattggtgactttataaaaagaggaagagagacctgagctagcacactcagccccttattgtgtgatgccctgcaccacctcaggactctgcagagtccccaccagcaagaagatcctcactagattctcctccttgaccttagacttctcagcttctataactgtaagaagtaaattccttttccttataaattactgagtttttggtattctgttataagcaacagaaaatggactaaaatagggagtacatctttcttaggggttaggggctgcaagatcccacagcctgctttctgcttgtggaagtttggaggcctggggttgttttgacagtcactgactgttttaggctcatgtttctttggcaatgcagtttctccccaattctagtagcttctgatctatttgcgtctggtagtttcatatgccagtaactatagccaaagttcttttctagtcttccagctacttcatatttttgctttcttatgcatgtgtctctccctacccagggtatcttgaggcttaacataatacaatagtcatgggtgtgggtggagacacacctgtaatctcacctgtgtgtacagtttagccctctcttcattgtggagtcttaatgggtctttgctgctcagaacatgttcagtcgcatatcttactcttggggagcagagggatagcttttcccggattgtgaggcccatatttctggactgtctctagacgctttcctgtctctctgaagccagctagtttttgcctaagcccgtgtctttctgtgatgctcaactgagcaaaatgggtaacagtgacctagacagttggcattcctttttctcttccccctgagctggaggctgggtgtgtgcattatctgccttcaggtgatcaagggtaaacggtttcaccaaatgacatgcactgtataaaataggtcttctcattaccagctgtctgacagcagtttttattatggtgtcaccctcttcaaggagcccaattctgtgttaatttatttctgttgaaatatgtatttaataatagataatttgaaagaagaaaatttctgattagactctttctttgggaattaattatttgacccattttctacttccctccgcctctccactgtttggaaatgaagctgtacatttgtggcagttttctaagcagacgtcacaaaggtgtggtatggcagttcatcttttttgtttttaactgtattaacactggaaaatcaaaccttttctgatttcttacaagaagaaaaaataagacacttcagttttttttaaataaaatgagatataaagataaacatttttgatgaagagaagagttttgtatttaagttgcagtgatgtggataactcccagactcatccctctctctctgtagtatcctacaagaagtgcctgggccttcttgctttgaatctttttctgctttgaagacaggcagaagtgaatacctggcctgagcttctcctggggcccttgtggaagcaacatgagatgactgatgtgcaaacacattcaagagtgaagctctctgggtagagaagacattattatttcatcctgaagtactttcggaaggtaaatgatttatttagcacactaagttcatcctccgaggccatgtgtttctactataaggtacccaaaccagccttggaaacttacagcattgagagaggagaggtccagtgagcatgtctctctatgagttttacttagttgggtgctcttctatagagttctgagctctatttataattatccttaagcaaaaaagaaacaatccaaaatggtgacacagagagtccaatttacagttatctgtggtataacccagttaataatcaccataatacttagggtgctagactgctggtttgagtttttatggaattttgaagataatgagattttgtaatggaaccatgtttctcagtaatgtctttcactgaattatcttgacttgagtcaagacaagactcaagagtgactttattttaaatgtaaatccaccatgtaacttctgactaaccctgagccgataatacctccacaatgtttagttgatgttgttattctttatgtaggaagaccaattcattgtaagttttcttcaaaacaacccttgttgttgcagagatcataggctgtgatgactgtagcatcctacacatatcttccagagcactatactttcgttccgagatataaactctatgtctgggggtttgtgcagagatctacctgtttgcacctgcccaagaccatgattctgtctgtacattctccagtaaatcacccaataccaacaaactggatttctctgtctccttctttggtttcttggctcctttggtatttgaggattgctttgcatatatggccctttcacaggatacttcattaattatctaattaattaaacaaataataatgaagtaggttatgttgcttactaaaaaattgataaacttgaggtagccatacttctctaggtccacttaggaaactgaaagttttggtttaatagtctttttcaaagataagccatgtattattcatatgattagtgtggaggctgatattgagagaaggtgtagtagcttgcttttatatgagggcactggaatgagatgtgatccgtagattcccatagtggtctgtgacccatgctgggactggctcttctcctcggctcctggaacagggatccagccccacatgacttcccccttccctggctcagttggatatccacaggggcctctttctcttggacatgcccccacctagcacccaccatttctatttctcttgctctggatgccaccgcatcttcaggacacagcttctcctgagctgatagggatgccctggagcctgtggagtgcctctgttgtccagagttctgtggtaagatcccaagaaactttcccacctgaagaacagagcatagttgaggcgaggtcctgtgctttgcaggacttactgaggagactttgaccctggtcttccttctgtcatttccaaaagtgagtatgtgggggcagtggggtggaggtcagttcagtgagcacacatgatggggaggcagagccctctacctcttgggcagctgaggctgaggtcctgggctgggcctgtctgcttagtgtccttgatgcagggatagatcttatttaagtgaacatgtccctacagacaggcaggtaccacctagggaacccacaggcaaggcccaaatgctcttatttgtggtctacattaggcaaagaaccagattggactatgaagccggaagggagcttataacttcctgctgaacagaggataaaaatgtgacccactgagggcagtaatagctgatgagcaatcatggtggttcttactcctggttggctcagggctgggagcactaggcgtattgcagtgccagtgaaagcagagcggggcctcaaaccctcttttttcacctctttttttatgccatagcaaccacagtaagcctgtaaaatctcctgtgatttgtggagtctcgggctccctggaaacctttcagggggctcataaggtcaaaactgttttcataatgatatggagccattctttcctttttcactgtgtggacatttgcactgatggtgtaaaagcaatggcaggtgctttgacacaaatcaagaccatggcaccaaactctactgacagtcatcatactcttcactgtcacccactcgcatacaaaaagccaacaacatttaagaatgttcttgatgaagtcgtaggaatgattaattttattaaattttgacctgtgagtacatgtgtttttaatattctgtgagatggaattgaaagtttgcataatgtactttggcagatggaactacaatgattgtttgaggaaaagcacttgtgctttttttgggttaggagttaaactagctcctcttttaatggaacactgtttttactttaaagaacaactgacagacaaaccatggttattcagacttgtatttttggcataaaatgtctgaaaattgaactaactgagcctgttacttcaaaggaattaactgcctgtgtttgttgcaaatgataaaattgaattttcaggcaaaagttagaattgtggaaaacttgtatctgtcatggtgagcttgacagccttccaatataggcatcactcattttattgcactttacagaatttttttttttaaacaaatttaaggtttgtggcaaccctgcatcaagaaagtctttcagtgccatttttccaatagcattgcttacttcatgtctctgtgtcacattttagtacttctcatgatatttcaaacattttcattattattatatctgttatggttatctgtggtcagcgatctttgttactattgtaattattttgtggtgccatgaactttgcccatataagatgttctatgtgttctgactgctccacagccgaccattccatctgtctgcttctcttggggcctccgtatgccctgagacacaacaatattgaaattgggccaattaataacccttcagtggcctctacatgttcaggtgaaaggaagggttgcacatctctcattttatttattttttatttttatttttgagacagagtctcactctgttccccaggctggagtgcagtggtgtgatctcagttcactgcaacatctgcctcctgggttcaagctattcttgtgcctcagcctcccgagtagctgggattacagatgcatgccaccatgcctagctaattttttgtatttttagtagaggcggggtttcgctatgttggccaagctggtctccaactcttggcttcaagtgatccacctgcctcagcctcccaaagtgctgcgttagccactgcgcctggccacgtctcccactttaaatgaaaaactagaaatgattaagcttagtgaggaaggcatgttgaaatcccagacaggccgaaagctgggcctcttatgccaaacaaccaggttatgaatggaaaggaagttcttgaagtaaatgaaaaatgttactccagtgaacacacaaaggataagaaagcgaaacagccttgttgctgatatggagaaagtttgagtggtctggatagaaggtgcaactaaccacaacattgctttaagccaaagtccactccagagtaaggccctaatgtgcttcacttctatgaggctgaaatagatgaggaagatataggagaatttgaagctagtagaggttggttcatgggatttaagtaaagaagtctccgtaacataaaagtgcaaggtaaaacagcaagtgctgatgtagatgctgtaccttgttctccagaatatgtaagagaatagatgaaggtagctacactaaggaacagattttcaatgtagacaaaatagccttctattgaaagaccatgccatctaggacacccatagctagagaaaagaagtcaatgcctggcttcaaagctttaaaggacaggccgactcttttgttagggcctaatgcagctgatgactgtaagttgaagccagtgctcatttaccattccaaaactctaggatccttaagaatgatgctaaatctactcggcctgtgctctatacgggaacaacaaagcctagataacagcacatctttatagcatggtttactgaatcttttaagccttctcttgagacctgctgcccagaaaaaggttcctctcaaaatattactgcttatgaacaatgcacccggtcacccaagagctctgatagagatgtgcaaggagatgaatgctgttttcatgcccattaacaccgcatccattctgcaagccatgggtcaaggagtaattttgactttcaagtgttactacttaagaaacacattttgtggctgagcatggtggctcacgcctgtaatcccagcactttgggaggcagaggtgggaggatcacaaggtcaggagatcgagaccagcctggctaacacggtgaaaccccgtctctactaaaaatacaaaaaaattactcgggaggctgaggcaggagaatggcatgaacctgggaggcggagcttgcagtgagccgagatagtgccactgcactctagcctgggcgacagagcgagactccatctcaaaaaaaaaaaaaaataataataataaaataaataaatacattttgtaaggctatagctgccacagatggtgattcctctgatggatctgggcaaagtaaattgaaaaccttctgagaggcattcaccgttctcgatgtcattaagaacatttgtgactcatgggaggaggtcacaacatcaacaaagtttggaagaagttgattccaaccctcatggatgcctttaaggggttccatcctttattgaaggaagtcactgcagatgtggtgaaaacagcaagagaactagaattagaagtggagcctgaagatgtgactgaattgctgcaatctcatgatcaaacttgaatggataaggagttgcttcttatggatgagaagcagaaaagtggttacttgagatgcagtctactagtagtgaagatgctgtgaacattgttgagatgacaacaaagggtttagaatattaatattacataagcttagttgctaaagcagcagcagggtttgagaggactgactccaattttgaaagaagttataccatggtgaaaggctatcaaacagcatcacatgctacagagaaaactttcgtgaaaggaagagtccattgatgtggcaaactttagtgttgtcttattttcagaaattgccacagccaccccagcctttagcaactatcagcctgattgatcagcagccaccaacatccaggcaagaccccaccactaaaaagatgatgactcactgaaggctcagatgattgttagcattttttttttttttttttttttagcaataaactatttttacttttttctttgttgtttttttgagatggagtctctgttgcccaggctggagtgtgcagtggtgcaatctcggctcactgcaacctctgcctcctgggttcaagcgattgtcctgcctcagcctcctgagtagctgggattataggtgtgcaccaccacgcccagctaatttttatatttttagtagagacgaggtttcgccatgttggccaggctggtctcgaacttctgacctcaagtggtccactcacctcagcttcccaaagtgctgggattacaggtgtgagccaccacgcctggccgcaataaagtatttttaaaattaaggtatgtacattgtttttagacataatgctattgcacacaatagactacagtagggtgtaaacataaattttatatgccttgggaaatgaaaaaattcatgtgacttgctttaatttaatatttgctttattatggtacctgaaaaatgaacccacagtatttctgagatatacctatattctaatatgtgtcttttatcacatttgcaaatatgtctcccatcctgtatctgctcttaatcctcttaatcagggcttttgcagataaaatatttttaattttgatgaagtgcatattatcagttcttacgaatcatgtttggtgttaagtttagccgtagatcacaaagattccttctattctgtctaagttttatagttttacattttatatttgagtgtgcaatttattttcagttaatttttctgtaaggtgtgagacttagattgaagttcatgcttttgcctatggatatttgattgctcttacatcattttttggaaagtctatcctctcaccagttgcctttgcaattctccaaatcatttgagaaactcatttctccaaaatcatttgggcacctttctgtggttctctatagtattttccatactggatttcttatatcgttccattgattgccatgtccatccttctgacaatgtcacataatcttggctactgtggctgtaagtcttgaaattgggtagagatttctctcatttgctcttgtaaaaaatgtttcagttattctagtttctttgcttttccatatttattttagaaccaacttctctatatatacacacatttttgatgaaattttaatgaaagttgcattaaatttgtataataatttagggaaaattgatatctctactatgctgaatgttcttatccatgaacttagtatgtctccatttatttagatatatttgttttaattcttcagtgttttgtagttgtcagcataaaatttctacacgttttggtggatttacacctaagtgtgtgtttattttcagggattttattatatttttaatttgagtatccatgtgttcattgataatatacaaaaataaaatgaatttttgtgtgtttatctttagttttatgacattgctgaactcattgattctagaagcttttggtaggttccttgggatttttttagataatcaagtcacctgcagatttggacaatttagtttatcttttctgatctctaggtcttttatttatttccttattacacaggttagaatttccagcactacgtggaatataagtgagcaaccttgtcctgttcccgatgttaggggaaaatcattcactattttgctgtgaagtatgatgctagctgtagatttgtgtagatgatatttatcaagttaaatacctttttctctgtcctagtctatttgtactgctataacaaaatacctggacttagtaatttataaacaatagacatttacttcccatggtttgggaatctgggaagctcaagatcaaggtcccagcatttggtatttggtgagagccttcttgctgcattctcacatggcagaaggggcaaatgctgcgtccttacatggcggaaggcagagggcaaaaaagggcctaagctagtccccgccaccccttttataagacgttatttattagggcagagccctgatgagttaatcacttcccagaaggtgccactcttaacaccactacaatggggatttagtttcagcacattaattttaggggacattcagaccatagcagcctctatttctagttttctgagaggttttatcacaaatagatgttggattttgtcaaatgcttcactacattgagcaataggattacttgatttttcttctttagcctgtaaatatgaagtactacattaattgattttcaaatactggagcagttttccattcctggagtaaaccccatttggtcatgctgcacaattctttgtacagaggctccctgacttaggatggggttacatcctgataaacccattgtatattgaaagtgtcgtaagtgaaaaatgcaacctggtctttggtcaaggaatcactcttgctaaaagtctgaaacctcatggtttcatatgactttttcaccatcataaaataaaaaagtcataagctgaaccattgtaagtcagggaattgctgaattccattttttaatactttgctaaggatattttgcatctatattcatgagggatgtaggtctgtatttttatttcttttggtaatgtcttttttggttttggtgtcagggtaatactaactttgtaagatgaattcagaaatttttcctcttcttttgtcttctggaaaatatgataaccaaaataaaaaactcaatggatggatggagagatcagaggaaggaatcagtgaaatgaaagatagaacattagaaattatccaatttttatatccaattattatatctataataacagatataatatagaccaaaaaagaacaaaggctcagaaatctggggggctatgaaaaaaattgctaagaatcatgtcatcacatttcaagaagaagaggagaagaagagcaaagctgaaaaaagtacttgaagaaacaatagctaaaaatttctgtgggtttgtctggagtgagcagttattttgttaaagttttctgtcttgctaggctgtcccttttctggtcaaaactaggtaaaacatgcttttgttggggcttcttccccctcccacccaacatccattcatatttatggtactatgaacacccagggaattcactatcatgtcattccttgggtcgcacggtctctagctggtctgccttcctctagtcatctttcagagtctatgattgttttatatataatgtccagtgttttcaattatgcttagtgggaggaatacagaaagcacatctactccatcttcccagaagtggaagttaacctacagaaagatcattctgactagtatgggactgactgcctgtaaccaggcaaaaactgaagcaagaagacctattaaaaactgagtgcacttatccacgtgaagaataatggtggcatatggccatagagtgatagcagtggaggtggtaagaagtagctggaccctgaacataatgtgaagaaagtacaggtagaatttgctgatatatgaggtatgtagtatgagaggaagaaaagagtcccagggttttagactgacaagcaggagaatggcgtgccatcagttgatatagagaaagatgaggaggagcaggctagggggaacagaaggatgattgtattatgtttttcaaatgggaagtgaaacatgccaattatacagccaaatcaaggtgttaggtaggcatatggatagcagcctgaagtttagaggatggagtccaggctgaaaagataaactggagattcatcagcccataggagctatttagagtcatgaaaccaggtgaaatcactaaggaagtaagctagagaagagtaccaagaacctaaccctgggttttccagtgaggcctgggataggggaaggaatccgaaacaaaacaaaacaaaacaaaaatactgcgtgtcatcaatcagagagctaggagaaaagaggatagaggtatatcctagaagccaagtaaaaaaagtatttcaagaaggagggaacaatgacctggattcagatcctgctgataggtcaaataagataggattgagacttgatcactggatttagcaaagtcaaagaggcctttggtgatccccacaaagctgtttttggtggagtaatagggcaaaatccacattgcagtaggttaaagaaagaataggaaggaattgcagataataaatgtagatttaggtgagtcactaagttcacctataattgaggataatggtgatgcctttccttccttaaattaatctttacggaggacttactttgggttagacacagcaaagtaaggagatctaaggtgaaagagacttttagggttataggaagagatataaaaataacaagtacattggattgtaacaggagatcatagacaaatatgtataatactgcaatggaatggcagattctctacaaagtcaggatagagttttccagggatgtgacactataccttgaagaagtttatcacaggaatcaatacacgtgagtgttttaaaaataaggtgttgctgcgcctgtaatcccagcactttgggagactaaggcgggcagatcacgaggtcaggagatcgagaccatcctggctaacacgatgaaacccggtctctactaaaaatacaaaaaatgatcccggcgtggtagcaggcgcctgtagttccagctactcgggaggctgaggcaggagaatggcatgaacccgggaggcagagcttgcagtgagccgagatcgtgccactgcactccagcctgggcgacagcgagactccatctcaaaaaaaaaataaaaataaaaaataaggtgttgctgggcatggtggctcatacctgtaatctcagtgctttgggaggccatgacaggaggattgcttgagaccagcctggtcaacatagaacccatctctacaaaaaaaaaaaaaaaaaaaaaaaattgccgggtgtggtggcacatgcctgtagtcccagcttctctggaggttgaggcagaaggatcacttaagctcagaagttcaaggcagccatgagctatgatcacaccacttcactctagcctgggtgacagtgagaccctgtctctaaaaacaaaagcaaacaaacaaaaaagtaataaggtcctgtggaagtatatgttaaatcaagagggtattaagtatgaaatttatgcggttctgatggtgccattggtaaggaaggacctgagattaactcataagagagatagagaattactgattttactgcttgatatagtgtggatatttgtcctttccaaatctcatattgaaatgtgatccccagtgttggaggtggggcctagtgggaggtgtttggatcatgggggaagatccctcatcaatggcttggtgtcctccctgcagtaatgagagagttcttactctgttaattcacatgataactgtttaaagaagagcatggaacttccctgctccttgctttctttctgtttatgtgacatgcctgttcctctttcaccttccaccatgagtaaaagcttcctgaggcctcagcagaggccaagcagatgctggtgccatgattgtacagcccgcagagccatgagccaaaacacctcttttcttcataatcttcataaattgcccagtctcagatattcctttatagcaacgcaaaacagactaacacagtgctcataaaatgtctgttaaaccagagaaatatgaatgggcaatgctacagtttaattttccattcttagtgtttatagtgatttacatgaggtttgataaatgttaagctatggaataaaacacacagaagtctatcttccccacaccctgccccctgccactctgctacagaaaaccatcaatgtatatccctgtgactgtctaccatatcagcttgttggcttgaacattttgagtattacaaaccatcatcctaacattagatgcaaagaccaaatgttacacttcctttaaaaacaaagagaggtgaaataagccagtcataaaaggacaaataatatatgattccacttaagtgagataccaagagtagtcaaattcagagacagaaaataacatggggaatgggttttaaaggttgtggggaagggaaaaatggggaattattgtttaatggatacagagtttcagttttgcaagatgaaaacagttgtggagatagatggtggtgatagttgcacaaaagtgtgaatgtatttaatgccacttaactgtacacttgaaaatggttaagatggtgaattttatgtgtattttaccaccactaaaaaaaataaaaataagaaatacaaaaaggaaggagacctttgcctctgcccatggtggagtaaccaggataggacttatccttctgttgtgaacaaccagaaaactggaaaaatatataaaacaacttacttcagacactggacaacaggctgcacaagactgataaagataaaccctgtaattcccaactttcttagtaaaagtacttttcaaactgcatggcaatgagggggaatataagcagagccttacagcataactgagttggtgaaacataaaagctcaggcaggcttagttagttggagattgtgaagaggagatacatggaaagactctgaagagaagtaaaatcagccccaaaaatctgcactggggattccttcagtctgttgccaaacactaaccaataaccaacacatgagactccatgaggcaagacaagaaacaaaaacaaaacaaaacaaaacaaaaagcctgtaagatgaactttttttttttttttttttttgagatggagtcttactctgtcgctcaggctgtagtgcagtggcacaatcttggctcaccacaacctctgcctcctgggttcaagtgattctcctgcctcagcctcctgagtagctgggattacaggcatctgctaccaccttggctaatttttgtgtttttagtagagacagggtttcaccatattggccaggctggtctcaaactccagacctcaagtgattcgcctgccttggcctcccaaagtgctgggattacaggtgtgaaccaccgtgcctggcctaagatgaacaattcacattgctcaacagaggttcgggagacaattagagttttggccatccagaatggagcatccctcctgaaccaccaaggcaatcagtagaggtaacggaaaggtatacctcaagagtaggtctaaattagctgtagagtaaaagatactgtacatccaacctaacaaagcttaaaaaagctgatccacaagtaaattatctgcatgaaagaagacagtctactattcttttaaaaaataacgacaaaatccagacacttaatgtaattttcacagtgtctacagtcatctaaagctattggacctacaaagaagcaagaaaatatggccaaaaacaagaggaaaagcagtcaataggaacagaccctgaaaggtagagatgatgaactgtccaaacaaggatcttaaaacaagtattataaatatgtagaagtacttaaagggcaacatgaacatagtataagataaatagaagatatataaaaaagagtcagatggaactttgacagtgaaataaatatcagaaatgaaaactttaataaatgaaattaacagctgattagatgtgtagaagaaaaacagctgtataacatagaaatagaaaagacccaaactaaaacacaaggaggaaaaaagagcttcagtgacctgtggaacagtatcaggcagtgtgacataacctagaagtcccagaagaggaggagaagaaggtgtgaagaaaaaaaatatttgaagaaacaatggcaggcaatgccagaaaatacttcaaatgtggtaagagcaataaacccacaatttgaagatgcttaataaaactcaagaaagataaagaaaaccatattgaggccccaaagtgtaggaggagaaccttaagcacagaggcagaaatataagaatgaataggcatggatttctcatcagcaattagccaaaaaagaaaaaaacagtggacccacaactttaaagtgctaaaagaaagactgtcaacctataattctatttccagagtaaatattatttaaaattaaggagaaataaagactttccagaaaaacaaaagctgaatttgtcaccagcaaatttaggtaataagagaagttagagaaagttcttaaggaggaattaaaatgatataggtgagcatctatccatcaagaaaaagaaaaatccactatgatagatatggataatacagtgatgttgtcagggctggagaaatggaatgccaaaagagaaagaactaataaacaagaggaacaaagaacagatgaaataaacaacaaacaagtagtaagttagtaaatttaaacccaacagtatcaaaattatagtaaaagtaaatggtcaaaacattccaattataaggcaaagacaggataaaaaacaagacccaacaatatgaataaaactcacattaaatataaagatacaactaggttagaagaaaaaggatgaaaaagatataccatgcaaagactaatcggagataaagacatttcttttttgtttttttttttgagatggagtctcgctatgttgcccaggctggagttgcagtggcatgatctccactcactgcaagctccacccgccaggttcatgccattctcctgcctcagcctcccgagtagctgggactacaggcagccaccaccacacctggctaatttttttgtatttttagtagagacggggtttcacagtgttagccaggatggtcttcatctgctgacctcatgatctgcctgccttggcctcccaaagttctgggattacaggcatgagccaccgtgcctggtcaaagacatttcatagtgataaaatatcagtttatcaaaaaatataacaatcctactgtgtatgtacccaaaaacaagttttaaaatacatgaaacagaattaaaagtagaaataagacagcactctttttcctgtactaaagcaagtagacatgaaatcaataagagaatagaagagttgaacaacaccagcaaccaatttgttctactgaaacttatagaatatgccagccaacaactgaagaatacaaactaatttcaagaaaacatgaaaaagtgttaaataataaaatgttttctgactaccacaaaattaaattagaaatcaataataaggttattgataagaacatgagattcttcttatgatttttgcaacttctggtaagtctacaattatttccaaatataaaaagttcaaaaatatgtgagatacagctaaggcagtggttacgtagaagtgtacagatgtcagtgctgacatcagaagaggaaaaagatcccaaatcaattactttaacctttaccttaagaagctaataaaataacagtaaagtatatccaaaataaataggaagaaaataataaagttaagaataaagatcaataaaatgaaaaacagtaaaaagaatatgaaggcataatcattgtacttgaaaaaggcaataaaattaataaacctttggctcaactgatcaggagaagagaagaaatacaggttaaaaatatcagtagtgaaaaagaagacatcattacagatcttacaacactgaaaaggctaatgatgcaatattttatatcactgaacttgataacttagaaaaattcagtaccttaaaaaaaaaacaacaacaaaaacaaattactaaaattgactcatgacacaaaaatctgaaaagctttaaaaatccaagtccttaatttaaaattttaccactaagaaaacttgaggcccagacgaattctatcaaaagtttgagaaaaaaataatattcctacacaatttttttttcagaaaatggatgagggaatactgccgaatttatttaattaggccagctttatcctgtcatgaaacctggcaaaaatattccaagataaaaaacaccagaaaatttaactcaggatcatagatataaaagtccttaatcactgatataaaagatgacaagtatcagcaaatcaaactcaggaagataggtaggtaggtagataagccatcaggaccaaatggggttcaacctaggaatgcaaggttggtttaacatttagtaaactcaaaatattaacaataaaaaaatactctcctatgatcacctcaatacatgcaggtaaaacacttgacaaaattcaacacacattgatgataaaaaaaattttaggaaacaaaaaaagggaacttcttcaagctaacaggtggatttatgaaaatccgacaattaacattatacttcatggcgaatgactgaacgtttccccctaagataaagaacaaggcaagaagatccattctcactacttctattcaatattatactggaagtcctagacaataaagtgggaaaaataaataaaaggcatacatattggataggaattcacagatgatcagatcatagagaaaaggttattaaaactaataactttagctaaattgaggatacaagttcaatatataaagcaaactatttttgtatactagctaacattggaaatgaaaaaaattataaactgccatttataatagtaccccagaatatgaaacaggataaagttaataaaatatgtgtaagacttgtatactggaaatttcaaaacagtgctaggagaaatgaaagacttaatacatgaagagattatgatgtgcactgactggaagactcaatgttggtaaaatgtcaatttgaattgatctacagattgaaagctatctcaatcaaactctagcaggcttttttggaggaagttgagaagctgagtctaaatttttgtttttaaatgcaaaagacctaaaacagccacaactatttggaaaagaacaaagttggaggacttgatttatctggtttcaaatatccagtaatagcatatgatagcatagggataggcatgtagatggaacagaacacagagtctaaaaatagacccaagcttgtatgatcaattgatttttgacaagtgtcaaggcatttcagtggagaaagggaaatatttccaacaaactgtcagaagaactgaatatccatatataaaaaaaagaaccttgattcttgcctaacactgtattcaaaattaacctgaatataaaagctaagtccatgaaacttttagaagaaaacaaaggagaaaatctttctgaccttggggcttgctagattcttagatacatcaacaaatagataaaaataaaaataaagcaatacatcaacaaaagaaaaactaatttacatctcatcaaagttttaaaattctgttctttgcaagacaccatttacaaaatgaaaaggcaaatagaatggaaatttttttcctacatatatctgaaaaaaggactatttcagaatatacaaagaacttttgcagctcaataataaggaaacaacaactcaataaaaaataccaaaatatttctacagatacatcacagaagacatacaaatggctaataagcatatgaaaaagatgctcatcatcattagtcttcaggaaaatgaaagctaaaagcacaaggagatattaatatctatcattagtctttaggaaaataaaaactaaagttgtaaagagataccggtatacatctaatagaatggctaaaatgtaatgaaaataagtagtgatacaaatagtggtaaactggatccatcacacagggcaagggggagagtaaaccactcaaccactttggaaaacagtttgacagatccttataaagctaaataccgtagcacttaccgtataccacctaaccattccgctcccagataattacccacaaaaaaatgaaagtatattcttatgcaaagacatgtacaaaagtgttcacagtagctttatttataatagttaaaagctaggaacaattaaaaaatctatcaacaggcaagtaaacaaagagtacaatactaactaataaacaggaacaaaatacattcatacagtatggattcatcttaaaaatgatgaaagaagtaagccagacataacaaaagaagtcagtacatatcatatgattctatttacataagaatatcaataattgcccagactggaaggtgagagtggggaatattgaatgaaaaggggtaccagagccttttggggtgatgttctatatcttgtttgtgggggtagttatatatatatatatctcatatatatattatatatatataaaatatatatatcatatatatgtatgtatgtatgtgtgtgtgtgtgtgtgtgtatatacatcacaattcactaatctgtacacctcaaatagatgaatttgattgtacataaattaaacagagagagggagaattctgccctcaattagaatacagtgagtcagagcaggccaacattaccaatggaacaagtggatttataaaaaatggtaaattgcaaaaactgtatttctaaaatgatcaaagcaatgaagagtatatgagctataacaacccttctagataagctaaaaataagccagtaattccaaacattgcctaagaatcacatgtggttgaagctgagggattctatgggagaaaagaaaaaccagcagagtgtttctgcagtctcaaggtactactataattgactggaaactaaaggagtccccagcacaaggcttgttctgtccaccagattatctggcaagttctggaactgtgcaagaagccaggagatggaccagtgagatagaatggcaactctcccacgttctccaggtgtctaggggatagagtcaccctgaaggaaacaggcctgcaacaagtacacagtccgtcttcccctcaagtcatttttccagattttgaatccatagtatgtggcaggaagctgaaaagatcagctcagaagctttaactggctgaactttcaggactgaggagataaggacctggaagggtctcaataaagaatccaggaaggccactctcaagttcagggacaaactagaggtttctaaacagagaccttaggttgtaactcaaaaaactagaagaagaacagcaaaataatctaaagtaagttgaaggaaaaaaataagaatgtagaaatcaacaaaatttaaaacagacaaaaaattgagccaaaagctggttctttgaaaagatcaacagaatctatgagctcatagctagaatgatcaagataaaaaaaaaaagaaggcacaaaacatgaatatcaagaatgaaagaggaattatctccacagatcctacagataataaaaggataataagagaatatcctaaacaactttagccagcgtattaaacaactgggaataattggtcgaattccttgaaagactaaagctcattcaaaacaacgaagcaattaaagctcattcaaaaagaaataaataacctgaataggcccatatctactatataaattcaatttctagttaaaaactctaagctcagaaggctacactggttcattctaccagatgtttttaaaagaattaatactgattctacccagactcttccagaaaacagaagagaggaaaacacctctgaactcatcttatgaggccaagaatatccggataccaaaaccagatgaagatattacaagaaaaacctactgactaatattcctcatgtaactaggtactaaaatccttaaaacattatcaaatcaaatccagaaatattttaaatggataaaacatcacaaccaaatgaggtttatagcaagaacgcgaggttggtttactcattattcaatgtaatcatcatcattcaatgtaattcaccatattaacaataaaggagaaaaaccagacaattatttcaatagttgcagaaaaacatttgacaaaattcaacacccactaataataaaaattctcagtaaattaggaacatacaataatttcgtcaacctgataaagggcatctataaaaaacctacagctaacttcatactcaaaggtgaaatagtgaacacttacctcctaagactaccaacaaggcaaggatgtctactcttgccacttctcttcaacattgttctgatacccacaataacgtgggtgaatctcaaaattattatgttaactgaaagaagacagacataaaaagagtttatagtatatgattccattaatacaaaatacagactaatctaaaatgacaaaaagcatgtttttgtttttcttggacccagaggcagtggagggaatagcccataaaggaacacaagtaatcttttgggggtgatggaaatgccctgtcttaggatcatacacaactgttaaaactcatcaaattgtacactttaatagaatataatttttaaggtaaatcattccccaataaatttgatgagaacaaatatgattaatatgtttaaaaacaggaaaagaggaacaaatggataaaaagatgaagaatttcaatgctgacagaaaactgtcaatctagaattctatactcagtgaaaatatttttcaaaaatgaagggcaacataaatatgttctcagacaaagattgagacagtctgtcatagacagacctgcactataagaatacttttagcaagttctttaggttgaaaggaaatattcccaaatggaagcatagaagaaatgaagaacacaagaaagggtaaatatatgaacaaatattttaagatacttactgcttaaaacagaaataatgtcatattgaatctataacatgtaaaaatatatgactctgtcagtgcaggaggggataaagggagttaaactcttctgagatttttaaagcagtctgtaataaattatagtgtaattgaaatctcttagataactacgaaaatgataacactagaataaataaagaagctgagattaaaacaacggaataaaaaatacctcattattccaaacgaagatgggaaaggggaaataaagtaaccaaagaaccacaggacccaaaaaacaacaaaaacaacaaccaaccaaatagcaagatggtagaattaaaatgaacattttagaaatacaaattgaatgcaaatagattaaacactccaattaaaattctaaaggttgtctatagaataaaaactatgttttgtctaaaagaagcatattttaaaagcaaggatgtagttaggttgaaagtagacgagaaaaatctataccacttgaacattaaccaaaacaaactggaataactttattactgtagtcaaaattgacattaaggcaaaatatattaccagagaaaaagaaggtcattgcataattataaaagggctagtttagtgggaagatgtaacaccctgaataggcatgcatctaatattgtctccttaaaatacaaaaagcaaaaacagaactgaaaagaggaataaataaatacacaatcatagttgaaaactttacatggcattacactgaaatttgtaaataaatttagcaaggttgctggatagaaggtgaataaagaccactcaattatatttctatgtagcagcagcagtaaaatcaaaagaacttctagaaataaaaccagtgcctctatagtaaagacaacagaatatcattgagaaaaattaaagaatgcttaagtggaggaataaatcatattatttgaattgaaaaactcaatattataaaaatatcagttctttcccaaactgctctttgaaactaaaacaccacgatcgaaatttcagcaatttgttttttttaggtgtaaatcagcatgtttattctaaaacatataaagatgtgcaaaagacttcgaatagcacaggcagttgtaatgcagaatgccagtggaggatctccaccagccattatgaggatatactatcaagctatagtaatcagtacagagccttgacataagatggagaaattgaaatagaagagtcaagaaacagacccacccaaatggtgtgctgtgccagttatctgttattacctcttaactcctgatcccacctgtcttggccccgtttgttgaaattggtgctggaccctaagaaaattcctccttgaccagttggcatagtggtgggcttgtcagcagagggtgctggagggacacgggtagaggaaggggcttctcttccaggtttcagggcttttgttcttgtttgatggcatggcagccagtgggcagtttcttatcaagagtagccagcaccccaatagatgactgcccagagagtctcacaggcacctcagcactggctccagcctcaagtacctcagtgagtttctccagtgggtcacagccatgccctctgtaacaatgcctgaatctcagacttgttagagagaccctcttctgagtttcttccatttcttaggactttcctttactggcttttacatttgttattcctatattctttacagtggcctttaccctttacccatcttgatagttaatcccttttactagttattctttttattaaattttccctactcaaattacttctgtaattattgtctcctgactagaacctggtacataaggccacttgatttttagcaaaggcaccacctacaattaagcacgaaaagaatggtcttttccagccaggtgcgttggctcacgtgtgtaatcccagcactttgggaggccgaggcaggtgggtcacgaggtcaggagttcgagaccagcctggccaacatggtgaaatcccgtctctactaaaaatacaaaaattagcctgacgtggtggcacacacctgtaattccagccactcaggaggctgaggcaggagaatcacttgaacccaggaggcggaggttgcagtgagccgagatcgcgccactgcactccagcctgggtaactagagcaagactctgtctcaaaaaaaaaaaaaaaaaaaaaaaaaaaggtcttttcaataaatggaagtagagtaactggacatacatacggaaaacatgaacttggactccgtctcacaccagccacacttggattggacctaagtgttaaaggaatatagtaacgctgctagaggaaaatatggaagaatattttcttcatggcttcagggtaaacaaatttttcttaaaccagactcaataagccctacctataaaagaaacagttgagaagttggactttattaaaaataagaacttttgtttatcagaagaccattaagtgagagaaatgtgaaaaacggcatgcaccaagaaaagatgtttgcaatacatatattaaccaaaagatttgtctccagaatgtatgaaaacgactgcaagttaattttttaaaaaaggcaatcaacaggctgggtgcggtggttcatgcctgtaatcccagcactttgggaggcagaggtgggtggatcatgaggtcaagagatcgagaccatcctggccaacatcgtggaaccccatctctactgaaaatacaaaaattagctgggcatggtggcgcacgcctgtagtcccagctgcttgggaggctgaggcaggagaattgcttgaacccgggaggcagaggttgcagtgagccgagattgcgccattgcattccagcctggccacagagcaagactctgtctcaagaaaaaaaaaaaaggcaaccaacaaaaaatgggcaagagccttgagcagacacttcacaaaaggggacattgaaatgtccagtaacttataaagaagtactcagtgctgtcagtgatccagaaagtacagattaaaaccacagtgaggtaccacaatagcctttagaaaggcaggtgtgaaaaagacagaaaatggcaagtgctggtgaggatgtggaacaactgaattcttatatgctgctggttgattgtgacctgctttgaccactttgaaaatatgtctggcaagtatctacttaaaataaacctacaccaaccatatgacacactagtcttccttctggatatatgtgcaagagaaatatgcacatatgttggccaaatgatatctataagaaatttcctagaagctttatgcctaatagtgaaacactggaaacatcccgaatgcctgtcagcagttcaactgttttagttaaacaaacaagcaaattatggaacatatgtacattggaataccacatggcataaaaaattactctaaatactctaaatatctttctaaatttatgctccagcacaaacttgtggagaatacactcactaataatttaatttttaaaaacttttccatcttaatcatacaaaccacttaaaaaatatcacaaagttgccagatgctatggctcatacctgcagttccagcactttgggaggctgaggcaggaggattgcttgagtctgggagtttgagaccagcctagacaacatagtgagatatcacctctacaaaaaatttaagaattagccgggtgtaggtgtgcacacctgtggtccaagctactcggaaggctgagatgggaggattgctcgagcctggccggtgaaggctgcagtgagccatgatcatgacactgcactccactgcactccagcctgggcaacagagggagaccctgtctcaaaaaaaaaaaaaaaaattacaaaggaattattctcctacttatcttattaataagacagagacagaacatgtagccatggctcatttttgaatcagctgtgtcctactagtttccagaaagtccagaagacttctcctctgttgtgtgagcctcataagtggccaggggtagatatcacacaggctgaaacatctcagtcatcagacaccagatgctgagtccccatctggcccatccaccttccctacacactacttcccatgcaccttatcctgttgtctcacctgggcttcacaatttagtccctgggagatgtgaaaaacaacttttttctattttacaagttagaaaacaggagtctagggaataaaataataataactctcccttactgcaacatccctatgtgccaggcctgttccacagactctccaagattaggctgaggtaccatcctcttggggctccttccccttctccaaagtgcccacctctctgacactccacattgtttgtggagtgtgtgctcttctctgattatgcatacctgacactgtatggcattgaagacatttgtgttcatgcattagcctcccattatgggggacacatgcttcttgaggatgggggctgtcgcccaccaagcagctaccaggacagggcttttcaataaataatttgttgggctgaatttctagcatcacgtctcagagcctcagcctagcagggctctcttggggagaagggatctggggatcatctgatgaaagcaaggaccagcatgtgacatagaggaaaagaaagagcagtctacgtgaggtctctggtctggtgcagtgacagcactcattccagaagagctcttggccaggaatgtgggagccaaaaggctgattagctcattgctgcactgctggcaaacatgctggcctcttggcccagccccaaaagaatatgatgtgaacattatgcaccattaagctgactcagagaacaaatgactaagtttcccataatcaaggagattttggcttggcccttcttcattttgatgcaacctgagtttaatgcatcatgatgaatgattctggtccacaccaaaggaagtgtctttgctgtggggtgtgttcttagccagtcttgcttcacggcaggggcagggaacattttactgcctttctaatgttctcccagctattcagaatcctctgtgaacacttttctccaatagcaagctataaaacaggtgattctgtttattggagctgtgctatttaaagaccagcttgctcattaacgtcacctgccacatccctgagctttatgtagcaactcaaacatggctcacaaatggaggaaagtcttcataccccaaggtaatgaaagatgttagagggtaataaaagaaataaaatgggcatagacaacctaatccacacctctaagtccccagcgaggcatggcctagggctctcccaagtgacctagaagctaacaattccacatcactttctgcattttcattattccttcatcctggagaccttttgtggagggcactgactcctgcgattgattcttgaatagcaggagacgatggagattagaagataagccagagttcaatctgccctccctccactgcactccagtagagctttcaaccaacacccgcttcctgtttgttactaacagcaaacctcagtgccatccaatttagagaaagaggcagtaagagagtccagagtcacatatagcttgtcatatctggaactctagcccttacccagtgtattagtctgttctcacactgctaataaaaacatgcctgagaatggacaatttacaaaaggaagaggtttaattgaaggactcacagttccacatggctggggaggccctcacaatcatggcagaaggtgaaaggcatgtctcacatggcaacagacaagagaagagagcttgtgcagggaaactccctgtataaaaccatcagatcttaagagacttattcactgtcacaagaatagcatgggaaagacccacccgcgtgattcaattatctcccaccaggtccctcccacaacatgtgggagtttcgggacctacaattcaagatgagatttgggtggggacacagccaaaccatatcattccgccccagcccctctcaaatctcatgtcttcacatttcaaaaccaatcatgccttcccaacagttccccaaagtcttaactcatttcaccattagctcaaatgtccacagtcaaaagtctcatctgtcaggttttctgatttcatttctgtagtcaagaagctgagggacaggacccatgcatgccagtgacaatgtttgatgagtctggtgggaggctctgcaatagcaggaaaagctccctgggtgcttctgctctgagacaggagatctaaaccagatgatttctcaggacacttggattactaatattctgtggtcaatgatgcccttaggccctgaaaaatcctgtctttttagaaagacaatcatatttaatgtgttctagggaataaatcagaaacttagtcttacggtttaaggaattttctaataatgatctggaaactgaaagggaacgcattaatcagaattctctgttccctggattcccaatagaagagatgttcctgtatttccacaaggagccctggaagcagcccacagatggagaggactgaggccaagtgaggatgagtacacagcaccccctgtactgtgatcttgggcctgtgtcccacaccctccacagggacagttccttctgcaaggtgcccgcccagcaacaaccacctctccggtgctaacagaccttttttttctccactgcgcagtgtgccataggtatcccgtgcatgtgagtgagccagccagagagctccatgtcccgataccaggcagtgagatgtgaattcctgtctagggctgtaacctgccagactgcttccagcctacatgaaggctggtcactccctccttctcaggcactgcgtccctcagcccagagccttctgtagagagctgctgtggctccagctttcccatctcctccaccattttacatcttcttaggcagcctttcagtggagagcttgtcctaccaacattttctccctcctaaagtactgaaaaaaacccttaggagcgaaaaatcatctgcagtatccctgatccccttctcagaacagcacagtgtccccaccaagtgctaataaatgttgttggataacagaacaatttggtttaaatctcctctcacagagcagaatcgcctggagggattttgccttgaaaattaaattctgatatcaatttctaaaattatttacaatattaaagttgaaatgaatccatcacacagtttccttccaatgttagtctttcaagtgaacctactttcctattagcagtcacctaaaaacaaataagcaaacaaacaggtaactcagtcttccctctgactcagtgtgaggaaagggacaggcagcatctggtgacagcttacttcagtgggtctccatggttcttcaccaaaaccacttgtgtttcctcttcaagcaccacagtatcctatgacactaggccagtgggctctcaaacttttggaattcaggactcctttcctctcaacttcttaagttgggttctatctattgatagttacattacttgaaattaacacagatattttaaaattattcagaaattcatttacaataataatgaacccattatataataaaaacattttattatttatttattgagacagtttcattttctctttttgagacagactcttgctctgttgccaggctggagtgcagtggcacaatctcggctcactgcaacctctgcctcacaatctcaagcaattctcctgcctcagcctcctaattagctgggattacgggtgtgcgccaccacaccagcctaattttttatttttagtagagacgaggttttgccatgttggccaggctggccttgaactcctgacctcaaatgatctgcccaatttggcctcccaaagttctgggattacaggcatgagccacctcacccagccccaaaataacattttaataaaaagaactatattttataaaacaaaaataaattagtgaggagaatttctagaactctttaatgtcagaattactatgacagcttgattctcctatgtccttctgcattaatctgttgcgatacattgttctgattgaattatgtgaagaaaacccagcctcacatgaataggtggctagaaacaagaggagtattttcatagctttatcagattattgtagatgttcttgttagatagggcgtcaaaacttgacaggtggtagtttcttaaaggttagttgcaacatggagtctgaaacactatcagtaaacttgtagtattttattacagcccattgtctgtcagtcttgccctgcaaacaaatattttactatgcatgattttcataacatgcattagtcatttggaaatattattcactgagttatgaagattttcctaacgttaacacatttctgtatacagtgtcaaaaaaaatcacttgataatttcaccactaagctcatcagaaacatcaggtataggcaaatctcggagctattgcaggttatgttccagaccaccacaataaagcaaatatcaaagcaagtcacatgaattttttggtttctcaaggcaaacaaaagttatgtttacactctagtctattgtgtgcaatagcattatgtctaaaaacaatgtatgtgccttaattttaaaaatactttattgctaaaaaatgctaataatcatctgagccttcagtgagtcatcatcttctcactggtggagagtcttacctggatgttaatggccgctgactgatcagggtgatgatagttgctgaaggctggggtggctatggcaatttctgaaaataagacaacactaaagtttgccacatcaatggactcttcctttcacgaaagttttctctgtagcatgtgatgctgtttgatagcctttcaccacggtataacttctttcaaaattggagtcagtcctctcaaaccctgctgctgctttagcaactaagcttatgtaatattaatattctaaaccctttgttgtcatctcaacaatgttcacagcatcttcactactagtagactgcatctcaagtaaccacttttctgcttctcatccataagaagcaactccttatccattcaagtttgatcatgagattgcagcaattcagtcacatcttcaggctccacttctaattctagttctcttgctgttttcaccacatctgcagtgacttccttcaataaaggatggaaccccttaaaggcatccgtgagggttggaatcaacttcttccaaactctgttgatgttgtgacctcctcccatgagtcacaaatgttcttaatgacatcgagaacggtgaatgcctctcagaaggttttcaatttactttgcccagatccatcagaggaatcaccatctgtggcagctatagccttacaaaatgtatttcttaagtagtaacacttgaaagtcaaaattactccttgacccgtgtcttgcagaatggatgcggtgttaacgggcatgaaaacaacattcatctccttgcacatctccatcagagctcttgggtgcattgttcatgagcagtaatattttgagaggaacctttttctggggtacagtggctgggagagggtgagttggtcttgaagggccttggaggccgataggagaattagacttttactccgtgggaaatagggagccattgcagggtttagagcagagcaatgacatgaatagacttagcctgtaaaaggaggattgtgcctgctgtttcggggggcatgaacagaagaaggagcacattcatcaggtaggatggtggtggctgtgaccagggtggcagcagtggatatgcatggtggctgggttctgggtgtagtttggtgatacatctcctggggcttgctcatgaacatgcatgtgacatgaaaaggagaggcatcaagagtggctcttggcttgatagcctagcaaggtggctttgcagttgtcacatgaggttgcagtttggacatgtcctgtggtggatagcaatggaatgttacatgttagcaggggtttgggagagaggaccaggacatggagatggaggttgcgagtggttgatggatgaaattaccaagtagggagtacaaggagagacgaggatccaggatggaggctggccctctggctgatgtcaagaggtcagaagggaagacacgtttatcttgagttgggaagaacaaactggtcagctggaggaaagccaaggggcactgcccagccgctgagtgggtggtggtgaaggtcatatcagatgctggggatggctccaaggagactctggtggcaaccctgagcagtgtggagtcagtggtggctgggagaagggccatcactgctggggtggagcagagccctcaggaatgaggggagttgacatagtttgtctgcagaaaggagtaaggaaacatggtggttggtgggggaactgggaacaagagcaggaagttttaaaatgcaggacatgctatcctctgttgctgtggtctgcgggccagctgcagactgggaggccgcagcgtctgcccccattttcctgctctcccctggcagaggcgccccagggggctccaggggagtgctgtctgctgctggcggtggggggcggtgatcggatatgggaaggagggagacatggagacataaaacattgtctaagtgaagggcaatcgtatttgaagtaatttgaagattgacaggaaattcataaagggaatatggagttccgtttacaacagcaagagatgccttgtccatagcttcctgacctctggaagaacagaagttgctgctggcagagttccaaaacatgaaaatgtaaaatggaattgaataatctctcctaaatcaattttgtgagccaaatgacctagagagtgatgtgatacagtgcaggtagacgacacagggcgctgctgtctgctgaatacatgatggcagttgattctggagataaccaaataccagcttccctttggtctctggagcctggtttctaccattagcctccacagagcccatcttggggaggtgtgcctcttttttctggcttcggtgtgctgattccagagtctgttgtgagggtcaccttgctggctgtgaggagctctctctctgggcccagccggaaggcccttgcagcctcttttcaggagcactgggctgttgctttctgtgcagcatcgtgtggatgcatcctctgagtgaggctcatttgcttatgtgagttcccttgatcagccaggttcccagggaatctgtggagactggctgtgtcagccactgaggccaagtgagggctgttgctgtttgtacttatccagggacaccttcagcttgaggccccacccttgtgagcaggggcctcagtgagcatcttagggtctctgtgtgaggtcacagtaggacccagactggagatgtgggcacagtgggtaagtgacaccagggctgggacaagcagagcccctcctcggctgaagatgtcccctgtgcacatagagacaagggctcctgcagctccctggggagtctagcaattggtggctgtgttttctctggggattctttactgggcgtgcacttctacctggcttgacctgcttaaggcatgtcagggtgctcctgtctgtgaattggcagggaaagtgcctgtcagtgtggacccaaacagggaacctctgggcacctgtggttgccacaaatcagggatccgtggatgttttctgtcaagtcctggatagtaaatatttcaggcatgagggtcacatatggtctcttatagtctttttttttccccctctcagccttttaaaataataaaaatcatttttggttcataggttgtacagaaatggtctgtgggccatggcttactgacccctgctgtgagcccaggaggcaggaataaaatactgacttggccatggtgctcactaattcagtctccatagaggtgaaggaggcacagagcacgtcccttgttgggacagatcattcttttgcacatgtgtgtttatgtcagtgtgaaagtcagttttgaagaggaccctccatctttcttacagcctttcaccattcaagacactcagttgtcaaagagtcttttccacctttacattagcaatgttgtgttttagaaaatcctcctcattgctgcagtacatcaaaggtaatgaatttgaacaaactttctcctcctggagcagtcttctctactctgactacacattagtcatctggggggcttttgcaaaacagcagtgtccaggtcccctaaccaggaaagtcgaatctcttgggggccctgacatcactgtgtagccggaggaagagccctctgcccaggctcacagcatctagcagcaggttcattgattctgagtgtgctgcctggatgcccagtctggctgacgttacagtatgcagagtctcttacacattggggtgtgacaggagctcactattgctgctagtgcaggcttctcctttccctccctctgctctctccctcctttctctccctcccctctccctctgccatctctctctactgcccccctttccctacctatctctatttctctctctccctctgtatagctccctccccagtccccactgctgcccatgtactgtaaatgctctagaatttaggaaagatttttggcttaatcagcaagtgctggttcaattagcacaaatcccaaatgacatgaggaggtctttcagcatttaggttgagaagccctagccaggcagagggaggcaggctgatgtggagcatccaccatgtgcacttagggtgagcacgctgcctttcagatgtcagggacaccagtaagcccctgttctctctctgcttcagttgatactgtttcagttcccagtgggactgacatctaggaattaggtatttactttaaaaaatatttctctctgcaacttggatcaaacaaagttcaagaaactgcttagaaagaggttggtaaaaagatgacagaaaatctcttggttatgaggcttgtcagcaagtttattttgtccttttctgtaacttttatttctaggcccctaaggtcagcttctgcttgctcttcatgctgactgagtgtgcacgtacattattgatagcaggagcgggaaaggagtaatgctttctacttggaaatattccctgatagaagccttgaaattggaatacttttttgtctctggggatctaggtcagtgcttctgaaactttagcgtgcacgagtcacctgggtttttaaaatgcagattctggctgggtgcagtagcttatgcctgtaatcccggcactttgggaggctgaggcgggtggatcacctgaggtcaggagttcaagaccagcctggttaacatggtgaaaccccgtctctattaaaaatacaaaaattgtctgggcgtgatggtgggagcctgtaatcccagctactcggaaggctgaggcaggagaatcgcttgaacctgggaagcagaggttgcagtgagctgagatcatgccattgcactccagcctgggagacaaagtgagactccgtctcaaaaataaataaataataaataataaaataaataaaatgtagtttctgacccagtggatgtgaggcgtggggatctgcatttccagtgagcacctctgtccacacttggtgaggctttgggccatcattgcatgtgatccttgactgaggcataatcagaatgattccagaggacatttgccaaatacagaggtattattaggagcataatatccaaatagtggaggtgatagtcctgcttctctgtgtgctgcctgcctgaacttggactcctgggagaggcagggagagagtggggccatcactggcacgtgcagacaatggaagtgtcaagaccccacgctgaagcatcttctgaactgcagagctgagcaccccaggtgtcatcttgactgcacatgtagccccaggaagctggtcttcccaggtgaggaggatgacctgagaagcttgctcaaggtcactccactggtgtcaggatttagcccaggtatcttcagtggcaaagccgacgttctgcttcatcactgaataaaactatgggactgaggaagtttaattctactgagatagcctgactcagcataccctacttccctccttcctaggggttccacatgccgaaattgggaaaaagctttagactggttctatgtgaaaggaggatgtttgggatcaccatgtgggtactatgggggagggataggttgcagcttttcttctcaagggctagagtggtgctctggtctcctgaaggtattcctgcagagggtgggccactttatgggaggaggtgtggcaggagggtcagaatctgcatttctgcccaattccaaggtcaaattgctgctgtgagagttcagggatcctgtgaatccccatggtttctgaccccctgaacccttgaggaacactgttgatcaagaagccaaggagggcaacaccactgttttgctgcttaagtttggaaaccatagaaatcttggaagctgacaaaggattctcctaaaattcaggaaacaaagtgaaagggatcacttgtaaaacatagcttcatataagcaaacttcatgagataaagaaataaaaatcaatgtctcatttaaatagaaaaagaaaagctagcaaccgtagcttgcagcaggggtgggagttaatacaatgaggggttaatcccttcaaagattcagaaatacttttagggaattaatgtccaagatctaatggcatattggtgactgtgattcatgtgggttccgtagaggcttttagaccctggctctgtttcaagggcggaagaatcctttgttccccgtaggagcatttgcactgttcacacacatgtccagttgtccagaaagctctgcatatggctgggcgaggcccccactggcaggcccatgtgtgtgcagaggccaagggacccagcatggatgaagaagctggcctgagcttcagtgcctggtagatgtgatttcaaagactggtttccttgcttgctagcggcagaacttttggacaaatgcttagcctttctgggcctccgtttccccatttgtaaaacagaaacaacagtccatgtcttgctgagctggcatgaggagagcagccatgcagaggaagtgcctggcatgctgtaagttctcagcagaaggggctgctgttatggcagggtccaaaattgctagcctgtcttcggaacattcggcctcttaagctgagtattcactgtaagaattaagaaatattttggggcaaggctgacattttctgcttcagttgtgactaagtacatcacataccttagtcagaggagaaacactctatatcttagatacatggcatctaactgggtgcctcaaatgatgaaatattgagtacttcctgtaaacttggactttctaggttcctcttctaaagacaccatcaccgtgacctctgcaatgtcagtgtctgaagataggcgacgacttttcagaatttggcactgccgtgagagctgctgttttcccaacatgttcagactaagacggggaccttttttttttctttaattgctatttcttaatattttttctgattttagaatggtgttagatttacagaattatgatgaggatggtacagagaatctttgtaaaccccacatccagtttaacatcttacatcagtaagggacatttgtcatagttaatggaccaatatcagccattattattaactaaagtccatacttcagatttcttcagttttcccgtaatgtccttttctgttccaggatcctagccaagatcccacattatatttaatcattgtggttcctcaggctcctcttggctgtgacagcttctcagactttccttgtttttgatgactttgacaattttgaggaggactgggcaggtactttgtagaatgtgcctcatttgggatctgctgggatctggtgttttctggtgattagttatgggttttggggatgaagacactgagataaactgccagttctatcactgtcagtttatgtcaaggaagctcactgtcagcatgactcatcactgttcatggtgaccttgatcacctggctgaggtgtgtttgtcagatttcttcactgtaaagtgactcttcttttttattattattattagtgttatactttaagttttagggtacctgtgcacaacgtgcaggtttgttacatatgtatacatgtgccatgttggtgtgctgcacccattaactcgtcatttaccattaggtatatatctcctaatgctatccctcctgcctcccccaaccccacaacagtccctggtgtgtgatgttccccttcctgtgtccatgtgttctcattgttcaattcccacctatgagtgagaacatgcggtgtttggttttttgtccttgcgatagtttgctgagaatgatggtttccagcttcatccatgtccctagaaaggacatgaactcatcattttttatggctgcatagtattccatggtgtatatgtgccacattttcttaatccagtctatcattgttggacacatgctgctataacgacacatgcacacgtatgtttattgcggcactattcacaatagcaaagacttggaaccaacccaaataactcttctttttttctctgtctttccatactgtactgtttggaaggaagtcatcttgtgtagtgcacacttaaagggtggagagttgtgctctgcctcactgaggatggagtgtctgtataaattatttagactagtattatcttgggagatttatctgctctcacacttatttatttttccaatcatttatttatttaagcatgaacgcatggatttaaaaacaattcttgggtttatagttccatgttgcattttttttctctcaaattgctccagctttgcccattgggggcactttcagttggttcctgtgtccctttgacatacccacatcattgtgtgtgtgtgttttgtttttaagcacctctttcctttctggtactactgaaagtgatgatgctccaggctcattttgtgtatagtatttcctgcccttgtgctaggatcagccatttatccaaggagtcctggttccttttattggagaataatataagaaaccaatatctaggtgctgaatgtatttgttgctctgggagttttgttgcttttaggccattttagctgacagagcaaaggagatatatgtttgtatactaactaacctgtatatatgcacatgtctatagatatttctatatgtaaccatctgtatctttcttgagctaacctgtgtgtatatacatctatagatatttctatatgtaatcatctgtacatttcttgagcattagttcatactgacatttgtaacttgaatccattgccacacggattattctagccttctccccttgctggcttctcactccaacagtgagaaactggtttgcaccatccactattgatttacttaattgttcacctttagtatacatgtatagcagtatgaggattgttatcttgtactccttggtaaacaactttatcaattagagtacagtgcttatgtacttcagtgcttacagttcctttttccttcaaccttagagattctactcatttctaaaatgacttaggtcagcaccttattctccaacccctttgttaaggttgtttaatatatttttaatacagttagattgttttgtcactttccgcatcctgtcttgagattggacatcctaaatgacgttttaaaataaagtacatacattaaggtttaatttttgtgttgtaaagttctatggtttttgagaactgcttaatgtcttgtagttatcattagagtatcatacagggtagtttcactgacctaaaaatcccctgtgcttcatctctttatctctgcccctgaatccctgataatcactgatctgtcaaccatctctataattttgccttttccagaatgtcatatagttggagtgatacagtatgtagctttagtggtatgcatttaaagttagtctgtcttcatatcttgatagttcatttctttttatcactgaataatattctgttgtataaatataccttgatttgtttatccattcacttattgaaagatgtcttggttgcttccagtttttggcggttatgaataaagctgctataaacatttgtgtgcaggtttttgtgtggatataagttttcaattcatttgggcaaataccagggagcacaattgctggatcatattgtaaaagtatgtgtaatttataagaaactagcaaactcttttccaaagtggctgtactattttgcatttccaccagccgtgaatgagatttcttgctgttctacatccttgcaaacatttagtattttcagattttttgatattaataattctaacaggtgtgaggtagtatcttgttttaatatgcagtttcctaattttgatgtgtttaatgtggtgagccagttttgaaaactgactcttctgtacctctttcaagtaaatttttacttttccaaatgacttgtctccgaatctttactgacactgtacacgttggtttgtggtcagcatcttattagcctgagctattatatactaattatgatgatgattattatacatttcttgtgagggttgctctttctttcatttttttttttttcctattgagacagggcctcactctgtcacccaggctggagtgcagtggtgcaatcatggctcactgcagcctttgacttcctggactgaagtgatccccctgccacagcctcctgagtagttgggaccacctgtacacaccaccatgcccagctaattaaagaaaattatttgtagaggtgtggtctcactgtgttgcccacacatttgccactgtggtgttgtggtctcaaacttctgggctcaagtgatcctcctgctttggcctcccaaagtgttgggattacaggtgtgagccaccttacctggccgagggttgctctttccatgagtcatttacactgaactattaatgcctttgcaggaagctacagaggccagcttctaggaccacgtgggaattttgggataaaatgtattatctagactttaggaaattacttccagtagtaatgaattccagatttcaacatgccactactgctaaaaagttgtgcttggtgtccgtttatcttccagataaagcaccgccagcaagccccttccttggcctcgcattccagatcttctcgcattggcttgtaggctctctctctagcttgacctaccatttctcccttttagttggtttatgctccagacaaaccgggatgagccgctggccttgctcttgctttccacctgctaggactgcccttctgcagactgcataagcagtcctgcccacacagccccatacagacacacctcgtctgtccatgcggagttcttacctacccagggcctgcttttgaatgttgtccctcactaacgaccacctcatgaaggcagagtgagatttcttccttactttgcacatggttatgcatgtacctgaccctcttcttgagacagtgtgggctccctgaagatgtgcctgcacctgctgacgccatgctccgctacttgcatggtgcacgagggagcacaggacaggctgcacgcactccttagagcacctgccattccagcagcctctcgatggtgctggtgctgatgagaatgacgctgcagatgtgcagccatgtgagtctgcttcattgtctcctcccagaactttcccaaaggaggagccagtgctgttgtcttggccctgcttctgatttctgttttcttcatttgcatgcaatattttattgttgtcttatgaaaggggcctgttgccaggacagctaggggtggggtatgtgcagagccacttggtcacactccagttgtgttcttcctttatttcagttttggggatgggagaatataaacgttgtacacttctgtcctcttgttttgtctttcctctaagggctagtagttcccacacactcttctgaatgtactgcctatgctctgtgttttcgttctcttcagcgtggttggttgcgcctccatttccctcactcctttggggtctcatctcttctctcgactttaaatactggctgtgctctgatgactcttgctctgggactctcccatcaactccagactaatttgtctcagtgcttatttgacatttccatttgcaagtctaataagcatttgagactgaatatgtccaaaactgaactcttgaccattccaggacagctcctttttctggttgcttaggccaaaagccttggtgccacactgggttctacgtctcttaacccttagtcccatcctctaggaaacctgtttcagggaacacacacacacacacatgcatatgcagagtcacaatgatgaagctcacattacaaggtattcatagacttaaaggaaaaactacagataagattatacatttgaaaatcatataacttgaaagggattaatatcaaagatctagaaagaataagcatataatagataaaaggctgtaaaatgacaagtcaaattgaagaagccagaaaggatataagtatatgaaaacttcatttttgagacgaatccatgaaatgtgaattaaaacagtgagataccatttcacattcatcagcttggcaggcatgaagtcagttaatatgtactggtgagatgtggggaccttgctcttgggagtgcacatttttataaccactttggagactattttggaggcacgttttcaggtaaagttgaaaatgtgcacataatatgacccaccgatgccattttcaggcatttgctctagaagaactagtggatgcccatggatatgggcctatggtgtttgtaagagcaaaacacggtttaactgttctcaggaaggggaactggacatttgttttattcacatagtcaaaaactattcaacattaaaatgaatgaattaaatctatgggtatcaaaatggataaatctcagtaacagtgttaacaaagcaggttgcaaaaggataagtgcagtttggtattgtttttggatatgcacgtggctggtgaagatatgtacacgtgaatgtgagtactgatttgccatctctagattatatggtttccttcctatacagaggggtatcagtggagtatagggcttcggtggtatctgcaagcatttttaaaagagatccaaagcaaatcaaaatgttgacaactttttaatcttcctggtaagtatatcgatgtctattatgtttattttttgaattgaggtataatttgcataccataaaatctacccattaaagcgtacaagtgagtagtttttggtattaatatatttacagagttgtgtaagtattatcactaatttcagaacattctttataccctgaaaataatcccatgtacattatcagtcactctccattctttccttccctgagaaatgggaatgaaaatgccagagtgttttccaaattggctgcatcattttgcattcctgccagcaatttatgagtgttaacaattttgcatgtcttcaccagcacttgttattgtctgtctttttgattattaccgttctagtgaatgtgaagtagtatatcagtgttattttgattggcatttatttccctgatgactgatgatgttggaaagcttttcatgtgcttactggccatttgcatatattttctggggaaatgtgtattcaaatcattttcccattttttaagtgagtcatgtttttattgttctaggaattcttttttatattctggatactagttccttattagatttgccaaattttccccttgttctgtgggttgactttttacttttttgatcatgtccttgcaagcataaaagtttttaattttaagcccaatttatttattttttctttcattgcttatacttttggtatcatatctaggaaaccactgcctaatccaaggtcacattttcatatttttcacgttttattctaagagcttcaataggtttagtccttaggtctttgattcattttgaattaattttcgtatatagtatgaaatagggttccagattcattctttagcatgtggatattcaattgtcccagcacactgggacaattattaaaatgaatagtgtttctccattgaattgtcttggcagtcttagtcaaaaccagttgactataaatgtaagggttaatttgttgatttccatatctatatatggggagggagagagaatatatctacatcattataccctgaattagtctgctagggctgccataacaacatactacactgaatggtttaaacagcagaaatgtattttctcatagttttagaagccagaggtctaaaatcaaagtgttggcagctttggtttcttctggggactctctccttggtttggagatgacatcttcttgctgtgtcttcactgttcttttgctgtaaggataccagtcctcttcttgtaaggacactagttcttttggattagggccccacccttatgatctcatttaatcctaattattaatacctctttaaaatccctgtgtttaaatatagtgatttgggggattaggtcttcaacacatgggttttgtggggatacagttcagtccagaacatgcccatatgacaatgtattgagtgctgtagctttgtagtaagttttcaaattgggaaatgtgagtcttctgactttgtttttcttttttaagattgttttggctattctgagtcccttgagttttcatatgaattttagaatcagcttgtcaatttctgtcagaaagttggctgggatttttatagagattgcattgaatttgtagattagtttaggacatattgccatcttaataatattacattgaacataggatgtttttctatttatttaggttttgtttaattcctttccctttcttgtagtttttggtgtataagtcttgcatttttaaaaaattaaatctattcctaagttttttattatttttgctgctattacgaatggattttttaaaattttatttttggattgttcattgctagtgtacagaaatacaattactttttgtatattgatccctgccaccttgttgaactttattatactagttttttagtggatttcttagtattttctatatacaatatcatgtcatctccaaatagagatatttgtatttttccttttcagtctggatgccctgtatttctttttcttgcctaattgtcctggctaaaacctccaatacagcgttgattgtactggcaagggcaggcatccttgtcctgtttctcatcttaggggaaaagctttcaatcttttactattgttcatgatgttagctgcgagtttttcatagatatccattattaagttaataaagcttccttttattcctagtttttttgagtgtttttatcattagatatattgaaatttgtcaaatgctttttctgtgtctactgagatgatcatgtggtttttgtcctttattccattaatatgatgtattgcattgatcgatttttggatattaagccaactttgcattttggggataaaccccacttgattatagtgtgtaatcttttttatatattgttagatttggtttgctaatatttttgttgtgatgttttacatgtgtattcataagagacattggtctttggttttctcttgatgtctttgtttgggtttggtattgggctaatactggcctcataaaatgagttgggaagtatccttttcttgtctgtaattttgaaagagtttgtgaggggttgttgttaattcttacttaaatgtttggcagaatacggtagtaatgccatctgatcctggacttttccttgtggaaagttttttggttactaaacctcttcacttgttttaggtttgttcagatttctcttttatctagagtcagtttctgtagtttctgtgtgtttctaggaatttgttcatctaggctttttgttgatataaaattgtttatagtattttcttataatcctttttatttctgcaaggttggttgtgatgtctcctctttcattcctaattttaataatttgagtcttctctccttttttttttttgctagtctaggtgaagatttgtcaattttttgatcttttcaagaaactaacttttggttttgttttctattctgtttaatttctatttaatttctatttctatttagtttcttgttgccatagtatttgttgtttccttccttctgcttgctttgggtttagttttctcttgttttactaatttcttaagatggaagtttaggttatcgaattgagatcttgcctcttttttaaaggtaggtgtttacagcttcgaaagactcctgtcctgttctgccgcttccatgccagccaggctgctggttctcattgattgctgggctcttggttttcaaggcttggatgcagctcgggggaaggggatggaagtagggtaagttaaaatgccacaatgctcactgttcttaccaaggtccagttgtttttcttgaatcagtgatccttggattgctgcaagcctttgatgaatttccagagctcttaaaaagttaattgtgacaattttgccagggttctcattgcttttatggagaggtaagctgttagtggttattactctgccattctcacagatgccatctgcgtcctatgttttataatgaacacttttcaaaaaatgaatgtgattgccacaggatattttatgaaaattgatgaatggcttctaaatgtcacaaggggataaaagcataagactggccaacagtttggaaaagaacagcagtggagagctgcctattcatctgatatcaagatgctctgtaaaataaaggagtggaaacagtgtgggacttgtgctaagcagggccaagcagcaaatctagagcccagctaatgggacgggaggtcagtgtgtgagaaatttccgtcttgggttaaccctggcctggctgaattcggggaacaagccatgttgtgtgattagctcagctgtatctggctgaccgttcgtaatcctcaccctgcaataaggttggctttacctcagaattagagctgaggcagtttgggaaggggcttctcagtggatgcgagtgacttggggccgctcttggggatgaaggacagaacagcaagtgttctcagggaggctagaggggccatcactgagagagttaaaagaagacaactgaggaactgagaagtgagaacaagccatacccggtggcaggaaatgtgtgcagagggtttttagtgtgtcttctccaagacatactgatatggttaggctttgtgtcctcactcagatctcatcttgaattgtaatctccattacccaaaatccacacatgtcaagggcaggaccaggtggaggtaactggatcatgggggtgattttccccatgctgttctcgtgatagtgagtgagtctcacgagatctgatggttttataagcatctggcacttctccatcctgccactctgttaagaaggtgcctgcttctcctttgccttctgccgtgattgtaagtttcctgaggcctccccagcattgtggaactgtgagtcaattaaacttcttttctttataaattacccagtctcaggtatttcttcatagcagtgtgagaatggactaatacacatactaagtcatgaacaccaaatctggaaactaaaagattgccagatttttgaacctctataggcaaaatcattacccaccaaattccagggtcagtaagaggaagtggaaacctgttctggcctgagggacaagtagagaaggcacctccagatgacttgccagagataagccagcaggacaattgcaaaggtctttaacatccaccagtcctttatgcctaaagaggaatactcagtgctgcttgtactttatttagggctcaatatgttaaaaatattatactcgagttctgggatacatgtgcagaacatgcaggtttgttacataggtatacgtctgccatggtggtttgctgcacccatcaacctgtcatctacatcaggtatttctcctaatgctatccctccccttacccccgaccccctgacaggccccagtgtgtgatgttcccctccctgtgcctatatgttctcattgttcaactcccacttatgagtgagaacatgcagtgtttggttttctgttcctgtgttagtttgctgagaatgatggtttccagcttcatccatgtccctgcaaaggacatgaactcattcttttttatggctgcatagtattccatggtatatatgtgccacattttctttatccagtctatcaaacctgcatgttctgcacatatatctcagaacttgagtataataaaaaagtaataaaaaaagaatcaatttttaaaaacaatttaagcagtgtgagtaaattattcttttaaatgccttagcagtaaaagtattcacaaatacaataattgtaaaatttattactacatttggagttttgaaaacaccttcactgtagtttaattctccatcacctctgtacctttactcttgtagggttgcaatggttttgacagatgcttctcttacctctctggtgcagataacgtccagcagctcagcacttgcacactgaccaggagggtgcaggcttcatgttttagaccagttagtctgggacaggtgacttggttgcatgttctaagatgatttggaccttgacttcaacgtgagctcctgcttcaaacttaaacaagaatattacttattctctccaatgccaggatggccatagcttggctgggtgtgggggccctttcagctgccactttgtgctgccctgtgctgccccagatgtttgaaggtaccttgctttctggtcagaacattctgtgtgtcaggccctctgattttttcttgcctcaagttgcggaagcagctacttggccaaaaatttttgcatgtttagaaagttgtatttgaggccaggtgcagtggctcatgcctgtaatcccagcactttgggaggccaaggcagtaggatcacttgaggccaggagtttgagaccagcctggccaatgtggcgaaaccccatctctactaaaaatacaaaaattagccaggcatggtggcgggtgcctgtagtcccagctactcgggaggctgaggcataagaatcgcttgaacccaggaggtggaggttacagtgagccaagatcgcgccactgcactccagcctaggcgacggagtaagactccatctcaaaaaaaaaaaaaaaaaaacaactcttggctgcagggctgaccgtgagtatttgaggagaccacttttggtgagagaattggaaataaaccttttgtggcctcgagttcacaatgatttccacagctcctgaccccaatttaattattattaaatgacttattattaggttcattttaaagttattctaatattaaagacaccagaatttcttatctaaatgtatttgcttaaatttgttgagctttggccagaagctactggtaccactttattttcattctccgtgtgctccatttggtccactttgtcactttcctgtcgaatttcacagaggtccatagacagggaggggactgagtcttactgttgatgaagcaaatgtatgtgcattgttctttgacgatctcatctgcatgtattttgagaaggctgataagatagaattttggcaagaaatcacagaaactggagtcactttgcgtgtctcagaggactactgtagggaagcaagcttctgggggctctttgttcaagtatatgagaagctctaaaaatatttatgcactttggctgaaaattctgttcttacggctttatcttcaggagataatcggataagcactaaatttatgtacagagtatgttcactacagcagtaatttaaataattaacaattggaagcaacccaaatacccagtaataaaggatttagtaaatcagttattgtacttcacaacacaatgagatattagaaagcaattagcgtttataggaatgatccatgacatgaaaaaaatgtacccagtatactggcacctaagtcagtaatgtatgtaaaaatggcctatgtgacataaaatgtaagtggatatatgtttgcatgtgtatgtgtgtgtagaagtacaaccaaaggcttacagcacctgtctctgagagctgaggtcactctgctatttgttttcacacatttctgaattttctaagttttcctaaatgaatgtatatcacttttatgctcataggataaataatatctatttttattgttggagaagaattatgtgaatattaacctgatctttgaaatgcagaagtttttttttaagcataaaagcaatccatacaatcttaaataatagagattttcatagacaaatttctttgactattaacaaatattgttaaaaggctaaaaacaagctgttataaatattttctacaaatactacagatacagatttactacactttcttagcaaaaatgtgatctcatttttgttttaaaaatgtatataggtaaatgtagccgggcacagtggctcacgtctgtaatcccagcactttgggaggccaagtgggggtggatcatgaggtcaggagattgagaccatcctggctaacaacggtgaaacatcgtctctactgaaaatattaaaaaaaaacaaaaattagctgggcgtggtggcgttcacctgtagtcccaagctgcttgggaggctgaggcaggagaatcacttgaacccgggaggtggaggttgcagtgagctgatagcgcaccactgcactccagcctggatgacccagcaagacccgtctcaaaaaaaaaaaatgtatataggtaaatgtaataatgagaaagtactagaagaaaatacactctactgctatcattgtttctatctgggaagtgcaggtgcttttacagatgttttttgcacttttctgttctttccagctttctgcacagagagctggcatgtgtttggcaaccaggggacacataggcatcctagagagtggctctgagcacatggcctgccgtctgcggcctagtggcctgctctcgagggaggctctggggcaggcctctgaagaactaattctccatcagggattggtgatcatatgggcagttgtctagagagtctagcagatatattttaggcaacttcactaccctggtgagaggccagacagacttcctatgtctagttctgataatgagagtgacccattcagaaaagggttaagtaaaaatagtgaattttaaaattttaataagttcatgtactaactgacattgaaacaaaaatcatttcgtaaatcattacaagttgatagtgagtaaagcccatcagtgtaattttgtaagattgaaacatgggtatatgtatctatattgacacatacctgaagtatgatctatcttagatatgaaagtgaaatgaaaagtacacattgtgggcagatactgagtgtctggaaggagggaaggggctgctgtcccagcaagggagcacagcccgcacaacacgcaggttggatgccaggcccggggtcgagctcagggtctgtgggatctgcattccctggccttgtcagtcatgtcatggccatgccacttttgaggtggaggagtaaagaagttcacctgctgactgcttccttctttttccgctgagaccatcaccgagagtggtaattatttataatagaaatggtgattactggtggattctgtgataggaattaagttgaatcttccttgcccgtcctcctccagcataagctgttttaaattctagctcccccacatcctgcttcttgttggcactgtaaaactctcaattcactcacctggagggggtaagttaatgagacactctctcccccagatctggagaaattcagagtcaaggctgtccccctcctgaagtcagatccttcctgtggcctatttaggttttaggtaaaaacatagcatttgctcattttcctttattgagatctgttgaagtctgagctcctattaacacatttatcgaaaatggaacctatgagcaaattcctaggagctgcatttccaggggtgtccagctgtgacccaccccgccccctcccggtgttaccctgagttatgagaatgcagtctttggaagtggtgggctaaaacactccacagggtggtgcatgggggctgcccacactccctgctgctttctgctctctgcttgttcatcctctcccaacggggcagccccagaagccaacactgcatgttggaaggagtcccagccctgcccctgccaagcgaggtggggacagctgggaatctcgctgccttcatggtggcgggccaggctgctctgtaacacgaacattaaaactgatttgaggtgttagcggtgtcactgtaagtgtgagaatgagaagcggtgtgagacgtgtagatttgtgggcagtgatggggaacagcaagggtggggtgcctcggtgggatctgaaagagaacccgcccccctcagctggagtggcactctgtaacccgccccccctcagctggagtggcactctgttggctgttgttttcaggctgttgggccgtgaggctgctctggtctgagaaagtgggtggcaggaggacaggacggcctctctgtgagggaggcactgactctcaggagatgctgtcattgggatactacagtattccatgaacttcctctataacttaaatgatgaaagttacagataatagctcaaataaactgttgtgagccgttaagtatggcagtttgtatcatggttaaatctgcagaaggtgtaacattttgcttgggtttttttttgccttattactggccgtgttttaaaaatatctttcttatgaagaaattctgtcgtggctgtgtgatttcccctgcgatgctaggatgtgtttgcaaaccagtggcaatgccagagcctgggccctgggctgcggtgcgttggctgggtgtggtctgtggtagcttccacctgctgcctgcgcttgggaagtgccctgacctctgagcagatgacctctgagcagatgacctctgagcagatggtttctgatggtggttttttttctgattaattgaattacaagtatcctgtggtaggtacagggttttccctttcccttgtccaataaatcttaacttcattctgtgatttttagaaaaggaagaatgcccacagatgtggaggcacagatgccctgggcctcgcagcaagcttatccttaacaacccattctccttcaggccctgccacttagggagaagactgtgggggcagtgcctgcctgtcctctctccattaagcctctgctgggggcctgcctccacagtgctcttcccggtctcagagtggcaggggacacacaggcagggttcttaccaccatggagcttatttctggtgggtggagggagggcccacaaccaaagaaagtgacttacaaacacagcaggcacatgctacatggagagcagggaggctgagcaggagtggctgaggggctgcctggagggtgggcaagggaggactttcggaggaggaggtgttggaactgggtggcaggggggagccaggcatgtgtctaggcaggaggcgtgcatggagcaaagacctgatggaggaaaggaaggggtggggggcagctggggtgaggaagccagtgcaggagatgaggtcaggagagcaggccccctctaggaggtcaggtgtcaccctcagggcagtggacagcatggccccaggccccactgcagaggctcgccctggctgtcgggaaggcactggggtgcaggtttggtacggaggctgcaggtgcccaggcagtgtggttaggcctgctgagatgtggtgcgtgccgaggctgccaatgggactggaaggaggactcagacctgactccgaggggcctgagcaactcaggcaggatgacgtggggagggtcaggtccaaggtaggaggggttaaggatttggtcttggacttcaggtaacagatgtccaagtggcttggccaggtaggcagtggatatgggagttcatgggggagagcaggggcaaggagattaatttaggaaattatcagcagagaaagagagcatggctatggactgggtgggctcatctaggggagaggagcagaggtccaggcccaacacccaggggcctgtggctggagcccagaagagactggtgtggttggaactccaggtggggcttgctccactctatcctgggtgctcatgccccagatctctgtgtgctcaaggagcgttggcagcatcctgacccgccctgctcacatgccccatccctgctttcccctgtcagtgggttgcaggcccatgatcccgccaggcctgtccatctgtccctgtgtcgcagacagtgccaaccttccctgatgtttgtgtctcccgcctgaggcctgcctgtgtttccagtgtcttccaccacggcattcaggatgtggaggacagtgacccgcgtgtggctcccatggctggcctggctggtctggaaagcatgcgttctgctttcctggccagatcgtcttttcatgtgcttatttgccatctgtatattttctttgaagtacctgatcaaatattttgctcattttaaaaactgggttgtttattttcttattgagctttgagaattttttctgtatatattctggatacagtcttttatggggtatgtgttttgcaaatattttctctcagtctgtagcctgacttttcatttttataacagtgacttgaagatgaaaagttttaaaatttggtaacctccaacatcagttttttcttttgtagttcatgccttttgtatcatgcttaagaattctttgttaaattgaaggtctttaagattttatcttattcattcttctataagctttatagttttgactattacatttaagtctatgatccattttgaattaactctatattggatgcaaagaaaatgtcaaggttcttatttttcttgtttttaaaaatacaatgtccagttgttccagcaccatttcttgaaaagattatctgttcctcattaagttgcctgggaagctttgtcaaaatcacttgttcatatgtgtgtgttttcaggatatctgggatttgttttaatacagtgtgctaagacatgagacatagaaatgactgtcatgaaggaagaaagtgtttgtacccacagctccctggaagcaggagcacggctgccaggcagggccacatgggaagcaccgggtaggtcaagaggcagagagagcaaggggacaatgtgggcagggaaagcctcactgtggtctccacaggaggaatgggtgaggcagggggagcaggcttaggagtggcactttgaatcatttcagcaggcccttgggtgtagggtctgtccctagttgtctggtgcctggccttgggtgattggggcaggtggggagtggccccatgtgagaggaggtggttggggtgtgggctctggattggtgggtttgtatttgaaaggtacactccaggatgggttgtttgctatttctaggaattggctaacgctgggagggcagtccctccaggtcagcaagccctggatgtcaaagcatcagacacagaaaaggaaaaacatggttaatactgtgtgcagactatttctggactgtattctattccatgggtcaatttatttatctttataactagctttataataaatcttgaaatcgggcagtataagccctcccattttgttctctttttcaaagttctttggctggtttatttcctcggtatcttcatacaaattctagaattagattagttcagcttttggttggggttgcactgaattgatagatcacttgtggaggttggtatcttgttaaaggaagtgcttggagggtacggtctaactttgttcctgaatttaggggtaaacattcagttttcacccttgtgtatactgctagctgtatgtttcaactggaggtcctttatcaggttcagaaagagtccttaaattcccaggttgctgaggatttttatcatgagttaatactgaattttgtcaaatgttttctctgtatctattgagatgatcatatggtgtttcttttttgtttatatggtgaattacattgatagctttaaaaaacaatagtaagccagttgcatttctgggttaaaacccactttatctgcatgtatttattttatattgttggatttttatatgctaaaatttaagaattttggcatctatatttctgaggaatattgatgtcttttcttatgtgtatttttctgattttttatcatgttaatgcttgccttatagaatgaattgggaagtattctctcatcttcagttttctagatgagttagtaagaaattgatattatttcttccttgtatattttattttatagaattcacctgcaaagtcatctcggtcagcacttttctttgtgggaaggttttatcttgaatgcagtttctttggtatgtatataggattatttaattctccttaagtgagttttgattatttgattcttgtaagaacttgctccatctaagttagcagatttactgacatgcagtagttcatagcatccgcttattgtatttatttatttattgaggtgaaattcacttaaaatgcaattaaagtgcacttaaaatgcaattaaagtacaccaaattaaagtgtacaatttggtgcattcagaatgttgtacaaccagtacccagtttcaagactttttcaaaacttttttgttaccacgaaggaatacctcccacccattaagtaatcactcctggtctccccctgtccttatgccctggaaaccactaacctgctttttgtctctatggacttgcctgttctagatatttcatctgaagaaataatgcaatatataaccttttacgtctgggttctttcacttagccccgcttggaggttcatctgtaacacgtgctgtacttcattccttttgatgtctgcagaatactccactgatgcctgtaccagatgtgtttatccattcatttgctgatggacatttgggttgtttccccgtgttggctattatgaatagcactgttatgaacaagtatctgcttacatgtgtatttttaattcttttgggtctgtacctaggaggggagttgctgtcctatggtgattctatgtttaactttttgaggaactgccagactgttttccaccctagcagcaccatttttcatttccaccagcgatgtatgaggttgcctgtttctccaggtcctcaccaacacttctgttagacttttttgattatagccattctggtgtgaagtggtatcacattgtggtttgacctaattgtcttcataatatcttttgtgtctgtataatgttctatttctcattcttgatattggtaatttgggccttctaccttttttcttggtcagtgcaactagatatttatcaatattatgtgccttattaaagaaccaactttcggttttattaattttctgtattttttacttctatttatatatttttagagacagaggcttgctctgtaaccttgaacttcttggctcacgtgatcttcctgcctctgcctctcaagtagctaggattacagggatgttccaccatctaccatgcctggttaatgtaaaaaaatttttttgtagagagtaggtcttgctatgttgcccaggctggtctcaaactcctggcttcaagtgatcttcccactttagtctcctgaagcaagtatttttaaaatggcttttcagcttatagatttttattctttatttcctttcttctgcttgttttgctctgttttagtaagcttaggtaatggatttgagaccttttatttccctaatataatcatttagtgctgttgatttccctcttggtactgcttttactgcctcccacatattttgatatgtagtgttttcatttttattcaggtcaaaatgctttcttatttccattgtgttttttctttgacccatatgttatttagacatgtgctgtttattttccaagtatttggaaaacttcccaaatacttttttgttcctgttttctaatttaattgatttctaatttaattccattgtggtcaggaaacattttttttattcctttacagttttattgaaatttaaaaaaaattttcagaatattacctttgaaaatatctcatgaccacttgaaaagaaggcatattctgttataattgtgtggagtgttctataaatgtcagttaaataatgttggatgataatgttatttgagtctcctatatcccgtactgatcttctgtgtaggtttttacaaaatcagttattgaaagagaagtgtagaaagcttccattataattgtggatttatctatttggtggggggttgctttatatatttttaagctctttattaggtgtgtgaacgtttagggttattattttctcttgataaactgaccccttaattattatataatgtccttatttacttgtggtaatattatgtaccctgaaatctactttttctgatattaagatagtcactccaccttttttttattagagttaacatgtcacattttttcccatcctttttcttttaacctctgtgtatgtttatatttaaagtgggtttcttacaaatagcttatagcgtggtcttgtttttttatcaagtcttaaaaggtacattttaattgggatgttgagaccattcatatttaatgtgattattgatatggttgggtataaatctgtcattttgctgttggatttctatttttcccacttgttattagagtccccttttttctctcattctcctttattttggattgagtactttctatgatcagttttattacctttactagctttgttgcccacacaatgggtgggttcaattgcttggccaccaatagtacaatgagctcaaccaaggaggatttaacaagggaatctaaaattgcagcaagtaaggaggacaccagggataaatctccaaagcaacgcctccctgaacaacgctgaaaacaccgtttttaggctcgttagctgaatcattgtgtgtagaaggtacagtcaaggcagcacaggcacagttgtcagtcatgcttctacatacatcacaggtatacaagatggcaaataagctcttctctgggcggagtttttagtgtggtaatgaggagagtttgccaaagttcatctccaactgaggcctctctggatctaactggcttttgtttcaccagcactgggcttcttcctggaacttttcttaaacaacaactcaagatgcaacagttaaagtggatactttttacagtatatgcctgaaaacctgaggacattgggttgcagcttattagctttatctctgtgttttcagaggttgctttaggatttgttgtatatttccttaagctaccatagtcatctgcaagtaatatcataccagttcacatataatgtaagaacattaccaaagtataccctctcacttctggctattacattatgcccttatctcctcacttcgatattgtcataagccccacaatgcattgccttttttttttcttttgctttacatagtctattatctttgaaagcaatcttaaaaaattaagaacaaaaggcttttatattttacatattttctgtttcaatggttttcacttctttttgtagatccagatttccttctggtattattttccttttgtgttttgtacttcttttaatattatttgcagttcaggtatgttggataatgaattattttagcttttgtttgttagaaaaaatcttctttttacttttatatttgaaagttatttttactatgtatagtattccaggttggtagccttttctttcattactttagagatagaattcaattggctcctgacttgcactgtttctgaaaagttctctgttcaccctgtctgtgcttgtctctttgtacatagtttcctattttaaaaaattaattatattgtgtatatctaaggtacacaatataatgttataaaatacagataataaaaaggttcctgtagtgaagcaaattaacatacccatcatctcacataggtacccagttttgatttgttttgtttttctgtggcaagagcagcaaatgagtagattttagctgctcttgccataatgtttcttttttactggctgcctttacgattttttttttttttacataatttgattatgacgtgccttggtttagtttaatgttatttatttatttatttatttgtggttggggattgttgacctttctgaatctatgtatgggcttaaattttcatccatttttgaaaactttttgtaattttttttgtctgttttagagacaaggcctcgttctgtcacccaggctggagtgcagtgatgcaatcacagttcagagtagacttgaattcctgggctcaggtaatcctccaacctcagcctcctgagtagctggactacaggtgtgtgccaccatgcctggctgattttaaaaatgtttttgtatagatggagtctcactgtgttgtccaggctggtctcaaactcctgggctctcagagtgctgggattacaggcttgagccactctgccctgccttttgtcattattttttaaaatatgtttttggcttgtcccatcccctgcttctgggtctccaattacacatatatttttgtcttttgggagtagagaatctttatctgtgttttattttaggtagtttctgtctgcacagattattctgtctgtacattgactgatcttttcttttgtggtctaatatggtgttaatcccagtcagtatatttttttaaatctcagatgtatttttcatctctgcatgcttgatttgtgtgttttaaaaatacttttcttgtctctccttagcattttatgctttcctgtatcatcttctacatatacaatgtatttatgatagatgttttatttatttatgtatttattttttgagatggattcgctctgtcgcccaggctggagtgcagtggtgccatctcggctcactgcaagctccacctcctgggttcacgccattctcctgcctcagcctcccaagtagctgggactacaggcgcccgccatcatgcctggctaatttttttgtgtgtatttttggtacagacggggtttcactgtgttagccaggatggtctcgatctcctgacctcatgatctgcccgcctcggcctcccaaagtgctgggattacaggcatgagccaccgtgcctggcctatttatttatttatgtatttatttattcaaatggagtctagctctgtcacccaggctgcagtgcagtggtgcgatcttggctcactgaagcctctacttcctgggtttaagcaattctcctgcttcagcctcccaagtagttgggattacaggtgcccaccaccacgcctggttaatttttgtatttttaatagagatgggatttcatcatgttgctcaggctggtcttgaactcctgacctcgagtgatctgcctgcctctgcctcctaaagtgtataatagctgttttaatgtctttgtgtactaatgatctctgtgtgtataatttctgagtttgtatcttactgatcaaccaatctcattatgagatatatttttgtgcttctttgcatgcctcgtcagttttggacggatgaaagacatcgtaaactttgtattgttggactctgcattcttttaaaatattttgaactatgttttggaatgcatttaagttacttggaaagttcagattttttggcagcttgttgctgactttgttaagcattgcctagtgtagtaccccagcttagtctgctgccagtgcagtcatttgagtgctcagtgtggtgtcccctgtactgcaaggctcctgcagcctagttgttgggagtaggaactcttcccagatctgtgtgagccatagctattgtctgtactttttcttttcattggttcttcccccgacctcctgtagtccactcactcacatgtgcccatccatgtccaggcagagactagagaatccaccacagacctctgggatgtttctctgtgcagggcattcctttctggtactctgccctctaattctagcttttgcctcctgtgctgtggggtcctgagtgcagtgcatcctgatgagacggtgctgcaggcccagcccaccgacttccagagatgtcagttgcatctctcccctttcctctctgcctttgcctccctgaattctcaactccgtttccaactcccctggccttgcctgggttcccccttcctgtgctgtggcccaggcactctccccaggctgtaggctgcagcaattgtaggatgcaacccatttgcttcccttctctggggatcgttgtcctgtgctgcctgctgctccatgtctgaacaccctcgtctcatatcttttgtctgacttttaagtgaggtgggagagtcatcccagtctcactctttctctgtcacagctgaccatggtccaggctttcttatgtttctgtagtctttggacatcactggacagaggccggctgtctgtctgtaggagtctctgcgcggtgttcacctgctaattcagtctgcacagggagaacccttggcctgtggtccaggtgaaggcccttcagggtggagccgagactgtgggtgttctgggctgtcccgtcccgtatactctccctgtgttcttaccttcccctatagattcagagggatttgagaatcagctgtgccccagacgtcagtcaggccgaggactgtgggtcaaggttcagggaccctggggttctgagtctttatcagtgtcgtgtatgttccagactcagtttagaattgaatcactttttatggaattctttctctgggaaactgtctttgaccttcccaataactgatttataaacatgtctttttaatagatgactttggtttgataaaatttggtatctaaggtgatagattgtgatttctgtctctctttggaaagcctatgatttccaattttaattgttttttccttcaactgtttacaggactgtctacaagagagaagctccccacgtggttccgtgtaagtagtgcttcttatgatgctgtcacaggcgatatttttagactaaacgactctttcggtgtcagcagagttgaaagtcttgctctcaagggaagctgtgtgtctctgctgaccctctggatcctggttttatgtctcatggggaacctgcctcaggtcacactactgccaagagcatgtagtgtgagtgacacgcgttttcccttcttgcttctgtggaaccaaaattttaaaagaggcagtttcctccctctctggtaacctttctccacagttaacctgaccatgtagaccagcaggagctggagggccagttgttagtgcacttggagcctactgcacgagcctaccgcacaagcctaccgcacgcctttgttcttgtgccaacagtgcccactgcccggtagtgcctgtgtgtgcggtggccatgatggcaccacaatgtctgaagccacacagtgcatgggtgacatctgtggaaaggacctggcaccggccagcacacagaggcactcacctgtctcacacaatgcactgtggtcccaattctagttttgtaaaactaccttgagatgactccttttaaaattatccttaagatgtctttctttttctaaagcttattaaaggtcattttcaaaacgttttcagcaggaacttggtgtatatttgcagttctgcatggaaaactaatggagtcatgatggctgctgatgctgatgaagtagtaccagccagcctgatttcataacttccatagaatcactcccttcttcctcccagtgcccctttgagatagggattgttattccctgaggcttggcgaggtgaagtaactcactcaggttatcttggtgccagtggtggggctgggatttgagccaagtcttccaacttcacaatagcagagtaagaagagctgccttgttgatgggacgtgggtcggagctcccagtgtgtcttgccttcctggtgtgcttgatggcagccctgggctgctgtgaggtcctgagcacagtgcatcctgaggagacagtgctgcgggccccgcctactaacttccagagatgtcagctgcagcagggcagcgccctggttagagagacggcatggggagttggcagggggaggccctcggagagatggcatggggagttggcagggggaggctctcggagagatggcatggaggggttggggcctgtgctcctaggtgcttaggcttgcaggtgactggaatcctgactaatatcataagaggagagttcttactaacaaattacttgaacaaagactttgtttgttccttcattcgttcagcacatgtttacagtgtgcctgtgatgtcccaggcgcactgccagaatcctgacatccttgtggggggatcgaaaacataaatctagtcagtgagttcatcctgtggcatgtcagggggtgacagtggctgtggaggaaacagggaagggcagggtgtgggagtcctggtgctgtgtgaataggccgtcaggtcagccctgagacacggggcatctgcgcgagtcttgctggaggtgcacgtgtgagccccttggtgcaggaggtgaggagctgcagggccaagggggtttggagcagaagctcgggtctgacatgcctggtgcatccatggggcagtgaggaggctgcggggcaggaggtgagagtgccgcgggttaggaggtgagggtgcagctggggcacatcaggggtctcacaggtcatcccgaggctgctctcagtccacgtggcgtcggggctgagaggagcccacagcagggtgggtgtgggagcagggagccagccagtctcttctctgtgctaggttattgttgtggctttagctaaagctgctgtaatacctgtttcttagaggaatccaaatccctgttgccttggggccaactttgtaatcttacaaatctggatctaattttcaccaaactctcaagggaagagcctctgggactcagacagataaacaacacctgttatgtgctgttcccattttctcttcgactttggtgttgtccaaattcttctgagcctaactgtaggctcttcagacccagcctacagttctggaaataaaccagcgtgctggggtggggcgagcccgaccatgcaagccatgccccggcagccaggctgagaggcagagcaagcagtgcaggtggacccatcgcctgccagcatgtgggttctggaggctgcagcaggcagattctggaaattccctgaggccttcgttcagtacagacagggaacttttataggtacctgtggcctcttctgctggtgggaatggaggtgccatgagcactgagctggttggaacagaagggctctcctctcgtgggctgtgtcgagtgagtcctgcagcttctcgctgtgagattctggggtgccatgatgaagcagagcggagctcatctgagtggatgtttcccaggggagccagtagttttggaagcacttggtttttccattcccatgtcttggaggactcttcccccttcctgagagagagcgatgaatgtaggcctccatggagaagcacaggtgccttccctgggctgtgtgtggtccgtgcagacctctcaggtccacttcattttgcaggtaaggacccatctcccatagctggttagtgccagagcccactcctagccccatgtaggggctgtttttcagctacagcaagatcaggaaataagaagtagtaatgaatacttcattgaagatttttatttactttgaggtcttttatttcttgtaatactgaattggttatttgcttcttagagtttttttttttttttttgagacagtctagctctgtcgcccaggctggagtgcagtggtgccatcttggctcacttcaagctccgcctcccgggttcacgccattctcctacctcagcctcctgagtagctgggactacagacgcccgccaccacgcccagctaattttttgtattcttagtagagacggggtttcaccgtgttcgccaggatggtctcgatctcctgacctcgtgatccacacgcctcggcctcccaaagtgctgggattccagtcgtgagccactgcgcctggcctagagttttttgctttccgtaagataacaattttccttatagaactgaaaaatatgaaaaacaatttaaaaattcacctatgcttagccttagtgcagagagcagctgaagggtatcaggggattgtcctcaccccttcctgtccatggccccctgggtagcccccccatcttcatcagcccaccccttcctgtccattgtcttctgcgtggcccctcccatcttcatcagcccaccccttcttgtccatggtcctctgggtggctcccccatcttcatcagcccaccccttcctgtccacggtcctctgggtagcccccctatcttcatcagcccaccccttcctgtccacgatcctctgggtggcccccccatcttcatcagcccaccccttcctgtccacggtcctctgggtagcccccccatcttcagcccaccccttcctgtccacggtcctctgggtggccccaccatcttcatcagcccaccccttcctgtccacggtcctctgggtagccccccatcttcatcagcccaccccttcctgtccgcggtcctctgggtggcccccccatcttcatcagcccaccccttcctgtccattgtcctctgggtggccctcccccatcttcatcagcccaccccttcctgcccattgtcctctgggtggcaccccccatcttcatcagcccaccccttcctgtccatggccccctggatggcccccccatcttcatcagcccaccccttcctgtgcattgtcctctgggtggcccctcccatcttcaacagcccaccccttcctgtccacggtcctctgggtagcccccccatcttcatcagcccaccacttcctgtttgtccatggccccctggatggcccccccatcttcatcagcccaccacttcctgtttgtccatggcctcctgggtggccccccgatcttcagcccaccccttcccgtccatggtcttctgggtggcccctcccttcttcatcagcccatccttcctgtccattgtcctctgggtgcccccccccatcttcatcagcccaccccttcctgtccattgtcctctgggtggcccctcccatcttcatcagcccaccccttcctatccattgtcctctgggtggcccccccatcttcatcagcccacccttcctgtccattgtgctctgggtggaccccccatcttcatcagcccaccccttcctgcccatggccctctgggtggcctccccatcttcatcagcccacagcacctggtgctgcattgtagtcactgtcacacacactctcttcgctttgcctctgtgtcctcccagtgtccatgtggtagaacaagatcacagcattgatggagaccacatagctgtgcagactagtctcgtctaatttcacagccaagggcttggatccaccctcacttgcctagtcccagcagcacccccttgaagaattgcttttgcctgagtccattctgttctgtctgcttccccttcctcagatctctgatctaatcagatgtgagtctcagctggcgtctatgcctcagagttaaggagaagagagttgcttctctgccccatcctccgacccaaggggctaagtcgcgtttcctcccttggcctttcctgcccctcaagtgcaaggagccctcgctgttagctcaggacaagcccaccctcttgtttcctcagggacttgccccgctgtgtggtctgtggtgccatctctctgcgtgcccgcctcactggcaggtcacttctgttagcatccgggatgacttagtagctcccatgttaaaattaaaaaaaattattcccttgatccttgattttcagccagattggcaaattgatttcacagtgacctctgcttcctcttaaaagcccactaaaatgacaggcaagatgtttttaaagggcaaaagtcaccaagaaattgagaaagaagatgacagaactttgaaagttggaaggcaaatggtcagagcagatctgaacctagaaagctgagaggtgcgtgtgtgtgtgcatgtgagtgtgtgtgtggtgtgtgtagtgtgtgtgtgtgtgtgaagtgtgtgtgcatgtgtatttacccacacaggtctgtgtgtacacatgcgtgtgtgtatgtgtgtgcaggtgagtgtgtatataggtgtgcacgcatgcgtgtgtgtgtggaaggtgtgtgcatgtgtgtgtggtatgtgtgcatctgttatatgtgtgtgtgttgaggggactgagaagtgagtttcttgtgttgcagacagtgcccccacgtcttgggaatggcgttactgtgcagctgaacatggggaggcagtagagatacggttgacataggaaagctgtggaaagcttgtctgagaaggagtcagcctctcagccctctcctacccagtctggttcctccctggaaggtgacttgggagcctgccctgcggtgggggactgtcctaaacggaaagcagggcacgggatggcttcactccagctcctccttatttggccccagagcactgggaacctaggaacagacacaggagggagggaaaggagccacttggtgggtgaggaagctggacgctggggccctggggcgtggctccaagaagggctggagggtgatgtcgggatgagtgggtctgcagtggtcggccccatggctaggagtttggaaagaaatcaacctaagttcatagaacaccaaagaaagcagtggggaggcccttattcactgtgagaagcagaaacattgtgcaagaagggagctgcagcatcaggtgtgggtaccaggtgcacagccagcgaggggagtcctggaaagtggggaggagggcgaggtaggggctcaggagagtcagtgctcatcttttatagcaggaagctaacagctgatacataaagttgtaagatcaagaatagcaatacaaactcagtaattagaaatatggagataaagaaatgccaaaagaggctaagagctcagggaaggattgtgatgtagggggcaagggaggggtagggccactgcttttcataagctttatcgaattatttgcttttaaaaactgtgtatatttatagttttattaaaaataaaaaattttaaaggttatatggcaaatattattttataaaaaattgatgaacctcaggccctgagctcccttgcttgccctgctcctgccagggcagacttccactgcccttgccctctggtcctctccacttcagaggcccggcctctggcttggtgaatctgaggcagatctttctcctcaggttgcttgagctctgcagcgttaggcctggtgagcgcctcttgcccagtgccctgggggcggtggggaaattccagtccagactgtctgcctcaggcattcagtacacactttcgtgccctgctttttaactgaatagtattctgcaaagtgttcgaccttacctagtttgagaacattatttttagaaggttgcatggtttcccatgttgtggatctaggtatcatttattggattattccctttttgtttattttttctgattttccactaatatccataatacgaggtaaacacccttgtgcataaatccacagcagcttcctctcttttgtaggcagtgttcacacctacagaattcctgggtcagaggacatggacatttaaaagaggcataatgtgtaattgccaggttgatctcaaaagtgcaagtttgtacttgaacaaggctgtaccagagtgcctgtgctgttgtatcctgacacaccaggtactgcatacgtctccatctcgaaatgcagaagcacactgaacacacatggcttagctctttaacaataatgtcgttttcccccatgctcataagcattcttgcattattgaagatactctgcttttatgtctgtgggaggaattttccccagttgagtcgtgcactttttcatctgatctgtagcattttgggtagctcgctcagtattttccgttgtgatgtcgtctcttattgtgtttacatttagaaaatccttttcttgggatttaattaggtgtatgttcttaggtgaagatctaagttattttttcttatattagaaacaccatttattcaaaatacttcatttttctaatgattcatgctgcaactttttatgtatgtgtaccacatatgaaaatattgtgtattttagtgtctgtttctgaattctctaattgacctctttgttctagtgctggtacactgttttaattattttagtttcacgatatatttccatatctgataaaggtaaccaatatttcaaaaaatattttggttattcttggctacctactttctaaatgaactttagaatgattttcaagtttaaaaagttaatcatattgaggtttcttttcaaatggatcagatctataatttaaattataaacagctgacattttaacaatatttaaatagtttcctatatagaaagggaatctgtctttccatttattctgttattagccttcagttacatttcatagctttcttgctgtaggttttatctttcaaatttttttccaactaatttgtgttatttggttattgtaattgggatttttcccattgcatttatcaaatatttaacattatataggaaaactatcagtttttatatatttgaatgtggtcacatgttaaaatggttttatttgcaaaagggttttcaggtgaaatttgacttatttttaccttgacccaacattcaccatgaagtatgctccctgtagctctctggtatatattcttcattaagctacagaagttttcttttattgctatttattaagttacgtgttttttaaaatcaaaaaagttgcatttcactaaatgtgttcattgctactatttaggtggttgtatgattcctgcttttgtctctcaatggagtgaattctgttcctgacattccaagtgttgattcttggaataaaccccgttaggccatagctcttccaattataatatgctcccagtatcttattgggactagaataagggttaataatagggttagggctagagttaaggctagcataagggttggagttaccgttagtgttcgagttattgtaaaggttaggattagggttactgttagggttatcgtgagggttatggctagggtgatagtgctctataaggttcttttttttctaatttttatatgattttggcaataaatgatagcttgctttcataacatgatttgagaattgtcccatgtttttctatcctttaaataacaaatttttctgtcttctgtttagaaatgcaaatgttatcagccttcgatagaattctacctttaatagaattcgtctatcaaagctgctaagcctggagcctattttggagactgattttttagtgtctatataatttctaccatggttattgattttatacacattttcttatacaccaatggttttttgcttaggaaacagtcagttttaagcaagtttttaggtatataggtaaaaatgtgtatatgttttatatatatatatacatatgtatgtatataacatatatatgttgtgctcgtcatttttcagtctttaaaaatttttaacttaatttaatttttctttttattatttttttagagacagagccacactctgttggatgttgatcccagctcaccgcagccttgaactcctgggctcaagcgatccttccacctcagtctcccacgtagctgggactacaggcatgtgccaacgcatccagctaatttttaaaatttttttaggcactggggtcttgcttagatgctcaggctagtctcaaactccttggcctcaagtgatcttcctgccacgtcctctcaaagtgctaggattacaggtgtaggccaccatgccgggcctagtttttcagtcattttatctgttactgtgttccctttatttctagtacttacttcagcattttagtcacatttgtctaattttttctccaaaatagctttcatttatattgatcatttataattttactattaatttctcattttagcatacattataattataattctctttttcttcaagttaatgctattattttaatagtttcctgagtgcttctttgaacattttcatttattttctgactaatgcatttgactctcagtcttctaagacacttttaactctgttctactggctttatatgtactgacctgttgtccctcatgtttttattatttaatttaaaagattaatttcttggtagtcctgtctaggaggactattcttttgttgttaagtttctactttttaagtatcatgtttgccctgtgtgggtcagagagggactgggccctttgtgactgtgggtgttttgtaggagatggctgtggggcttggggatggaagagtggcacccactgtaggcatgtcacaggctgtcacggagcagcagggtacagtgtgagcagtggagaaggtgcccagagggaccccatggggttgtatgctgcctgtggtcctgggagatggagtgatcgctctggaagaaaaacattctggagtttgtggggagcagacagacttctgtgtgagacccataggagacatgccatggaggcttttggaatcctggctcacagctgaggggacggtgtggggcatacagagagccacgtgccaagaggaagagttgaacccaggggaaagggtaagctgtggaaatacagagcttcccagacccaccagctttatttaataaggtcagatgctctcgttgacatcagcgttcctggatgggagggctgggctctgtgaggccctccccggcctggactctgggtggcctgccattctcgatgtgtggtttctgtctcttgctatgttgtcatgactgcagagttggaaggaacccagatgcacctcgtgtgttctagcctgtggatgcaacaggggacaacttcattttaagaactggaggcccaagttatgctgacgtgtatcatggtatctgagaccaggtgtgtctaacatgtgccaggtgaccctctctgcagaggagctgggcaatgcattctcccgctgggcagccttgggctcagccaaagctctgtcttcacggagaaagggaggaagggacaggggaagagcttctgcctccataggcgaggatgaggacataggaggcactgaatagtggccaggagaggagtgagtgaggacctgggggtcacccacacttcagagtgaggcgcacttgcaagagtgttggcatcgtgtgaaggcagacagcgccacacggtgttgtgtcagcatcgctgtgtcagtccattgacgtagcgccacacggtgttgtgtcagcatcgctgtgtcagtccattgacgtagcgcacacggtgttgtgtcagcatcgctgtcagtccattgacgtagcacacacggtgttgtgtcagcatcgccgtgtcagtccactgacgtagcgcacacggtgttgtcagcatcgctgtgtcagtccactgacgtagcgcacacggtgttgtgtcagcatcgctgtcagtccattgacgtagcgccacacggtgttgtcagcatcaccgtgtcagtccattgacgtagcgcacacggtgttgtcagcatcgccgtgtcagtccattgacgtagcgcacacggtgttgtcagcatcgccgtgtcagtccattgacgtagcgcacacggtgttgtcagcatcgccgtgtcagtccattgacgtagcgcacacggtgttgtcagcatcgccgtgtcagtccattgacgtagcgcacacggtggtgtcagcatcgccgtgtcagtccattgacgtagcgcacacggtggtgtcagcatcgccgtgtcagtccattgacgtagcgcacacggtggtgtcagcatcgccgtgtcagtccattgacgtagcgcacacggtggtgtcagcatcgccgtgtcagtccattgacgtagcgcacacggtggtgtcagcatcgccgtgtcagtccattgacgtagcgcacacggtggtgtcagcatcgccgtgtcagtccactgacgtagcgccacatggtggtgtcagcatcgccgtgtcagtccactgacgtagcgcacacggtgttgtgtcagcatcgccgtgtcagtccactgacgtagcgcacacggtgttgtgtcagcatcgccgtgtcagtccactgacgtagcgcacacggtgttgtgtcagcatcgccgtgtcagtccactgacgtagcgcacacggtgttgtgtcagcatcgccgtgtcagtccactgacgtagcgcacacggtgttgtgtcagcatcgccgtgtcagtccattgacgtagcgcacacggtgttgtcagcatcgctgtgtcagtccattgacgtagcgcacacggtgttgtcagcatcgctgtgtcagtccattttcatactgttatgaagagatacccgagactgggtaatttataaagaaaaagaggtttaggggactcagttccacatggctggggaggcctcacaatcatggccaaagacaaaggaggatcaaaggtgcatcttacatggtggcaggcaagagagcatgtgcgagggaactgcctttttataaaaccatcagtctggtgagatttattcactaccatgagaacatgagaaaaacccacccccatgattcaattacctcccactgggtacctcccacgacacgtggggattatgggagctacaattcaaaatgagatttgggtgcagacacaggcaagccatatcaattgcaaagcccaccgggcatccttgttctgagaggagcaccaggccgcggggtgagctctgggcctgctgagcctcctggactctggccagcacaagccctaacatccataggtgctgctgcagtgacagtggggcggttccagcccctcccagccaagacccagggcctgcggggatgggcagcactatttcactgtggaaatgcgggccccagaaccaggagggccagggaagacctggaggtcttggccggctggggcagggcgttttcacatgctctcagtcacagaggctgcggtcttgcccttaccccgctcctcgccagccagcagaagctctgcagcctcatcgaatctcaggttctttatttggaaatggtgcagcacacctctcgagggaggacagactgccatgggcccagcggaggtctcatggcactggtgtccttctttcctccctcctctgagttttctccttggctaggtagcgttccttctggaccttctctgctttgcttttttccctctcaccgggatttggagagtgctgccctcccggaggttgagatcagattgcagcctggcacggagggatgatcatttttcgtgatgactcatccctcctccgtgccgtgctgccaggctgtctggcggccctgcgtgcagagacagtgatagatctggagagctgttgctgctggtccgtggtgactggggatggcatgtcaggtggagaagaatttcctctgtgtgcgcatttagacaggtgggagtcagcatttctgtgtgcttttattttacaaatgcaccatccattcattggagatgcagtctatctactcttgctcgtcagcgtgcatggtgagctgcgtccatcccagtctcctgctccacccaggcctctgtcgtcttcctctggatctgcagggacacttgacagcttacttcattctgtgtagggttcatgcctttgcgccataggccctgtgtgaatggtgtcacagaggccaccctgtctttggcgatgaagggcagtcagtgatagactccgggagcactgagctaggctgaggcttttggtgtgggtgtgagctttgctccaagtgctctggccattttgctcttctgaggtacaggctgacagccctgcagctttgttcaccctggtagtgagtaaatgggtttgactttacccacctgtttcccagcctctgcccttgcagcaaacccaagataggactcctctgaacacggctgcatccacatgtaccttctttgctgagcttgtgcctctggccacatccagcagggctggttgcagttgggggcaggtgttaggagcacagcggtgagctgttgtcatcgttcccttgtgttaagctggcagagtctgagcacaagtcacgggaagagaagtgtccggtaggaacccagctgggctggtggagcaggactagctgagaatccagagactgtgttctgcttcctgcttctctcccagatcaccacgtgacctcggctaggttccttccctctctgtgctgcttttccatctgtgagactgggtctcctgacctgttcctgccctgacccttgggggaaggttgcttcagcttttacaaagagggcaagaaccaccagtgtctttctaggaacaaacatatgacctatgagaagatggtttccataatcattattatgttccctgcaaaagttcctcacttaattcctgtaattctccaaggtctttgattaaccctttttatcagtaaagaaacagagactaaagatgagccagcattggagcagaatccagcccatagttgcccgttttcagaaccttctctccttcactttattgctattagattgtaagaagttcagatctcaagtactcatggtcaaattaccatccagagtcacggatgttttacacgttcaccagcatttcatgagagtgtctgtgtgagcgcccttcagtcacactgcgtcttttctttgttccagcttcagaagggaggaaaacacagaagacgagggctgaaagatggcattggacttggcacagggatggtcaggaggtcctgagtcactttgagaaggtacaaaggaagccagattgagccagcttgaagagtcagggagagggaggggtggagatggctgtggaaaatgtttgactctgaaaacttggggtctagaagggaggtgtttgggttgcatctttagtatgagctacttggttatatttaaagcctgaaaatgagttagtagagaaactttgaaaattaagagacagagagcacgtggatgctgctagacattggtccctgaggagtcaagagggtgattcagaggatggagaggtgctgtttcctgggaatgggggtgtcctctcatcaccacagcaccattgtcagcttacaaaacccgtctagatgctgcaccccagtatttccagtccccccagtaatgtcttttatattattttccctccagcacaggatgtggtctgggatcaggtgttgcatctgcttgttgtgtgtctgtcatctctgtcaatcaggaacattttccacagcctttctgtcactttcatgacattgatgttttgaagaacagtctcttttaataagtagatgtttccccctttggggcgtgtccagggactcctgtgataggattcactcgggcactcttggctggcgcctgcctgcgtgggattgtgcttcctcagggcctcacctcgccaggtgcggagcaacgctctgcccccacgttgggatgtgaggttgccgactcagtgcagagctgtttggcttctcccgactttggttaccactcacgactaataaaccatctgcaagaagcccctggaagaccatgcggaaatcctgcatcttgtgacgtttccccaggacttagccgtggttggtttctgccttgacccgtctttactgtgatggctgtaagtggtgcttgtgcagctcccatgcagacttggccacctgctgggagcagaccccccccccccccccttcttcctggactcctgtgtcttcattcaccgctgtcctagtgtctaattcatcactgtcctcgaggattttgtgctcaaattctcctagatttgatcagtgggagcccaccaggccaattcccagctccttccctctttcgttcccacctccttccctctttcgttccccaccttcctttctcttcctgctaccctctgcctcatttaaagaaacagtttcctaacttttccatataatgtttcacacccatcttgtacctaacctacccagccctggagtccaccagatgtttgaagggctctagtttttgtagtgtgaaaatgttaccaaggaacaatatctgggtacaaggtaggcttattgctgtcgagtgtctttgcttctaaccctgttaggggtcagagctgggaaatacgtgcatgtacacatacacacctctgtgtaagcatacatacatgtaagtgtgtgtgtgtgtgtgtgtgtatatatatatatgcacatatacatgcatatatgtgcgtgtataaaacagacaagtcccacaatgtcctttctcttcctgttatccccaccccttgtacatgacagtgatgttctaaggtggtctctcaccagctcctggagccacttctgcacatctcttcccagctctgtgtttagtgacatcatgcggtaggttggaagtcgcccacggtgggagggtttgcacatggaaggaaactggcaaacactacaggccgggtcctccctcccacctcaggagctgtttgttaaacgtttgctggcatacctctaggcaaacacatttttacaattagccttccatatgtatgttttctgtttctcttcttttttctttctcacctaaaatatactaatgtatcttgctacatatgttctctttttactatttttattgtaaacatatataacattacatttgctatttaagctgtttttaagcgtataattcagtggcatttattacattcacagtgccgtgccaccatctacatctccctttttgtactttgtgttttctattaaacagcatccctggagtcgctctgtaccagggtggagtgatcgtcctcattcttccttttgcttcctctgctgcccagtgctgcgtcctcgtctgggtttcatgatggtgggatgatgacgtagtttacgatattttgcagttacacccagtgcagtggtgaatagccttgtgcacttgtgtttgtgtgtgactgtatctcccggaaaggccttagcggggtgattgctgggttcagtggcagtgctcagtgctcctccttcagttagacagttgcaaatcaccttcaaggggtggccaccgccctccatgaccaccacagccacaccatggggtctgttcttcagctcatgactttttgctaaagtgatgcctgaacagcgtagctcagcgtggttttaatttgcatttctcttcttgtgagtgaagtagagcaccttttcatatgtttaaggacattttttatgtctcttttcatgtattttgtacatttttctatagggtttttggtcttttttgtcccctcaatttaaacatttatttatttattggtatcttagagatattatttcttttcctgtggaatatgctgcaaatattttcttccatttagtatttctgtcatattttctcatgtcattttgctatgccaaagattttttatttttatagtcaaatttatcttttatctagatttttaattcacaattagaaagcctttttctacacccagattaaagaggaaattactcatgttttattctagtacttgtgtagtttaattttttattagtttattttaatgaatttttcaattgttgatttttttctatgggatgtttatttttctatttcattaatctaagtttttatttcttccttttttttccagtttatgtttctgttctttttcaaatttatattggatgtttgctcattgatattcagctttttaaaaatatagatcagcgtttaaagttgtacatttccctcaaagtacagcttgttgcagtgcatagatttagatatatagtacttttattatccttaacttataaatgttgtcttgtttctactgtgactccttttttggcttatgagttatttagaagtatttctcaattccaaatacacagagctttaaaaatcatgtaaaaatatacatttatatttatatatacataattttaagtattttagtttctaagttcactgcattgtggaccaggtgatctctgtgtttgcagtcaaagggcggctcacacatggtcaagtattataaatgtcctgtgtatctgacaatggaatctattctacaattttgagtatacgctttctgtatatggccattaagtgaagcttaataatcttgtcttttctgtcctcatagatatttttatctgtggcatcctcctgtagtctcagcattttgggaggctgaagatgagagggttgcttgaggccaggagttcaagacaaacctaggcaacatagcaaccctgtctctccaaaaaaaaaaaaaaaaaaaaaaattagctgagcatggtggtgtgcacctgtagtcctagctactcaagaggatccttgagcccaggaggttgaggctgtagtgaattatgattgtaccactgcatgacagcctgggtgacagagcaagaccccgtctccaaaaaaaaaaaaaaaaaaaaaaaaaaaaagatgtttctccaactgatacatcagtcactatgacagttgtgttcaaatatgctggtatgattggattaatagatttgcctattttcttatatttctgttcatttctgctcttaggtctacgtaagtttagaattattatggtatcttgctaataaattgaaccttttaatctttatgtaatgtagtctatcctgataatgctttttgctttaaagcaaattttgtctgatgtatttatctagtatatatttttctttcccctttttcagtatctctgtatccgagtgttttagtgaatcttttaaaatgggatgtaatggatttttgttttatcctccctgacaatctttgccttttaaagactagaacatttactttactttcatttattttaattacttataatttggactccattctaccatcttattttggactttctatttagctcaactttcttattttttcttccttcccttcttttgattgacagatgactgttttactcattagttttctccttcactatgtaatttcggtttctcttatttttgtgtttgtcttatatgtatgcttaatttatcaaggtccagaattaattagtactctgtccacattccagagaatgaaggagtctcacagtgctcacctctgattattctctcctgacttgaatggcattttcattctcaactgttgtatttttaatattgtgcagctttctccatcattttatacactggtgcctgtttagatttactcatatctcaccacattcattactatttgtttccacttttaccacagataatgcctcttctaaaatgcatcgtggtgagaatgtgggtaaaaaactatttttaactgaaactttctaccttctttttttcaaaacctgtattttatttttaatttttaataggtaaaatgtattttacttattaggtcattctgaaattgttttacccaagactgctttccaaaattaaattttaatggaaaaatattggcatgtggcatagaaaaagctcggactacaagtttaggagtagtgatgagtctttgttcaacctgtatataatattataatgaaaatagttatgataagaatagttcaagtacccagtaaaaaaattaatgctgaaaaaacaagaaaacttttaaattatgtcctggaaatctaaggtattgacgtatttgttgtatctttgccagtacagtttttttgattttggtgattaatctcagcgtctcgtttcttttgcttcggttgtttaaattaggcctgctaacctacccaaatctgctggtgtgtctatttgtgactaccagaaattatctcaggttttcagcagcatttaaaaaatattccctgttgatatagctagaaaacagctagaaaatattcgtgagttttaaatttagcatgacaccttgtatcttctcacagccacataaagacttaaatgctaattgcctgtgtatcccacattagagtttagtagagaggttgaaaatctagtaacagagaagctaatactagctcctgctcctctgggttgaaattctgggtagaagattattttcttagagcatggaagagattttattctactgtctttggcttccattgctattgagaagccatctttcaatttaaataatactcagttcaaggaatttctattaaaattttggttacttttaagattttccctatgtctttggtgttttacaattttactatgatgtatttaggtgtagatttcttgtatttatcttgcttgggattgttcttggtatcttttttaacatcaagtatattgagatataatttatatagtataaaattcacccttttaaggatacagttttatgagtttcaacaaatttatgcagatattagctatcaacacaatcatattataaatagaatattttcaccagctcaaagttccctcatgacccttctgaagcccctgacaatcgctgatctgtttaactgcagctctgcctttctcagaatgtggaatcatgcagcatgtgacattttgactctgctttatcccttgcccatgatacttctgagatgcattcatattgttgctgaataatttttgataaatatgccacaatttgtacatccattcacctattgatagaaatttggagatttacagttttagagattatgaataaatctgctataaactttcttgtaccggtctttatgtggatgtatgttttcatttttcataggtaaatacctaggagtgggcttttctagatcacatggtaagtgtgtgtttaattttgtaagaaactcccaaggaacgcattgtcccaagttgctgcaccagtcagtgtacattcccacaaacagtgcatgagagttcctgttgcttgtgaaataaatggtcagcattcagtgttgtcagcttttaaaattttctcctttctagtgggcatgtaatggtgtcacattatagttttaatttgcattttcctggtgacatgtgatacggaaccttcctcccatgcttgtttcccatctgtatgtcttctttggcaaagtgtctgttcatacattttgcccattaaaattaaaacattttatattgtttgttttcttattgttgatttgtgagggtttgttatatgctatgaataccagtcatttatcagatatgtatttttcaaatgttttctcctaaagtatgccttgaatttttattttcttaatgtctttaaagaaacggaattgtttaatctcggtaaagtaaaatttgtcattttttgtcttttatggttgtatttcctgtgtcctaagaattctgcacattcccaaggtcacaaagattatctcctgttttctcctagaaattatatagttttaggtctttaaattaggtctctgatctattccccatcccccatccattttgagccactttaagaatatatagtgcaagattagagttgaggttcactttcccccagggatgtacatttctttgagcattgtttgttcagagatctgttatcttcttcactggtcatctttgctctttcaccagacagcgatctgtgctggcatctgtctggactctgtattccagtccactgcactccattcctgtcttctcactggcaccaaagtgttctgtttactgtagctttataataagtcttgaaatcaggtacaatgagtcctctaatgtaggtctttttcaaaattgtttttcctatgaagtcctttgctttgattctaaaatacaaattttagaatcagctgtcaatttctacaaaaaaagaccactgagattttgattgagatagtgttggatctgcagaacaatttggggagaatatgcatgtttttaaaacttttatttccattttatcttgtttgtattaagatataattcacacaccatagacttcagtggtttttagtatattcgctagcgtgtacagccattatcactatcaccacccgtaaaacaaccccaggagcagtcactccccactccttcttcctcctttctgttcctatggatttgcctactctgaagttttgtattaatggaatcatacaacatgtggcttttggtgtctgatttctttcactcagcatattttcaaagtttatgcatgttatggtatgtattagtactttattcctttttatggctgaataatattccattgtatggatggaccacattttgtttatccattatagttgacgggtatttagttcgtttacactttttgggtatttagtttgtttacactttttggctattatgaataatgcttctacaaacattcctgtacaagttttttatatggacatatattttaacttagcttgagtttatatgtagaagtagaagtgtagtgtcatatcttaactctgtgtttacctttttgagaagatgccaagtggtttttcacagatgctgtaccattcgacattcccacccacatgtgtgagcgttccggtttccacacatccttgtcaacacccatcttctatttctttatggtacagctatccaagtaggcctgaagtagtatcgtgctgtggtattgattagcatttcccaagtcactagtgatgtggaacatcttttcttgtgcttattggccatttgtatatcttctttggaaaaatgtctattcaagttttttgcctacttttaaattgtttgttctttattgttgagttgtaggttttttaaatatatatattctggatactagacactttcagagataagattgctatcagttttctttcatttagtaggttgtcttttcattttcttggtagtaccttttgacaaacaaaagtttttaatttcagtgaagttcactttacctgttttttctttggttgtgtgcagttaagtcatagctaagaaactactggctaatccgaggttatggagatgtacactggtgttttcctctaagaagtttgtagtcttagctcttacatttaggtctttggcccattttcaattaatttttgtctgtggtgtgaagtaggggtccagagtcattcttttgcatggggatattcagttgtcacagcactccatatttaaaaagatgattattttcctatggaatggtcttagtattctagtcagaaatcatttcaccatagatgggagggtttatttctggattctcaattctaacccattggtctatatatattcttttttttttttttgagacagagtctcactctgtagcccaagctgaggtacagtggtgcgatctcggctcactgcaacctccacctccagggctcagctgattcttgtgcctctcagcctcccgagtagctgggattacaggcgtgcaccaccatgcccagctaattttttgtattttagtagagacggggtttcaccatgttgcccagggtggtctcgaactcgtgagctcaggcaatctgcccgccttggcctcccaaagtggcgtgagccaccgtgcctggccagtctatgtatattcttaagtcagtactatgttttggatcctggagatttataggttttgaaattgacaagggtgagtcttcttagttcttcttttccgaaattttgactatttttttttgtcattgttgcattccatgtgaattttaggatcagcttgccatttcaataaataatggcagatctgacagtgattgccttgaatctgtagatacatttggggagtattgccatgacaacaatatgaagtctttcagtcaggaacatgagatggctttgtgtttatttagcccctctgtgatttctttcaacatgtttgatagttttcacagtgcaagtcttgcatttttgttaaacttattctaagtattttttgcttttccatgctattataaatgtaattgttttcttaattttattttgggtttttcttggctagtgtatataataaatataactcatttttatatattgatctcgtatcttgcaatcttactaaacttgttttgtagctctaattatttttttacagtttctaacccacaggctctttatttcttttacttctcttagggtacttactgggatccccagtgggatgttgattagagatggtgagaagggacatctttgtcttgtttctgctcttgggggaagcatctggtttctcaccttaagtatgatgatagctttttatcaggttaaggaatttgctgaaaatttttatcatgaatgctagttgaattttgtcacatattttatctacatcaattaaaataatgtatggtttttcatttttaatctatataatggcaaattactttgatttttgattgttgagcgaaggtttccaagttaaatcctactaagttatgatgtgttacagtaaagggattttgttaagaatttgtgcatctatattcatgggggatttgggtttgtagtgttctttccttgaagtggctttgtataggtttgctgttaagataaatttgacctcataaaatgatttgggaaggatttcctccttttctgttttcaggagtttgtgtgaagtcatgttttatctttcttaaattgtttattagaatttgccattaaagcaatttgggcctggagtttcttgttgttgttgttggagagtttttaaactgtgaattcagtttctttaattgttataagatttttttctgtgtggatctgagtttttgtttgatatcatccggaacagcttccgctaacattccatgttttttatcttgtcaaatatcacctctgccgcattatttttctcttctttggaaacctcagttacattatgtcagacgttcttactctgtacttctcatcatttcttttcatattcaccttccttctctggtttttactgtaatccacagtagacagacagaacacagcccagagggacaaagagatataaactattcaagagaagatttcagacatggagagacatggacaagttataacatataattcattggttttccagaaagagaaggggggacaatggagtaaaagtaacatttggaataatggttaacagttttctagggtgtgtgaaagccaccaatctacagtttcaaaaactctaacaaataccagcctggtgaaatgaagtctatatttagacatatcatggtgaaactctggaacaccaaagacaagtacaagatcttaacagagagaaaagacattgccttcaaagaagcaacattaaggctgacatggcttcttactggcaccagtggaaaggagaagatagctggataatatctaacgtgctgagagaaaagaactgacattctattaggttggtgcaaaagtaattgcagtttttgccattaacctgcaattacttttgcactaactgatatacttaatatatctttcaggaattatagaaaaataaatacattttatacaaacacaagtggagataatttgatacctataggactttattaaaagtatttctgtttttctagagacagggtctcaccacgttgcccaggctggagtgcagtggctactcataggcatgatcacagtgcaccacagcctcgaactcctgggctcagtccactctcctgcctcagcctcctgagcacctggaatacaggcatgcaccactatgcctggctactaaaagcatttctaaaggacctatttcaggaggagagaaggttgtcttctatggaaagtccgagctctaagaaggcattataaacaaagttgtatgcatgtgagtaaattgaacaggcttgaggcagatgtctcctgggctaaaccacaaatggtagaactaaaataattgactccaaggtcatgtcagcaggaagggaatggaattaaagagttttaaggtcctgggattgcgtgggtagagtgtggggacattaggctttgataagttatgtaattaagtttagagtaaaaagaaaaaaatgtataatggggagaaaaatccaaaagaaggcaaaagaggatagttgaacacagaaagatgagaaaagtagaaaacacaacataaaatagtaaataaatccagacatattggaaatgtctaaaatattgatgggctagatgatttaaaagttccattgaggccgggcgcggtggctcatgcctgtaatcccagcactttgggaggctgaggtggggcggatcacttgcagtcaggagttcgagaccagcctagccaacatggtgaaaccccgtctctactaaaaacataaaaattagcctggcatggtggcgggtgcctgtaatcccagttactcgggacgctgaggcaggagaatcgcttgaacctgggaggcggaggtttctgtgagccaagattgcgccattgcactccagagagcgagactccatctcaaaaaaaaaaaaaaagttccgtgggaagagctgctcctcagaactccactgtcttttagcacagtgttgccacgtggagcctttcagggctctctcctcagccttggattttctgaacttaagcaggacattgttccttgggtcctttcactctgaagacttatttcttcagcccggggaattctattctgtcgcctttttgaatgctgttttctttctttccgctccatggtcattccttctggacctctttggatctgttactgtctctttttcccgtcacctgcattctggagagtgccttggcttcatcttctcactgtctctttgctcgcaagctgtgtccattttactcctaggttcacatattaggtttttattttgacaacatttttccttctcagggtgtccacttgcctctcttgcctggacagagcatgtgacggtcaccttggacgtgtaaactagcgcttgccacttgctttgtatgttctcagatgaccgtccctccttccagtctggcgtctctctttcatcacattggctttcctcaaatactgtttctttgttactcagtgaggtttgtgtttccagaatgcctcttggcctttctgtgggtgtggttggtctctggtgaggacagtaggtgagccgcgggatgcttgtcctgtggacgtgagtgtcctgggccttgagggtgcagtgactgcctgaggcgctggccctcccttcccctctctgccagccttgacctggagcagacaccaccactgccaccgcaaccagggaggatgtcggaaggcccagctgcccagcgcagctcccgttatcctgatggcatcttgtaactggtctctctctgtgcaactcttccgtggaatgcactgtcattcctgacacaggctcgtgcattgtgtattctgttttcgttgcaattgtttctccatcaatttcatctgcctcctttattttctattgctgtgtaaccaatgcaaaactgagtgggttaaaacaacaaatatgtattatctaagagattttatgagtccagaattcaggggtacctttcgtgggtgggtctggcttggggtctcttttgaggctgcacatcagctggacagcccacttccagggtgctctcacagggcaagggcaggaggcctcagcccagcaccttgcggcctccccacagggctgcgtgcgtgtctgtgggattgccattcacttttcctgagcaggcgattggagagagagagagagagagcaaggaggggtcacggggcctgcatgtcccagtctcgggtgttacaccctgtcccttctgccacactatgttctttccatgtgcgttaccaagtcagtcctgtcttaagggagggtaattgtgcttcacctttttcttttcttttcttctcttttttttttttttttgagacagagtctcactctgtcacccaggctggagtgcagtggcatgatcttggctcaaccttgcaacttctgcctcctgggtttgggcgattctcctgagtagctgggattacaggcgcccaccagcacacccggctaacttttttgtattttattatttttagtagaggcagggtttctcagtgttggcccggctggtctcctgacctcaagtgatctacctgccccagcctcccaaactgccgggattacaggcgtgagccaccacgcccggcctgtgctctgcctttttaagagagatgtatccaacaatctgtgggcattttctcaaaccacctcactctcattgaggacttcttggattttccacgttcgccttgtaggtaaggccagcagcaacccttccagggggtcatgtgagccatggcttttctgtctcatcacttttgtggttactttcattgccttttcttttaggataggttttctctaggtaatttaacttaaagggacagtaagtatccacatcttccttgctgcttgtttaggattgaggttgacacatacctcttagaaggccggacgtttggtcactggagcagcagtgctcggcgactctccggaggtgccccctctggctttccgctcggtcagctgagccgcacaagcagcagtggcgctgcccctacatggggcatgctttgcagggctgaggttttgcagttcccaccattgagggctgtaacatttctctatttctggcttagaatgtgtgtaggatgataattatttattcagcattcattccgctcacgctgtgctccgaccacacaccaggctctgcgtgcggtgctggcacagtctcaggactccgcttctcagctgtagggctcagggtgcagtggagaaggcgcgaaggggctgcccgcggatggatttgttcccttggcctttcactgttgctcctctcactctcttctcctaaactcggcgtagaggagcatcctcaggagaaacaggaagaggcaaagttcactgcaaagttttttttgggttgaacgcctgtaggataagaatagcagagggcacccccagatgagatgcggccgtggtcgagcatcaggatcgtctgcctgcgcccaccagtgtggtccgggagcagggaggtggcagagccagggccgcgccctccccgcgggtctcccgtgctgctcgctggcggttggtttcatcagtgccctggcgagtgtcgctggttgcacgtgggcactgcccacacagagcgaattctcaggcaggcccccttcctctctctccccggaagctgcttcatggcactccctccctttgcccttggccgtgggaacctctaggttgatcactgggtcattggatctgcttttagttagccttgatttttgtctgcattaaacaattaaatgagcttctaataatacggtgttttgaatgtcatacatggcttttcctgttgaaacatctgcagaaaaaaaatagctttattatttgtgagtgaagctgtctagctcctcccttttgttcttagtgagataattgcttttgtaatacaaagtttctcattcttttttttttcttttttttttttttgtttttgagatgaagttttgctcttgttgcctgggctggagtgcaatggcgcaatcttggctcaccgcaacctccgcctcccgggttcaagcgattctcctgcctcagccttccgagtagctgggattacaggcatgcgccaccacgcccggctaattatgtatttttagtagaaatggggtttctccatgttggccaggctggtctcgaactcccgacctcaggcagtctacccgcctccgcctcccaaagtgctgggattacaggcgtgagccaccgtggtcggccagtaatacaaagtttcttgaattcaacaattgtgctatagcaaaacaagctggctgtgtattagttaacccgccaagtgaggggtgctgcatgttctgaccctatttctgaccacttccgttaaccctgctgcccaccatggagcctctctcagaaacttcagctgcaggctgaaggcagggggcttgcagagaagcttttgctgcagttttctggacggtgggcaggcagctgtgcttaggagtacacctggggtacatggagtcagccagctcaagagtgttttcaagcttttaatttaaaacaaatcacagaatgtaaaaaatagctttataatgttagttttccatttaccacattctagcaagggaaagagtggtgccatcgtctgtgtgcttgctaagtgataattataagcgtggagacagatgtgcgcttcctgggaacgggctggggctatgccggagaagctttgctcttggaaggggggaggtctgggagtttggctgcagagccttggagctggacaggaaggatcagtggtcgaggccccgggtgggccatggggcctgggccagcctgtggcgagacgtggacttgctgctgtccatgtgtgagtacagcccatagaatggacacctgctggtgtgtgtgcagagggcatgggtgtgcctgaaacagcatggtgcagggtcagtgggcagctgctgagttggggatggtgccctttaggggaaggtggggatagacagagaggcatgagcagatatccctgtggacttgggtgactgggcaccagggtgaccctccaggggtgccaggatatctgtgctgagaggagagggtggccaggctggggcctgggaaacccttcccacagcaccatctgcatcatcaggttggggcgggcattggccagatgaaaacaggtgaggtaatcagattttttgtttcataaaaattatggtcctgaagtgaagttggtagaaacaacaagttaaataggaggacagctcaaatagagaaaacccctcagtcacaccaagtcagcagctacagtgaggagctgcgaatgtgctctcccggcgggctgggcctgccagaccccagggtgcgcgctgcccctccccgtggggctcctgggactggtgagggcaccgaggacagtgccatgctggtcctgggagggtttgccagcgcggctcttccattgtctgccttcctgaggggtcgggggcttgtctcctggctcctgcctcctggatggtccctaggaggcccctcatgtccagacatcggcttcagtttagggctatggggacttccacagggacgactgttctctggagtaactgtggatgatgttgataagaaaatacagaaacaagtcattcctcctgaataagcactggcgatgtgcttccttcatgttcctgagaacggggaaggctcaaattttgttcagtctcataattgtgctgaaaaataatgtattcaagtggacgccttcagaagtctcctggagcctggaaggatgagtgcagtaacgttaatggtcagtgatgttggatgtgggctactgtgccttttaaatgtggaaatgttggcacagttaaagcagcattttctcccatggtcttgtctcctgtgggactgacgtgggtccgtacaacatcgtcatccacggcttcacagtcccaggctgaggatgtagggagcagcggcattgaccagccatccttagtgaggcgcctgccctgcagactggccgctggagtggctggccacgctttgatgtgttgctgtgcctcacatgactttctcctcctcagataccaccagcgatggaccggattgtgcccccaagttcacgtgttgaagcccaaacccctagtatgactgcttttggagtcggggcccttgggaggtgattaaggttactgaggtcataagggtgggcccgaatttgagaggactatggccttgtaagaggaggaagggatgcgagagctgtctctctctctgcacccatgtgaggacacagcagggaggcagccatctgcaaaaccgaggaagaacaccggcaccagattccaacccagccagcaccctgatctccatttccagcttccgtggaagcccccagtctgtggtgttctgttatggcagctgagcagatgaaagcactttttacctcacggttacacttttgggaaagcagcctgcagttggcctgtgtgagcacaggccccagcagatgcccacagatgtccccgtcactcattggtcattgaaaagactggagggaagaggccgatttcctctcaacaggaaaggtgtgtagctgccaggactctgcctatcctgagagtctcctttctcccttagggcttcatagccagttaacttgtgcattatttagagctttttctttctttctttaaaaaaagaaaaaaccaaatgagaaagccaacacaatcaacaacaacaacaagagtggtatcattacagtctgtcagacactgactagaaacatgttcactttcacacacacactcactcactaacacagtactcagttttgaccctgacagcagctctgtgaggggtcactcccctccccccttttaattgaggcataattcacataacataaactgtgccgttttcaagtgtataagtcagtggcattgagcacagtcttcatgctacgcagccaccacgtctgcctacttccagaacattctcacccccccaaagtaaagccctgtgcccgttaagcagtccctcccaatcccccctttccccagcccctggcagccactagtctaatttctgtctacagatttgcccatgctgggtatttaatataaatggaaccacacagcgtctggcttctttcacttgcatcctgtttttgaggtttatctgcatcatcgtagcatgtgtcagaatttcattcctttttatggctgaatcatgttctgttgtatgaatataccacatccacttattgattagtgacattggtttttttcctgctcttcggctattgtgaatagtaccaccatgaacattcttttacaagtttttgtttgacacctcttttcagttccttaggagtggacctgggggacacgtagagactctgtgttaactgactgaggaaccaccagaccgttttccacagcagccgcactgcactgttttgccttcttgaggtggcacttttttatccccattttaagaaatggggcatggggaggtaaaaggacttgctcaggataggacagaccttcgtggtgaggcagctctgtgctggccagtcgggaggccatggcagggtctctgctcctgctccggtgctcatgtcaggccccaggcccctgcaggtggtgccctagagggcactgacaggctctcagagaggagggggcctgtgctggtcctgagcaggcagagggagggctgttagaggggcaggcagtgtgagcaagggcacagatcctgctgttgtttagtgaactctagcaggtttgtttttgcttgattgtttgagaaggatgcctgtagttttaggaccagtgtcactacccacgttggccacaggccatggtgccagtgtccttgctgccacgatgcaccagcttctgtcttgcaggtggctggctgcttccctcccagctgcactggggcacacactgtggggcagttgccttctcaccctttggtggggagagcctgggctgtggggtgcctctgtgtgtggccgtgtggtgcctgctgaggcctagccctgcgtgggcctttgctgatgctccctgcgtgggtggcagtgagccaccctcacgtttctcagcgaaagcacttggacaagatgaaggtttccagcactgcgagactctcacgtctgttatattgtgttatacttggctgtggttttgcttacagtaaattcctgaaggcgtttctgttgctcagtggaaatcactggcagaattcttgttactgagcatcagactgtggggcaccgtcatggtgtcttaggggtgtcaaagcagatgcatttgaggggagatgtattcacattttccagtatatcattaccacattcttgtgtgatagcttcctggtaattcaacttgatttagtgtagtacagcagcacaacttttcctttctgagttgtggagatttaaatttgttgagcaaaggaaacactgaagaggactcagaacactccagttgagtgcacacactgcatgaagctgatggctctgcctcctgctacttttaccccattgcactggtgtgctttgccctccccatggtggcagcaggctttcccagggcgccatctgcagttggaggcctggctgaggacgtgctgtgcctgccctgtgagcagggagccaggcacccctggcctgcagtgctatcgtcccctcgtctccacgacaggcacctctgcctgttccgtctgactcggggatgccagagctccaaggcgcaatcagggcatgatgaccgatggcaggaggtgagcacgtgtcaggacttccaggaggacggtgtctctgcttctctgttcagggctgtttggggattgttaccagaagtaaggttcaggctttgtgtggcactggctacagactgcattgcctgtgctgacttagctcagcctcagcccctctttcatttgtttctccactgaatccttgtcttcttgcattcactgggcattggctaaggcccagctcagttccagggccccacaagacactgtgggtggcatgagatgggtgggttttcccacagtgctctcccatggttattctgttatttgaattgagtgtacacaggtttctacagttgagggagtgttggacgacccattcctcagggtaaaactcgccctcccaaacctgtccctgagtgcaggtgacagtgcgtgctcaccattagaagacgcgggtgctcacgcagggctgtctgctgcctgtgctgggactgtgggcgcatcgcctgtgcgtgcagctggagcacctgcgtctctgaaatgaaagggatcttcaaatgggcggcccctactgtgctttgttcagtttaattcttagaaccgcctatccaggccggtcttgtgttccccctacagaggagagaactggtgtctggaccttttaggtgccttctctgaaactctgggttggcgtgcaggccagcctgcctctgccccacccatggttgcaggttctctctggggtcctaaagtcctgcatttctgccttgccaggtcttcactctggctggccgtctctcgtaggcaggcctctggagtgtaactagtgtgtgatattcagggagggaaaatgggccgctcgtttcacaagtgatagaaatgtgacgtgacatatttcagagaaagcttaacagtacggcagctctgtgactcagcccagcagaaactgcatctcttgttaggaaaaatacactttattattgagtctgtgggaagacaaaatggaagaagaacttttctggacattgtttagcctgcaggaggttttgtttagccctgaggcacacagtgggccgtggagatggtagtgctcaccaccacaggacatggtgaacgccggggggttggcaggtggcggcctcgtgttggacatggtgcataatcgacggcgacccggcctccctccttgtgtccgtctgaacggcgcccctgaactccgccgaaggggcgcctcctctcccctgaagtcaaattagcgaacagaagattaagaatatggaaagtaaatgaaattttgatcatttcttctcatgattacagttcctctagactttatctaaagctattttgaagccaaatataattttttattcatatttccttttctttttagactatcgttttacaatttttaatctcttgtttcattgagtttttcttttccttcttgtctctgaaagcacatagcaggccattgactaaaataacctgtttctttttgtgcatatttctgaacatgcattcttctaccttctgctgtgttgttgtgtttttcttcatgtggcagagatttttttatggcttctgtgtttctttctttctgtttgctgctccctgaaggagaagtcagtgctggtcttgccttcttcccagcgtgcatgtatggacattttctgctgtgagccctcatttttcaccgggatctcctttaaggttattcggaccctgagctggatgtgaaagtagcaggaggcagagccatcagcttcatgcaatgtgtgcacaccagttctgggtcccccccagccttgtggggtgctgaaagggggcttggtggcctctggtcccatgtggcaccctgtgtggctggggccagcctctgcagccatgtatccccagcatctccctcacccactgcctccatggcacactgcttttcaggaagggcaggagaggggcctctagaacccgctgcccatgccgtcacatgggagcttgcggagggccctgcatctgtgctttccagtggtttgttttcctgatttcttcaatcaattcagtggaaatttgggaaagatggagtgtaaacatgtgtgcctgaatcacctgtctcccttagccagtcctcatgtcctggccggaaggcctgctcttccttccccctggctcagccaggggtctgcattgctgtccattgatagaattgttggtgctttatgatccagctgctcttgttgccttgaaccaggatttgaatattgtaacattaagttttttgcatgtttatgtccagtagattatgtattttgagactagacagtgggctaattaatattccacacggggtcccatgggacgcatgttcatgatgaggtcactaaagttctgtctcaagcacatggtgggcgttcagtaaagacttagagatttcggttgaccagacatttagcattaattagcagtttagtgtggtgggtgactgaaaagtaaatgtaagctttgagcattttcagagcatcattttgtctaaaattaatcagtatatttcaccgtcttaacaaactaaaaacgaaaaacagtatcattttagaatatgcagtgagatcatttgacaaaatgcaacactcctttcagatacaaacgttcaagaaactgacaatagaaggaatcttcctcagatgcatggtatttatgaaaaatctagagctaacctcgtatttgatggcgcaagactgaatactttcccctaagatgaggagtaaggcaaggaaacctgctctcatctcttctattcagtattttactggaggttctagcaagttcaatagtcaagaaagaggcattggaattgaaaaagaagaagtaaaactgtctttcctctcagtcagcatgtttgaccctatagtacctactgcagaatcaaaacaaagctcctgaactaatgagtaagtttatcaaggctgcaggatgtaagatcagcatacaaaaatcaattgtatatctgtataccagcaacaaataattaaatattaaagtaaattattagttttttgttaacctatttatttaattatacaaatttatgggacacgtgaaattttgttacatgtgtataatgtgtagtgatcaagtcaggatatttaaggtgtccatcacctgaatacaatatagttttgttaaatacattcaccctactctgatattattgggtttattccatctatcttactgaaggtttgtaatccacttcctttcctcttcatcctctcccctaacccccattcacccttcctagtctctagtatttatctttccattgtgtacctccatgtgatcaaattttttagcttctacatataggtgagaacataagatatttgtctttttgtgcctggcttatttcacttaaggtaatgactttgagttccatccttgttgctgcaactgacatggttttattcttttttaaggctgcatagtattcctttgtgtatatatactacatcttctctatccattcaccctttgatcaatacttaggttgattccatatcttattattgtgaatagtactgcaataaacataggagtgcaggtactactttgatatactgattttatttcctttgggtagatacccagtagtgggattgcttgatttaatggtaattttatttttagtttttttgaaaaatctctgtactgttttccatagtggctgtactcgtttacattcccaccaatgatatataagtattttctttttcctgcatcctcaccaacacctgttatttttttattatggccattctatttttaataacagccattctgaatggttcaagatgacatctcattgtggttttgatttgcgtttctctggtgattaattatgttgaacatttttttcacatacttcttggctgtttgtgtgtcttcttttaagaaatgtctattaaggtcctttgttcactttttagtgggactatttgtttttttcccttttgattgagttccctttatattctggatgttagtcctctgtcagaagaataatttgcaaatattttctccctattcaacaggttgtcttttcactctgctgattgttttctttgctgtgcagaagctttttaatttaatatagttccatttgtctatttttgtttttgttgcctatgcttttgcggtcttagtcataaattctttgcctagaccaatgtccgggagagttttccctaggttttcttctagtatttttatagttccatgtcttacatttaagtatttttatagtttcaggtcttacagttaagtatttttatagtttcaggtcttacattttaagtatttaatccattttgaattgatttttgtgtatggtgagagataaggtcgaattttattcttctgcatgtggctatccaattttttccaccaccgtttattgaagagggtgtccttttcccccagtgtaagttcttgtcagctttgttgaagattatgttgaacattttttcacatacttcttggctgtttgtgtgtcttcttttaagaaatgtctattcatgtcctttgttcactttttaatgggactattaaaccagaagctttgtggttttatttctgggttctctattctgctccagtgacctctgtgtctatttttatataagtgccatactgttctggttactgtacccttgttatatattttgaagtcagataatgtaatgcctccagctttgttctttttgctcaggattgctttagctatttgtgcccttttttggttccatatggattttagaatttttttttctaattctgtgaatgaggttggtattttgatagggcttgcattgaatctgtagattgctttgggcaatatggtcattttaatgatattaattcttcgtatccacgaacatgggatgcttttccatttgtgtcatcttcaatttctttcatcagcactttgtagttttccttatagaaatctttcctttccttggttaaatttattcctaggtattttgtgtagctgttgtaaatgtgattgtcttcttgatttctttcttgactagatcactattggtgtgtggaaatgctgctgattttgtatgttgattttgtatcctgcaacttactgaattcatttatcgcatctaaaagttttatggggccgggcgtggtggctcacacctgtaatcctagcactttgggaagctgaagtgggcagatcacaaggtcaagagattgagatcatcctggccaacatggtgaaactccatatctactaaaaaaaaatgcaaaaattagctgggcgtggtggtgcgtgcctgtaatcccagctactcgggaggctgaggcaggagagtcccttgaacctgtgaaccgagattgcgccactgcactccagcctggcgacagagcaagactccatctcaaaaaaaaaaaaaagaaaaaaaagtctttttggtggagactttagttttttctggataaaattatatcatcagcaaagaaggacaatttgacttcctctttttcaacttggtttccttttatttatttctctttcctggctgctctggctaggacttccagtattatgttgaataggagtggtgaaagtacgtatctttatcttcttctaattcttagagagaacactcttagcttttctctagtattatgttggttgtggctttgtcatatatggcttcattattttgaggtatgttaccactatgcttagtttgttgagagtttttatcatgaggagatgttgaattttatcaaatgcatttttgcatttattgagatggccatatggtttttatcactcactctgttatgtgatatatcatgtttattgatttctgtatgttaaaccatacttgtattcctggtataaatctcacttgattatggtgtattatttttctgatgtgctgttggatttggtttgctaacattttgttgagcattattgtgtctgtgttcatcagggatattggcctgtagttttattttgttgtattcttgtctggttttggtgtcagggtaatgctgcccttgtagaatgaattaggaagatttcccttctctttgatattttggagtagtttctggaggattagtattagtttttctttgtacttttggtagaattctgctgtgaattcacctggacctggacttttctgtattgggaggcttttactactgattcagtctcactattccttattagtctgttcaggatttttatttcctcctgactcagtcttggcaggttgtatacttccaggagtttatccatttcttccaggttttctagtttgtgagtatatagcttttttttttataatagtctctgatgatcttttgtatttctgtggtatcagtttaatttaaatgcctccttattcatttctgattttgttttctttggttcttctctcttcttttttatttaaaaaaatttttagaaacagggtctcactctgttacccaggctggagtgcagtggcatgatcacagctcactgcagcctcaaacccctgggtcaagcagtccaccagcctcagcttcccaagtagctaggactacagatgggtaccaccactcctggctaactttttaaatttttctttagagataaggtcttgctatgttgcccagactggtcttgaactcctggccttaagcagtcttcccacactgcagctctcaaagtgctgggattataggcatgaaccactgtgcccagccttcttcttttcttggttagtctagctagtggtttatcaattttgtttatctttttgaaaagccaagtttttgtttcattcatcctttgtattatttttctggtctgtatgccatttagttctcctctgatttttattatttcttctcttctgctaatttggggttcagtttgtttttgcacttccagttccttgagatgcattattagactgttaatttgtaagctgtctgcttttttcaggtaggcatttattgctataaaattccctcttagctctgcttttgctgtatcacacaggttttcgtatgttgtgttattttcatttgtttcaaggattttttttattttcattttttctttattgacccaggaacatactgaatttccatctatttgtgtagtttccaaagttcctgttggtattgatttctggttttattctgttgtggtctaagaagatagttgatatatgatttttaaaaattttttgagacttgttttgtagtctgtcctggagaatgttcctttcatgtgctgatgaaaatgaatattctgaagttgttgggtagagtgttctgtaaatgtctgttaggtctatttggtctgaagtccaatttaaatctaatgtttctttgttgattttctctctagagtgaaaatcagtctctgagagtggggtgttgaagtcccccactgtttttgtacttgagtctctctctctcccactgtttttgtacttgagtctctctttctctctctctctctctctctctgtctgtctccctctttagatctagtaatgtttgctttatgaatcttgatgctctggtgttgggtatatatatatatatttagaattgttatatcctcttcctggattgatccatttatcattatttaatgactttgtcttttacctttcttgacttaaagtctattttatctgatataactgtagcttctggtcacttttggtttccaatttgtacaaaatatttttttccatccctttaatttcggttcatatgtgtctttactgacaaggctagtttctcgtaagcagcatttagttggatcatgtttttaaaatatattcagccgttctgtttctggagcatttaacctgtttgcatttgaggcgattatatgacaggtttgtttctgtcgtatggttgttttcttgctttatgtattctttgtttctttttctcttattaatttgggtggatttttctagtggtaccatttaagccatttctgttccttctttgtgtgatgctttaccactgagttatgttttcatgtattttcatgttggtaaatgtcatctttgtacttccaggtttaggactcccttgagcatttcgtgtagggatgatgtagtggtaacaaattccctcagcatttgcttgtcttgaaaggactttatttacaaagcataattttgctggatatagtcttcttggatggcaggtttttttgttttttgtttttttcccccattactttgaatatatcatcccattctcttctggcctgtaaggtttctgcccagaaatttgctgtcagtctgaagggatttcctttatagatgactagatgcttttctcttgatgtttttaggatttgctctttatctttggctttagagattttgacataatatgctacagagaagacctttttgcattgcgtctgcctgggaatcactgaacattctttatctaaatgtctaaatcttctgctagacttgaaaagttttcatctattatttcattaaataggttttctagttctgcctttatctcttcacccttggggatactgatatttagaatattctatcactttatgttgttccaaatgtcataaaggatttccatattcttttttatctttatttttatctgactggattatttccaaggacttgtcttcaagtacagagattctttcttctgcctgatttagcctattgttgaagctttcaaatgtattttgtatctccttcaatgaatcttcagttctagaatttgttttttttttaagtatttgtccctttcataaatttcccatttatataatgaattctttttctgatttctttgtattatttttcagaattctcttgtatctcactgagcttccttaaaatcaatattttgaattctttatttgggatttcaaaaatttctttttgattaagatctattattgatggagaattattgtgttcctttggggagggccttttttttttttttggtttctcatgtttcttgtgttcatactttgatgtctgttctgcacttctagtataatagttgcttcttcctatttttgaattcacttcatagggaggactttttcctgaagatgaatctgtcatgttggttgggatattctgggtttgattctgggtgcatgcagtagtgaagtctctgtatgatatctttgtctgtaaacagcattggtggtgtctgtgatttcttcagtaggttagggtgcagttagtagtggagctgtgctgaagttgtgctggggactgggatgccaggtgagccagacttaaggccccactagaggcagcattggattgagcgtgcccatctttatgtcccagggtggcatatcctggcacctatgctggtggttaccagtaggccgattattgggcctccatgtgtcttgcttggatactggtaatagcagcagtggaccaagctggtgggtgggttcttgcgcccctgggaaactggcatgggcgatgacaatagcagtggtgggatgatactctgggtcctaggcaatgtacatttatgttggtggtggctgtgatgagcagggagggccagtcgtcagatccacaggtggtacttgcaggtaggtgccagctgaggtgatagcagctgggagatgagacccaaactcaagcccctggaaggagtgctaaggcacccacaatggtggattgggttgggcaatgcctgggaccctgggctacatgctctgtcttggaatagggtaagagggtgaaattgggctgggtgggcttgtgttcaagcaagaccccccagtagtgagggcaggtaccagctttggttggcaggggtgggtcgatcctcaggccccaggtggagtgctgggtgaagagtgggagcagctgcactgatccctgccactggagcaggtgggtccatccttggtggccaaagcctgggttgatggatagggaatgcacacccctctcagctcccagtccccacagggcttgccccccagccctggtggcagtaggctgtgcctcacttggttcttatcctcagctgtgggagcactcccagcttgttccccagtcccagcagcgacagcctgagtttccataatgcctcagtagctgttgggccctaggacatcacgcagtctgccaaaggctaggtttgaaaatggtgccttgctgtagccactgaggtctcagggagttgtaggacccagcatgagctccctccctgaagcagctctgtcccacagtctcctggcatctcctgatgttattttcagggctggtgagggttgagggagtctcccatggccagaattgcatgatttcttggtggggatgtgggccactggaagtttctcactcagcctttccttgtgttgggaagtcactcttggctcctgaccaatcccagccaggcaggctccccctcttccttttccttaactcgcttttggtatttcctgttacttctctgttgaattcacattctctcttgggtaatgtattcagaaagtgaccgtacattcttttggttcttcaaagtggaggaggtgggcataaattgcatctcgtcatccatcttgaagctcctctccatgaaaaaaatattatttttaataacattagaaatctaaattggacaagagatgttcaacacttgaacacgtaaaactacaaaatattgccaacagaaattgttgaagataaatacattgagagatataccatgttcgttgttaagatgactcaatattgttaagatgttaattctccccatgttgatctatagaatcaatgaactcccaatcaaagtcccagaaggcttttcatagacatttgactataacagtacttggttttatgacttattataggctgcaatagtcaatgcagtgtggtattgctgttaagatagacaagtagatcagtggatcagaatagaaagtctggaaataggcctgcacaaacgtggccaattaattttcaacaacagcgcccaggcaaattagtgggaaaaggcatagctttttaaacaaatggtcctggaataattgtatatccatgtgaaaaaaaaatcctatactttttgtcatttataaaaattacagtagatcaggaatttcaatctctaaaactcaaaaatatataatttcttggagaaaacgtgaggcgttctttgtgaccgtgtgatcttgcgtgaggcaatgttttcctagttatgactttcaaagcattcgtctcaaaatacacacatttatacactgggcttcataaaattaaaaaatttctgctcttcaagatacactgttgtgattttttcctctgatttgatattgaagtctctctctggaaagaggttataaattctagttatgatctgatggggctccaaggtcatagatgtttacagtatactttaatgggattcttctttatcctgacaggcagtctaatgcctacttaggcacctggtccaacctgtgacgaggtgtccctttcacgtgaaacttgtttatgctggctgatgtccttgtggcccttgtctgactgtgtctagtttattcttgccagggtggccactctctaagagaggcctgatcaggacaggagagttgggtctgggtgtgtggctcgggtgaaacacacaggagacagcacagcagagcatgaagcaatggaagcatttgtattaagtaatatgatctcagagagaagaggacagccatgcagggccagtaggcagtggaaagccatgtgggacatgtgcactcaaccagcaggtggggagcaagagagagagagagccagggaccgatgcgccaacacttttattggagtctagggcattactcaagctggtttcctgcagggaattttagtttgtgggtttagatcaagcagccacaagctccgtgggatcacactgactgagaaggtgtcagtggggtacatctgggcagtcatttgggctgtgggggtaagtgggggaatcaagtaggttgtgtctagctgtcccacaggaaggtgatcaccaggaggctgtggtgtaaggcagatatctgatcaaccaccttgaggacccgggaggaggtagagaactggaaagtttgtcaaggatgaccaagccctgctcctggtataagaaagtccaacctatattcagaatggattctgaggcaacataatattataaaaattcactacattctcttacatgggtaagagaatggaaaaacaagccacagactgggaaaaacatttgcaaatcacatatctaatgtatctaacatgtgtaaagaactcttaaaatgcagtactaaggaaataaagaacaaacaaaaatggctgcaagatttgaacatccatttcacaaacgaagacatgtgactggcatataagtacataaatagatgctcagcgtcattgtcatcaaggaaatgtgaatgagaaccacgatgagaaaccactcggtgtaactgaccatactaagtatgggcaaggatgggaagcatctttcatatactgttggtgggaatgggaaatggtacagttactttggaaacattttggcaatcaaaccaagagcttattaaatacgtacctaccaacatcccactagaaggtatttccccaagagtagtgaaagcatatttccatacacctttgaacaggaacatctgtagcaatttgttcatattgcaaatgtctatccatacttgaatggctatacaaattgttgtacatctatataatggaatactgagtgaagtgtatccatataggtgtgtacatatgttaaaacatttcaatttgcatatttacaatatgtacattttattatatgtcagttacctggcaaccactcacttgccttctgacgctacagaatttactttcactgaaagtttatataaatggaaatgcacaatatatatacttacgatttttggtctggctattcttactcatcataactctcaagattcgtcagtgccgttatgtgtatcagtagttcattcagtattccattatatatctcaaagctgattttttttttcccccaaagaaagcagcattcctttttggagcaagataacattgtccatagtctcaattattttttaaccatgatgttcagtactcagtaaaaaattttaaagcatgctaaaacaagaacagtaagtgaaagacgagataaaaacgtgagaaatagacccagagatgatttgtataattgcattaccagataagaactttgaaatatctaagattagtatgttttttaaaaaagagaaacagacagaaaaatatatgaaaagatggagaatttcaagtggaatcatctataataagaatcaaatggacattttagaattgaaacatataggatctgaaattaataatttactagacatgcctaacagaagactgaacacagtagaaaacaggcacagtgcattgggaggcagttcagtgcagtcagtctgtgttgaagcacaacagaaaaaaggatggagtcattcaaggtagaatgcaagaggcctgcaggatggagtcaatggtcaaatgtcatgtaatgagcatcccaggaagtaggggatcagaaaaatatttgaagacataaagatcagagatttttctaaagcatcaaaagacatttatattcaaattcatgaaacagcctaccctgaaatgaacaaattaaaaaagcaagcaaacaagcaagcaaacttttcacatctgggcatatcattatttgttgcaaaccaaagacaaaaaaaatcttaaaagcaaccagattttaaaatggtccattgctctccaaggagcccagccggcatacggcacaatctcgtggtgggcacagcatacacttctctgtgaggcatgtcgctgagtggaactgctgtgtcgcaggttacacggagcttcagctttgctgactgatgccattctggctttctcatgtagtttgtactcccactagcagaatacagactgatctcatataatgaccattcaggcaaccactttcctccataattgctcttcaaaagctataccaagttttggaaagcaacatcttccccctttctcgcccagataatgacatttttgcccaaaaatatgctaaataaactatatggagtaatattgcagaaatatggttttggttttaatttgtaaatcttaatttacaatccgtcactaatgaggctgagcatctttccatgtgcgattggccatttggagctcctctttcatgaagtgcttttcttggttttcagccatttttctattgatgtctgtgttatgtatcagggatgatcaggctggtccgagttgttttcaccacaattttcatggtagaaaaaagtgtagcaaagtatacaaaaatctttagagaaagaaatgatattctcaacagtacatttgcaacctgtaagaacttgggaaaagtgattctcacaagcattgttgaaagagctcctggagatagaaccagaggccaaaagaggaatggagaaggggggaaggtcacagagagtggcggtggcctcccagaggcacagcgcacagcggagtgagaagttagggtgaggacgggattttaacgttgcaagcttcacaaggtagccatggtgatggaggaggtcagtgcacggcctgagctgcagaggccagggctggaaagatggccctgtgctcttggggccaactgatgagctagtagggatttaagaacatagttcagtgattaccagtaaaagaaccaaaaccagctggataacctactcacgccagcagtggtgagggtgtgaagatggcagtttcctcctcacccttggggagccatcagttattctccttcctggaccaggccgtgagcaggactttcacacacacaaagcacggaattcagtgagcatagaaaagaactcagactcactgaaaatggttgcagttttatagttttaaaacagtaaaatgatgaggtaacatttttgtgcttttcagtttgtcaaaggttaaaacattggagagtgaatagtgtaagcagtggtgtgaaagagccccttgtctaccttgacagggatgtaatttgcagagtccagtgtggagaagattctggctaacacctctgaaataaaaaatgtacaatatttcactttttgtgccaaggtagctctgaatgtgctgattcaaaaaaaatttaaggtgttttgattgtaaagaataacatggcaggtatagaaaaggcatgaacatttcactcctacctgtgtagaaaattcctggatggaccaccagggaatgttaatagtgacagctctacctctacctctacctctacctctacctctacctctacctctacctctacctctaccgctacctctaccgctaccgctacccctacctcctacctcctacctcctacctcctacctcctacctcctacctcctacctctaccctctttccactgtctccctctgatgccgagccgaagctggactgtactgctgccatctcggctcactgcaacctccctgcctgattctcctgcctcagcctgccgagtgcctgcaattgcaggcgcgcgccgccacgcctgactggttttcgtattttttgggtggagacggggtttcgctgtgttggccaggctggtctccagctcctgaccgcgagtgatccgccagcctcggcctcccgaggtgccgggattgcagacggagtctccttcactcagtgctcaatggtgcccgggctggagtgcagtggcgtgatctcggctcgctacaacatccacctcccagcagcctgccttggcctcccaaagtgccgagattgcagcctctgcccggccgccaccccgtctgggaagtgatgagtgtctctgcctggccgcccatcgtctgggatgtgaggagcccctctgcctggctgcccagtctggaaagtgaggagcgtctctgcccggccgccatcccatctaggaagtgaggagcgtctctgcccggccgcccatcatctgagatgtggggagcgcctctgccctgtcgccccgtccgggatgtgaggagcatctctgcccggccgccccgtctgaaaagtgaggagaccctctgcctggcaaccgccctgtctgagaagtgaggatcccctccgcccagcagccgccccgtctgagaagtgaggagcccctccgcccggcagccaccccgtctgggaagtgaggagcatctccgcccggcagccaccccgtccaggagggagatgtgggggtcagccccccgcccggccagccgccccgtccgggagggaggtgggggggtcagccccccgcccggccagccgccccatccgggaggtgaggggcgcctctgcccggccacccctactgggaagtgaggagcccctctgcctggccagccgccccgtctgggaggaggtgggggggtcagccccccgcctggccagccgccccgtccgggaggggggggggtcagccccccgcccggccagccgccccatccgggaggtgaggggcgcctctgcccggccgcccctactgggaagtgaggagcccctctgcccggccaccaccccgtctgggaggtgtacccaacagctcattgagaatgggccatgatgacagtggtggttttgtggaatagaaaagggggaaaggtggggaaaagattgagaaatcggatggttgccgtgtctgtgtagaaagaggtagacatgggagacttttcattttgttctgtactagaaaaattcttctgccttgggatcctgttgatctgtgaccttacccccaaccctgtgctctctgaaacatgtgctgtgtccactcagggttaaatggattaagggcggtgcaagatgtgctttgttaaacagacgcttgaaggcagcatgctcgttaagagtcatcaccactccctaatctcaagtacccagggacacaaacactgcggaaggccgcagggtcctctgcctaggaaaaccagagacctttgttcacttgtttatctgctgaccttccctccactattgtcctgtgaccctgccaaatccccctctgcgagaaacacccaagaatgatcaataaaaaaataaataaataaataaataaatcatatcaaagtaaaaagtttccaaaaaaaataaaaagtttcaaaaaaaaaaaatagtgccagtgagctctgcataacaggagagagtcttgttttccattgttgacatttttactctttatatttaagtatcttttttttttttctttttgagatggagttttgctcttgttgcccaggctggagtgcaatggcacaatctcagctcattgcagcctctacctcctgggttcaagcgattctcctccctcagcctcccgagtagctgggattataggcgcccaccaatgtgcctggctaatttttgtatttttagtagagatggggtttcaccacgtttcccaggctggtctcgaactcctgatctcgggtaatctgcctgctttggcctcccaaagtgctgggattataggtgtgaggcaccgcgcctggtcttaagtatcattttgaagagttatgaaaaccacctaagccacaaataattttaagtcattattgttagtaagagaattacatatattgctacgttcgttccaactcatggtatgttcctgttgtttagtaattgggaaacctgagacatgatgtgaagtaattcacctgcaatttgggggtgcctgcacagcaggaatgttctggcaccatgactgctcctaggaacacagaataatagtcattaaaatgctgtaaatagcagtgtgtcctgaattcacccacaccctctgaagaaattattagaacctgtctcctgcctccttccatgagagtccgtgggtcccctagcggcgtgcagcctgctgggatggaaagggcccgtgctgcaactctgcataaagaatttccagctgttgacccttcccaactgcttccctctctgagcctgatcctcatctataaaaatcataatagtgcctgctttttaatctggtaaatactaggtatattgtaataagcctgaacgttcttggaaatcataaaatgcttgaaaatagtttcgcctcctttttaagattttgcatgtgttcataatcagtgcctgtttctggaacgtaattcattaggataacagctggatcttgacgtttcatctgagtttcgttttgtttgagacagggtcttgctctgttgcccaggctggagtgcaatggcgtgatcatagctcactgcatcctcaacttcctgggcccaagtgatccttccaccccagcctcctgagtagctgggactacaggcgcgtgtcaccacacctggctaatttttttttttttttaaatagagactaggtctccctgtgttgcccatgctggtctcaaactccagaccagccgtagctcaagtgatccttccgccctggccccccacagtgctgggattacaggtgtaagccgctgtgcctggcctcatccgagttttttggaagtgtttccttgctgcctaaattatatggtggggcctccagggaacaaagcgagtccccctgcttgggccctggtggtcactggcattcctgcccacacagcagtgggggacatcccaggctagggctaatggctgtccacagggtagggccttgcttctccgtcactttgctccactagacagtagagtttggttggggtctgtagcatgccaggcacctttgacgcttcacaaatgtgttaccagatttttaaaaaggtatttctgctataactgaggatgtggactgttgcaacaggaaaagttgaaagccttactaaagagatcaggctttgaggtatagctcaggtaatgctacctgcaagtaaagggtaactttttagcagactatagcaaaggcggggagagactggggagacctacgggggaagatgggggcacctacagttgcaaggtgggcaccagttgtcaggagttgacaggagggcatagccaggaacagctggtgtctccttactgggacatgctgtgacctgtagaatcgtgtctgaccatttctggaggatgcagtactgaattcaagtaacaaggtgtcctgtgaaccccccacagtcagatgggtgagggatggggagggtcacgcagggtgtgggcggcgtgcctggcatgggtcctgccaagttcgtcaggtaacgtgatacttctcccttgctttttggtagatggacagtgtgtcaccctcggggagcaggtgggctggcaggacaggcggccccaggccgggagaaggagacactcccaggtactctcgtctacccctgctggtgacctgcctgcccggccccgttctgttccagatgatggctcacctgtgaccctgcctgccctgcccagcttcgcccccatgtctgcctgtccccaacctcagtgctgtcggctgacctacctcagcccacgccctgccctcttttttcccaccccacggggccgatcctgacttctggttgctccctttgcttgaccgttctcttgaggttcttaaccctgaactgcacccgactcccattgacctcactcactgtgggccgccacgagggcccctcagagacgatgctaacggcctctcagatgctgacctgcttcatgtctatttccttttacagggtaatttgtagtggaatgagaaaaaaaagttgtatttcttaaacaacatgatctggagtatgtggtgactgtcaacttttcatctatgcagaatgttaatgactcaccagtcacagggcagttctcctcaggttagaaacacagtggagctaatgacacatttcagaattagaaatggttttagcaataattctaaatgaggctggaagaattgaattgctgtccagatccaacagacttattcagccaacagtaaccaaatacatgctctgtgccctgctctgtcctgggcttagaacacagtgagtgcacatcaatggctgtgtccccagagctggccgtcctgtgtgtacttcatacctgagaaaatgagatggcatgctcagcagatcaaggaagggggcatgaagcagaggtcaggagtgaatgtgtgtgcacacgtgcgtgtgcatgtgtgtgtctgcacatgcaaatgtgcatgcatgtttgtgcatacatagtgtgtgcacgtgtgtgtgtgattgcatgtatgtgtgtgattgtgcacgtagtgtacccgcatgtgtgcgagggtgagtgtgtgcatgtgagttcatgtgtgcatgagtgggtgcatgtgtacatgtgcttgtgtgcctatgagtgcacgagtgtgtgcatgtgtttgtgatcgtgtcttttcatgtgtgtatgtgtacacatgtgtgcatacatacatgcagttgggggttgccagtgttcaatagggccgtcaaggttggccttattaagaaggtgatgttaaaggaaagatgagggtgtgagccatggatgaggagcaatccgggcagaggagtccccagcacgaaggctttaaggtggaggacaacccggggccagtgtggccggagcagagcgagcaagggagagcatcaggggctgagttccaggaggtgaggagcaggtcatttgtggtcctgtggcgtcctaagagcttttgctgtgagtgggagccagtgcttcttgtcttaagcagaggtgggacatgccagtgcttcttgtcttaagcaggggagggacctgggccgagttaggttctcgccaaatcgctctggtgtctgggtagagaatagtctctcggccgggcgcagtggctcacgcctgtaatcccaccactttgggaggccgagacgggcggatcacgaggtcaggagatggagaccatcctggctgacacggtgaaaccccgtctctactaaaaatacaaaaaaaatagccaggtgtggtggcgtgcgcctgtaatcccagctacgcgggaggctgaggcaggagaatggcgtgaacccgggaggcggagcttgcagtgagccgagatctcgccactgcactccagcttgggcgactgagtgagactccgtctcaaaaaaaaagaaaaagaatagtctctcaggggatccagtggggaagcagagactggtgaggaggcttcacctggacccaggtgagaggtggtcccgaggacgtcatgagagggtcagattcaggatccgttttgaaggtaggaccttcaaacagagtggaggaagtacttgtgggacaggggaggtgaggtgactgcggggctctaggcccgattagcaggaaggacgaagttgtgtccagcacttgcatcgagggcagccaaggtgggacgccgtgccattcaggcagagcagtgagcacacagttggatagagagacccaggagaggtggacttgtgcctgtggacttgtgcctgattggtccctccatgatgttttatgccggaaatggcatgggtcatccgggggcgtctgtggagagaagaggagcaaggacccaggcctggggcgcccctgccttggcaggctgggatgcagtggaggaacaagcagagtctgagcctaagtggccagcgagggacccaggagacgcaaaagctgagggcagtgcctcatcaggagaggagagatagtctcaatcctgtggacaggtggggtaaggggagagccaggaatgagccaccagagctcacacaggtccttgggggtcttgagcagttttagacttggcgggcaacaaaagcaaaagtggggtgctctggagagggagaaggacagcagaggggctggggcagcaaggtggagttttgaagagttttactacaaaggaaaagagagtagtagggggaaggaagccagttttgagagtggaagaaacagtaggttgtttctgtgtaggtcacagcaaccagcagagctctcacaagggcaggagaaccactggggcagccttgggatgcccaggatgggggtgggctcagtagaggggctggctggcccaccgaggccagcatcttgcagtggcgaaggtgcagagatggtggggtccatcccaggaagcccctcacaacaaggctgtgttggtcgtcagcccagcgtgggaagggggagttttgaagacaggaatcggtatgagatatgcatatttatatgtttttgatgtacgataaaaggcagtttcatatgggtcagtgtaaggtttgtgcggtagaatttggaaggctgggagcatggccagcccagggagtgagtgtggtcactggtgtgtgtggcctgcctgtggtctggtctggtgtacactgagtcgtttgtgttctccagttgtgtgcagctccagagtctaggcacggaattgacagagagtgagactttaatagggtgtggcttttgtcaagcaaggacaaggaaccaagcgggtagccagacacaaaggcagagaggagacgatggtctcgcggcgtgatctgggctagggaaggagagaagctcgcgagggaggtgtgcaacagccggaaggcaggtggccgccaacaactttctttttccagttggtggcagtcataagttaatttctgtcgaagtagaatacaactaagaaaaaattttaaaatacaactacctcttcagcttagagaatagtactacttggtttccctggtaactgccaaccgcttgactgactgcacagcaagtgttaggtcgtggcacagggtaattacagacaacagagaaattgcagggtaaggcttaaataatcctaaagcaactatgtagttaggtcctgctcctgaaagcaaggatgcagttcatttccagccctgagctgcactcaggagctgggcctcatgcccagtccccatccttagggcagtgcccgccctcaggctgacagcctttcctttccttgctccagtcgcttgggtgtgagtcctgcttctcccattttctctgtgctgggacctcaaggcaagccgactgcaagcccacctggcccaggccactgcagggccacccttcgcagggccaggctgtgaagcagttggaggcgaggcccggggctccaggctactgtgttgagattaatcttaccaactagaactttaaaaattgtgtttccagcctttatttgaaagtgggagaaacagtagcttgtctctgtgcaggtggcagcaacccgcagagctgcggcaagggcaagagaaccgctggggcagccttgggatgccaggaggggcgggctcagtggagggtctggctggcccaccgaggccagcgtctggcagtgatgaaggtgcagagaaggtgggggccctcccaggaagcccctctgggataagaggttagcttatctattgtctgtggaaagaaaacttaaatagagttttcttttttaaaaaagacagcacaagtcagtcttctggtgattgtaacaggatggtcacctgagaacagtcatctactgacaccctgaaccagaatctccagaaaagacagaaattttgaaacagcagcaacaacagaaattcatgatgtgctaggagacagggatgactgcagtcagaggaccagatgtcttgattgattattaagagagagaaacaggcgatgtttgtggaatcacatcaccacagaagacatgcagacaggcctaatgcagagaagagtggaagttaggacgctcagcgcagattaatggactcagggagttggagagggctggctggcagcacttactcagaggagcagagccaggtatccccctcaaaccccccggctttgggcccaggcagtcagaagttgtgtcggggccagccaccaactccagtgagggacagggagccacttccaggagatgaaacattgtcacatgcagtccaaagacacccctccttctccctgctgcaacacccgaggctgaccaaagtagacaggaacagtatccaggatgagcaaaccaagcctctctaaagcaaaactgccaacaagctgggaaccacagcacgctggagggaaaccagcagcaggagaaagcagcagcaagcacagcagaaagaagacgtggggccgccttccggacggagactcggtcagacacacggctccttcaaagggagtgccaaaggccttgaagagtagacggtcaaagtggcacagccaggaaagcaggactcacagaatgggcagcatgaagagttgcatagccacggactattgagaacgcagacccagaactgttaccgcactcagacgtcaaaaaccgagagctattcccgagcacagaccgaggaccagcgagtccaggactcgctgatgcagagctccaggactgacaggcggggagagcgagaggaaaagctgaggccaagcgcgatgctgagaagctccatattctgtttaacaggagtctgaggaccaggaaagagagaatattgaggggaagataatggagacatcctagaagatcgtctccccgagcacagagcgcatcacaggactgaccagtattgagtgggcgcggggaaaacatggctgccaggacctgtgaggaccgagtttcagatactgtggacagcggagactccacaggggctctgcaggaggagacgggaggcgatagcccctgcaaagctctggctggtgattggcatcagacttctcaatgagaaactgtactctagatttaattagaacagtatcttcaaaatactcgggaaaaatgatttcaaacctggaattgtagacacagacagactagaattcaaattgaagggcaaaggaaaagtgtcttcagatagtgaaggactcagaggttaccagcctcatccctaataccctgacaaaactaaaaaaaagacaactatctatgaaagaaaacaagttttgattccacaaataatggagaggaaagcatccagtgtaacatgtactagtctaaatcactgttggtgtatattggtatgcaaattaaaatactatttgaaataaaaatctcaagcatatgtatctgtataatgatgagaaggagaaaaatgaaagcttactaaacttcagggtttttttcaggggaaatttatagatgctactcacgcccgtagtatagaaatgaaggcttaaatggattaatgatttacaaggaaccattgtaaatgatttacaaggaaccctggctctacagaaaatttacaaattagctggatgtagtggtgcgtgcatgtagtcccagctactccagaggctgaggtgggattatcgcttgagccgaggagtttggggctatagcaagccaagaccgtgcctctgcactccagcccaggtgacagaatgagaccccacctctaaaattaagtaaataggagctccctgaggaatagggacagatgcatgacttcacatcttgaacaggaaaattttcagaacgaagaaaacctcatcaattcaccaaaaggtggagtagaatggaaaacatttgaaatcatagaaaatatataaggcaagacattaattcaaatatgaggttagatttctctattaaaaggcagacctcagattgtcttaaaaatgacccagaggccgggtgcaatggctcacgcctgtaatcccagcactttgggaggccgaggtgggcggatcacaaggttaggagttcgagaccagcctggctaacacagtgaaaccccatctctactaaaaatacacagaatgagccgggcgtggtggcaggtgcctgtagtcccagctacttgggaggctgaggcaggagaatggcgtgaacccgggaggcggagcttgcagtgagccgagattgcgccactgcactccagcccgggcgacagagccagactctgtctcaaaaaaaaaaaaaaggacctagaaacagagaatttgttaatgggaagggcactgagcaatgccagccactagaaagcagaccagcaacgacattttcgtgaaaaagatgaaaggcattaaatgggacaaagatacttcacgtttataatcctctaagaagatacgatcattgtgaacttttatgtacataattacatagctgtgaaatttatgtagaaagaaattctaagaataagagatggattaattcagtaccataatgggaaatttcaattgacaaatcaaagggaccagaatgtccgtatgtttacgaggaatttgaatagcattcataacccactctctttttggaaggggacacagaggacacttgtcttcttctttttctttttttttttttcccctttcctttcttttctttaccttctctctctctctccaggaccattcacaaatatctctgccatgtatttgattttatagaaaatcttaattttcaaaagcagaaatcataaagtgcagtaaaagtggaaaaaaacacaaaatgatagccaaaagtaacccaggcgtcattatatacttgggaattttggaatgcctttaaataaagcatactgattaaaaagtaatgaaagtgagagaatgttgcacgtcaaacatgagggatgccacaaaagcaattctcagaagaaaatgtcagaaaaccagaaacatttacaatgaatgaactggccatatgactctaaaggttagagaaagacttaaaaccaattcaagataaagtaggaaaaatgaatgaagataaaatagaggttaatacagtagagcatggaaacttattgcttggtgcaataaattctgaaaaagaatcaataaaatacttaaactgttagccacttcgatcaagaaagagaaggtgtgaaaccttaaaacttgggaaacaggaaaatagataccactgcaggtaggaagctgttaacactctaagagactgctgtttacagcctctgtgcaaagaaatttggaaatctaagtgaacagttttctacaaagatgtaaatcaacgaaactgcctcaatgtatgtaatgagtctgaaaagacccgtaattgtgagagtgattgaaaacgccagtcagagggctgcactctcacaccacctgacgatcccctctgcaggtgggtttcagcatgtcccaaagggagggtcatgtgtgaggtctataaaccatgctggtgtacagaaacaacaaaacttctccaagtcatctgatgagctcagcaatattgtcatgtagaaattgtgcaagaattgttaaaaaaaaatctataggtaactgtaccctcagaaaacagatgtgcaatcataagtaaagtgttagaaaattaaatccaacctgcacttagttttaactgtttttattttcatttaggaagagctttttacaatttggtttggaggttttgctgtgtctcctgcctcagtttcctctttgggatgctgttcacatgtgtttgcacttccttgtctgtcttctgtatgtatcacttctcttgaattcttttcattgcttttttaaaaattttttaaagtttccattttttgtctgttgtgtttatttggtctttttgtgtcttctaatttcatctttatttttgaaatatttttctttctattcccacatattttctagttctgtgacctcagttgtttagtttttctaattctgatttgtattttttcaccttttgcaccattaatgccttttaggcaattaacaaatacttgattatggtttttgtcttttttgttagcatgtttttatggtgtgtttattgtcagtaaagatgttatttagtttcttattttcttttgtcttttaaaaaactttgtatggggtttgaattgtgtgaaatttgtttcccaaacctcttagaatggaagcatgatttataatagcatttctaattacatagctcttgaaggccctcttgtgttatttttatataaagtttaaatacgagggcttaatcaatgaatttgtaatgtgtctggggacaggccatggagaatcagccgagaattaggtggtaatactggctcagtgctcatgttctgattttgatcattgcactgtggttatctggatgttgttttggggaaacacatggtacagtatttggggtgaaagagcgtggtgtatgggcctacagagatagtaaatatgtggatggacagatgtatggatccgtagagaaagtgaatgtgaatgctagatggatggatgcatgaatccataaagaaagtgaatgtgtgcatggatggatgaatgcatggatggacgaatgcatggatccacagagagtgaatgcgtggatggacgagtgcataggtccatagagagagtgaatgcatggatggacaagtgcatggatccacagagagtgaatgcatggatagttgagtgcgtggatctgtagagagagtgaatgcgtggatggacgagtgcatggatccacagagagtgaatgcatggatagacgagtgcatggatccatagagagagtgtaatgcatggatagatgagtacatggatccgtagagactgaatgcatggatggacagatgcatggatccatagagagagtgattgtgtgcatggatggatgaatgcatggatggatgaatgcatgaatccacagagagtgaatgcatggatggataagtgcatggatccatagggagagtgaatgcatagatggacgagtgcatggatccacagagagtgaatgcatggatggacgagtgcgtggatccatagagagagtgaatggatgtgcatgtggatgaatgcatggatccttagagagagtgaatacgtggatggacagatgcatgtatccatagagagtgaatgcatggatggacgaatgcatggatccatagagagagtgaatgcatggatggatgagtgcatggatccatagagagagtgaatggatgcctacatggatgaatgcatggatccatagagagagtgaatggatgtgtacatggatgaacgcatggatctgtagagagagtgaatggatgcgtacatggatgaatgcatggatccgtagagagagtgaatggatgtgcatgtggatgaatgcatggatccttagagagagtgaatacgtggatggacagatgcatgtatccatagagagtgaatgcatggatggacgaatgcatggatccatagagagagtgaatgcatggatggatgaatgcatggatccatagagagagtgaatggatgtgtacatggatgaatgcatggatccatagagagagtgaatggatgcgtacatggatgaatgcatggatccatagagtgaatgtatgcgtacatggatgaatgcatggatccatagagagagtgaatggatgtgtacatggatgaatgcatggatccgtagagagagtgaatggatgggtacatggatgaatgcatggatccatagagagagtgaatggatgcatacatggatgaatgcatggatctgtagagagagtgaatgcatggatggatgaatgcatggatccatagagagagtgaatggatgcgtacatggatgaatgcatggatccatagagagagtgaatggatgtgtacatggatgaatgcatggatccatagagagagcgaatggatgtgtacatggatgaatgcatggatccatagagagagtgaatggatgtgtacatggatgaatgcatggatctgtagagagagtgaatggatgtgtacatggatgaatgcatggatccatagagagagtgaatggatgtgtacatggatgaatgcatggatctgtagagagagtgaatgcgtacatggatgaatacatggatccgtagagagagtgaatggatgtgtacatggatgaatgcatggatctgtagagagagtgaatgcgtacatggatgaatgcatggatccatagagagagtgaatggatgtgtacatggatgaatgcatggatctgtagagagagtgaatgcgtacatggatgaatgcatggatccatagagagagtgaatggatgtgtacatggatgaatgcatggatctgtagagagggtgaatgcgtacatggatgaatgcatggatccatagagagagtgaatggatgtgtacatggttgaatgcgtggatctgtagagagagtgaaagtgtgcatggacgaattcatgacacacagatgggccggaatataagtaattggataaatgaggtaaaggatatgtagatgttctttttaatgcttgtacacttttttcaaggtttgaaattatatcacaataacaagttgtccgatgagtacagtagtccccctttgtccacagtttcactttctgtgatttcagtcacccatggtacagtatagtgagatatcttgagagagagagaccatatttacataacttttattatggcatattgataaaattgttctgttttattattgttaatcttcctctgtacctaatttatacattaaaatttatcataggacagtttataacagggtttggtatagtccatggttccaggtagccactgagagtcttggaacgtacccctcttggataaggggggagggctgcagaatgaattcttcagccttctcctcagaacagatcttctgcaagactttggcagatgatgctgtgaccccggtgtcacaggccaggtggacggccaggccaaggtatccgtgcctggtcctgaggggccaggcacgcgtccacggcagggccacccagagcctggggtgctgggaactgggctttgttttagtttctcaaatgcttttctcaaactggaattttaattacaacaaaattaatgccgcagaatatgattaaaaaataatgagctgagaacaagcagcctcttgaggtgatgtccctgtggctgagcccaggaggccttgatgcgggcagaggctgtgctagcttcaccaggttggcaccgggctctccaatgcctggttgctggtggcttggacagctgtcggggagggtcctctcagctcccgcgccctctgcccacagcttgttctctcactgtgagaaccacccagtgatggttcttgtgctgttctctcttcatgaatcatggcctggcttccgtgcagctgcctttttggaggaggctgcaggagcacagagtaatggctgcaggtggggccttccagaggcacaggctgaggggccaggcagcagttcctctcttgcagctttttcttgggagcaccgggccaagccagaggctcctggcagatccacccacagagacagcaggtccaggtcagggctacccctcgcacagcccagcaggatgtgggagcaagcctgtgcgccctgagccaggccttctgtgaagtgcagatgatgtcgcctttgtagacaaaggaagagaccttggaacctgagggtaaatggagaggctctttaccagcactgaactctgagcccaactggctccaaacaggcgtgttgtgggcgtgtcctgaggtgtgtgcctgacctgaccctgaggccccctccctgccatgcctctaacccacccaacaccaccagccttgctggtgcctcctgccctgccctctgctctcagctgcctgccctggtcacctgccaccccttcgtgctgggcccttgggccaagcaccgcatgcagcctggtgcacacctgtgccctcctgagcctgggtgaggtggccctcccacctgggccatgtgcctcactatgcctaggccacagcccgggagggaggatgtctttccctgacctcgtttgtgtggccctggtgcccaatgactgactttccttctgctcccagccctgcatcctcctgggagatggggtgtttgagcatggggttcccgcctcctcctccaagtgactttccttctgctcccagccctgcatcctcccaggagatggggtgcctgagcatggggttcccgcctcctccaggacttgttgcccgttctgcgtggccacccgttcttgccagcatgcccactcgctctgaccttggaacgtgctctgctatggccactctccaactctggcaatggcaccagccatcattctatcacctgtgacttccccactcacccgtcctgtcgtgccacctgcagcacccacagcctggctctcactgccactgcgtcctgtgggagaaggtcacatccacttccctgtgtggatgggggtgtcatgaggaccctggagtgttctgatggccagccttgtggggaccctggctgctagccttgccttagctgctcctctgtccccactcacagccccggtggccagtctgtctgagtcctgcccttgtctacccacctcctacaagacagccagtgtctgggctggcccctccctgctggctgcagggcccctgggtgcacaaggagctgcagaggagcagatggcggcagctgaggcagccacagggacagggccacagacacactcaggttccatggccttggtacatttgctcttcttgacatgggtttcagagaggggccaccatgccatgcccacagcgtctggccaggtgctggtcactgacccatcttcacagcatctggccaggtgctggtcactgacccgccttcacagccgcacttgttgtgacatacttgattcagtagatcctcctggatgcactctgcttatatgccttttgctcattttctgcctttagctgcagtattctttggaaggaattctgggcagtatgtgctgttcagatcctgtcactgcatttgctaatttgttgcattagcaagtatttggcttgtgcatgcaagacaaggttaaataatccagtgtggaaatagaaaaacagtatgtggagatccaaacccatataattactccccatgatctactcagtttaatcagattctgcaggttaatcatgtttgtgatctcatggtgcacatccctcccgaacatctcagcgtcatcagtggagccgctcggttgtcctgtgacactgactgtccctctgtggctctcggggtctcccctcctcttccttgagggcatcgtcatgattcagcagtgacttctgggctgggtggttagcggggctccctcctttaccctcagaccccttggatgccatcctgggcagaggccttggcccagtgcaagctctttctgcccacattctcctggtagcggctctgcagctgggcgctgtttctgccctgtcatgcaagtgggctgggtgcagaggctcacagctgggtgctggggctgggggtgagctagctgtccggcccctgcgtcagcaccaccccttgctgtgttcctgaagcgtcctgtcttccatggtcaggatgctctttcaagacagccctgatggcatcacctcccttcactcgcctcttcttagcttgttcattaaaaacaattgtacttactgagtgcctacgttgtcctgtgcccgggctgcccaaggtggtgtgagtgtcagggcacgtggcccagagggctctgcagagacggctctgagagcaaaagtgagccatgctggagaagggacaggagcccctgggagacgtaagagatggggacaggctgacggaggaggaggaccgggctgggggaggatggtggggctctaagcagggcaggaggtcagattgtgtgtttgggatgttcctctccttcatggggaggagaggccctgagggaggcaggagcaggaggggcatcgtgtccccaaggaccccaggcagggcctccagggctggtgctgggaggaggcagggatgggaagggtccccgagggccctgagcagggctaaccctagggaaaccacacacaggccacggagggaaaagcttttaacccttgtcgtgtataaacgactcactaggtcttggtgcatttttcattgatactcatatatttactgttgaatctctttgagttctttttaatgatttttcttgttttcaataaaaaataacatttcccgtctgcattgtacagtcataatttgaaaacaaaaattgttttgttgtgcaaacacttgttctgattctttatctattcgttggaagtcagtcacaaagcaacttgagaaaacagcctgtctctgcctccagcctggtgtgcctgcagctgtgtgggtgcgtcccctcctcactttctcagcagaggcagaggctacagtctgagtggcagagcccacctttctgctgggggtagtggccatgcaagggtattggtgtgttttttgcacatgcagctggccatgctttaaaataagcagattgacctttgtttacctttcacccccagaatggtttggtcaatgacagcagccatttttattgtttttattgtttcttttctgtggtggtgaaggtggcatcccctcctagcagctgcacactggggtggtcctgaggaaaggagggcgagagcagagcttgggggcgggccatgaggggaagtccaggcctctccacccaaggatgaccctttctccaagaatcctgcagtctgttgttaggtcgggaaaaagccgtggtggttttatactgccagtgccgggagctttcccatgaagtttaaatgcaaacaggacactgagggcaggaaggtgtgctgagctgccctgcacagtgcttggctctgatgcccaccccagggtccctgggcactgccaagctgggcatgaacctggggtaacccagaggaacctggagcagtatgggctccaagaggcccctgagcttctccaggacccagatggtgacagcctggaacatggcttccccgtggcctcgctgccatagtcaggcctcgggaggtgaccctgtgccagggcaccggatggcccaggtcctgctggggtgggctgctgagtcccttcccatgaatgttgttactgtgctgtatctcacttgtgccctcgctgagatgaaggacgcctagaccttagtgcaggtgccttgggggcgtcctggcactgaacatccttgagacatctgtggtgcttctcttcctcatctgtggtgttgtgggcctccaggggaggtggctgtctgcctggaacaggaggcccagcccacaggtgcccactgcctgctgccgcgcctccctctctgctgcccgcgtggctgtagtgttttttaccccattgctgtttcgcttggcacctacacgttggttccctcctgtgcaccgggctttgtgctgcaggctctggcgtgttcacagtactcctttggagggattctgtttttagaattagtggtacaatatcttgtcatcttggtaacttattattaataaaaatggtataaaatgttttgcctcctagtgcccacaccatccatgtagattatattgatttactccagctatttgaaaggctttgaggtggtgtacaatatcaaaccatgtgaaacagcacgattaactggcaaaaccaaaagccatggaaatgagccggggagcttactgaagatcctagtcttgggggagatgtttggtgaaaatgtgtgcatttgcttatgaaagacttgtatttattctgcacccccctgaccctgagtgtcccttggtccattgcctgggctctgttgtccttaccaggactgctgcttccccagtccctgctgtcctgctgatgtgtccacgcaccaggcattcggctcctgaaatcacagtgactttcaggagtcacttgggttgtagtgttggccagttttagccacatgaagatagtttctgaaacctcctgtgtgtgaatgacggttttcaccttgggcctgtccttctgctgccaccacaagcaggaggggtgggaaggaaggattgcccccgagagaggcagcacaggaaggccaggccgtgttcctgggagtcaggcttaccagctcagagctgggcatggttgaaattctaaccctgccgtggcaggccctgtgcttttgtgaaatgggcctcacgggagggtgtcagtgacgtagataaaggcttcccactgcctggatgctgtgaccgcctgatcccgtggtgatggcacagccctgctgtggggagagccgtgcagccccaggccgtgtgtgggaaggcctgtgccactctgggcatcgtcatcttgggccatggctaccacatatggcgcttcctagccgggcactatgccacagccacacccctgtggcctggcccccatggcagggtctaaggctgttccccggaagcctaccttctataggaagaggcattcttgtgtgactctctggtcatttgcttgggggagctgaaaaccccccaggtggtgtctgggggggaaagtaattggaagattatgggtgggtgtgactggtaacaagcaggggtttggcaccccccttgcccacctgccctgtgtgctgggccgtgcggaggtggccatgggcagcccttccttctggagccccctgtcttcccttatccactgcctcaaggttcccaccagcagagtggggccacctgggttggtgccaacgaggtgctcagaggccttgtgggcagtgtggcagaacggcacatacaggtgcctaaaatcgagctaggggaccttgaagataatgcttcctgtctgcttttgtgtcaacagttggggcaagcacattttcacagggagagtgtgactggaaggaccagccgttgctgctggcagctcatccctgcacctgagcttgcaggcatgctcctgtctttctgtggtggtaaaggtgacatcccctcctagcagctgcacactggagtggtcctgaggaaagcgcgctcctgtctttctgtggcagcgaaggtggcattccctcctagcacctgcacactcggatggtcctgaggaaaggagggcgagagcagagctgggggggcgggccatgaggggaagtccaggcctctccacccaggagtctgtgaggttcccattgcatgagaagatggaggagcctccttgtgctgctgtgtctcagcattagagagggcggtccacacgaatgtcatgttgggatgttttttcttcagcttctgagtcattgctgcctccagggttatcactgggcagagagcaggtgtgatgtgtctgaggaccagcagctctgcacagagtgtggaagaccccagcaaagccacccggctgcagaatcgcagaatcaccctcgtggcaggcttggtgcggacaagtggctgtactcccgtgctggatggaacggcggcctttccgccctttggccaagtgcatgcagagactcgagcagggtgggagctgagggctgctgccagctacccctcactgcacagaaagggaagtggaggtgaggccaggagacgtgttcttcctggagtacagggccaagtcctcctttcttctcagatccactggcacataaccgcaccctggctcaatgtggccctggatgccttcagaacaatatggccaatgcagtcctcctacttttctctgtccccttttcttatctcgtatttttactctagaattatgctgggaaaataaggcttgaagttctctcatttgtgtagcactttgcaaattacagagtacttttcacaaccttgaaaggtgggtatttcatcgttcttttttagaatgaggagctgagtcatggggaccagccagggcctctctagtgaagagtcctccacaaagcagaccccaaagggccagggacccaggccgcagagtccccacaccccacggaacatctctttggggccaaggagcagcctgcattcagaattccacttctggtcccctcacccagagcactgaggcactgggctctgccctctccagatgccggcctccctgccttgctcttgttctttctcatcagatgctccgagctccttgtcattggctcctgtatgcagcactcactctctgtggacactgcacactccaggatttagaaaaacccttgtggcttttcattaattttatatttgtgttgcattgcccattttcctttcaagaaagtcagctttaaaacaaaactgatttctgctatttatgacaaacccacagccaatatcacacgaatgggcaaaagctggaagcattccctttgaaaactggcacaagacaaggatgccctctctcaccactcctattcaacatagtattggaagttctagccagggcaatcaggcaagagaaggaaataaaggatattcaaataggaagaaaggaagtcaaattgtctctgtttgcagatgacatgattgtatatttagaaaaccccattatctcagcccaaaatctccttaagctgataagcaacttcagcaaagtctcaggatacaaaatcaaagtgcaaaaatcacaagcattcctctacactaataatagacaaacagccaaatcatgagtgaactcccattcacaattgctacaaagagaataaaatacctaggaatacaacttacaggggaagtgaaggacctcttcaaggagaactacaaaccactgctcaaggaaataagagaggacacaaataaatgaaaaaacattccatgctcatggataggaagaatcaatatcatgaaagtggccatactgcccaaagtaatttatagattcagtgttagctccatgaagctaccattgacttacttcacagaattagaaaaaactactctaaatttcatatggaaccaaaaaagagcctgtatagctaagacaattctaagcaaaaaaaacaaaaacaaaacaaaaaaaaaacctggaggcatcatgctacctgacttcaaactatactacaaggctacagtaaccaaaacagcatggtaccaaaacagatagatagaccaaaggaacagaacagaggcctccgatataatgccagacatccacaaccatctgatctttgatacacctgacaaaaacaagcagtggggaaaggattccctatttaataaatggtgttgggaaaactggctagccatatgcagaaaactgaaactggaccccttccttacaccttatacaaaaattaactcaagatggattaaagacttacatataagacctaaaaccataaaaaccctagaagaaaacctaggcaataccattcaggacataggcatgggcaaagacttatgactaaaaccaaaagcaatggcaacaaaagccaaaattgacaaatgggatctaattaaactaaagagcttctgcacagcaaaagaaactatcatcagagtgatcaggcagcctacataatgggagaaaatttttgcaatctatccatctgacaaagggttaatatccagaatctacaaggaacttaaacaagtttacaagaaaaaaacaaccccatcaaaaagtgggcaaaggatatgaacagtcacttctcaaaagaagacatttatgcggccaaaaaacgtgaaaaaaagctaatcatcactggtcattagagaaatgcatatcaaaaccacagtgagataccatctcacatcagttagaatggcgatcattaaaaagtcaggaaacagcagatgctagaggggatgtggagaaataggaatgcttttacactgttggtgggagtgtaaattagttcaaccattgtggaagacagtatggcgattcctcaaggatctagaaccagaaataccatttgacccagcaatcccattactgagtatatacccaaaggattataagtcattctactataaagacacatgcatgtgtatatttattacagcactgttcacaatagcaaagacttggaaccaacccaaatttccaccaatgataggctggataaagaaaacgtggcacatatataccacggaatactatgcagccataaaaaaggatgagttcatgtcctttgcagggacatgggtgaagctggaaatcatcattctcagcaaactaacgcaagaacagaaaaccaaacaccacatgttctcactcataagtgggagttgaacaatgagaacacatggacacagggagaagaacatcacacaccagggcctgttggggggtggggggctaggcaagggatagcattaggagaactacctaatgtagataatgggttgatgggtgcagcaaaccaccatggcatgtgtatacctgtgtaacaaacctgcatgttctgcacttgtgtcccagaacttaaagtataaaaaaagtgatttctaagagcgcttttcatttgtgactttctgcctgtatcatttcacaattatataaatattggacgacttattgtagtaattatctttctgcatttccatctctatctagaatttatttcgatgactctatacatcagggttcagttaggaaaaccatttccactccacgcatttaaagagagcatgttgagtacagagagttgattagaaaggtgatgtagggctgaggagtacgggagataaagagggggtgtgcgagcaagaggaggaaggggctcactggggctggagttgctggtggttctgggctggggcctgtcagcctgggccggctgctgcgtggggagcacaatcgtgctcggctctggatccacgtggaggagctgatctgagcagggcttgactctcctaaaaggagctgccccgcttcccccctgccgctgccactacagcagctgctaagtgcggcagatgccagcagctgctatgctgcgatccgggtcggggcaaggccctctgtcctgctgcctcttccctgcatcatctcccatcagagaccctcacaggaagccaactgatgaggtttggggggcagaattctagggggtcctaaggcttctgctctctggtgtacaagccttgcatacacacatcctcttgagagtgagtgggacctgctggtaaggtgggacatcacccctgtgattatgccatgttacttggccaaggggttttgcagatggtatcagggtttctaactagttgactctgaaggatcaagcacatcaataatcagggtgatgtcactggaaagcaaattttagcctaatagaaaaaagatttattgtgaagttttatgcacagtattgaattttgtcaaatgcatttttctgcatctattgaaataataatttactgccttatcatgttaatatggtaaattacatattgccagattttgcaatatataaccaattttgcattcctggtgtaaaccctacttggtcgtgattcgattctgtgtgtgtgtgtgtgtgtgtgtgtgtgagagagtgtgtgtgacagagtctcgctctgtggcccaggctggagtgcagtggcacgatctcagctcacggcagtctcagtctcctgtgctcaagcagtcttcacaccccagcctcccgagtagctgggagtacaggtgtacagggagtacagggagtacagtacaccatcatgcctggctaattttttttttttttaatagagatgaggttttgccacatttctcaggctggtctcaaactcctgggctcaagcgatcttcccacctcggtctcccaaagtgctgggattataggcgtgagccatctgtgcccggccaatttttggacttttttcactaatattttggtaatgattttttatagctatggtcatgagagacactttcatttttctcatctctgtgtcagattttaaaaccagagttatgcttggtttacgcaatgactttggaattattccctcttccctgttttctgaaagggtttgtgtaagattggtgttgttatgtctctatgtgtttgacagaatttgccggtgccttgagtcttcttgtcgggaaggtatttgacaacaactttcattttttagtttctatagagatattcaaatttccttttacagtttgtatcaattttggaagctgtagttttaaaatggccccacttcatctaaactgatacatatgttggtgtgaagttggtcatcataataatctcacattatcattttaatatctaccggatcagtactgacaacttgtctttcatatcttttgtgatttttgttttctttttctcttggtctaggtgtttttccatttttttgtatttttatattaaccttcttttctttattttgtttactgtttgttcgctgtgctttcatcagtctccattcctatttgttatttcctgctgcatttgctacatgtggccaccttccaacatcaccacagactccatggcttacagcacaagctcatcacctttcagttctgctgatgagagccccgacagcaggaggccccactgggctctccgcagcagtgctgcatcccttctggaggctcacggggaggactcacctccttgcctcttccagattctagaagtgctcccgttcatctgctcctgagtcctcctccacctgctgtgtcagccacaggacccagtttggaaagattctccacttttaagaactcaagtgattagagtggccccacctggataatccaggataatctcgccattgcaaggcctgtgaccttcatcacatctgcacagtccctttgccacagaaacagcaaacacatttaggactgttacatcttcttgataaactgacccttttttattgtgaaacatttccctttctacctgctaatattcattgtccttacaccagctttgtctggtattgagacatgttggcttgctaggatcagtatttgcatgccatattttttctcattgttttacttttaactgtctgtgcctttgtatttaaagtgtttctctaaaagtagcacgtgctttgagtcgtgcttttgttatcttgtctggcagtacatttttaactggagtgttaaatctgtttacacctattgtaataactgatttggttgagtttattcttccttcttcttatatgttttttaattgtccctctcttcttttatagcttttccttttcctgccttaatatttatcagttattccttagaatttcattttatttcctctttatcttttagctctgctttgtatttttgttgttttaaaaattttaatatacaattttatcattgttcactcaaacttatattacaccttttcacatttactatgaggaccttacaacaatatacttccatttaactgctcctttttggggaggtcgtgttgccatataattaacttctgcacatgctatcataagccagaaggtatctggtacaggtctcagtcaatttagaggtttattttgctaaggttaaagaccatgggctatgacacagcctcgagaggtcctgagaacatgtgcccaaagtgtgggttttatactgttttctgtttttgacactctgtactctttctcacggatctgagtttccatctggcatcattttcttcagtctgaaaattttcccttaacattgtgttgttgtcgtttttgagatggagtcttgctctgttgtgcaggctggagtgcagtggtgccatctcggctcactgtaatctctgcctcccgagttcaagcgattctcctgcctcagcctcccgagtagctgggatgacgcccaccaacacacccggctaatttttgtatttttagtacaaaccgggtttcaccgtgttggccagaactgctggcctcaggtgatccgcccgcttcggcctcccaaagtgctgggattacaggcgtgagccaccatgcccggctgtgaacattttttgtagtgcagttctgctaggtatgaattctctccatttttattgattgataattttgatgatgtctttattttgccttcattttgaaattctctctaaaattttaggttagaggttttgggattttttgcccatatgtaatatgtcattcctttgcctctggcttccactgtttttgatgagaggtcattccttaccctgttcattctctttgtgcaatgtatttttttcctattgctttgaaaattttctctgtctctgattttcagcagtttgactagaatgtgtgtgtatatggttttcttctcttctgtttttttatgggagtttgttgagcatctttatatgtgtgattgacactagccatcaaatttagaaaatggttagccatcatatttaactttttcccatttcagtctttcttctcttctgggactccagttaaacatattttagaccactcactattgtcacgcaggtctctcaggttctgttgttttatttttaagcttttttttatctatctgtgcgtagtttgaatagcgtctgttgatctgtagttccctggttgctttgtatgcagtatgtgttctgctgctaagtccatccagtgaattgtcttctccgaaatttttatttttcatttcttgatttctagttggctcatttttatagtttcccttttcttccttagatcttctgatgagttcactcattatgttcagtttgttcagtctgcctttcattttcttttttggaaatggagtctccctctgttgcccaggctggagtgcagtggcacgatctcagctcactgcaacctctgcctcccaggttcaagcgattctcctgcctcagcctcctgaggagctgggattacaggcatgcgccacaacgcccggctattttttgtattttttaaatagagatggggtttcaccatgttggccaggctggtctcaaactcctggcctcaagtgatccacctgccttggcctcccaaagtgctggtattgcaagcgtgagccaccacacccagccttcctttaattttctaacaaatttataatagctcctttaaaagtacctgcccaataaccccaatgtgtctgccatctctttatttttatggactaaatttgttttctgatattggaccatgtttttctgcatctacatatgtgcagtattttttgtttgtatgatgttcattggatagtcgtgcatcgcttaatgacagggacacatgctgagaaatgtgttgttaggcaatttcctccctgtgtgaacatcatggtgtggacttacacaaacctagctggtgcagcccactacacacctaggctgtatggtacagcctattggtcttaggctacaaagctgtgtagtgcatgactgtgctgaatactgtacgcagttgtgacacagtggcaattgtgtgtttaaacacttcgaaacatagaaaaggtgaagtaaaaatacagtataaaacataaagaatggcacacctgggtagggcatttatgaatggagctggcaggactggaggttgctctgggtgagtgagtggtgggtgagtggtgagtgagctagtgagtggtgagtggtgagtgagctggtgagtggtgagctagtgagtggtgagtgagtggtgaatagtgagtagtgagtggtgggtgagtggtgagtgatgagtggtaagtggtgagtgagtggtgagtggtgactgagtgatgagtggtgagtggtgagtggtgagtgatgagtggtgagtgagtgatgagtggtgagtgagtggtgagtggtgagtgatgagtggtgagtgagtgatgagtggtgagtgagtggtgagtgatgagtgatgagtggtgagtggtgagtgatgagtggtgagtgagtgatgagtggtgagtggtgagtgatgagtggtgagtggtgagtgagtggtgagtgagtggtgagtgatgagtggtgagtggtgagtgagtggtgagtgatgagtggtgagtgatgagtgagtggtgagtggtgagtgagtggtgagtgatgagtgagtggtgagtggtgagtggtgagtgatgagtggtgagtgagtggtgagtggtgagtgagtggtgagtggtgagtgagtggtgaatgatgagtgagtggtgagtgatgagtggtgactggtgagtgagtggtgagtgatgagtggtgagtgagtggtgagtgatgagtgagtggtgagtagtgagtgatgagtggtgagtgagtggtgagtggtgagtgatgagtgagtggtgagtgagtggtgagtgagtggtgagtgatgagtgagtggtgagtgagtgatgagtggtgagtggtgagtgttgagtgagtgatgagtgatgggtgagtggtgagtgatgagtgagtggtgagtggtgagtgagtggtgagtggtgagtgagtggtgagtggtgagtgagtggtgagtagtgagtggtgagtggtgagtgagtggtgagtggtgagtgagtgatgagtgagtggtgagtgatgagtggtgagtgatgagtgagtggtgagtgagtggtgagtgagtggtgagtagtgagtgatgagtggtgagtggtgagtgagtggtgagtggtgagtgagtgatgagtgagtggtgagtgatgagtggtgagtggtgagtgatgagtgagtggtgagtgagtggtgagtggtgagtgagtggtgagtgatgagtgagtggtgagtggtgagtcagtggtgagtggtgagtggtgagtgagtgatgagtgatgggtgagtggtgagtgatgagtgagtggtgagtgagtggtgagtgatgagtgagtggtgagtagtgagtgatgagtggtgagtggtgagtgagtggtgagtggtgagtgagtggtgagtgatgagtgagtggtgagtagtgagtgatgagtggtgagtggtgagtgagtggtgagtggtgagtggtgagtgatgagtgagtggtgagtgagtggtgagtgagtggtgagtagtgagtgatgagtggtgagtggtgagtgagtggtgagtggtgagtgagtgatgagtgagtggtgagtgatgagtggtgagtggtgagtgatgagtgagtggtgagtgagtggtgagtggtgagtgagtggtgagtgatgagtgagtggtgagtggtgagtcagtggtgagtggtgagtgagtgatgagtgatgggtgagtggtgagtgatgagtgagtggtgagtgagtggtgagtgatgagtgagtggtgagtagtgagtgatgagtggtgagtggtgagtgagtggtgagtggtgagtgagtggtgagtagtgagtggtgagtggtgagtgagtggtgagtggtgagtgagtgatgagtgagtggtgagtgatgagtggtgagtggtgagtgagtggtgagtggtgagtgagtggtgagtggtgggtgagtgagtgatgagtgaatctgaaggccaggacattactgtgcactgctgtagacttcataagtactgtacacttgggatatgctaaatttatgatataacaaaatttatttcttcaataataaattaaccttagcttactctaacttttttgctttataaacctttagatttattttttaacttttgactcttttgtaataacgcttagcttaaaacacaaacacattgtatgcagctacgccaaaatattttctttgtttttataagaatttttcatgtttaagatccccttccccttccccctccccgtcccctgcccctcccctccctctccctcctccccctcctcctccccttccccctcccctcccctcccctcccctcccctccccttttgttaaaaactgagacacacacacacactttagcctaggcctgcacagggtcagaatcgtgcatgccactgtcttccacctccacgccttgtcccgctggaaggtcctcaggggcagtaacaggcgtggagctgtcctctgctgtgatcacagtgcctgcttcttgacacctcctgagagacctgactgaggctgttctatgttaacttttttttttttaataaatagaaggagtacactagaataatggtaaaaatatagtatagtaaatacacaaaccagtaacaccatcgtttattatcatcgtcaggtattactattgtaagtaattgtacgagttacgctctgatgtgactggcagggcagcaggtgagtttacaccagtatcaccacaggcgtggggggagccagctgcactccttcctaaggaggccacagcgttgcagggtgatgggacttttcagctccattctaattttaagggacggctgtggtatatggcacgtctgttgttgcctgaaatgccgttgtgtggcacgtgactatatatgctacgctgttaagaatttggggtgttgtgtttgttgtttttggtttttatttctgcaggcatctaatttaccgaaacttcatgtcatggctcggtcgaactttgtcaaggaaagtcttcactatcccttcctctagaacttaacgttgtcctcctcctaaggtgtagcctttcatgggtctcaagtgaacaccctggatgctgagtgaggggcctccactgtggctgtgagcagtccccgcctcgtggtaccacatgacatttagcgtgtctgttcacctcatactccccagtagttctgtctctctctgccattcctcatggagtccttgcgtgcacagcatagtatttggccaacatcttcctgcagtttgggggccccgtctcctcttagctcttgcctctgctgtccccatctcccatattccagctgctgccgcagcccccatgcttgccttttgtcctcagccccccagcgaggcagcagcttgtgtgtgtgctgcactgccgtgagcagcaacttgacagtggacgcagctagaaagcagccggcgaggagctcagcgtgtgtctccgccgggtgaaagatcacagtcctgcaccctgctgtgcaatgctcgaacacacttgcttcttatttctgtccaattcttaaggtttttactgtgggatcataagtccttactccttcatggttggaatcaaaatccaaaaccttgtggtttccattttcagttgatgatatccttatgaactcaggatttatttcacttttgaaaagttaatagtctttatgttttagggcaattgtattctacaatacagaaaaattattggaaagtatagagcgtgccacctcctcccctcatacagagcttctcctgttacgtacatcttgcctcaagtgtggtacagtcaatgaaccaatattggtacattattattattattttttgagacagagtctcgcactgtcgcccaggctggagtgcagtggtgcgatcttggctcactgcaacctccacctcccgggttcacaccattctcctgcctcagcctcccgagtagctgggactacaggtgcgtgccaccaagcctggctgattttttgtattttaatagagacggggtttcaccttgttagccaggatggtctcgatctcctgacctcatgatctgcccgcctcggcctcctaaagtgctgggataacaggtgtgagccaccgcgccggcctggttcattgttattcacggatggtcatagtttgcattggggctcactgtgttgaacacaggttttgacaagtgtccagtgacacgtgtccctgtcattactgtgtcatacagaagagctccactgcccccatgcgcttcacgtactcactcctcccgtccctgaagcccctggcaaccactcatgtttttattgtcactatagttttgccatttgcagaatgttttgtaagaaactgccacagttttgtaagaaactgccaaactaccttcccaagtggttgcatcactttgcaaactaaaatctctctaaccgtgagatctattagtcatgctccttggtatttactcaaaggatttgaaaacttcagcctacacaacaacctgcacacagatgtttatagcagctttgtttatcattgccaacacttggaagcaaccaagacatcctttagtaggcaaatgaatacaccagtggtgcatccagacagtggaatatgattcagcactacaaagaaatgagctgtcaaaccatgaagtgatgcggaggaaccttgaatgcgtgttacttagtgaaagaggccagcctgaaaaggctgcatgctatacgattccaactatatgacattctggaaaagacaaaactataaaaatagtataaagatcagtggttgccaagagttgggcggagagatggatgtgtaggtggatcacagagtacttttactacagggaaaatactccgggtgatgctgtaatggtggatgcgtgtcattacacatttgcccaaaccacagagtacagcaccgagcgtgagccctgctgtgaactctggacctggggggtggtgatgtgcccacatgggtttggttgtgactcatgtactgctctggtggcgggctgtgggggatgggccgtgggggatgggggtatataggaaatctctgtgttttgtgctcagtttgctgctctaaaaaataaaacctaaacaaagcagtcggagtccctgaagactgtcctgtgacagagcaggaagggctcccttagctctgagggaaagcgctggttatgtatttgctcttctcccaagaacacacagtctaattttgatcctctttacagacgggatgaagggcatgttcatcaagtaagcggatgcaggtgcagagaccacacctggcacgacactgccgttgggcaccccaaggccgaggccggcagccactgttgtccccagagtccatctggtttctagagtggaaaatggaaaggggtcaaaccgcccacgcagccctgaagtccttgatggtagtgtagattctacagtcttccccaggtgctatcttggctgaggtggggaaggctcctggggactgtacttggccttttctgccttaatatcctgctcaaggccggggccagagggcttgtctggcagctgctgggcgcctctgtccagtgctgtaccagaacgtctagcagatgggtgtgcgggcacagggcctctgccagatggactcgggccaagctccgtctgtcatgttaattgtgggtccatgatggtgtctgagtcccctggagtgggcaggagctcaggccccagacccagccattgtctgaaggtccagggcctggccactcactctgcccatcatgctgtcactccaggcagttactcaggcccgctggggaaggtggggtgaatgtttgctctacaccgcaggactgttgcgggtcttccctggagactgggtctccgtttcagccactggctctgacccatggaccagctcagacctcatctcctctgaagggagtggcgctggccttttcctggctctcggctatgtgtgggatgatgctggccttctcccggctgtcaggtgtttttggtgtgtccatgtcaagtgtatccgtcctgggaacacccagtccggctgccatggcagtgggcaccacgggccagcacacctttgctgcctgtgaggtcgttgcgcctacctggccccatgggccccattttatctcgtcgctttgctgtctgggaactttgtcacccacggataggagtgccaggcccaggaggatgtcacgcagtgttggcacttcagcttggctgctgttctcccacaatccttgtgagggcctgtgatgacccaggtcaggataggacaggtggcttgggttctgcgggccacacggtctgcagtgtgcgtggccttgacctggtgctggaaggcagctgcagaccacgagtcaaggagggggtgagactgtgctccggggaaacgtggattgtggatatgggcagccagcggggcctgcagacccctgggttagagccaagccccagaggcaccttggtttctgagaagccagaggagggagttcctgggacctgggggatgaccatggacctctgctgccacctcgtggcagggctgacgtatctgagccacgtccttttctcccggtttagaaatatcctggtgggaggcgctttttcatccttgcagcagacaggcagctctgttggccacacgatctgggctgtgtgccccgccttcagcagaggccctcaggaccctgcgggatacagcctcgagaggacagagcctcagactctgaaggccacagcagtgatagcacacctgtgtctgaggagtgcgttctgagaggagacccggcccctcgtccttgtccatccatgtggcttctgcaaagcacccttgtcttgcagagccagcgagcctggcgttgtgacctgggctaacttggtaccttttctctttttagaggcagaatcctttcttgagaacagcatctttcaactcttgacctgctcccccttcccggttcccactttttgcctggcaggctgggagggaccccctctcctgtgcagcctctccctaatcctggattccgcaggggctccaagaccctcagggtcgccagtgactcctgggtcacactggcccagcacacactgagctccagcctgatgtccagcccaggaggtcctcaactgaggtccagtacccccctgcaccacgctgtgggccccgcaccctcccccaactcttttctacaacactcttccccctgcaccgtgctgtgggccccgcaccttcccccaactcttttctagaacactcttccccctgcaccacgctgtgggccctgtgccttcccctaactcatttctagaatactcttccctgcctgcaccctgctgtgggccccgccccctcccctaactcatttctagaactctcttcctcacctgtctccctggttcttgttctggcttctccacgggaccctcctgtcctcccgtgtgatgctgactgctcgtgacatgttgcagcctgtctctgctcccttccctgctcttgtcacttcttgctggtgctctgtggctgtcatgcagactggggttggggttctgttccctctactgtactggagctccaggtcatgggaggcagcagagcccagccctggcccttcgagcttccgtcctgcaagcaccggcagtgtcagggaggcaccgcccaggggaggctcctccttagggtgcattgtcactcggcgtttccgacacctgctctcatcattttcctaccttctctttcctgacaacttagctatttatcagaccccaaaatcatgagccttgagaaatgatattccacatgctcatcctctggaggacacctggaactgagcttgcttccctgctcaccctgggaagtggtttcacaatgtccctcaacgtgtgactatcacccatagcctccggtatctctctgtgttcagtgtgaggccatttgctcgtttgacccttttgaaggtcaggagaagctggcaggactcctgcaggcacaggcaccggcaccgtcatcctgggagccatcggggtcctcagcccccactgcagcctgagcctttcctctggccgcactgtccatttctttagctcctcttttgccttttctggggccttctccggtgttctgcgttcttttaaatgtttcatggttaaaactggacacatcccccaagaagctataaatcaaccatagcaagaactgatctctttccaggtgactataaaaatgattttttaaaaatggttctttaaaaattgtcagttaagcagataacagacccaagacagggccaggagagtgaggggcggatatggcatgggacagggttaggagagcaaggggtggacctggcatgggacaggattaggagagcaaggggcggacccagcacaggatagggccaggagagcaaggggcggacccggcatgggacagggttaggagagtgaggggcggacccagcaggggacagggttaggagagtgagggacagggttaggtgcacgaggggcagacctggcacaggacacacccatcttggttgtgagtttctgactcttcttggttttggtgaccttgactgtcctgagcaggactaatcaggcatttttcaggctatccctctgctgggatctgtctgatgcttttctcatgggtacaggaaggggctatgagtttgaggaggaagcccccagaggtgaagtaccactgtcaccccatggtatcgggcacaccctgtcactgtgactcacatgtgaggctgacctgggccctagcggggggtaaggtcttccccctccatgctgtcctcttataggacatcggtctgtgcaacctaagggtgagataagattgtagttttattcaactcttacttttaaaattttacaaggactcacattgacgtagtgggtgagattagaattagactttttaactttctggcctaaaactgattgtactggcaccttttgtgaaatgacctctgcagtccccatgacccctcaggtcagtcacctctgttccctgcatgtcgtcctccccagcgcccgctggcatggctgctctgctgtgccaggaacacagggtttcagagtttcagaaaacgtcggccttaattccttcaggggaccttccacactgtgcagctccaggagaagtcctgctggggattcggttgaggtggtgtctggtctcttcatgagtggaaagtgcagccatttaacccccttgacctcccaccccaggcgtggactttccgctgtgcagattccctttcatgtcccgcagaaccacgcgtgtccgttcttctgagagttttttcctggtcctcacacagtgtgtgggcttggcatgggctgcgatctttggctctgtgattcactgactcacccaaaggggtggccgacgggttcctgcagggcagctgtggcaattcagggcccatgggcctgggttcagggatgctcctcaaagagtgtggcaaaggaccccaggcaaagtaggtgttttttttttattttttaatttttatttatttattttgagatggagtccctttctgtcgcccagtttggagtgcaatagcatgatctcgactcactgcaacctccatctcccgggttccagcaattctcctgcctcagcctcctgagtagctgggattacaggcacccaccaccacgcccagctaatttttttatttttagtagagatggggtttcaccatgttgtccaggctggtctcaaactcctgacctcacgtaattcacccgccttggcctcccaaagtgctgggattacaggcatgagccactaggctcggcctgtttgtttcttttaaataaatgcttctcaatttataatgtgtctttagttgatttccagcatcctaaagtggctatttttgatggtttcatcccatttgtcattgtcttgggcaggggatgtgctgagcccctcactctgcctcctgggagtcctgcctcctgcatcatttctctcggacactcaggacaagtctaaggatcacatcactgccctcaggtgcaagtccctttccagagcacatgtgcttttagaacactccgagttttgctgtgttttagatctcattcccttctttttctacatttgttccattgtctaactaagagactcagggcatcaggcaagtcatgtcagaaaggttggctttagaagccacatcccagaattcctaaacttaatcatggaaggagggggcagactgacaacgcattccctatgtcctctaaagagatttctcccgttgggattgctttatccccagaggtgtgctgtagaaccagcctgtgttcacagtaaatctctgcttccgcaacagcggtgagctctcagccctccctgccctggtcttgtctctagggcctgtgggtctttgtggactgatggtgtgggtgggtttctgagggtctgcatggactcatggtgtggatgggtttctgagggtgttggtagcagtaacggttccacatgatgaaacccagatggctgctccccactgtgcatccacccggattcacccgctgctttgctggctgatgtctacaaggacatagatggcctgcatctggcgggggctgcaggaaagctggcaggacatggggccattagaagaggtgtgagactgtcatcagcagtaaaaagtggaacagcccagggagccctcttgtgagtttatggcttaaagtccaagtacaacttcgtttgaaagaaatgccttcctcctgagaaaacattgacaagcctgcaagccctgcaccctgcaggtgggcagctgcagagaaggggcaccctggtacctggcagggggcctcagccctggcctgcatacagcaggtgtccctgcattggctctgagcttgtgccacacaggaggtagctgtgatgccaagcccttgctctgaggttctaattgctgtggtcttggtggttcagggatgtttgcgagctcctgagtgactccgaagtaaaagcaaggctaggtcaccacagaatctagatgacattctcagcgccttcctgggagtaagtggctgcctcggccactgctgcctgtctgcatggctgctctgtggagcctggccctcctccctgatcgtcatctcttaggaaatgaggcaagggagagtgtccccgccgccgtggagagcccaggacctgagcgctcagctggccctcctgtgtgacccgtgtcctgcctgccgcccagcacccttctgtcttgtccctcaacccatggctggtgattttgggaggggtctgccactcctggcggctcaacaggctcctccctcccagttggcagatcagtgtcaccgtggatgagtttccttcagattgtttttctgtattagacggaggaaaccctttcttatttttcagggctcatatagatcattatttctttttgcatctcagtaggaattctgcaattcagtagggaaatgctggaaactgggaggagggaagactcctcactttgtctggggaggggaagttctctcaggcagggcatcgaggttgccccagcagaggtggggttggtggtgggacgtgggggcgcatgtggaatctttcacagggagggattcagtgcatacagtgacatggaaataaatccaaatgactttttccttattttaactattagtattaaaatacatttacttccaagttactacctatgaaagaaaaaaatatataactaaagaggaaagaaaaaagcagtgagggcggggtgcagtggctcacgcctgtaatcccagcattttgggaggccaaggcaaggttgggagtttgagaccagcatggccaacatggagaaaccctgtctctactaaaaatacaaaattagccaggcgtggtggcacatgcctgtaatcccagctactcgggaggctgaggcaggagaactgctggaacccgggaggtggaggttgtggtgagccgagattgcggcattgcactccagcctgggcaacaagagtgaaactctgtctcaaaaaaaaaaaaaaattaaattaaataaagcagtgagaatgagacaagtccaggtgtcatgttacctcaatgcatttgaacggttcaactttcctgttaaaagacaggcacaagagctgctctgatccacataacgcaggtgaatgtgaggataactacactcagtgaaagaagcttgacatgaatgagtctaaactctgatttcacgcatgcaaaattctaggtgtgtgaagtactctgtggtgacgtgaagcagatgcgtggccttcagcttttaggaggatggagtcagggtgccttccctgtcctccccaccaggcatgacaaaggtgctgggtattttatataaaacatgcataaaagattctgaaaggtgggaagaagaaggccagccagccacatacctcaggacccatgggacgacatggtggtgagttccctgggtcatttgttccagatggggcactggacaagtcagaaaactggaaacgccagtgggtacaggcaaaaagcaaacaagaaaataaaattctaacaaactctgttctctctaaccagaggaggaggaaaggggcagcctagccggacagaacaaaacgtgctctgccttggccagacctccccaaaactgtggccacagcctcccccgagtcaggaaaggccaagtggagagttgaggcttctgcttgtacccacccgtgtcaaggtgctccagtccacaccatgggggcatcaaggaggctgacagggacacgtactcccagctgagccagggagcatcagggaggctgatggggacatgtactcccagctgagccaggctctcaagagcgctccccactcccgcgtccctggggaccacacggggactggagctccctacctgctcaggatctccttcccatttgggcatcagctgagggacaaggagcccttcccatctgggcatcagctgaggccaggggcggaacctagatgcctcttctaacctggcggcaatgaggcagcacacctctgcccccgctgcgatggtgtcggaggaggccggtgaaaatgagataaaagaagatctggacatgatcatcacgtcacatcacatggccaggtttcaactgcaggtcctcacacacgccaagaaccaggaagactccagttcagctgacaaaaggcaatcgacagacaccaacaccaacacccagatgacatgggcaccgaagttacccaacagggcttttaaaaaagacatcataaagatgcttcagtgagccgtcaccagctctacacagtgaggaagtggaaagtctcagccaagcgaagacggagggccaaccaagtcgaggtttcagaactgaaagtacagccaccagaatttagaaattcacattgtacactgtgatgtatgcagttttatgtacatcagttacatctcagccaagctgttaataagcagaactcagggtcccagggaagtccaaggactcactcttcatgagacctcaattaaaagacccagaaagtttaaaatgaaagagatggaggagttgccagattcataccaacaggagaaagaaaatttggaactaacctggccaggaaagtgggctgagactttgtgctgctggtgctgctgtctgggaaggaggcagagcagctctgaggggcttggggaggctgtagtaatgaaaggtcctcagatgccagtggctgatacatagacaagtttatttcctgttcacctgtgtcagctgtggctcttgtcttcaaccccttcccaagcaactagtgcagtccccatctggagtgtcgttggtgttggagcagagcagtgagagcacagacaaccacccgcaggacgggagttattcttcccacaagagacgccaactggccaagacttcagggggtgggaagtgtaggcctctcccagggacaggcagtgaatatgcatgagcagtaattcagtcaccatcatttgcccttctggtcacaaatatttgcttcccagctttccccatgcaaaataaaccctacccaaggaagatggccccaaagtctggtcccttcatggcaccaggcttaatgcccagactcttaatacggtgagttactctcgctctggatctgccccctcgtgctctggaaacctgagccgagaagctgcccactgccctcccaccccagtatacatgggtgggatcagttcgcaacaacttgaaccagccgcactttccagtggagctgaaatgggaaatgctgggcactcctgcagcccagccctgctgaaagtctgctgggcacatgcaggagcctccccgcaggctgggagtccctcccgtcctccatccctgtcattcctgtatcctctggagcaggtgccggcatttccatgaaaggcggatggtaaatactcaggctgggtgggctctgtgctgtgtgtccgttgtgtgcaactcaaaggtgcctgctcggctttcctccttggccacagggaagtgggcctgggagagtgtgtgtccctggaggcagagtggcctctccgccccgcagcccgtcgcacgcttgacttctggtccctcaggaggcagcctgctctgagtacccacggtcatgcccaggctcctttgggggctggatggaggagctccacctctgtccccgtgccccctagcagctctgcccaactggaagccttgtgccagcggtgtggacagaaggtgttgtgtctgacttgtgtcttcccacatttcacaggtcgaacttaccaggtgaagctggattacttcccggcctccttataatggaaagagctagtgtaggagctgggacagggatggaagggccattggccgagtttgagatggcatttcacaactccagggtgccacggtttcacaactccagagcaggggtataagcctgtcctctgctgctctgggccagggctctggatgggccccacgtggtgggggccttcagattctctgagattcaaagctctttggagagaggacactttgctggggagaaggtgcgtggtccatttctccaggagtccgtggcttctgcaattgtgagctgctgtcctcatcgaacaccctcagcacactggcatagctccctgcacagggagcccgggaccaggcagagggtgctgggcagaaccccttcccgctgggcctctctttggcattcctcctctctctcctcggcattccttctctgggcctggctttagagtgtcccagtgtctcttgcagtgttttctgaacattttgtggcctagcggtaccaggacggttcttttagacactcgtaagaagccaagccacaggaagctactttccttgtgcaaatcctgggttactgggtttcctcaccccagaccccacctgaagagcaaagttctgaaggacaagtggctgttaatgccgtgcagctggctacacccggtgcgaagggaatccccgctgttcctccacaggctgcccaggcaccctgcagggccctccccacctgccccccaggctcatacatttgtcccacttgaagcggggaggcctggttcccctgacattctgctgccaggaagatgcagctctagggcagtgcaggcatgttcttcaagtgggccctcatcctggcaatctcaccatgccatggcaactgccagtaacctcagctttcacccaccagcctgagaccagcttctgctgccctgctgcgatcgctgtggtctccaccttagtttggggcctgcctgctcagcagggtagtggcctccctgggcctccaagagccatgtttccctaggcaagtaggaggctgtggccccaaggggatggaggaagccttcccctgacccttttgggggcatgcagtacatgtgggccctgcaaccctagaccagtctccaggcagggcaaatggcccctctgtgccccatagcctcgtcctaacatacgtgcaaatgtgcactgtggagaccactcctgcccctaccctgggagcctgagccccaccaacggcactggctctgcagggagcccctctttcctgcacagtgcaggcatctcctcttaggccgctcctctgagcccctccatgggaggatcgtgaacacatagcctttcagaggcctctataatgcgccgagcagttgtgtcactgaacgtgaagaggagacctgccagactatggacagcaggctcgctgggagagcagggtggagtgaggccactgacgcgggagccctgctgtggggggtgtgtgcgcatgctcagcacagcctagggcagggcttctagtgcaggcagcgcagcacctggctctggaggccagtgaagggagggaagaaagcctggaccaggaggacaccaaggactgcccctgggacagcagccgcccctttccaccccttccccactgcctgggttggtgaaatggtagaagctcttctctaattaaatgctcatccttacgtaaatcatagctttaataaattaatcaatggtttgggaattgggtatacgaacatttataagccagtattatgatgccgaaaatgtttcatgatgaggccttcccagaaaggcggggaatcgagagtgacgtagtcaccctccacctttgtccctgctgtctatgaagaaggagtgctgtgccctctgccctcctctcccgggctcttggcagcttcccggccggcagcagtccccacgctgcccaggcggagcagcccctctgccccccactctggagctgaagccagttttctcaacgagtgtctctggagtctgtcctgccctcctgctggcttgttcttctctcctggcctcaaggaaaggcctcctgacttgcctccctgcagctggctctgctccgagggccctgatcacaggctcactgaggtgtctgtccaggccatgaggctggctagctccaggcagatcctccgctcactcctcggggcggcgccggctgtctctacaaaaaaatataaaaattagctgggtgtgtggcatgcgcctgtaatccagactacctagcaggctgaggtgggaggatcgcttgagcccaggaggtgcaggttggagtgagccaagatcacgccactgctgtccagccagggcaacagagttagatgctgtctcaaaaaaaaaaaaaaaaaaaaaatcaaaactgataaacaacttagggaattaatggaagaaaacatgaaaatttgatgtgcatatagatggtgaggtctgttgttgaaagtttggttctcagcaggattttctaaagaatttcatagcttttcaacctgaattgtgctgtattccatacactggaaagcactgcactggtcatgttactggaagggggtcccgatccagactccgagagaggggtcttgaatctcacacaagaaagaattcagggcaagtccataaagtgaaagcaagttagttagttagtttgtttattttagacagagtttcgctctgtcgcccaggctggagtgcagtggcgcaaatgtggctcactgcaacttccacctcccgggttcaagtgattctcctgcctcagcctcctgagtagctgggattacaggcatgtgccaggatgcctggctaatttttgtatttttagtagagacaggatttcataatgttggccaggatggtctcgaattcctgacctcatgtgatcctaccacctcggcctcccaaagtgctggaattacaggtgtgagccaccgcagccagccaaagcaagtagattaagaaggtaaagggataaagaatggctacttcatacgcagagcagccccgagggctgctggtgcccatttttatggttcttgattgtatactaaacaaaggggggattattcatgagtgttctgggaaaggcatgcgcaattcctggagctgaggggattttacaccatacggtaacttcctgatgttgccatggcatttgtaaactgttatggtgctggtgagagtgtagcagtgaggacgaccagaggtcacgctcatctccatcttagttttggtggggtttggccaacttttttactgcaacctgttttatcagcagggtctttatgaccctgtatcttgtgctgacctcctatctcatcccaagacttagaatgcttaaccatctgggaatgcagcccaacaggtctcagccttattttacccagcccttactcaagatgtagtcactctgccaaacgcctctgagtgtcagaacttcagctttgggaaattgaccattctcagctgtgcagccaccccgggaccccacacctacatcatgttgacaataagtcccacccccgtggccccgtgctgacctcgtgttctccagtgagtgagtcgtggcttcctcctgacattgagcactcctgggagcaagagaagaaacaaatttggcagatggagcttaacaaatgcagctgtattagttcgttttcacactgctataaagacatacccaagattgggtaatttataaaggaaagaggtttaattgactcatagttccacatggctggggaggcctcaggaaacttagaatcatgacagaagccaaaggggaagcaagcaccttcttcacaaggcggcaggagagagaagtgtgggcgaaggaggaacttgccagacaaaaccatcagatctcgtgagaactcgctatcatgagaacggtatggtggaaactgcccccatgatccaatcacctcccgccaggtccctcaacacgtggggattgtgggaattacaattcaagatgagatttgggtggagacacagccaaaccatatcagcagccagcgaggctctctgtgggcagctgtgggcacacccaagggaaggagtgggcacccccatccagcagacggagacacggcctcaggccatgggcaggcaggagatacccccacctcgcggttattaaataactatgttacatagtaactgtggggcagtagggctttcattcatcaatatgtagcatttttatgttcacagttttggactttgcttgcgggttacttaatgccatcagatggaaagctgagagaaagcctgtggccccccaggcatctctgtaaagaaggcaatgccaagctgagggttgcttcccaggcctcacaacagcacaaccttagaacctaaaaaatccagcatgctacttgtgcatgccaggctcagaactttcccacgttggcccctggcagcttattcacaaagactgtctggttccagccaactgccgaggtgctgcccatgtcaggagagtgggtggaggaggggagaagggcttctcaggacagagggtgtttctgcttcaccaggattccagacacgggccacccccctgagcacgactggatggtgcccaggcctagtgtatgcgcccatgaatgtgagtggccagtgccagtggcagaggccaggcctaaggggctaagagctctggaaggattgtctgtttctgggcagaccacaggtggctgctgtggccccatgcagggcagggtcacggagggaccaccttgctgggaggagcttgcagtcctgcctgcctgggcaggagctcagggaacacctgactcccttttaaagtcataaaatcatatttgaatatgaaatcttctgtttttttaaatgttggaaacaaatttggaccatgttggcgattgactcacctgtgcttgtcaccacctctgaggatggcgtggatgttatctggtcaccagaaggaaagccaagcacagggaaggctgggggctgagccaggacatgtcctgggtagggaagggaggagctgggctggccagcacccccacaggctgagactgccaccgattcacgagtccacggggcccaggagtctgggtctacgtggaagttgtcaagggcccagactccaagcaaggccaggccaagcaggcctctcaggaagatgccgcacagtgcctggagcccggctggcagcttcttttcctggcagtgtcgtgtcctgtcaccagccgtcagagcgccctccgaccagggcgcgtgttagagcagggactggaagttgtgaatgaatgactaaatgctttcctagaggctgaccgaaatttgtgattagctaggatgtccatttccaaggcacagcatgtgctgtgactgtctaggggtggcgtccccatgcagcttgtgctttgggaggggccagctgcctcctcgccactgcccagcatagcttgtccccgtgcccgccaaagaggtcctcgtgctggcctcacaacagaagacggccacagccctgctctccccaggccaccacgtccacgagtgctgcactgtgagggtgcagcccagcgcctcagaggcagcagcacctgtgagatggcgtgcagatggaagtaggccaatagactccaaaggaagcaccactgaaaaatcagaggcgtctctcagagggggcccacgagggaggtggtatgaaaggtttttaaaaggacaaagcagacttcggagctgcctctagaggagagcagcaggtgagttccgagttcacctggcacgcttttcggcagagcccaggaatgcccacttctgagcgctgagtgcacaacccagctcgggaggcctgcggcagcaggaatggggaggcaccgtgagtccctcaaagcgctgctggaaatgtcactctgcgcggtgtccacccgtgctcggggtgggcagcgccactgaatgacgcgggcagcttgggaggccggttcgcgaacgccgcagcagcctctgctgacacgggggctgctccccactcacagagccacaggttcctgtgggttcatttatgaggatgtaggaatcataggagttaggtacatcttttcctgaggtgagagccagatgaggggagccaagacagagaatagcccacgtctgccctgggccccgggggcggggcctacacaggctcccaggagtgtgggtggggcctgtttaaacttcatgccccgggacctgcctgggagcctcctgcacaagactcgccccactccggaggcttagcagcaccggagctgctctgtggcctgttggcagagaggagtctggtgctcctgtgcacgggggtcacagcaaagccaagtggccgtagcacctttaacactggccccgggtctctacacctccctgccggccgtcagctcctggccgcagccggcactgacctggagcaccttaaggagcccctctgcaagtccctgtgcatctgagaggtcagagaggcagaaacacagttccagggttcaaacctaatatgcctcagcattctgggcactcacatggtgtgctgggcctgtcctgccacatggcccctgcgtgaggaagacagagcctgggcgtggccccacatccctgtgagctgcccatgggcctggaccctggctctggcagactaggctgcatagcagatcagcttctcctgagccattttcatccaggccacacctgccagcttgggccagggacaggcagaccctgggcccagggtcttgagcttgacccgcaggaggtctgggccttatgccctggggagaggagagcgcagaaagccagtgtcacggcagccccaggggaacaggccccaggcctggcggggtctggatctcagttccacaggggaagctgtggccgcaggcatggtaacctcaccaaacaaaaagctgcccatctttcagaatatgagcaagaagtttgtgagtccttgatcaccagaggggcaacgtggggcccgagatgacaaggagtccaggccacccacagtagctcctccttcagccttacagaggggctgcctggtctgctttcctggccgtgggttgcccctctctgggggccgatgtcagcagacctgtgggggatacaaacagaaggaaccttggaccccttcctggtacctccttactcatctgattcaaaccctcccaattctgcctccaaagtggaccctgactctccccagtccttaccgtccagtctccaagaccagtccacccagggagcggccagaagacagcccacctgcgccaggcctgtgtgtgcctttcctggcatctggaatggggtttggtgcttgctgcctgtagccaggcctgctggtcatgccttcctgccctgctgggcctcatctccgtgacaacgtcttggccttcctgccatcctttgtaagtgctgcctggtctgggatcacgtgtgccggctcctctgcttgcagtacttggctgcacttcccagtatattcgttaaaatgttgtgacatgagaattagcatatgacacgtacgtaacgtgagctgcggagcatagctttctcatgaacagccgtgaccccaggaccaggctaagcgagatgacccatgctgccgtgggtgcttcctcttctttaccgtgatcctgcattttgttttctcatctcttctctttaaaataattttattttattacacatgattgcttgtttctgaactcttagaaagtgacatcagtccctacatagacttcccaaacctgttctgtttagtcacacacaaggtgtcttaggttggtatgtgtttctgggcagagctgcagtttgtgtgcctggctgcatagtgttccagtgtgtgaataggcatcatttatttgtttttccagcagggtcatgcggctcgcttgccattgtgagtgatgcttccgtggacattcctgtgtgtttcttttggtgcacacatgaggtgtttttggtttaaggaagtggaattgctgcatcataaagtctgtgaaaggtgaactttcaggaactttcaggaccatgtcagtttttgtttcaaagcgcgggtaccaattcccatcccccagcagcgtgttagcgccacggatgatctacagtccaccaacattctgaatgtttgccaatgcagtgaatgtaaataacgtttcactgtggtctgtatctcccgttccacatgctcttgtgctgtgactttgatgcacctcccgccagggaggggatcgtgaccctccctttaatctgggcaggcatgtgcctccagcggaaatgatgttatgtgacatctgtgtgcaagccacaggcagcagcacagcgctgcagagctcccaggatgctggctcttggagcctagggatggcgctgtgagaacaggccacggcgccctagcttcaggttatagggcatggctacgtgcctgtggaaattctcctgcgggcggtttcatgtcgaaggcctacctgtagccctgggttgtctgcctcttgggggtagcggctgtgtggaatgcctgcgttctggatttggctggctgcctcctctggcatggtgcagagcccacctgcaaccccatatttgccctggtaggtctgaggtgcgattccactcagatttatttttcctgtgaggcgagcgagcttcctaggtggcactgcacgttgcaccgcatggcatgatgaggcgtgtggtctggccgctccttcactggtgctgagactgaggattgagcttagggggtcagcctgatccgccactgctgggttccccaccagccttgcagcttgctgtcaatattcattgatggtcattgcctggatgcagtacacattaggggctgcagaacggtgattttctaattgtgttgttctttctgtacttattagttgggattcatctatgtggaataacgtttgcctcatccactagggctgtttggttacctaaactatggttcatgccagaaaggcaggatagatgcttcattctttgcactcagttgttctcactgcgatgagttggtttctggaagccccagtgttgtcctgtgaatttgtgtctttccctgcttttctctccctgtgaagcatcattgttaactggtggatgttatacacacagtggagtttggccagtgcagctgccatttctttactcaaactgttctgtagtttttgggctcccctcgctttctgatgtaaccacatcagtcttggatggctttattgccttctgtcgtatgtgttcccaccttaccttttatattttcttccacagaccacctggaatcaaactcttttgggagacctgtttttgttctaataataataataataatactatttgggaagtagtatttagagaccacagcgtgagtattaggagtgcttattgcaattgggttgtcattgattttttataatttagtgaacagaaataagaaatgtttgtaattttaaaagaagagaaaattaagataaatatttttaaatcatatttaagattacattattttaacttaaaaatttaaaacttatactagtttttcttttctctcatcattaccatgattacttatttgttttagcctaagtaaatatataacaggtttggagaataataccaatattatgattaatgactaaatttagagcaatatatttctttgcacttttttctgtctgtataatatattcccttgaggatatgcagtcagattcctgtgttttaaggtcagtgcctacagtccttctctctgtggttatagcttcaactgaaattcctgcatttgattatgtaaaatacaaacatttacatgattctaaagtcaaaattattgcaagggctattcacaaaagtctcactttcctccctttctctccattcagttcccttccttctcctgtaagtagcttttaagttttttaatctttccattttttcttttcgaaaacatgaacaaatgtgtgcatacatgaattcttcaacttagtaaacttttcctccatgttcatatttcttttcacttttaggaaggtttgtattttttttcttggctttatattatcactctctatataattcacataaacccctctttttacataatttctattgacttactgttataagcagtattaaaattagccagaagtctcttcttcctcctctcccactcctaatttttgtttgttctcccacctcttcctcccatttcattagtgtattaactttattttaagcacatttaatggttacatattatcctgtcacccttaactccatcatttagtcctagttcagtagttaaatgtgtttgacacttaccaccataccttatgacaaagcttctccaattatttcgtggttggcccaaccccattttatattatgttcttcaggatgggctcatcagaaaaatatttcctgtgttcttgtggagtcatatctttttatctgtagccttcacaggagaaaggtaatttggcttcataaaatccttggttcacatttttctctttagtatcttaaatatgttgctttacgccatggtgattctgactgtgtataggcctacgctaatgtgtgtgtttatgtcttagtgttgttgttgttgtttttgagatggagtctctctcactttgttgcccaggctggagggcagtggtacgaactcggctcactgcagcctccgcttcccaggttcaagcagttctcctgcctcagcctcccgagtagctgggattgcaggcgcccgccaccacacctggctaatttttgtactttcagtagagacggggtttcaccatgttggtcagcctggtctcaaactcctgacctcaagtgatccacctgcctcggcctcccaaagtgctgggattacagacatgagccaccacgcctacccctgtgtcttagttttcaaccaaaagtttaaaaataaaagtataacaattttaagaatagaaagaagcttataaaataaagatataaagaaaatattttgtggtgctgtacaatttgtgtgtgtgtgttttaagctaagtactataaaaaaatttaaaagtttatagagtaaaaatgttacagtaggctgggcacggtggctcactcctgtaatcccagcactttgggaggccgaggtgggcagatcacaaggtcaggagatcaagaccatcgtggctaacatggtgaaaccctgtctctactaaaaaaaaattttaaaaaattagccaggcatggtggcgggcgcctgtagtcccagctactcaggaggctgaggcaggagaatggtgtgaacccgggaggcggagctcgcagtgagctgagattgcgccactgcactccagcctgggtgacagagcgggaccctgtctcaaaaaaaaaaaaaaaaaaaagttacagtaaactaatttaatttattgaagaaagaaaaatattttcataaaattaggataacttaagtgtacagtatctctaaagtctacagtagtcatcctgtcccaagccttcatatttactcaccactcactcatggactcaccagagcaacttccagtcctgtgagctccattcataataagtgccctagacaggtgtgccattttattatcggctcactgcagccttgacctcctgagctcaagtggtcttcccaccttagcttcctgaatagctggcatgtgccaccatgcctggctaattttaaatttttttgtagcgctgaggtctccctacattccctaggctggtctcaaactcctaggctcagctgatcctcctgcctcagctttccaaagtgctgggattacagatgtgagccactgcacccggccttttaaaatctcttataccatatttcactgtaccttttctatgttgtttaggtatgtttagatacacaaatacatagaactgtgtcacagttgcctacagtattcagtacagtcatgtgttgtgtaccgctttgtagcctaggagcaataggctataccatctagcctgggtgtgtcagctctctcacctaggtttgggtaagtatattctacgatatttgcacagtgatgaaatcacctaaaagtgcatttctcagaacgtattctcgtcattaacgcaggactgtgtgtctccccacgctcttggaagatgcagcaggaatcgcggttgtatgtatgttggatctcttttgcctgtctttttgtctgtcatgttctcctgaaccttttttacctctctttctgtttaattattttcattctcttctttctgttttattcctgtgccttctgtgatgtctccttactcttacatttcttctacttttcatttctgaaaaaaaaaatctagttggttcgtgagttctgtcaatagtaaaatgtcttcctgttttcttgccattccacttctgagatgttctaatactattttaaattatgttcttctaaaatgatggttattttctcaatttttagttcagtttcacatattacgctatgagtttcgttttctttgtgtccatagttttttggtatattttcattatctgctagtgtgttatttatcatacttttacttctttttggtagtgttctcatacgggatttgatcataattctttgtgtcccatttttaaataagagtcttcctggactattaggagaaagttttctgtagaggaattgggaatgagccaaagtagcattcctagcctcagcaaccaagaggtctctctgttattacggtgaaatatgtttgaggcctgtgtgtgtggacacttctgtctctagaaatcacttccaactcaggagggctcccttccctgactctgttgtctagagacgcacagcctctcactctccacgctgagctgtttgttgccttcaatcactgccctttgtcaccagtatgtgctggggctcacctcctctggatctctctttctctagcactttcaatacaaaaatacctcgtgttccaggctagctgaatttgtgttttgctttgggcagttttcttccaggcgattctctgtgcagaagtgaatcttcattgtgtatttctgagatacttgaggacttaggcccttcagtatggcttaaatttccagtgaactccttaatagttcttttttgttgtgttgtgttgtgttttcttgttgctttcctggaacttggagactacaagtacgatttggagtttctccatttgctctcaggatattcacctagattcccacttggtgtgagaaatcataaattcaattgctttaattgttgtagggatattgagattgtctgtttcattttttattttgtttgtttgtttgtttgttcgttctccatatcgcctacttatttgttcaggcttttttggaaacttggtttgagcctgtctatagaaagctcagtgaagctgctttaaaatcctggtaagggaattctagcatctctgttatctcagtgttggcctctgttgattttcttttctctttcatgttgaggtatgcctaatgtttggcacgacacataatttttgtttgtgtcctggaagtataggttattatgttatgatagtctgaatcttacatcaatcttctgtttcggcctctgttgacaccatggggaagggatgtcttgttaccagcaagctagggtggagatccaggctcctccctggatcctggggacaccaccggtggggagaagggtgcttggtactgctgggtgggagtggaagccgaggctctcagctcagcccctctgaccgggcagggtgctgtgtgcgtcctgtcctgtgcatggagcagggcaggtattctcagatgctttctgacctaataggttcctcctttcccatccctttccctagagagaattttcttgagactgtttttttccagtgtgtatcctttggcatttttcagttgcttttccagtgccctgtctgaaatatagaggaggaagcacaaacaaaacgaacaaacaaataagaaacccaaagaatagcgaactcaccgctgtgtcattctccaaatcccaagggcccagccagtcccccttcttccctccagctttcagggttctcttctgtttgttccacatgtaatgtccagagttgttggctgtgctcagcaggaagaatagggagagaggtgtctattccatcctgtccagaaccagaaggcatggcttcctttacgtgactactatcccctgtgccttcgcagttgtttttcttgattaatctcatcagagggttgtatattatttagactttaagaaccaaattttatatttactgatcttctcagttgcctttgtttctttgcttaacttctgaacttttctttattattacctttccactttctgtggatactttctgttctttttctaactttttaaatgggattcgtgactcactaattttgtgtttctttactccttttaaaagctataaactttactgtgagttctgttgcagctgtttgctacaaattttggcatgcaataattttattattgttgaggtctgttttctgatctcatctatttcttatctggaaacatttaaaaagtgttttgtccaagggaattgtaaagttatcttttgctaatgatatttaattgcctactgagtaggagatatgttctgtggactccatgttttcaacatttgttgaaacctgcaatatgaactaaaacgttatcaatttttgttttgttctctgagagccttaggagaatgtgttacctctgcttgtcaggtacagggttttatatacacacagacacacatacgcactatcatgttgtttgtgctgttaatatattctgcatctttattacttttgtggggtatacttgtgtgaactgtaaaggagagaggtatgttggcatctcccaccagttgggcgatttggggcctgtgacctctgacctcactgctccttcttgtagcattcttcctccattaatgctcgtctctctccttgaccttctttcagtctttcttctcagtgtttctacccaaaattgcaggccccagctccagcagtctggttgcggacaaggccgtgcttgtttttcattgggctggtctgtccagctccaaggctgccctttgagccggacgattgacccactgcattaggaaatgctttgccgtcttggtgagagccccactttagggaggtcttgcacactgctgcatggagcatagacacgttgggtgggaggtgccccagcacctaaggactcttatgattgggtggcaggggtgggtggtgctgccctgccctccagagcccttcacatggtccagatgtcacccagcgcaaggtgagggagccctggggtcacattctccaccctccctccagcattgttgcagccgcaggacacctgccagggtagaattcagcgtggctggaggattttgtgtggcagaagtaatggagatggtaggcaggctggtctccccgctcctctgtgagcactgtgtgttggtgctccctgccaatggtgctccccgcggcatggttccacgcgcaccacaagggcagcgtggcttcctcatcttagatgtgacagaatggagatagttctgggtgttagcccacaaaagtggcaacgttagggtccaaactctggtacatatgaaaccatggttcttctttcttcctctccaggcagattcataagaagaagactgggtctgagtttatatacatatatataaagttatatataaacttcatatacgtatataaagttataactttatatacgtatatgaagtttatatacgtatataaagtttatatatatgctttatttatatatatagtttacatatatatatgctttatttaaggttgaacaaaattttgcattcatcagaagcttccttttatgaattcttagacttttttactgggtaccccagagatttaaggtatcagcttgaatatcttctaaactgttctccctaaaaggaccatacctggattctcaaggagtccacctccggaggggtcactgacagttctgctctcttatgccttttgttcatcttaaccagccttggttagcaaggggcacctgccaccagatgatctcttaccaagtcatggtttcctgtctgaagcggtttccctgatgctgagaggcatgaggagaatgttacagagagacagcatgctgccttgtgattgtctgaggtttgaaaccttctggtgaagctgaaaccatttcttaagagcctggctaatgctgtgagctgcttaagcacccgtgtgcacatgtgtgtaagtgtgtgcctttgccatgtgtatgcatgtgagctgcttaagcacctgtgtccacacgtgtgagtgtgtgccttcacctgtgtatgtgtgtgtgtgagctgcttaagcacccgcgtgtacacgtttgtgagtgtgtgcctttgctgtgtgtatgcatgtgtgtgagctgcttaagcacccgtgtgcacacgtgtgagtgtgtgcctttgccgtgtgtatgcatgtgtgtgaactgcttaagcacccgtgtgcacatgtgtgagtgtgtgcctttgccatgtgcatgcatgtgtgtgagctgcttaagcacccgtttgcacatgtatgtgagtgtgtgcctttgccatgtgtatgcatgtgtgtagtttgcagctgagtgcactgcttttgtctggactgtgcccaggagggaatgtgacacccttggggtccttgcctttgaagctgatctgttgtggcagccagttcagcatgttcagcaagatgttaaagccattgctctgctgttactcccggggtctcacagccagagcaggccagaggtgaggaaggggatcccatgcctccttcatctcctctgtctccttgccttcctaaacagctgtgtttcccactgaaaagggagctgcagagcatttccacgtggagattccatctcgtttgtatccagctccatcaggggcctgctctcaggctcccctgggcgtgtgcgtgaggttggaagaggcgggtcactgcaggaatgtgtcgttctgtcatgtcactctctcgatgtctggtctcatggggttccttaccaatttagggacttgttagggagatatctagaactatattgatagatatacatcatgaaccagttccccttaggtgtttctaaaatgatataaattaccaaggaaatagcctttggttaaagttcattattttctggtcttgcattgttagcatagactgctgtctgctgtctgtgccatttctatttcatgtaacttactgaggttttctttgtgccctaatacaagctagttttttgtttgttttttttttttaacgaatgtttcaagtatgtttaagaagaaagtataatctctattattggagtacaaagtttgatgtaatgtccctaagacctacctcctgttactagctctctgtcatgctgagttatttttgaccccttaccttgccatggctgacagtcatgtgttaatgattgctgttcttaggtttctgtttctttccccaacatctatagtttctgcattataaagccagcttccgtgtttggggttctagcagattcttaactcatatggcttcgccgcgcactgggtcctccggcatcaagaagtgcccttcttggtcttgcttcctgctttgaggtgaggctggaccttgtcccacagggagattgcaatccctgctcttcagcctggtgcgctggcctcacgtgcttctgctcattccttgacactgagccttttcaaatcacttggcaattgtcatgtctcttgtgtaaagcagagctggctttgtgagccaagtggaaatttttcacagggccaaaaccatttacatttactcatgtgttgctaggaccagtatgtccagtcccaactgccacataacttgctcctgtatttaatgtgtgtgttgtgttttatttattgtgcatctttttattttttacatgtggtttgtgtctttgctttttttttctgttgtttttggcatttaggaaggtctgtgttttgttctgctggctactgttataaataacacctctcattgcacccttagtcccttgtttcttcctctgacctctttattttggcttgtctggtgggattcttttctcccacctatttttcatgcttcagtctatgagcttattctacattcctttttttctgattcatctacctctgatttatttgctgtatttttacttttgcagaacagcatgcttcccgataagaagctgtttcacagcccacctccatccttaccctcactttctcttttagtctgtgctcaacagatttgttatttttgtttatgtcaaatttcccagtggtctcttggcttgaggaagattcttttgtagtgggtttgggcctggaaacacagtgttcattgagttcttagctatttaaaactatttctctagagctttaattttgaaggacagtttggctgacataaaatcctttggtcacactttatttttacttgagtttatgaaaataattgctccactgttcacttaccttgtacattgcagtcaggaagtccgatccccatctgattttcttccctttgtgaataagctggtctttttgcctggagtcccaaagaattttctctcagttgtaatcattactggggagtgccttcagggccaccgttctgggtcagtttgttcaagtacatgatgagcctttcaacttgtcgattatttttttcctaagaacatttctaggattttaagtattaggtctgtttcgtagttttgcttttctgttttgggaactccagtctttgtttcttgggtctttgttggcctgggctctgtatctggcagcttctctgcgcgtctctcacctcttggtcagcctcatgttctctttgatgttctcagtcctcctgcagtgttccttatgcagtcattaccagtagagggtgtccaggtggcatctcgaacaaaggattggacaaaacgcacaaacaaagcaaggaaagcaaaagcagggatttattgagaacgaaagtacacgccatggtgtgggagcagcctgaccatcgggactcaggagcttacagaattttctggggtttcgatactctagaggtttcccctggttacttggcgaatattctatgaaaatgaagagaatgaagtgaagtcagagtcatttactcagaatgcaccctactgtaaatggagaggatgctacttggagtgtgtggtctgtataaatggagaggatgcatatgaagttacaaagggtaaatgccgtgaacggagagggtgaagtgcagttgcaaagctgttcacatccctgtcattgctgaggagctttcatttgatttagttctagggagtcagcctggatggatcagccttctgttccctgcctccttctgttgtcctgcctcacactcagctgaatctctctcttttggtaccttgtaacttagtctcatttctaggctaattgtgtcattctctttcatttctgtcctgggttaaattaattctcatttcacagttttttgttttaactgtacatttgtgttcctggtgtttttagtgtttcatttctgtttctcagcttttactcattttgctttggactgcagcgctgggtgggagttctcagttccattagctgaagaagttttagtgcccacaccccgttttcctctctcagagccatgaaggacttcaggagtgtctgcgacttggagaacatcatttacccaaagggattttgcatgccttttttctatttattttaaaagcacttggattttcctgcactagcagtaacaggtgtttctagctgggaatggacatgccaagggacacaggtggtttaccaggtttctttgtccaatagcatccttttttgttggtcagcaaaaatgtaggttctttttagaaaaaaactgaatggtgcatttggagatggattaaatctgtgtcttcttatgccttgctatgcttttatttctgtaggaaactgaatttctactctttccatccttccttccctttttctcccaaggttccaaatatgcctttttttttttttcttttttgagacggagtctcactcactctgtcacactcaggctgcagtgcagtggcgcaatctcagctcactgcaacccccgcctcctgggttcaagcaattctcctgcctcagcctccggagtagctgggattacaggtgcccgccaccaccctggctaattttttgtattttggtagagatgggggtttcaccatgttgcccaggctggcctcaaactcctgaccttaagtgatcctcccgtcttggcctcccaaagtgctgggattacaggcatgagccaccacatccaacctcaaatgtgccttttttttccaagtctctcctctaagaccatgctgaaattgaagaaattagatgaaatttgttcactatcagtgaaattagaaaaccagcaatgtatttaaattaatatataatttaataaatattgttttaaaatcagtgtagatataaggaaatacgtaagtaagtgcaattttatcaaaacatttcatgtagacgtctcacttgtgaagtggaagcctgcctttgggttgagtcacctcatttggggtgttggggggaagagccccaggggggagcgcttgctggcactctgtctccacactcacactgtgccttgtactcgaatgctgaagaggtgttgactgctgtgttgaaggcaagaggcagttccgttgaagcccagtgctggcggagaggccctgcactggtgcgctcacacagccctgtgtttttgtgttttaggtcggtaggctccacgacaaaagtcaacccttctgtaaatcacctgctgtggttatgatgctctgagttcaatacgtctgaacctttgctgtctatggatctgctctaaaccttatagcctgcttatgggggaaggtgagttactgtcttttgtttccatgtttgtttgtttaccaagagtgtatataacaaagtcagacttacccttgacaaatgaaatctgtttgaagtgacacagtgctgtatttcaccctgcttcagtccacaatgtgccctgaagactattctgtatatgactttgggaaattggggatccctgcttttgatagcagtgagctggttgtggttgaacacctttgggtccagtgccaggccaggtggttctcgcacagccttccagctctcccctggagccagccccgagaagccaaggaggcacaggtttcaggaatgaaggacaagaaggctgtgctgggggctgaagatcgtcctgaggtgtttggaaagagtaggtaatgagagcatcaggagtgggggtgctgttttggtggtctggtgataccctgcagacattagtgccgtggcttgagctgctaccatgaacttctgttgatacaattgcaaggaacgttggatgaatgagcagttgtgtttggagcttttaacatatcccttcaagaagtaggtcaccaaaaaataaacgggagtattaatatcttaagcaatataataaataagtttgagctgttaggtatattttgaactctacatgttactttctaagcatacagagagcatgtacagtactaggatgtgtacaggtgaagtctgtctgtaacatagggatgtatgtgtacaggtgaaatctgtctataacacagcatgtggagagcataaggcaattatactggaaattaatagtaaaggaatagcttacataaataatatgctataaaaaactcttgttagaaataaaatcataaaagaaataaaagaactttagggctgagtgattatgaggcagtatatgtccaaattagcatgacacagctaaagcagtgcttagaaggacatttgtagctataaacacgtgttaagaaacatgaaaaattaactcaagaggctgaaaaaagagcaagagagaaagcccaaggatccataaggcagaaatcagtgaaatagagagcacagaaaaacagaaaattcacagccctgaaagctgttttgtgttttagagtcaatagttagatctttggttaaagaaagtggaagggccgggcgtggtggctcacgcctgtaatcccagcactttgggaggccgaggtgggtagatcaagaggtcaggagtttgagaccagcctggccaacatggtgaaaccctgtctctactaaaatacaaaaattagccaggtgtggtggtgtgtgcctttaatcccagctactcgggaggctgaggcaggagaattgcttgaacccgggaggagaaggttgtagtgagccaagattgtgcccttgcactccagcctgggccatggagtgagattgtcttaaaaaaaagaaagaaagtgaagggatgatactggtgacagtcgatggaacagaatatagaaaggagtgaatgagtgaataaataaataaaaataaatatagatggatggatagatagatagatagatagataggtaaagaaataaccatagatacagccaagaagaaaagttgagtactgtgggaaaccatatgctaacacatttgaaaacataggtgaaattgataacttcctgggaaaataggaagtgccaaaatagacttgagaagaaatagagaacttggataagccaataatactaaagaaatttaagtgacaatcaaagacttccattcaaaaaaagttctcagacacatttttatgggtgaattatacctaactttaaggaacacttgatttctaacttacacagattgtttcagaaaatagataataaagctccccagccctgaggctaggaagaagagaggctggtccacaggtacaaagttaaagttagacaggaggagtaaattctggtgttctgttaacaatagggtgactatagctaataataatatgtctgtccagatagctggaagacaggattttgaatgttatcacaaaatcataaatgtttacagtgatggatatgctaatttccctggtttgatcattaaataatgtatacgtgtattgcaacatcatactgtatcctgtaaatatgtacaactattatgcgtcaattataaataaagcttaaaaaaagctgacggcttcgaaggtcgaggcaaggaacgtggcctggaaaagacaagggaaaatttccccaaagccttcagaaggaacacagccctgcagccaccctgacttttgttcagaaggaacacagccctgtagccaccctgacttttgttcagaaggaacacagccctgcagccaccctgacttctgttcggaaggaacacagccctgtagccaccctgacttttgttcagaaggaacacagccctgtagccaccctgacttttgttcagaaggaacacagccctgcagccaccctgacttttgttcagaaggaacacagccctgcagccatgctgatttttgttcagaaggaacacagccctgcggccaccctgacttctgttcggaaggaacacagccctgcagccatgctgatttttgttcagaaggaacacagccctgcagccacactgatttttgttcagaaggaacacagccctgcagccaccgtgacttttgttcagaaggaacacagccctgtaaacaccgtgacttgtctagtgagatctgattcagacctctgacttctggaaatagaagataataaatttgtgatgtaatttgtaacatcagcaatagtaaactaatacagtaacttttatagaaaaatgggtgaaggatcggaaagacagtttacagaagaagaagtacaaaaggctggtgaagagatgtgcaaactcacttcttgtctgagagatgcagagtgacatggcgtgtacacttcccacagctgagaccagcaggagcgggcagtggactcgcaccaggcattgggagcagatgcggaaagtgcacatgccgctggccagagggggtgggctggcatgtcttctctggagcctgctgtgacctggcatgctgtcctgcatctctgtggtgacaaaatctccacgggttcatggagacagatgcacacagcatctccttgttgtgctccgtggatgtcggggtggaaggtgacctcagtgcccctgcctagaagagtgaaaacctaactgtggcagaagccagatgccgtgggttgggtgtgccaatggcccttaaaggcagggctggcgttactggtggagggtgtccaggttcttggcgttttgaaaaaataattggacaaaacacacaaacaaagcaaggaaagaatgaagcagtgagagcagagatttactgaaaatgagagcacagtccacagggtgggagcagcccgagcaagcagctcacgggccccagcgacagaattttctggggtttcaataccctctgcaggtttccattggttacttggtgtacacccctgtgaatggagagggtgttcctgtcatggctgaagtgtttgcatttgatttagttctaggaagaccttaggtttcttccctgcaggccctcttctcctgcctcactgggttaaaaagctaagaaacatgagtggtgttaaaccattctgcctgtgtgagtacagacgcgtgcataggaaattaaatacacacatactttgcaagagcatatgtgagtaagagtcaggcactcggtgttttagaatgggctcctgcgtggtggcagtggcaggtggtggtgataagggccggtgagaataaaaaggagccgatggtacggggcaggagccgctcccaggaagcggtggtgccgacgtgtcataaactgatatccgcatctcagcctctgtgcacgaggctaggaagagaagagatttccaaaaaggtaagagtggggcgggggggacaaaaacgcaaagaaacacaaagagcagcatccgtgtgaagttgggcctgggagagagatggaaggggtgggatgaggcctctacgtttcacagctcagtaacctgggccctgagaggctgtgcggtttgttccatgcaagggccagcctggacttgcaggctcaaatacgactcctcctgccctgcatgtgtgtcagctaccacacatgcttttttaaaatttatttttgtttttatttttagttgttgtaaaatgtacataacatagaattttccatcttaactattttttagcatacagttcagggatatgctgggcagccatcaccaccattatctccagaactttctcaactttttgaactgaatctctgtccccattaaaccctccctcccccagcctctggcacccaggatcctactctctgtctctaggaatctgactgctctagggaccgctacacgtggaattatatggcatttgtctgtttgtatctggcttctttcttttagtctgctgtcttcagggttcatctacactgtggcatgtgtgagaatgtccttccttttgaaagctgaccgatatcctgttgtatgtaaagactgcagccatcagtggacaggaaggcttcacccgtttggctgttaggagcggtgcccttgtgtgtgcctatctcaagtgttttattctttgtgatgctattgtaaatagaagtgttttcttaatttccctcttggattgttcactgtgaggagaagatgctctttgatgagactgaaatgaagctgggtgtgggctctgggtgggtggagcaagcactccgagcctctgccccgcggaatgcagtggtctgagaagtaagtagcaggagtgctggaggaaatggaaacttacgatctctcctgcctgagttcacagcaggctgaaacccagaagatggcagaaagctgacagagagctccaggaggagcctctcggaacagctcgaagagcaggaaaggggaccctaggcagccttatggcgacaatagtggtgccaggaatggccaagggggtccgcaggggcccccaggctccaccacggagggagggagccttcctctccaagtctggcagcgatgcccaagtgccttctctctctctgcgctttcccacagctgatcctggaggagtgcacctgggaagccagtgcacagagctggagcttcccgactgcaggagggaaaagaggaatcctgggatctgggaggcacagggaggccagcacagacgcaggctccggaagcccacggagagggctgggcattctcccacactcatccccagcttcacatacacacatccgccctcaaacagcccatcacagaccttgagaaccgcaccatggggtggactgctgcccagttcccagaccccacaccccaccagcacagaggggggcatgcgtgggaaggcctggagagccctgcaaagaccgaaacaaccaacgtgggaaccacatacagagccccttagagttgaagcctgaacccaaccaggccggttgcctcctacatctgagatataaatgctctctctgggatttaaatgagacccaaggctgcctccgtaccccgccaccctaggtctgtgctgcaggccatgcagtgtgtggggtcaggcccacgtgtctgtctgccttctgcccgggatccaagtgcccgatggcctgagggccggaccccacacaggcacagaacgcgctgcagaggtgacaggcgggtggaacccagggagacagaaaacctcctgccagggaagttgctcggcttggagagaggactaaactctgacctttttcctctcttgcccaaattcctatctaaggagcctggggagtcacaccgtacaaaccgtaacatctcatgagacaggttttatttaacccaatataacgtggcttttcaatctgactgtggcttcacatcacatgacagataaagtaggaaacagaaatattttaccccaaaatatgtttatttgccatattttgaaatgggcctccaaagccatcttttatgggggaaagtttgcatctgtaaagaacctgtattaacataactggatctttccccttccagaccctcccaatcctgaggagcctggctgagagtctagtgccttgtgaaggtctgaataggaaacatttgccatgtattgcctctaagggtggacacctatgagatttcatccacataataaggaccttggtctccacagccccttctcttaacccagacactcctttctattgattccaggccttcagatagtaacttaactcattcaaccaagtacccatcagaacatcttttaattcatctgatagagcttggatatttgccctacccacatctcacatggaaatgtgatcccgagtgttggaggtgggtctggtgggaggtgtttgggtcatgggtgcggcttccccatgaacggcctgggccatcccctggtgatgaccgagctcttgtccttgagttcacaggagacctagttgtgtaaaagtgtgtggcacgccccccccacccccgctctgccccggtgacgtgcctgctcctctgcctcccgccatgatcgcaagtttcctgatgtcaaagaaaaaagtccaactctgtaaaatatttgaagagatttattctgagccaaatctgcatgaccatggcctgtgacgcagccctcaggaggtcctgagaacatgtacccaaggcggtcgggtacagcctggttttattcactttagggaggcatgagacatcaatcaaatacatttaacaaatacattggtttggtccagaaaggtgggacaactcaaagtgagggcttccaggctatcagtaaatttaaacattttcttgctgacggttgagtttgtctaaagacctgggatcatagaaaggaaatgctcaggttaagataaagcattgtggagaccaaggttcttctgaagtctcatagtggctgtccttagagacagtcgatgacaaatgcttcctgttcagacctttaaaagctgctggactctcagttaatctcttcaggattgggagggcctgggagaaaaagatcaagctatgttaatagagattctttacagatgcaaatgttcccccacaaaggacggctttgtaggaccatctcaagatatggcaaagaaacatgttttggggtaaattattttgtattctttgtctcataatgttatgccaggttggaaagtaagtcacaatatagggttaaataaaacccatctgatgagaatttatggtttgtagagcatgactccccagaacccttagataggaatataggcaagaaaaaaaatcagaattgagtcctcacggaggcccctctccagaagccaaacagatgccaatgctgagcctcctgtatggcctgcagaaccctgagccagctgaaatcctttctttataaattacccagcctcaggcattcctttatgacaatgcaagaacagcctaatacaccacctataaccccccacctttgagctgtcctgcctttctggacctcaaagcagagcacacctcactatatctccctaaaccatataaaaccaggctgcaccccagccaccctgggcacaagttcttaggttctcctgaggctgtgcctcagccatggtcactcacatttggctcagagtaaatctcttcaaatattattttgtagagtttagctcttcttgttgacaggagccagcatgtaccagtgaccagaaagcctcaagccctggtgctggcttctctgccactcttggacccatgagccctggatgggatggggaaacagggctgccccccagggccttgctctccagtgttgacggaggtgtcgtgggagaggctcgcagagggcaggggtgttgcctccccccacagccaagccaggcctcccccattcccacacccttcccactgaccgtgctcctcagacccaccctgcactcctgccttgcgggccatgccccagggagcctcatggacctcccttacctccctccagtctctgacctgtcaaccaaaatgggattgtggcagatcttaatccgctcagaggtttattttgccaaggttgaggactcgccagggagagagacagaagttactgtaggacctgttgcctgggatttttccgaagagacttttaggactttcgtatttgaaggggaaagagctggcgggaggcggtagaggacctgtcatctacgcacggtctctccaagaatctgcatttcccataaggtgaagtaaacctggagcagaggaagacatgcatgtgtctcgggctgggcggaggaggaacggcttctcgtcttgtcttagtcctgtacctgtgaagataagctgtttattgacactgtcagggtgagagtcagcaggacactgccttagggtacagactggggcccagagggcatttccgtgtgggcagctggtgagggaggcccctggggagcctcgcagccttctatctgcagctgtctgcttaggaccaaaaggaaggccacctttgcatgactctgttcccaaactgaactcctcgtcatagtgggtttggggtcctgagattttattttccttccacagttcccaggtcccccttcagtgaggtcttcctgatggatgctgatatggtctggctgtgtccccacccaaatctcatcttgaattgtagctcccacaattcctacaggtcatgggagggactcagtgggaggtaagtgaatcatgggggcgggtctttcccgtgctgttctcgtgatagtgagtaagtctcatgagatctgatggttttctaaagcatagttcctctgcacgtgccctctcttgccggccaccatgtaagacgtccctttgctcttcctgcatcttccaccatgattgtgaggcctccccagccatgtggaactgtgagtccatgaaacctctttcctttataaattacacagtctcgggtatgtctgtattaccagcgtgagaacagatgaatacagacgccatataaaaccccaatccagcctttccagccttgtctgctgccaccaactcctgctgcttgtccactcctttgctggtgtcaccgtccttgggatgtgagctctgtgaatgcccggcactgtgctgtggtatcagcaggtccccgaccaggaacagctgagccaggaggggccgtgctgcagaggtggccagcgggtcagccgggccgggaggcgctgtgcagcagaggtggccagcgagtcagggtacaaggccagagagggttctctgagagagaattgcatcatatgggggttcccctgcatggctatgcatcagaagcagggatgaatccatttcacactctccccatttactgcttcagagcccctggggaggaaaactcccaggttgcccaggaaactccaaggtggcccttgggaccctggacagctggccttccactggctgccagcctcaccctggctccctgcctctgctcagggaaggccagtcctaacacgcgacatctcccctcttggagaaaccactaggggcagccgtcagtgtgatgggtgggcgcctggccccagagcgggctccacactcggctgggcacctccctctccagggcctgttccagcactgagtgcgcctttggggatcgtgcaccgtgagcagcacagctggaccccaggtgagggcacttcacctcccaggcctggtctccacacccgggtcacagagagacatgtcagctgaggaagcagggcaggcggcctcttccttcaacacctttaacttcctttaaatggagaagggaggctgctcctggggaacacagagggccgctccactgtaaaaccacagcagctgtgcaccaggatgggcctcagggaccagccagcccagggatggccggtgcccccaccctctgacaaatgcacccaggagtcaagcatgggggtgtcctcggcacctggattggaaggttcttgccattgtggatggggtctaacctcctggacttcagtgggtaaccgaaggctccagcacgcagcttcagaaagaccagagccaggcccaggtgccctctccagccgacatccgggctgtggcctctgggctgcttctccttcctgtggcttccaagtcccagggtacatcggtgcccttctgtgtcctggcagttttagagaaaaggaatgaagcagctgtattcacatacatgtagtaaatgtgaaattttcacagcagcaccattaggtctctaattttattacgtcgaaagttgcatgttggcaggagtgatatggctaacagcagttaggactgtgcagctgacttggttgacattttacaccatgttgctgtctgtgttgaacacgcagttggggctgcaacttacatggccttttatcctctttctaccgaaatggttggaaaacagaagggttccatggagaaatggcagattctgggtggggaagcacaaatgagcctgagcacatgacagccccaaggtagaaaacccatcgccctggagggacaccgaagcccacctgaaagagcctctcatggccaacagcaaagatcgtgcgaggctgcgtgacagcgcagagtaaaacaggcacaatgcagactgcgggggagatggacagcccttccttacacaggcagttacacacacgtgatgcagctgtgcccctccggccggcagcgacccctcccctgagcgtggccctgggagcaggattggtagaggaaacagtgtggcgaggagcagcccttggcagcgacccccgtggaggtgcagtgctcgccttgggtgcaaatgactgtgttcggcctccactccgaggctgctggcagtgacccctccgagcagggccgctctgtacctcccctcgccctcactgggctcttggcggcactgagccagcggctcctcctgcccatcctgggccctgtggaggcccctgccccagttcccctcctgcctctgggctgctccttcccagtcacaccctcagctcctcccttcacaagcgctgtggcttggtgtgcagccgcctccatgccttctcacctctgccagcaccccctctcagctgctgcctggtcagcttccttctccccaccgcacacagcaggtgagaaggccacttacccacagcacccacctgggcctcacatctgctggtagccacccaccttccaccccactggcaaccaggccctgcctgcctgttctgctttgccttccagcaggctgtttgtgaacaccacaggcccacccacaccagcctcaacgctcagtgtccagtcctgccccagccagctggggcaacagcctgggcccttgccagcctgggtgccagccccaccacccaagctttagggccagagcacgccttgagtgattctgccattgttctccccatccgtaacaggaaccccacaccgagagctgctcaagattaaattagtcagcagtgccagatgcagagcgagagttgtcttaatgtggccaccgtatcctcctcctcttcttccctgacccctccgtgttcataagctcagtgcttgcagaccgcaccgagggcagagcctgcccagtggagaggaatggactggatggcgccagctgggcctgcttctcgccctgcacttcagcttgtgcctcctttggccccaaaattataggtacagactacaaggaaataagagagagacagaacgggatccactcaaaggtcatggttttagtccgtttctgctgctagaacaagatacccaacactgggcaatttataaacagaatcaatgtatcactcaccattacggaggctggcaatccaggatcaagactctagcaggttttgcgcctgggaagggtcggcctgtctgagacagcaccttgaacgctgcttcccctggaggccacgaacgctgtgtccccatggtggatgggatgtaagggtaaaaaggaccctgctagttttcttgagcctttttatgaggcactggtccatttctgagagcggagtctcatggcctaatcacctcctgataccatcacactgggtcttaagtttcaacataggaattggggcgggtggggggacacgtacatttaaatcatagcaacaaacattacattattagttactgtaacaattcaaaatacctggaattgtcagtcactgcagatttttatgcatcagaataaatgcataaaaatgcacaaaatgcaataccgtggggaatctgctcccttttatgcagacttcaatatagtaacatagaaaaatatttcatgtataatagcaagaaaaacaaacatggttggttactatttttgctaaaaagatataaaaacacaggcctactagaccaaagtctgaataggcagatctcaagataacacatatcaaccgtggtccttctgggtaatgatcagtgacaggtttttcttttgcatgtacacatattctatttttttctgtatgaacctccgatactcgttattttagcttctttctttaataagcaatcgactgactttgcttggtcagtaagacatgcaggacaccacacactgtctctgtgccttgtctggcatcagaaagctgcaagcacattgtgtgggccccagcaggagccagctcagcctgtccccgacgaaaccgggccctcttcacagcccagtggcttctctttgcattcacatttcacttctgcctgttgtgtgtgcttttcccattaccgcccctgagtcttgtgtaacatggtgggatcaaggtaagaagcctgtaacagaacagagggtgactttctcctactctgtggcagaagtgcctagtttgatgggtggagcagtgtgcatcctgtacctcctctcttggccccgagtgtctgggctgtggggtcctgggctaggcctttccaccccacctacctggggcacagctggcatcaggaccacatttgaggctgcagctcgtccactcagctttgcatgggtctttcttgtggggcagacctggaacatctcagtcacaacaaagaagaaaacagggaaaggagggaatttccagttcatgctgtttcaggtacctcctcctggtgaggaatagcctcatcctgcagtccatgaggacctgcaagagcgtcaccagccaagcccaggtcagccccgctgtccgggtagggacctgctttatgcctacgccacccatggcagactggcggcagcagcagcaaaagctcgtgtcttaggagctgtgttgggattaatgctgggtcctggggtttctgcccccacccaccccttcctattccaggggcttagctgctgcggccgtgtgtcctacaggctcgccgggctgttgagtcgcccctgttgggggaagggggtattgaaatgacagcgcatgagtgctgggtccaccctccaagggcatgaggggagctgggcaaaaagtgggtcacatgtgcctggcccatgtcacgcggctcccgcccgaggccaatggggtgggcagcctccctcggtggagagcgaagcaccactctcctttttctccggtagcatctcatcttgtctaaacggggagagtggccatctgtccgatacccacatcaaacctgatcgttcccagcctcacagagctgctttgttccaaggtaagggattgagggccctgggtgagcggtccgcgggcaggacggttggctgagattggcttcgacgggagtcccaggcaatgtggcaggcagagtttgtgcttggttgactgtcggggaaatgcctagaggaaccgcatagccgtgcacgatgcgttacgatgaaaaagcggaaattgtgttaggtttaagcccgctcagatgatgaggctcccgtcaggccggctgttccactaacagggttccttctgaggacccatagcaagtgtcaataatcttctttactagtcgagtgttattatttatggaaacataaacgtggctttacggatgtttatcaatcagagatactggatgtggtatgggagtgtgactctcacctgtgcaaacactggtcacccttgtggggccagacttttctgtctgatgagtgccttccatcactgcttctgtgggtgaacgctggcctctgaactgaacaggtgattacatccccgccactagcgtggggtactgaagtccaacatccgagtgaggcggggtcatgggtgctgccgatggatggagagcatgcacttttgcagcttggtgcttaaaatggggaagaacatgattctcttaacctcaggaaggccagtgagcaggatttctgtgtgatgaagccatcagggaatgcataatacttcaaaatgttgagaaaatgatgctgagtttttcagttcataagttacaacaaaattttatattttcacctattgtaaatgaactaaagtgttcccttagctcaggatccttctggtgaacgtattttggcagttgtgagtacaatagagagggtttgcagtgtctgtgtggtgtgtcgaccatcgctgccatgtttagtcacatttcctgctcctgcttgcatttgctgggaaaaatgttcccagaaatagcttgccagagccaaagtcataacggagtttgatttgaatgtgtcctatcagtttttcctttcagagataaatattttaaatttgtgttttaactcgctttccaggcaagtgggtctgtgaccaagttcatagaaataaatatgaacactttagatttttaaattcttctacattttagttgtatcgaatagcagttgtacccttgataacaaaaagaagcttttctctgcgtgaaagtaatgccttttgaaaacattctgcatttaggctaatacccagttcccaccaactacagccttcaaatgaatttcatgtaatatttctaaaggactgtttcttacccactgccaatcttgaggaaagggaatttttctctcatttcattaagatggggtagaagaatttaatgtttttcatatttatgattataaatgcttcttttacgcttggggaaagtcccacttattttgatgcagtttttaacattatctccattcttctgctccacctgacgtgtatcccagaacttggcttaatgggagcaattagtcatcgtatgtggtcagaagacagggagatgccgctgtaatgagcatgcctgctcatgtttaaaaaattacaaaatcgtagcccacccccagtcgcctttaggggagaatgcgtaccgctatctccaggaacaaagcatgccctgcgcggccggtgctactggatggatattccttcgcttctatcagtggaagatatcgctgttcctgcagaaataacgaaatggaacaatgcagaagcaacaaggtgatgtcccctttgtacttctcagaagaacctccgtgcctcccgccccatccgccactgagtatctcatgcagcggcgtgtcctctggcaccaggcagggactgatgttctccctcacattggcctcattcctctgggtcctgactcatttgggaactgaaagggctgctcggtggagctgggtttgaggatggtcttccacaaggccctgcagacgccacacagccttctccatgtgtggggtgtgtgttatcacccggagctgtgggctctgctcggaaagcggggactggtgctgcttctgcacggccaggacctcggcagggcaggcggctgtcctgcagaggcctcaggcgggctcagggtgtgcaccccccacagccggagcctcccaaagaaacattttcaccccagctgaggtgactgaagggactcagggccacaggccggatgctatgacagggtctccaggacccccgcatggactggaccatctgtgggcagagccagcaggcttggcctgtcctgccgcactccagccagcagaatagcagtgggcttccttctccaagcatgggctgcggtgtttcaatgaaataggacaagtcagtggctctccacgtgtgacccctggaccccccttgccatcacctgagaaccttctggaccttctggatctgtaaattctcagctttcctccccaccagactatgtcagaagcactgaggtagggcccagctgagtgtccacaccttgcacccagggccaggggcacagcctgtgctgttcagtgagccatcaggtcagatatgaaccagacagacctgtggcccagtgacaggaattccaggtgcacaggccagggttcttatcgcaaggaaatgacacagggcctgccccatctgccctgatgccgagcaaaagagaggctcatggaacgtgagaggagaaggggctgtggagaaaatgtggtcctgctcgctcatggttaaggttaacaggaacccaagacagaggctgggtgggagggacgttgtggcagaggctgtgaggcctccaggggctcaggagaaatgaagggtctgtgtctctggggcaggaaccagccacagatggccttaggggaggagaggacctggggaggggtctggtgggaggcgggggtggctggagcaatcccagagaggctgaggtgttcaggctggccccagatgcacacgagcgtgaagcctgttcagaagccagctcctcacaccctctcccctgccagaggctccagcaccccctcccctctcctctcccctcccttccctgtggtcctcctgcccaccccacccccgtctgcatgtgcaccgtcacggagatgcgtgtactagggcggaggtcggggacagtcgtcagaaggacacaggaaagaagggaacaggaatcccataacagaacattatccggcaggagtaattaacacaggcaggactggaggctttgttttgttttgcttaaaaaacagtggtatttaaattaatgggcatgggaagactattcagtgaaagacatcggtcattgaggtatctattcaaaaacacggtttagtactctgccacacaccgaacgcaacgccacagcagccatagaagcgtgtgtggctgtttaacgtggtctttttggggagggcatcctaggcagagcaggcgtggaagggaaggcggcggacggaacaaaacgcgggcacgcaacggctgctgcgccggatctgaggcagggccagcctgtgggagcagcaacatcgctcgcaggacagcgatggagcccccacgaatccgcgtgaaagcagcaaccacctagaaatgaacgtacagctgcttagaaacagaatacggatgacccgaaagacttcccgatggtagtcaccagcatacaggacctgacacgggcgtgcgggcagggtgtgccgctacggggtccctggcgcacctgctacccctgctacccgcattcaccgcacgcggagggtgcgggccgtgaaggttatacatgcaaatatccttccaccagccagttctccttccaggaatctgccacccgacccttgtgttgtgcacagacatggtccaggtgtttgcgacgtgattgtttatcagagagagagaagggaaatctccaggctcgctgtagctgcaggagctctgggggctgcgcccatcgtggagacggatagctgtctctcatgaacacaggacagcaagtccggctgcggccacagaagactcgccctcctggacgcagcgtcttccttcctcagccccacactggaggtggccagtgccatccacagcagaaggggccagccgggaccaggctcacgccgtggaattctgctctgtggtaagaggaagagcgatagctggaacccagcgccgtcgcacacacagcggggaagagtctcagaaatgttactttgagtcaaaaagctggacaaaaaaaggcgcaagccagatggtgctgaagaggccacaggaggctggcagccagggggtctggcacctcactcggaggcgcagtgggcccgtccggaattagtggccatacggcaagtgccgagtggacatcaaaccgtcacttcagactcctgcgcttcactgcctgtcggttatgcctgggttttgaaatcaagtcacagaacacctggaatgtggtgtttacgcagaacaaagcgggtgcctcggaggagagagcctagggacaggggcacctcccggtgtgggtgcccagggttgcagggtggcttcctctgtctgcgcggttttcagagccccagggtcctgcctgcccggctgcctggaggcggcccacatcctgctctgcgccgccgaatctcagcctgaacagcttcgctggtgtttgtgttgacttatttgttctttttttttttttttttttttaaataaaggattccgatgctgttacagtcaataaaagccacaggtctgggtgacctacaaatgtgtgtgtctgactttctgcagtttaaatcgccactgagccttaaggcgtctggcccgcgcattgaggaatccacgtgggtctcggggtccccatgcctgcccagctccctgcttcagcctgggcgggtctggcgggcatttctgcgagcctgtccctgggcccgcctcctggccagacttccagaaacattgtccacatccccgttgcacgtccccccgtcaccggaaactgcagcccacagcactgggaagaacccgggaggcaggcgttaggacggggtggccgagacagggaagggagccatggcggacgtcctcacccaagccagggcttcctgcccctgtggtactgacaggagccccgcaggacgtggggttggctttgggcagctcggtggacacttctctttcagatcctgccacagcaaagctcacgagactcacttcttcccattggaattcactaagaacaaattcaacaattcagacgccccagctggaggtttattttatggattttacctgtgcggtatttagggttgtgtttatgaataaaggtgtgcgttctggcaagtagaaatacagagcttgtctttcacccaagtatctgtaactttctccaatgcagacactaaaatgcaataaaaacaaaccaaacccattaaacatgaattagatgaggcaggctgatgggaggttgtgggattaacaggccgtcagcggattgaagctgcgcacatcgctgggatgctgctgcgggaggattcggtctaatccgggagcatctggctgggcagtgggcagcgtctgcagtcgtggctgcttgaaggtatgaaggttgtggcctttgcttccccccatcaggctgccccaccctggaccccacccagacccctcgggcaccctggggtcatcttcagctcccccttctcttccttccttctcttccgcctgggcccctactgtgacccgaggtcagcagaggaccctggcaggtggctgctccctgggactcgactgtgcaggtgaggcttggggtgaccgctgctcctgctcctgctcctctcgccgtccccaccctcctccatcatgctgtcaacatgcatgtgggctgcagccctcagcctgcaggacgctgtcagtgcagctcctcagtggccagggcagctccaccactgggaggagatgggtgtggagacctcggtggacagaagggcagtggggcctggggagtgtgaccccagggccccagggcctgtcccctcgccaccaacgttgcatgccaccacacctggcacctctttggatccctgcagccctgatcacagagctgcgtatgcattccctcgcaggcagggcccaccaaggtgctgtggccgcactggggtttagcaccagtgccttcaaaccagtggtgcctggcccaaccactgactcacactgtgcttagctttttagtcggatttttttagctgttagtcacacttcagactttaattttttgtgtatgtttcttatctaagttatctttatttttattgaatttatttttgttcatttattttttagttgtaatgttatcgctttatcttaatcttcataaatctattttaactacttttatcatttatttatcttgtatcactcattttattccctttaaagttttactcaacatttattatcttctgggtttttcttagtgattttttttcttttgggaagattcttaatggttttagttgctttagcttatatcttttttaaggagatatttttagcagataccatttgtcatattcttaaaatattaagacgctgaaagaaatgatttgctaatctaattttagcttattttcctgtcataatagagtggtctatcatcttacctgtgatgacgaatgagtctcctaaaaacattaattcatgcatccacgggacctgccagccccatgcacacccttcctagggcagcagggaggccgggagctgcgtctcctgcttccctcctccccagccctccatggagacactcatgaccaccgcctgcagccttgtgcggccagacccggttgggagcagctctggttggctggaagctcctggggtctgaagtgatgaggcctggccctgcaccccgggctcttcctgtgcacagcagggttgactgggaggaccagagggtccaaaccctactgccactgcccaccgcctgccacgcgaccgtgggccaagccactcagtgcctctggcctctggcctctttccccagctgcgtgtgtccagctagcaagtttgtgagtagtgttaccctgtttctgttcccaccacactcatcctgttctgaaggcagaggggatggtgagtcttcttaggacagggaagtcagccctctcatgcgcagaacccctgtggcacctggccggccttcacaccaggtcttcacacccctcatgagaccagccaggaaatgggggcccccaggggaggctgtatagcccagtgccagggagagcccagcacccgctggggaaggccatgcagcccagtgcccgggagagacaggaaccccctacaggaaggcagtgcagcccagtgcccaggagagatgggaaccccccagggaaggccgtgcagcccagtgcccaggagagatgggaaccccccagggaaggccgtgcagcccagtgcctgggagagacaggcaccccccagggaaggccgtgcagtccagtgcccgggagagacaggcaccccccagggaaggccgtgcagtccagtgcccgggagagacgggcacccccttgggaaggccgtgcagcccagtaacccccaggaaggccatgcagcccagtgccctggagagctggtgccctgtgactggggtggggaaggggctacgcggggcttgcctgagtcctcctccctccacccgcacccagagaccttcatgggagacacctcctctccaggaccccaggggcaggggtgatactgcagaggtggctctgggcttcctccccctcccctgccaggttctgcttcactcttgcagcctgggcaggggcgtggggtgtggaaggagaagcgagtggccccttatcttcaatccttgctggaagctgcagtccctgagcctaaccgggccacaagaatgcagaaccagctgaaaagaggccagggccactgccctctccccgcccttggcgccagcatggcggccacgatctttctggtgccgcggtctctgactctgtgggaagaagcatccccggacttgcctctctcctcagagccccagttccatggagggaaggtggcttccatgcctgtctctgggagttttccttaagcagctcctggaagggtgcagtggcgtctcctgctgcggtgacagttcccctgggatgtggaaggtcccaggctttggagaactctcccggagcagaggcctccgtccccccaggggacgggctgggctccgatttgggggcccacatgcatgagtgagcaaacaccccagagggttgggagagcgtccgttcgtgctggcggcagctgtgtgctgatgctccaacatgctccgcctgggcatccagcacgccttaagtgagctggagaggggtgtggacgaggatgagggctctcctggggtgagggtccctcttcagtgccacatccatgcagacccgtgtagacccaggctttttctccatagccaggtgggctttatttttccttaaacatcttaggtggttctcaagtaatcggaggctcgtctgcttttcatgctagcggtgcaatgccccattttatcgtgtgtctaaaaggcgtccctggtcccgcatttttcctagtttcctcagttacctcctgtgaccatttgctgtaatgaaagctggaaggagagctccgtgctgtacccacccacttctgtgaaaagtgggaacaagaacacagatttggaaccagtgctgtgcttttgtgttttggtaaattgtctttaccttccctgagctgttttcttccattcctgcgggattggattcaattctatttgatggtgatggctgtggacagtactaagtgccctccgagcttctacagtggagcagcctgctcagtgtccaggccccggagcccgcgttggggctgcggtcccagtgcccctgccactgtgtggctgtcggcatggtccagctggcctgtggcttcggtgcttggagggctgtggcaagggctgtctgtgcctggcgcgtggtaaacattctatcagtgtgttgtttattattatttgtatggttattggggttctcctttaatttatcaattatgttgacagaatttgtgatataacgatgcccatccattcctaaaatgaatcccattaagatattgtctgattagtcttcatatatactgctgattgcatttgttcatatttgatttggaacatgagttggaatttctgtctaggtagaagctggaattgctgggtcacagcatgcgcccaccatcaaccttcctgggtggcaccgagtggctttcctcggtgatacgggcgagcggggcgggtcatctggtgtcatgtgctctcccacgcttcctggagcaatttttgttgggctgtgtctttacctctgggggctgtggggtgtgtgctgcgactttctcctgcctctacctcctggctgatgcgctcactccactgccctttggatcacggattggccatgagggtgtccctctgggatgtgccttttcaagacctctgcccactcctctgtgagcaacccagaaatattctctgcataggaaccccttgtcattaaacaactgcatgtaccttgtctcacttgtggcctgtatttctgtcccctcacagtgtcagttgacccaaacaaaatcttaattctaacgtggtttatcatttcagcctttttcttaacagtcagagctttctggtgtctgaaaactctgcccttctcccccgcctcccagctctgtgtaaatctcccctgcctcccagctctgtgtaaatggtgtcctgtgctgtctttcagacgctgtgtcgtttatgcttccccttgagacgcacagcacccaagtccccgtgagggtggattgatgagggggttcaggtttcattttattcacctgcccgtgcaggggaccacgcgctgggtactgaaaggccttccgctctgcccatgtctgtgcgcacctgtttttcatgaccttctgttgaattattccatggtctacatgtctggtttttgttgttgttgtcgttgggttttcttgtttgtttgttttttgagacagggtctcgctctgtcacctaggctgcaaagcagtggtgcaacctcagctcactataccctccacctcccaggcagctgggactacaagcgtgcgccatcgtgcctggctaatcttcaaatattttgtagaaacaaggtctcccgatattgcccagcctgggctcaagtgatccacccgcctcagcctgcctaagtgctgggatcacaggcgtgagccaccacgcccggcccaggctgggctcaagtgatccacccgcctcagcctccctaagtgctgggatcacaggcgtgagccaccgcgcccggcccgcttgtctattcttatgccactgtcaaatgagctacattgctgcagcttcatgtctagatctctagtaaaataaatcggctcactttgacctttttcctcaggatattcttgaactgattaatttttcctgtacattttaaaatcagcttgtctatggaattaatctgtagatcaaaattgggagaattaacattttaaattatggagagttcgagtcaatgaaaaatatgttttctaattctcggatcttctttaattgctctttatgatgctttataatttctacatagaggtttcacacatcttttgttgggtctatcccaactctttgccttctttctgatggccttatacatggtatcttcttcttcttttctttttttttttttttttgagacagagtcttgctctgtcgtcccgggctggagtgcagtggcgcgatctcggcttactgcaacctcgggctcccaggttcaaacgattctcctgcttcagcctcccggagtagctgggattacaggcacttgccaccacgcccggctacttttttgtatttttagtagagagggttttgccatgttggccaggctggtctccaatgctgtcttcttttaagatttgattttccgttgctggctggtgtggggatgtggagcgccctcaccctgtgaaggcatcccttcccgtcactgtgtcggtccctgtggttttcgctgcccgtgtcccctgtgctgctgctccttgctgctggcctctggctgtgtcaccagctctggagtggccctagactcacgagagagcatgcaggtcccaaaccgagagtggctggaggcaggagtgctgcaggagtgcctgggccagccccctgtccaagtagggagctctgcccagctcccaaaagagcctcctcacaaagccagtcactgagcccgagcagcgcggtcgcccctgacgcggcaccttccttccaggctcctacctggctcagggcgtccagcggcagccagacaggctgggggcccctccatgttgcgcgctccggctgactcaccggggctgggggcccttccacgcggcgcgctccagctgactcaccgggcctgggggcccctccgtgctgcgcgctccggctgactcactggggctgggggcccctccgtgctgcgtgctgcggctgactctctgctgcacatgtgctggcagctgttccaggttgccacatcctgggattatcttttccagtaaactgtggggtcagcaggcccagtactcgccttgctgctgcttttcaccccctgcaccatggggatgcattgggtcaagtcacacaacgtcagaaaactcaaattcgattaaaaactcaggtctgctactgggctcctgggaaagtgcagagtcagttggggccactctggcaggctgcagtgcctctgcttccccctggctcagcctgcccacaccagcttcccccaggggtcttgggacatctaccagcaatggccagggtgacgtccctccctgtccagggcgagagcaggacagatactgtctctgatgccctcccagtgagctgggaagtaccgctcattcgcagcctctcctcctcatgcccactgaccctgaggctacagggaggttgacctttgcttccttccaagagggttaaacttctactgttcacttctggatctttcacctatataggacacacatttgagggcgaggtgggatccgatgttgattttcggctgtctggatcccccactgctccagcccacagccaatttctccaccagactgtgagccacttgcagacaatggctgtgcccatggccccgcatccccggtgccgtgtgggaactgaggaaaggtgtggggtgaggaatgttcccgctggaccctttttcatgggccagtaggatgtccctgctgcgttcagcttcccactaagactagagggcccgtggagcctgagatgttgtgtgcagcaccagggcaccgatggagcggtcaggggccagaacctgcccttaggcaggcgagtccacgtgcatccatcacagccaggacagtgtcagagcccagacttgactcagctctcagggtggcctaccctgtctctcatcagagatattacgaatcccgaaatgagcatttgaaagaattggaacatttgtaggaggcacactcttacgtggttcccaaaggtgggactaaggaacactggcaccatgagggagcctggctatggtcaggaaaattcagcatcttccagacatgagaccagtgtggctgggccgctggagcaggggaaggtgagcggtcactgttccccactggcacctttgtctgccttgacgctgagtagcaggggagcaggctgttcagaatgctcgccgaggccaggctgtgtaagccctggatggcctccgaatgccgcctgtgacaggcaggagcatgaaattccagaagcctcccctgccctgggtagcctcagggacatgaagtgcatgtgaggctctcaaggagaatgtggcagctaatctgccctgtcatttccgccgtcctggcctcgtgcagcctgatgcaggcactgagctgttaaacaggataaatcaagtaggggctgctgccacccaccccgcactgtgttccctcccacagtcacatcccccagacagctgaggccgtgagtgcagccctggacagagcacagctaacgggggtatggccagagccgctggctgcgacagcgctcgctgcggctgcgaggaccccagatggcgctttgctggcaaggcttctcccgccttctcggggcaagcagtggcacacaggagagagctcaaggcgcctgctgccagccgcactcacagctgtgtgaccgcccttctacactccaaggcatctctatgttaatatccaaacctattcatccatcccccagcaaacaagccttacaacttgggcctcacatgacactttcaaacgtgggtctcttcctttcgggtctgacgggatgtcattcactgttatttttggcatgaaaatagatgatggattacctctctggtggtcgggaacctaggcctggagccagctggtcacagttcagggtcatcgcactgtgtcacctcgtgtaaaacggaggaagagctcgccctactgtgttaggacagcctggatttatatatggaaaaacatggggctgtggccctgtgtggccgctgtttcattacacatcacttcttactagggcagtattcattttactagcattctgttgatttgaatatttttttaaaaaaagagtaactggcaaatttatcagaatttatagtggtaccagttttaaacagattttgccaatttaatcaatataaagatgaaatggccaggtgcaatggctcacgcctgtaatcccaacactttgggaggccgaagcagccaaatcacctgaggtcaggagtttgagacccgcctggccaacgtgatgaaaccccatctctactaaaaatacaaaaaattagccgggtgtgatggtggcacgcctgtagtcccagccactcaggaggctgaggcggaggaattgcttgaacctgggaggtggaggttgcagtgagctgctgtactccaacctgggcaacaggagtgaaactccgtcttaaaaaaaaaaaattaaatgaggctttgattctggtcaaatggagtgggggtacacccccctgcccctcccactgagcacagctgggacttctgcacagagtgctggagcagctcccttgggaccgggaggcggcagtgggagcaggctggaaaggagtccagcccagcagggagcttcctgtgtcctcactgcccttgccacatggcctggactccaggcagccacatacccagaagtgcagccacagagaagctccgcatttctgtctgaggatggagagggagctcctgctggttggcatttgctccaccttccagtctctcccatcctcacccccaggcgatcctgtggcagcagtggctttgagggcacagcagcctgacaggctggcaacgcacaggggcagaacttttctctcccaccagaggacctgtggtctcagagaatgaaggggccctcccagggccatttcccatccctgccctccggggtgggggggtcctcccggggctgtttcgtgtctctgcccttctgcctcttggccttagacaggatgcaagtgcagtaagtttctggcactgtggcaaaagccaggccctggtcagaaagccctggagatcacagagaggggcgagtttgaaaaggggatttcatgaagttgtgtgtgcattcctgggcactgcctgccctctctacgtctgggtctgaccacagacagtacagcaaaggctttgacaaggggactgcagggttgatggcccccaggtcccagccgggcactgggtggcacacacgtggcacagagctaaacagcggtgcagaagctctcagaacagaacagacattggagccacagcccacagaggctttggaactaactagaaccactgcccgataaaataaaaatgtcgtggttctgcataagatttaagtgataactggagtgttacgacaatattcaaacagaccagaggacaactcgacgtccgtactcagcataggaagaaataggaaccctcagcctctccagctgggaaatgagcaacacacaccaacctgggatccttcctggtggaggatccacaagatcttcagagcagctgcgccaccgtgctccaggaggaagggtgagccctctcaaaatgaatggaaaaataggaactctacgcagggaaagcgaaggttttgtttgtttgtttgtttgagtgagacagggtctcactctgtcacccaggctggagtgcagtggtgcaatctcagctcactgcagcctccatctcccaggctcaagcgatcctcccatctcagcctcccagcagctgcaaccacaggtgcagccaccacacctggctaatttttaaaatttttcgtagagatgaggtctctctgtgttgcccgggctggtcctaaactcctacactcaagcgatctgcctacctcagcctcccaaagtaccgggtttacaagcgttagccactgcgcctggccaaggaaatagatttaaagaataaaatggaaattttagaactaaaaaatctaataaccagaatgaaaaattcatgatgtagactcaataacaatggaagtgacagggcacagcgtcagcaaacacgaggacagctcagtacaaatgatccatgccgagtgatagaaaaaggactgggagaaatgaatggagcttccgagacctgcagacaatgcagacaccacagtacacgtggtttttatgtgcacatgggatgttccccaaggcaggtcatattccatgtaaaaaactaaagcctaacaaatttaaaataatttaaatcatataaaatgtattttctggccacagtagaattaaactataaatcaataaccagagataactggaaattttccaaatacttgaaaatcaaaacacacacctctaaataatgccctagtcaaagaggaagtataaaaaaattagaaaatactttgaagtaagagaaaatgaaaaaaaacctataggatactagtaaatcagtgcctctagagaaatttatagcatgacagcatccattagaaaagaagaaaggtcttcaaacaataatgtaagcttccacttgaagaaactttaaaaaaagaaaacaaaacaagcagaagggagtaaataatcaagacccaaacccaatgaaattaaaaacagaactaagcctcttcacattggagtagttcaaataaaggaaggacagaaacaatcatgggtttcaagagcttgcaaaacggtggcagttctctgctgtctgcgtttgttgtgtggcgtgagagtccatcctggtttcgtggcatttttctctgcatcctttttattgacaagacgttcctgtcgtgagtggttttcctctggcctcttctgggagctggtggatttgcaagtcacggccagccttcgaaagcaggactgttgcctggttccccagttgccctcctggaaagctctaccctgctggccctgggcctcggaggggaggggagcgcctggggcgccgcggtcctgaccccacacaacttcttctgccatggcccaaacccagccctgtgccgcctctgtgggccacagggacccccacagcagacccccagcaaaccctcagtgactgtctgaatgaaaaacgcaggagtgggtggtgtgggagaaaataggattacggtgcttctgagtattgagtttagaaatcgctgaatttcagaacgttccacgaggccgtggaaattgagctgggctcagtgctcatggtgtgaatctgtctaatccttaaatacatactgcgcccccttgtgggccaagagtggtgctgggaactggggattcagtggtgaacggaggagacacgtgtgccctctgccctctcggtgccagggtggccccaggtgactgcagcagggccaggagagacggggttgtaggtacagcctggtaggcaataccctccagaagaaggtcctgataagtgggtgggagaactcaccctgtccctgccacggaagccagggagccagcgggagggcagggagcagtgacaaacaagaccaagggggtaggtgctgggctctggacgggaggctcagggccggggttaaacagcacagcagtgggaaggtacccaggggcttcagcacggggtgagtccaagcttagaagctcactggcagcgtcaggcagctcatgcccagccaagtgctcctgagtggacatgcctgggccagctgcgggccacagctgtggctgctttcctggctggccttcatcaagctgagcgagttcccctctattcctgtttttttctgagcattttaatttttatcgtgagttggtatggagttttgtgacaggcttttctgcatgcattgatatgattgtgtgctttctttagtctgttaataaggtagattacacagacagattttccaactctgagccagccttgcatcacaggaagaatggttatagcatgtaattcttgtggtatattgctgaattctatgtgttcatgttttttgtgtgtgaaattattaaatcaagctaattaacatatccatcacctcacatacctttgtttgtggtgaggttcgagtgatcctcccacctgtctcccaggagttgagaccacaggtgcactccaccacacccaactaattttttcaacattttgtagagatggggtctattttgcccaggctggtcttgaactcctagactccagtgacctgcctacctcaggcaacagcctaggcaacatagagagaccccatctctataaagaatttaaaatcactctcagcaattttcaagtatacattgttcttacccatagtcactgtgccacacagcagctccccagcctgtttgactcccgtctaactgaacttgtgccagtgaccaacagctcccatttcccccaaccccccgcagtccccgacagccacctcccaccctctgcttctgtgagatgcacttttttagattccacatgtgagatcatgcagtatttgtctttctgtgcccagttcattttacttgttataatgtcctccaggttcatccgcagtgacacagatgacatggcttctttctgtgtgtatgtctgtgtgtgacattttctttatccgttcgtctctctatgaacacttaggctgattccaccatatctaggctgttgtgagttgtgccacaatcaacacgggcctgcatgtgtctcctcactatagtgactttgggtatatgccctgaagtgagactgctggatcctgtggtggttctatttctagttttttgaggaacttccgtaccgttctccataatgactgtactaagtttcccatcagcactgtacaagggttcccttttgtccacctcctcaccaacacttagcttttgtctttttgataatagccattctaacaggtatgagccgatatcccattgtggtttgaatttgcatttttctggtgattagtgatgttgtgcactttttcatatacctgttagccatttgtatgtctccttctgagaagcttccattccgtttctttgccatttttttaaaatctggtatttgttttcttgctattgagttgtttgagttccttacacattttgagtattaactccttatcagatgttgtatggtttgcagttttttttccagttccctaggttgtctcttcactctgttgtttgctgtgcagaagcttttcagtttgatataatcccatttctctactttctgcttttgttgcctgtactttgagggccatatttaaaaaaaaatcattaactaaaccagtgtcgtggaatttttccctgtgttttttcttagtggttttgcagttgcagatcttacatttaagtctttaacccattttgagttgatttttatagatggtgtgagatgagggtctaatttcattcttctgcacagggacatccagtttccccaacaccgtttattgaagaaactgtccttccccgtgtgtgttcctggtgtctttattgtagatggattggctgcagctgcggggtttcctgccaggctctccgctctcctccaccggcctgcatgtcgttcttacaccagcgccaagttctggtctttagtatttcattcctctgcttacttggatttattttgttcttcttttattagattcttaaaatgagtgcttagattattgattggaagcttttctctcttcaaatgtgtgtgtttcgtgccacaggtttccctctcagcactgctgtagttgtgtcctgcgatttttgatatgctgtgtttttattttcattcaggtcaatgtgttttttgatgttccttgagattccctctttgacccttggattgttcatatatgtgtttcatttccaagtgcttggaacttttcttgttatctttccatgattgattctggtttgagtcagctgtggtcagagaacatacactacggtttcaattctgttaaatttgctgaggtttcttttatggccaagggtatggtctatcctggtatagattctgtacatgcaggaagagagtgtggattctgctgatgctggacagagtgttccggaagtgttcgttaggccccgttggttgatggtgttgagtccttccaaatcctttgctaattctctgcccagtggttctttcagttgttgacagtaataaagtcttcagctgtcgttgtggatttttatatttttcttttcactactattagtttctgcttcacatattttacagctctgttatttgattcatacacatttaggattgctattgcttatttagactcttttatcattatgtaatgtccttctctgtctctgatcattttcattgctctgacgtctattttttccgatattaatatagccattcctgctttcttttgattaatggttgcacgatacgccttttcccattagtttatcttcagtttgcttatattgttctatttgaagtgagttttctgtagacagcatatgatggggtcatatttttaaatccactctgcccatctgtgcttcaattggtgtatttggaccatttatacttaaagttattacggtattgagatgttagggcttaaatctgccatttcaccttttatttatcttttgtatttatttattttgagatagggccctactctgtcatccaggctggagtgcagtagtgtgatcatggctcactgcagcctcttctgggctgaagtgatccccccaccccagcctctcaagcagctgggaccacaggcatgcaccaccatgcccagccaatttatttttatattttgtagagactaggtattcctgtgttgcccaggctggccttgaactcctgggctcaagtgatcctcccaccttgaccgcccaaagtgctgggattacaggcgtgagccatcgcacccagcctcatttttaattttgttggctttgttttttgtttctctggttttagttttttctttcttcctgtgagtcagtgtacatttttttggaattttattttatcagtagcattttagagtatatatctgtatggctttcttttttagtgcttgctgtaggtagtatatcatatatatacacacatactgaatactaagtatatagcatatatatacacacacaaatatatatatgtagcacatgtatatacacatgtatacatacacatatataacatacacatatgcaacatgcatgcacatctaaatatacatatatgtcacgtgtgtgtgcatgtataatgtttgagacaggatcttgctctgttgcccaggctggagtgcagtgacacgatcatggctcactgcagcctcgactaaccaggctccagccgtcctcccacctcagcctccccagtagctgggaccacagacaggcaccaccacacccagctaattttttaaatttttttgtagagacagggttttgccatgttgcccaggcatatatgtgttaccaattctactgctgtcaacatttcaccagttggagggaagaaactgtaacttcctttataatttttttactgtccctcatttatgatgtagttgctttaaatatttcctaagcattctgtacatatcagacaatgctgtaatttttgcatcagtcatcaatcatagtttagaggactcgagagtgaagcctttctatgcactcacatgtttgcctactatgttctttcttccttcctgatattccaagatttcatcattatttcatttctgtttagaggacttaggccttctcccagcgtaggcacgctggcagcaacttctcttcattttccttcatcccataatgtctttattcctgattattttcactggatatatcattccagttggcacttctgtccttttcagcactgagcagttcggggccacgtcctcctggcctccgtgcttctcgcctgaaatccacgccatccattgtctccctcctgtagcatggggtcatgtccctcttgctgcttgcaagaattattctttgcctttggtttttagactcttgactacaatgtgtgtttgtgtggatttccttggatttatcctgtttggggtttactcagcttctcaaatatgtaggtttttactttttgccaaatttgggaagttttagccattattttttcaagagcctttatccccatcccctttgttctctttttctggtaccctaaggacatgaatgttaggtcctccccatgtcccacaggtctcaggggccccatctgtgtgtcttcggtctgtgttctccctcttgttgggacggggtactttctgttgttttttctcacagctccctgcttctctcccctgactctttcactctgttatggttctttctagttctgtcgttccctttcagttgcctgcatctcccattagcttggtgggaactggcttctctgtggaggtattctattctgttttctcatttgtttaaagagtgttcctgcttgtttgctgaagcatttttatgaaggctgctttcacttctttgtcagaggattccgacagctctgtcatcctggggctgacactgtctttcattcagtttgagatcttttgggttctttgtataacaggtgattttctttttgaaatctggaccttctggatattacgttatgagactctggttatataaaccttctgtttagctggctgcctctgatacttctccagcaggggaaacaagaagtgaaagtccaggctttccactcggcctctgctggtaccaagggcagaggacgtggtgaggtgtggaggaggcctcattgccgctggtaccaaggacagaggacatggtgaggtgtggaggaggcctcgttgccgcgggtgccaagggcagaggacgtggtgaggtgtggaggcctcattgctgcgggtgccaagggcagaggatgtggtgaggtgtggaggaggcctcattgccgcgggtgccaagggcagaggatgtggtgaggtgtggaggaggcctcattgccgctggtgccaaggacagaggacgtggtgaggtgtggaggcctcattgccgcgggtgccaagggcagaggatgtggtgaggtgtggaggcctcattgctgcgggtgccaagggcagaggatgtggtgaggtgtggaggaggcctcattgccgcgggtgccaagggcagaggacgtggtaaggtgtggaggaggcctcattgcctctggtaccaagggcagaggatgtggtgaggtgtggaggaggcctcattgccgctggtaccaagggcagaggacgtggtgaggtgtggaggaggcctcattgccccgggtaccaagggcagaggatgtggtgaggtgtggaggaggcctcattgccgctgggcaagggtgggagctctggggccctggaggcctgtgcagaaacctccctgctcagaggagggggctccctcattactgaccccgcattgcctccactgacaccagggggcaaggactcaccacctgtggagatgagagcctctgtccctgctcagcctgctctgaagccacccccgcatggggttcgggagcctcttgacagcctggtgagggcggaggtctaggctctgtacgcggcctttgctgcgtgggtggggaggggcaccgtgtcctccgtggtgcctggtggaataaaggagctgctgctcaacatttccagcctcactgtgctgtcccttcactgacccttcggctgcagaaagcagacttttgttgaggcccttttcttgtctgtgcctgttggcatttccggcttgccagcttttccacttccaagtctgagagacatagagaaagcccaggggttcaccaccacgctgttccctgtgtgccctggtccctggctagtctgcctttcctacgcatttcagtcttcttgtgtttgttgtggatacaatatccaggctgttttgttgtttttagcaggaaggattgggaagcactgtgtgctccatttcccagaagcagcagccttgccactccttttgtgcatgtggcatctgagagcacagatgccggagctgctggggctgcgccagctttgccctgctcagctgcgtcaccagagcaggccctccagcctctccagcatcagtccttccatctgtaagacagggtgatggtggctccacacctcattcagttggagggacaagtaaaggcatcagcagacaccagctgctgaggacaggcccagccagaagcagacaggagctctgtggcatgggggacactgtcaccagtggcctcgttccccagctgtgcacacgttggtgttggtttccactgggcacccaggcaaacagcgtcgccattccgggcacctactttttgaatgtctgtgccttttgtgggagaagagatttctgcaaacgtaatttctagtttaaagttggcaagcattttaggctattggtgcatcctgccaggtcgccctttatagaggctgcaactactacgcactccctaagcttcccggagagccctggcttcgtgacgacctcactgttgtcacagctgctcttatcaatagatgtctagtaccagcccacggcgaagagagacgagccagactctggaaggttgggccgcctttccctgacctgcccttgcagctgtgcttgcagctctgtcctccggggatggccctgcatcgctgctgacccatgggcatttccggagggggctaacggttctcagggtctctcctcaggagcactggggtcctcacactctgctgggtacctgtcctggccgtgtacgaatcccagggaggccgcacagggcaggggggtctgccctagctgagccctgctctgagccgggccctcctcctgctcctgcagctcttgagtgtcacctgtttctgttactgtaataatgacatctcctttcttgggaaggcaccttgcttacctgtttttcttcaaggatagcacagagcctaaagcttagtgactgcctaggaaatatttgttaaaataatcaagttattaattaataactggcgttacctccagagtggatttcagtctgctccttgcatttatgggtgcccgcgggtgggaaccggggctagagcagctcaccctgctcctgtagtcccacctcccacgccacagcagggtgaactggcccctcactcacctgggtctcccagccggggccacccacacgccaccgcacacagcaccttccccacggcagatgcctgctccggggcagggccctgctccacagcgacacagcacgtgataccacaggcagctttcctcccgccagcctcctgtgtgcagcttcagtgcttttagacccgcaattggagctgaattcttaaatccctggtgggttttgagtgaagctgaaatgaataaacatgttccacacgtggacagtatctatacatggaatgattataaagtttgcacatcaaatcacacgtggacagtatctacatggaatgattgtaaggtttccaccttaaacacacgtggacagtatctatacatggaacgattataaagtttgcacattaaatcacacatggacagtatctacatggaatgattgtaaggtttgcacattaaacacacgtggacagtatctatacatggaattattagaaagtttgcacattaaatagcccttgtatgttagcttcctaaatacacctttatgggctcaataccactttgccataagcaagtaagtaaagaaaggaatctttcgttctggcccgtgcactgttgcatgactggagctgtgttgatgccctcatcctgggtctgtttcgtctgtggagacaaagagcgatgtgtgtgggagtgggggttcaggcaggagcgctcacaggggcttcagagacggtggagtggagagaggagctgttaaatgtaagtgccccgagctgccgtcagcagctgcatgcgggccagcagcctctgatttgccttcctccgactgcaaaagtcgttaaatcacatcaagcctggggcctgcttagaagctgtcaggaccgtcttctctactgttcccctgatgcctccattgtgaagacccagcccagctctgaatgcagggacagcacctgtgcttcctggcagatgcagctcagagcaggaaacctggtctccaccttgggcagacagcaacggtgcaggcagtgtggttgcctggcaccccttcctcccctcctcatggccagggccacggccagcctcctcctcccttcttctgcagcccgcccttgggaaaggatgctgtggagttagaggcggggagcttcaggcctggctgcgtctttccctagcttggggacctttgaacaattcctgagtctccctgccatggctcttgtggcagtacattgcggtggctacagatgtttgttgccgtgagtgctgctcagccctcacgtgcttgtccatctgcctgtggcactggcatccagggaacagctttcaagtacatggagatttcacctgcagcttctgatccccccagattctctccagtgtgactttaaggaaaagatacttatgaaaaccaaagggagcttttagaagtcagcgtagctccgagacggaggcctgtttctgctctgtcttggagctgacagtggctccagccaatgaccccattcctccagtagccctcagtaaggagtgctgtgtccctgacctcagtacttggcccatgccaggggctgggactgcgtctgtcactgccagggtgggagacgtggcctcgcagctgtctaaggggcagtttccagcagctactctgctgcgggagagaatggagcagacaggtcatgaggccagcatgagagcatggggaggggttctgcctggccacaccctgcaactagacaacactgcacgcccgctgggcagcacagaaaaggctgaacagaccagctgttggcggggccgtggaggagctgcagctctgtgcgcagctgagggaaatgtggataacagaacctggaactcggtgcacttagggggatgtggataatacaacctgaaaccctgcgctgctgaggggaatgtagataatagaacctggaactctgtgcactgctcaggggaatgtggataatagaacctggaactctgcacagctgaggggaatgtagataatagaacctggaactctgcactgctgaggggaatgtagataacagaacctggaactccgcattgctgaggggaatgtagataatagaacctggaactctgtgcactgctgaggggaatatagataatagaacctggaactctgtgcactgctgaggggaatgtagataatagaacctagaactctgcattgctgaggggaatatagataatagaacctggaactctgtgcactgctgaggggaaggtagataatagaacctggaactctgtgcattactgatgggaatgtagataatagaacctggaactctgtgtgctgctgagaggaatgtagataatagaacctggaactctgcactgctgcggggaatgtagataatagaacttggaactctgtgcactgctgaggggaatgtagataatagaacctggaactctgtgcactcctgaggggaatgtagataatagaacctggaactctgcactgctgaggggaatggagataatagaacctggaactctgtgcattgctgaggggaatgtagataatagaaccaggaactctgcattgctgaggggaatgtagataatagaacctggaactttgtttactgctgaagggaatgtagataatagaacctggaactctgtgcactgctgaggggaatgtagatagtggaaccgccgtgccgcagtcttgaacagtttcttaggaagttccacgtgctgcttccgcaggatccaaccgttgtgctcctaggtggtacctgcaggaaatggaagtgcttccatgagaagaactgtgcacaaatgtctaaagcagctttactcgtgtatcccgccttgcatacagctcgaatgttcttcactggttgagtggaagagccagtggtggttttttcccacggtggaattctaaacagaaaagaactgtttatatgctcagcagcgtggatacatcttctataaatactaagagaagccagacacaaaagaatacttacgacatgattccctttgtgtcgacttctgaaagtccaggagtctatagtgaccgcaagtgggcacctgtcggcgggcagtggcgggtggagtgggagcacggaccacaggggaccaaggactgcaggttcctgtgagccactgtgggacaccccaggggtatacacgggcaagattgtcacactgtagacttgaagtatgtgcagcctattaaccatcaatgatacctttaaaaggccatgacaccacattacacacgcaaggttaaacggtgagtcggtctgtgccactgcacggggccatcagagctctctctgagcgcctcctcccctggcccggccccttctcctgcacagccccggggcctctgcgcccctttgacctcagcctcctgggctgtctcaattgccctgtgcctgtcacccagtgggagcagcccctgagtcaggacgtccacacagcctgccttccacagagcaccaccggcctaaaatcaccacagggtcagaatctaatgtaaggggggtttattcaaaggcagctggaggctggcccacccagaaacaccagctccagagaaatggagtccaccctcgggagtagggaggggaagggtgccctcgggcaggcagaggcggaggcttttagcaggaccgcggcgtccttcctacgaggtgggcgctgtcacagcgtttgatggacgacgggcagtgcctgcttcagggaagggtgcatttaacctgtcagagggtgcggcagtcaccgtttcctgtcttctggtccttgcttatcaggacaaaggggaagttcctctacaagggtcatgaactaagaaggcaggaggtttctgcccctggcattggttaattccctccagtcatcgtgcagaacaaggaaacagagtgcattagtccctggcctgagaaaggggagctgcaagtgcacgtgaggggcgcagtcccgtctctgacggggcgtgggggggggggcggtcccgtctctcacggggcgtggagggcgcagtcccgtctctcgcggggcttcatgtaccagaccgtgttcatgttcacacctgggaggaggggaagcaggcatggtctgtgcggcaggtccagccaacccacagggccttggatgagtctctgcagctgaggctggcactgccagggctgaccccaaggctgtggctaaattgggctcccagcactggccctgtgtcctccgtgaggagatctgcaccccaggtctatgcatggactgtccccacccccaggccccaagctcagctcccttcaacctgtgtgtcctcagggcaccttcactccatccacctgggtctccccatcttagtgaccgtctccactgtgggtgccaggaccctctctacttccatggctgtgcgtcagggccactgtgtgagctggaaatcagcgcagggaactctggagaggggagggagtcctggggaggggagggagtgctggagaggggagggagtcctggagaggggagccgataataacagggaagccccatgaggagggaccatgatggagcgaggactgagtgcaggaaggagggtgttctaggcccgggcagagaggggagtctctagggaggagaagtgccgggggcttttaccctcagggcctatggcagttgtggggtgatggatgaggccttagactaaactctgagagaatgggatgtggagagttgtcttgagcagggagggagtggggaggagggagggggctctgtgttgctggttggaggcatccctggcacctgtcacagcaggggctggagggtggggcaggagctgggggcagtgggggtggaagaggatgcagaaaagctcagattgtgcctcacatggtgggtggggctgctgggcttgttaatgcatgggatggggtgggtcaggagtcgtgctggtcacatatgtcagatgtgggtgtctgaaatccccgtggccacagctgtaggctgcatcccctgggagctggggtgcagagtgtgttctggcctgaggcacatctgcagatggtggtccacagaccccctgggcaagtgcagacagtggggaggcaggtgagggccccgggtgcagacggggggtggggatgaggtgggtggggacccaggccctcacggatgactgtgcctgtcccttctccctgtcccattgcatgggctaaaatgtgctaaatctccagcactggacgggacagagggagggacctggatggaccagagctctgcctgtttctggaacacagtgtggggaggggcgggcaagcctcagaacgggctccattctgagaaacggccagtcccatggggccttggatgccagtggtccgagcatgggctgctgcaggctctacttcagcccttcatttcctggtagccactgagctgccccatggacactgggcagatggccagtgttagctgggaaggacagcagcagccgcagaggtggcagcaaggccagggcactttgcagacggcatggacgggtaggtgcctagggagagccagagagtggttgatgcctcgtccaccctggccttccgagtggtctgcagctctgggagctgctgactggagcagggtaggtcctctggggctctgggcactgagtcccaggtgacccgcacggcacaggatggcctctcactcatgctgcccttgcaatgaagagaggcacaggctgcagctcgctggcctgtgtgactgatagaggctgacagcctggagccccaagcacccctggcaggagctgacccactttcccttccctgggctggaaaccttgacataacagatggctgcagggccctgctgtccctctgatggggaggagagtttttaattaaaagggaggcacagagctccagaccagccacaccgagatgcagtccatgtgtgcgggtccgtcggcacccacaggtgaaagggtacagccaggcttatctcagggtgcccatgtgcacacagaggtgcttctcaggggccacgccatgcatttgaactgatactctgctctcctttctgagatctgtctacacgaatgcactacttagaatgagtcactgaagcaatggtgtgagctgtgctgtccagcagagctgtccgcgctgccagaaatggcctctctctgtgcttttcccccagtagctgccgccgcccacacgaggctgtttggcactttaaatgtgcttgtggatgtttagttttaaactgaaaaaggcacatgtggctgtcctgctgcacagtgcagcgagagcattcttatgcaagggtgatcttcggagccctttgtgctacgtgaagtcctccttaaatgcaacgtgaaaatccttgtccttcaaagtgtcattttattacaaataataatgtaataaaattacaaattaatacaaatactattacagataacaatttgtaataaaattacaataattttgtgatagtctgagtgtgttgatgaagtgacctatacatgtgtttttaagcacaggtgtagacagcgtaagcgcgggtgtagacagcgtgtcactttgtcagtgcagaggtgcatccctggctgtggctcccgtccaccccctgacacctgtggctgctctttgtagatcctccttacacaccacaaaggcagttggaacgggctttacgtctgtgttatctttgtgtttttcttttagcatattcttttaacagaactattttattgagaaaaaagccctctgccctgacttttaacccatagccgcctcttctgtgtgaaccggttgaatcaaagggcagtgtccaggcagctcgattatggtggggggtgcagcttcacaggtttctgttcctggtgggttttacgagccagccccctcggtgaggtgttgcccttcagggaaggactcgggatgaggctgactctgcagagcccagtacctcggagcagggtccccaccgtgccacacaaagtcaccctgactgttgcacgagtccctcacttccactaccatcattctttgctggtcagtcataaaatgaggccttaattttgcccagtgggctccgtcaactcactgaatgatggcacacagtagtgacacgatgactgcagacagcactgtgtgcttggaaggcacttgccgagaactgccaaggacaccagccgtttggcagcttggttgatggagactaagtcatatgagagcatgaggggatgaggatggcaggcttgggacgtgaagggccggctcccacaccctggtcaggggactctggcaccccgtgactgtgtgttgaggccacagcagaagcagggggcaaagccccagggcgctgggcctgtgagctgcaagtcccctgggcctcacaggggtagctcctgccagtctccggctgctgagagaggtgcttccgtgaccctgggcagatgcagacctcggccaggggctgcggtggcctgcccagcgtcaggagggaggcagccgtggggcctccctggagacctctcccaaggccctcccctgaactcccgtgcaccctgtgcccagcaggcgaggcctggtcagcacatggtgggtgggcaaccccattctcctgccacccgggaggccggagtgggagcggcccaggacacccctggatgtgcgtggtccgtgagactcttctctagcagcagctgtgccttctctctccaggtgacgccttctgggccccatctgtccttcctcacagcaccctcagcaccttaagccaccaccctcagccacaatttggcagaaggatggagtccaaggtctcagaaggtggcctgaatgtgaccctcaccatccgcctgctgatgcatggaaaggtaagaggagccgccattgtctctgtaggaaaggcggccgcggcagacagaaccagagatgcactgcccgggccattggcactgtaggaaaggcagacatggcacatagaaccggagatgcactgcccgggccattgtctctgtaggaaaggcagacatggcacatagaaccggagatgcactgcccgggccattgtctctgtaggaaaggcggccgcggcacatagaactggagacgcactgcccgggccattgtctctgtaggaaaggcagacatggcacatagaaccggagatgcactgcccgggccattggcactgtaggaaaggcggccgcggcacatagaaccagagatgcactgcccgggccattgtctctgtaggaaaggcagacatggcacatagaaccggagacgcactgcctgggccattgtctctgtaggaaaggcagacatggcacatagaaccagagatgcactgcccgggccattgtctctgtaggaaaggcggccgcggcacatagaaccggagatgcactgcctgggccattgtctctgtaggaaaggcggacatggcacatagaaccggagatgcactgcccgggccattgtctctgtaggaaaggcggacatggcacatagaaccggagatgcactgcccgggccattgtctctgtaggaaaggcggacatggcacgcagaacctgacactgcctgggtcattggatcattttttaatcttattttaagcaatctcaaacttacaaggcagttataggtacagcccctttgagacagtgccaacctgatatcttctgcgtgtttcctacaaacagggaccttctccagcacaaccacacacagccatcagtgtcagggcacccacacggatgcgttcccaccactggcctcccttcacagcggccgcaaagcatcccctggtcccctgtctcaagtcccttccacctggagtaggtcgtcggctttgactgtgcagtcggcactttctgcacagcgtgtgtggagcacccatgccttggtctaggtctcctggccgttggcaggaacgtggcagcagctctgtcccggggtgtgcctgtcagccgctcccaggaacctgtcctcagactttcagagcatgtgtttctatcctctgggagtcaggttgctatgttgttccccggcttttccttccatgaccacgtgatttgctccgatgccctcgctgcccctgctttggccagaaccccaaggcccgacgagtccctgttcctatagccccatcctgctctttgctcatcttgtcttccttgtcccagtcctggaaccagccactgccccagcagctcctgtgtgtggtggcatgttctggaagccaggatgcatggtgctcctgggctgctgtgggtcctgggctgctgtgggtcccgagctgctgtgggtcctgggctgcacccctgcagaacacttccttccatgttcagctccctatatggaaccccagttccagccccacagcacagggtcccccagttcttcctgcctcaggtgtgcaccacgaggaatccaactgccagtatctgtgcgtggcctcccgccgggaggaggctgccggaggctctgagctctagccccacagcactggcacatcctagatttccgggaagacacggcctcctccccaggggaaggtggtggtgcccacacccagagcattcattcctgcagtggagacagagggacctgcctctccaactgtgggtgtcaggagccaaggcgcatggtaaatggggctctctgtgaggccaggtgcacggccccatctccagcagcagcggccatgccacccagctgcactctgtgggggaggtgccatgattgacgggggcccctccctgtgtccagtgtcctcctccctccacgggcccctctgcacaccgtcctcacagtctccctctgcacaccgtcctcacagcctccctctgcacaccatcctcatggtctccctctgcacaccgtcctcacagcctccctctgcacaccgtcctcacagcctccctctgcacaccgtcctcacagcctccctctgcacaccatcctcatggtctccctctccttccacagacccctctgctcgccatcctgacggcctccctctccctccacggacccctctacacactgtcctcccagcctccctctacacgccatcctcacagcctccctctccctccacgggcccctctacacaccgtcctcacggcctccctctccctccacgggcccctctgcacaccgtcctcacagcctccctctccctccacgggcccctctgcacgccgtcctcacggcctccctctgcctccacgggcccctctgcacgccgtcctcacggcctccctctgcctccacgggcccctctgcatgccgtcctcacggcctccctctctctccacgggcccctctgcacgccgtcctcacggcctccctctctctccacgggcccctctgcacgccgtcctcacagccttcctctttttccacagacccctctgcacgccgtcctcacggcctccctctccctccacgggcccctctgcatgccgtcctcacagcctcaccgacgtcaccattgctggccccgcttcaggtgacaggccacagtagcacctgtcagctctgtcccgctgctggacagggagatactgggccactcagcccagcggggaacgtgtgtcccgaaactgccttgggctcgccatcagaactgtggcagcatcttccagcgttccttttaacaggctgccgttggaataggagtcacggagcaattgcagtgctaagttttctttaagtcacacaattgaaggaggctttatttttcacacatttcttccagagtttcctggtagcctgagtgcatgggtgatgccccctgagttatttatcaggggcagccagctgccctcccccggggcacttacagtcagcccatctctgtcctggtcaggtgggcgccaaggaagacccggctcagggcctctgtatgggcagcctggcttgtacacacacccctccccaccagcagattctgaattctcccttcttcatgcacaccgggaaggtcccttctgcactcataccgggaaggtaggcaggtttcggtagtgtctgcctccagtgttttcctcctcctgctctatgacatcatctttctgtgattttttttttcttgcaggaagttggaagcatcatcgggaaggtaattattgattgaatctctgcctctcctggggtctctgtaaggggatggtgaggatggcagcctccctgggtactaggtggcacccagtaggtgcgcctttcccagttggtgggtggtctgtgttccatgaagacaggaccccagaggtgtcgcctttatgctgtatgacattgaagctggtccctggctctgcgtggcctgaggggaaggggttcactccagctggtcacctcgctgccccctgcccgtggccttggtggccagtccttctttcccggttgaagaccccacgaagaatgatttctcacgccttcttcagccggctgtgtagtctgggtggtctccaggagtgccagtggaggcagcagcccccagacaattcctttccaaatcagggctggcccgggggaagtaaggcccagtttggaagcctgctgccccgggaggccgagcagtgagggccacctccctgtcttcatcacattttcaccgcttccgggggtccttcccctcagtcccaccatgggggcgcctctagtagctcattgtcccggcttcctcccaaacgcttgagagggcgcgtctctgagagtcaccacctccgggaggctgagccagagtgtagccggcaatgcggggcgcctgagggcacgcacactgccatgtgccatgagtgagctgccatggggagtcaggtcagacctgcgccacccttgccagctgtgtgcctgtaggtgggtgcacttgcattcctgggcctcagtttcccatctgaaatgtctgccagggtgtggtgggcatggagcctggccttcttagtggagaggctggtttgctcctccagcacaggcaggaggctctgctgtgtgggcgtatgggccaggctgctccccacccaccatgggccgcgccgtcctcagagccagagggataccttttccttattgtctaaatctttattccagaaaggagaaactgtgaagaagatgcgtgaggaggtgagtgtggtgggtccccacctgtccgcagccattcccgggtgggcggggtgggtccccaggctctgcccctgccgacgtcctgcctgtgctcttggccagccggggtgtgtggggagtgcagtgcggggcctcttttcccctactcaggcctcctgtgctcccctgtggggaaggaatctgttggattccttttgctagttaaaatttcattgtaaaggagattgttgagaagcattttactgttcattcatggtttccgtcagcggacagaggcatgtgtttgtgtcaattgtcaacggacttgcggcccccgacccactggcccaagggttttaatcaggtcgctggggtttctctgctctcaccttagagtggtgcaaggatcaacatctcagagggaaactgcccagagaggattgtgaccatcacaggccccacagacgccatcttcaaggcctttgccatgatcgcatacaagtttgaggaggtaacctgcaccccaggcacctctgccagcctggcgggggcaggcctggtcccagctggctccctgggtcctctcccctacacctggactaggggatgccccagcccgcccaggcaaccccataactacgctcacctcctttgcctcccagggcctctccgcagctctggttcacccagtcaggggccagtgtctctccatccttctgaagccagctactcccggctgtatgccttaggtccacctccctcagcttccccagaccctgccctggggcaccgagcacggcctcagaacaccccacccttcccctggggcgtgcagcctggctgacccttgggccacaccagcacctccagcctccagccagctctgccacatggctctcgatgaagccctggctggcacagccctggtcctcagccacacagcaccatgcctctggggcccccgtgacagctgatgtagccttgctgagatacggacggtaaaggtagaggccatccgtgatagtggatatgagacagagacagagagagagacagagagagagaggaagacagagagagacagagagatgagagagagagaggaagacagagagagagagatgagagagagagagacagaaagagagagagacagagacagagagagagcgagggggagagagcagcacttctgtgtattctgtcattgaatgaaattttaatgtctttatgtgtttctaattttcttgaaattgctggaagttagagatgcatttagtgtctttgaggagtgaccattaagtaatgaggtgcactttgtgggaataaacaaagacccctccaagggagaatgggcagaggctctttattatccaaagctggccatggtgggggtcggcgccatcttctgtgcttggcagagactcaaaggcaggcaggagggggagcttgggagtgggagagaagaggagagatgtgccctggggccagcagtagggctagaagtggggcatcccatgtgactggttggaggagtgtgcgaggccttttccagtgggtcctgagttggaactggggatgcacatgagggaagctgactgcccagagccgactgcagcagagcctgtggcctggcctccaaggctggacactgcagacactggggccagtgttcccctatcgtaggtggcctggcctccaaggctggacgctgcagacactggggccagtgttcccctatcgtaggtggcctggccactgtctgtaggttgtctcttagtttcccctttaagccactctctcatttgcaagaggatagacagttcaggaaaggctagagagccaggtcacgccgcttggggatggtttagttgcctttttggtcagctgtgctgcagggtcctctggatctttctgttgctgagtcatcctggccgttgtctgatgggagactgatggaatacagcagaccagcatcatgacaccaaaacagaaacaagaacaacccagtccccggatggtggtgagaccaagagcgccgttacccaacccaaggcaagaggacacatcccatagccatgaggaccagccttggagagtctcatagccgctccttagggtgctgggcagcccgctcctgggaccttcgctctgcaggtaacatgtgcagtggcacagacgccagcatggctggccagcaagaaactggagaaaagcaatcacccaccgctgcttgtgccaacacgtcttccacccagggcaggcggtgtcccgaataacttctgctggagttggcgatgggtttctgaccgcactttctgcctgtgtgattcccactgtgggggacactcagtcatcccttccacgagtacacaaataatcacaggtggcctcgttttggaactcgagtttgagtcagaatttccagctgtggagattatagaattagggtctttgtacacagagaagtctcaggataccattcctaagatgtctgaggtattcatctgaggccagcagggcctggtgactggtcccaaggaagcagtgtctggtggaggcatatggagactggggaagggctgttgctcaggacaagaggttggaaccaaggcctgtgtcctccagcttcagttgggacctgttttagtttctccctcgtggccagggtttcgtggccagttgccccatgcaggttgctgaatttaagttttgaatgacctagggaccgatcagtaaactttaataattggttgcttttctaggagaaagggacgctagcaaagtcacaggcaatttgtttagagtcagttgtccacgtagatgcaagcagaaagaccatcagctgtcattccccagggtcccatttgatgagactggcatgtctagagatgtgcatccctggggcctggtggtgggcggtgtgtccagtggtcagtgagagtgagggcagtggttactgtttgggataatcaagaatggcactagaacgaatatgtgctaacataacaattatcataaagtgaaaagaaaatagaaaagggaccatcaacagaggtggatgacaaccaggggtccatggagaataagagggagaatgattatatataagcagatgaaaaatgaaacaaatcagacagaggtcttgtcaggacatctgagcagacattgtcccttgtccaaggtcttcatcttgcaggaaggtctgagatcagccgtctgtttctgaagaatggctgcctctagaggatctcagagaacctcagtttgaggtcctgtgtgggagtctttttctagttgtgtggaattctgaatcgctgctttggctgtgaaatgtgaaaccaaggactgattccttggagtttcactgctggatttgttagcaatacttgtaagaccccttgcaatgagtttagagaaacagattttctctgacgtcccttccagtagacaaaatctcctggttgaaggtcctaaggaggatgtttgggaagatgtcatgggaagcagccgtaacctacgctattacgtaggttatgtagggctgtgctgagtcctctacagtcatttgtcatctctgccgcagcagggcagagtcgagtatcaggaattcctaaaggtacaagccttccagtcatcagtccatggaggaagagctgagatgtctccaagcgcgcagactgtatggccaaggaagctcgagggattcggacagttttcatcttttggtccttcggtttttccagaagactgtggatgctcaggaagctcgagggatttggagttttcatcttttggtcctttggtttttccagaagactgtggatgctcaggaagctcgagggatttggagttttcatcttttggtccttcggtttttccagaagactgtggatggtcaggacagtgttgttcttgagtaaggggtaactactcagagagttctgttataatggtttgtgtaaaatgtatttctcaatcacttcatgtaaaagttggtatgcttcaggttggaaatgcaaaatcaaggaattttttggcaactttaaggaccgtagcttttaaacaaggaagtgcttcagcccatcctgaaaacacacacataacagcgaaagtatttccagtcccaagtgaacactggttaaaatctacctgaaggtgctcagagggcccttgagtcgtcgctctggggccgtgtctcaccctcacaccatgtcacgattgtgctggtgacggatacctggccttaaaagaacctcagcagtctttgtaaagcttcccaccagtgttgactggagatattcatccagtctttgtaaagctttcccaccagtgttgactggagatattcatcaatttgtctacagcatgatgagtagtttcatggattgacttagcgaatatctgtttgaaatcatctggtaccacagccagctgagagcaccagagattgagtaaaggatacaaccagaattttcagaatttgtccattcttccttttcaaaatcaggggcgaagtgttgaaatcttacaatggcctcttggcttgcctccagagatccaaacttcgaggcttagctggagtcaagctgtggctaaagcactagttgggcagaatgaccccccagagcacctcctccaacgaccgcatctccgtctgcactggcctcgcatctgcagtcaccacctctctaggaagaagtgtgcccaagaactcagcacccggcccacgtagggtgggcttccagcagagctaaaagcccctctgtttccagagcatccaccgccatgggcccttggttagttgacaagtgctggcaagtgtgatgagttctgcatctggcagactttctgcaccacagaggactgtgccgaaggagagagccaggtcagcggcagcacactgtcccagcctgcttgggctgccattgcaaaatgccatgactgcgtggcttacacggcagacgctggttctctcacagtccaggaggctggaagtctcagatggaggtgccatcagggccggttcctctgaggcctctctctttggcttgcagatgccgtcttcttcctgggtcctcacagagtcacccctctgtgtgtgtcagttccttgtctcctcttacaaggacaccagtcagattacattagggtctactgtagggaccccattttaccttagttacctctgtaaagccccatctctaaacacaatcacacggagggtcagggtttcagtggatgaacttggtccggttctgcagcacaggccctgcctgatcacctccagcttcagttgtgaagtgggatgttaggccgggattctcgacagagtccactaaggctgcaggtaggtggggtcctccacagacttcctcgtctctgaacaaagagggcgtcaccacgatgtgtcagaactgaatcgctagggagatttaggtcttctaagtcttaatgaggacctggaaaaagcaggaggagacttcagtgacccccagggcgtgactgtccaagttcatcattgtcctccccattgagggcaaaacatgctcactctcctggtctagcggcagccctggaggggcagcgtgaacacccaccaccatgaagcacgtggctttgggaagaatggacagcaaagttgtgtttcggttcagtacccctaggaagtaagggagaataattttgttggtggccctgaggtcttcggcagatcagtatcttggtatctgtactggcaggacaggcgtgtcacaggggctggggtcaggtcaggaaggcctttgggtaggagccgtaggggtggggtcgggccggggaggcctttggataggggctagggtcgggtcgggaaggccttggacaggggccgtttgtctgtagtttgagcccttcttttggatttggggtcacaggattgtggagaatttcgggtcatgttttggtggaacctctcggagcctttagaggctctgccccggtcattttgcctgtgttagtgggattgtgtcaggtgcagcgtcaagacccttacccggagtctacacccacctcatgaggcaggggtctgcccagagcccacacacttgccggtgggccgaggagttctccgggagctcaggaaacagtgtctctgatgtacatttaaggtgccatcccgttttcaggcaaagtctctgcctactaaattttcaggggtggagtcccagagcaagaatgaatgttttccaatcaagggcccaagggttacagttcagggctggaaaatagggagagaaaacacggcgggtgatttgaaacgcctcccagggtgtggtgtacctaaactgaggaggaggatgacgtgagacctttctgcaggtcggatgcaggaagagccgcagtggccaccaggaggatgaggaagaccacctgcgtccagtgttagtcaccctgagagctgaaggccaggcggaggccggccgcccgttccttcctcgggctccctcactgcctggacccaggatctttctatgtctcagttgttctttctggggatgggatcatcttttctctggtgtcctttctgaatgcagcagctattacatgagtgtgcttgttgggtgctggggctggtgaggggcgcctagctctctggtctgcaggagtcctggctcatttttgttccagagctttttcagtgtgttctgccagtggctgtcattcagcagaagggctattcccatccctacttctgcgttcgagtggggtttcactccactgacctcatgggacgaaagggctgccctcacgccagcgcctcccttacctcgaagggtagagacagtcgaggttgtcggaagggactttctagtctgtccccagatctccagttgtttcatcttacgtctgtctttgtgcttgttctaatcagttcctactggagatgttttaggggtggcatttaggactttgctatgggaccttttttgaccctcgggttcatttgttgacagagttcaggtaactctgggtcatgtgcaaccaaaagaattctaaattcttctgttggtcattgcaggtcttgtctgggtgtagggaatctgtaagtgtggctctgaattcagctccaatccaaggtttagcttctggagttgcctattcgcctggctctcgggggatgggtttttacaggcagctggcatttgggggttttaggagggctggaaaagatagaggtagagtcgatggaggagctggaagggaaggacggggcggggggagtgctgggcaggggcagtgggaggaaaaggagggagagcttacgagcctgggggtctggtttgttgccgacgtctgccaggttgctgactagctgtagccaaagaatgttttagtgaaactatttttaaatgagaagttcatttgaaggcctcttcataccaatcaaaaaatgctgcccattgggcctgaaaaaatcttattatctttcttttttaaggtgcctcttaatgaacaatttcgttaaagtcaaatgttcccccagggcagccagtgaggcccaatcatccttggggaattgaggccacttggagagacaggcaccagaattccagttgcagtgactccattcaaggagttttcctgggagaggaggggattgagacatggccccatgagagcgggtggcaggaagtgggaatttagtgtccgtgcctgtgcctcaggtccctaacccgacaccttgacacacagagcctctccccagcctcaccagaaagaacgctctgtgtgggtcaaagtcaagctctcagcacaaaaaatagacaaaggggacaccatcctatttccttgctagtctatagcagtttgtccaggcacacactggccaagccttgtttctaagaagagggcacttttcgtggagagcaaatcctgttgccctgaatcgtaactcaggcataatggatccagagctgggggtgtcctgggggtgctgccctgtcactgcctctgccgcgctgtccgccacgctctgcagcgagctccggagctgccctgtcactgcctctgccgcgctgtctgccacgctctgcagcgagctccgggccacagcctggacacgccccatgcggctgacagaagccctgtcccccacgggttgccagcctgaacccaaagcccagctctgtctcctgggtgtcaggaccatgagccaaaccaggctgcccaggagggtgggcacaggccgccccccacctcagccttctcccgcttctacattaaccacacatctccttccctaggccagacaccaggagccattctctgcccccgtgccctccacacccagtcgtggcctgtccccgacatccctgccttacctggctctgggcatcagacccagcccccagctagtctccagcctccattctcccctccccttaggccagcacccacacttcctgtatcagcctgtctgtccacacccccttcccaccaggtctccacgaccaaggccagacccgccccaaccccactgcggcacggtgaccatcctgccttgccgtctgtgtgccctgccagcctgcccatccatttcagcgacgtctcctggtcctccctggcctggcctggccactttgtcctcggctgtgcatgacaggggctctgtgggcttctgagtgtgggaagtcaggacacaccccctgccctcctgctttctcactgcacgacgcctgaagtgctgccaacacacgtgtctctcccctaggatatcatcaactccatgagcaacagccctgccaccagcaagcccccagtgacgctgaggctggtggtgcctgccagccagtgtgggtccctgatcggcaaaggaggctccaagatcaaggagatcagggaggtaacaggaccttcccagcctgggccgctgcggagcctctaggcgggctgcgggtggtggccacaggccaggcagccttcctgagccttgtccctgctgtctgcaagcccaatgctggccacgcagaccccacagctcaaagtgcgagacaggaacacaggacccatgagcaagcacaactgcactgcagggacccagcccacccactgcccagatacggacccggccacccactgcccagatacagacctggcccacccactgcccagatacggaccccccccacccactgcccagatacggaccccccccccacccactgcccagatacggacccggcccacccactgcccagatacggacctggccacccactgcccagatacggacccggccacccactgcccagatacagacccggcccacccactgcccagatatggacccccccaacccacttcccagatacggacccccccacacacacttcccagatacggacccccctcacctgcttcccaaatatggacctggcccacccactgcccagatatggaccccccccaccactgcccagatacggaccccccccaccactgcccagatacggacccccccccacccactgcccagatacggaccccccccaccactgcccagatatggacctggcccacccactgcccagatacggaccccccccacccactgcccagatacggaccccccacccactgcccaaatatgggccctttccacccactgctcacctatggatcctgcccacccactacactcctatgggccgtgctggggacagggaggaactagctggtcacatggttctgggcaagggaggccctgggcactgggtgctgtatctactccctgtgaggggcctccagggcacctggagacagccctgagccatcggcctgtcccagtgggcagagtttgcagatgtgaacttcacatccacacgtttgtcccatttcaaggaaagcctgaatccttgccctatgcagcagggcagctgccccaatcttcatttcctttcccatgaccagagtccacctttctctgtgacctaaaactccacagaggagagaggattccgtgtatttgaaaagagtcgtttgtctccctgaaaatgcctctgattagatgcctccttgtctagccttggccaggtgccaagtgcgcccgagggaaggcacagggccgggtgccaggccgtggtagcaggggcagcatgggggcagtgctgggatggcggtgggggagggggcgcgtgggctgtatgcaggtttccaaggaagtgtcccccgagctgccttgggtgccgagactcgggaggtactgctgccccatgcgctgctaccctggtgctcccttccaatgtcccctctctccagtccacaggtgcccaggtgcaggtggctggggacatgctgcccaactccacggagcgagcggtgaccatctcggggaccccagatgccatcatccagtgcgtcaagcagatctgtgtggtcatgctggaggtaccgtctgcgcgccagggccagcccacgtcagtgctggatttggcctcccagcactgcaggcaaaggcttggaagccccggtcgccccaaggactcacacagttggggctgtggggggctcctgaccccaagtcagcctgagcgagagcggtgccggtatgggcgccacaggggtgctggggctgccagctcagggtccagtgtcttcgtgggggcgtctaggggagagcatgtggagaggagggagcctctcctctcatcttcggatttgggtaagaagttgtcatcccactgaggggtcttctgcactgagttggagctgcagaaacagtgctctttacgttggagtcaggccttggggggcagctgggggtgggagggaggcaaaggcaggaggctcctctgcgcatgcagttctgcagaaggaggcgtcaaaccaccgtggaggaacagaggtcaaaactcgggaaaacatacaaaactcatgcagaagtagagatgggtgaacaaaagcattaaaacggaaaagcagagaagaacccgctcagagcagacgcctctcttgaagtttcggggggaggaaaaaactcagaagtatactcaaaattcatgaagctatcaacagttgccagtctttcctgaagcaaaaatgaagaagcctcgccccagatggaaagttctagcagctctgcagggtcagcctccagcccctcctgcagcccaggctcactcctctctcgtacttggcttggggttcaaaccccatgtttgactctttaaaaaatgtttgcgtagttgttgtttccctgaagtttgatactttgtgaagtgaaaaatatttttcaaaatattcttgttctgaaatcttccccactccctggttagggcgaaagtgccatgctggtctgagctatctgttcaactctccagtctcaggccctggaggccctgcgggccgaggctcaggagcagccagtgacacgaacagttctaggagggacatccctaatggagggccgaggtccagctcctcaacaacacgtgggtctcgtcagcgtcacccagtgcctctgctgcctgcgtcccggtgcagtgccaggtgcagctccacagatgcaggtgcacccgctgccccaaggctgcccatgcccccagagccatcatccgaaccaccctatctccttcctgggcagggaggtttgagcaagacagggagctcgtagcagacatggccagtgaagatggccaggcagctgctctcactcccgctggctgtgctgcatcccaagtcccaggggccatcatcccagggaggaagattcatcacacctggaaacagctgggtccgccctcagatgaagagtgactggaaaaataaagccaaggatgccttaaagaccctcctggttgattggaggacttctgggcttggtagtgggcatgcctcacctcacacccaggagatgacggaggaaagggctgcccagggtgccatgagtctgggtggggcctgctgagaatacagacatcgccacagatggtgccctgcccacccagggcccagcaccctgtacccagtgcagggaggctcatgcagtcccaggggaggccagcaggccctgtgcccagagaagaagtgggaatcacaggtcagggtcagctgggagctcctgtgcctgggtgggggtcgagggcccatagcacaggggcactggcccgaggctgggcatctccaggagccggggagggcagcagcggctcccgtctacctcagtcagttcctcccaccccaggcccagctcaagtcagcccagacccgccccacatccccttccccacagtacttgaggtcacaccccagggccctggcgctgcggatccagccacccactccccatcttggggctttgagtgtgagtggcgctccctgagtgctgggctggccctgagtcagccaaggccccagaactcccagcaggacaggctgccccctgccaggaacggctcatgggctccagcccccacctcttcctgctggaccaaccccagctgtggtgccccccaggcccaggacttctgcctccttgacctgggccctggggacagttagacaggggactcacccaggagaaggagggcaggctaaaaatgctggcgctggagaatgttaatcctgtgtttccgacagaatacccaagggaaattaaggcaaacctcatcgtaactatgggattttttcctctggagtctataagcactttaaacatgctttttcacatagtgaagtgagatgtttccaagtctcctgtggagatctctgctgactgtcaccacgggccaagccaagcgctttggatataggtcccggtggagtcctacagggctcaactttctccagaacattcaagagaattgctccaaggggcagctccctgtgaagccgtgcagccaggcctgcagggccctgcgcatcccaggaggggccccggtggaggggccagcaccgcagggggccgtctgggttggcggccagcccttgtccagcagggtcttgtgggcaagggacccaccccagctggcctcccacaatgggactgactctccgcactgccacagagcctcccagggatgttcggggcaggcggtactctcaggaggccggtgtgtggcaaactgcagcccagggctcagcaaaaaggagccctctggagggacaggccataagacagccacacagagggtgtgggggctggaggtcttcactcccctcccccagcactgctgcgaaactcggggaggtgtggggagcgtggagctggtgcagggggctgagtggggtgggccggggcacgcctccccattgccaggctgcgaagctgctctaacgctctctctccctctcctgtcccttttcctagtccccaccgaaaggtgccaccattccctaccgcccaaagcccgcctccacccctgtcatttttgcaggtggtcaggtaagagccgatccgctcgcggcctccactgccaacctcagccttttactgcagcacccgccgctgcccgttagtgcactcaggttttctcgccttctcacgtgcacgtctcccacccgtgctggaggcagagctcttccacctacacccagcaccaggcggacgcagggggccttcagagcggcattcccccacagagacggccccacggaatcatgttctccctccctgacccgggcaggaagatctggctctgcctaaatccagttcccagaactgggtgtttttaggaagcttagatagccggcgcgcaggcgctttctaggtgattttacgtctcacgttggaaacagcatggtgagaaccagggtcttgtttccactgacatccgtgttcccaaactcccaggatgtgcttgtagcagggacgtgcgagaggagggagctctgcactgaggaaggatgcatggcccgacgaccgggcgtctgtgccgctgtgtccggacctccgtctgctgtgagcaggggcctcacaggcgccccataccccatacccagtctgcagatctggctcttttggtttcagcccttgagctctgtgttctcccgccagggatggcagcacctctgcaggagagtggaggaggggagccctgccccagcccctcacctgagcccaaaccctggccagggcacagggaacacccacccactcagggccagtctgtggccaacagactttgaaggtgtccggcgggggttggcctggaagagctctgtgtccagtcggccgtgatgtgtgtctttgttcaagggagagttgagacagacgttcccacaggtgaccctggcaaggcagaacaggcctgaggtttgactttaccatcaaaaaggagagaaggggcaaatgttagcacttttcctggtgcttttccttacggtgtaaaggaatcttatcagatctcccagttgtggcccgtgtttgagggagagacagggagtgtgtgtccatcccttccctcccagggtcccgtgtgctcagggcagggtatgccttttccccacactggcctcgtctccacagcctggcacacaccccttcctgtcttgctgtggtcagggagcccccacatgcacatgccatccttacagcagccccagggcatggcacacccccattttatagccaggaaactgggcctggctagccagggatttgcctggtgtcacagccctgtgggcagcaggacatgtccttacctcgccgacctagggggctcaggtcacagggtcacacggagtcacacggcgggagaagtccctgtgcaaaactccatttcgctgctttccccaaattcatggttaggtaaccggtttagtaacctctgtggactccacctttatgtttaaacaaatccatgatgatatcatgtggtaaaaggtaggatttttttcaaaaggaaggtgtgtttatacaaacacatgtggggtcttaaagccactgggggaggagtcacagctccagggaagagggggtgcagctgagccctgctcagccaccggccacacacctctcactcctgtaaagaaggcagtagcacgccctccctactgcagcaggtgaagggccctgtgcagtgggtgctgtccgaaggttgatgctagaatgtcagccctttgagagctgggccctggggccctggggacagtctggtctggccagtggtcagccttggtggtggaggacagagtcgcagggagttacccaccctgaagtaacccaggggagctgccgaaatgcaaacccagaagtgtgggccggatacctgcaaggccactggcgtctccttgacgactcagacccacagtgcctagattaggacacacaacccaatacagaccctagagagctaacctggagggcccatccactttatttctgtccagttggagaaatcagggacctggaagatgccccaccactgtgagtgctctgggggcacccagcagcagctcctgtcagccaccaccgcgtttctagcacgacatggtcgtgagttaaatcagcagagcctgctaagggacgagcagatagaaaacataacagtaagaagatcagtcagaaaactcgcgtggcccaggatgcaggatgcttgagctcttgtggttcagctcagacagttggggctgacctgggaccccgtgcgctgagggggcggctcccagcatgagttccagggcccctcaccttcggtgacacatgggaacgtgcctctggcagcacctttacaaaacacttgcaggtggccctcaagacactttgtacaggacagtgaggtccttggttcctgctctatctgataagattcttttacttcctcagctgacgcagcactgtggcctcacagccctggggcttgtttcaaagctgggctgcagccgggtccctgtctggaggttgactggcctttaactccgaggattgggttgtttatgatgaaaactcttggcagattcaaaacccatgggagggtttgggctgcacagaggtgacacacatccttccctgaagtgtccctctctggtgcacagggtccccccacccccacgtgtggtcaccgcgaacaccgataccacgggtcctcatgggaagtggcgtggggcccgcacagccaggggctggtagccgctccctccacccccaggctgccaccaggcctggtgcagccctgtccatgtcccgagtcctgacagctgttcgtggtcttcactctcccttgactctgtgtggtccatttgttgtctggccatgagtttctgaatcacctgaaagcgtctccactgacgggacctgtggggcaggtggggcctctctcacctgcccggatttcagagtcagggtgggtgggaagaggctgcaggtcggagtcactgttttgaaggcgagggaaatactgaagccaaaatgaggcctcaggagccccacacgatggcttgggaggggtgtattgctgcccccacgtcaggagggccaccccctccctgtcttcagggcggtcatgagaggcagcaagctgtgactgacgtagacccacttcctacgtagactggcttttggtgaattggttttggtcaccttttagagctttcttttgttgtttggacttcttggggtaaattatttcccaaaagtatttactcagatgactgattaaattttcaaaaccgtaataattagtggagacctcttactgggcagatcactcttcgattcttttgctttaagaaacttggagtcggaagcatcaaggctgaactgtttccctcccacccgctgaactggccagctcagctctgcccgcccagaggaagtgggtgcggctcccctggggctcctggtgccctgggagggttggccctttgtcctaggatggggacaggtggagaggcacacgagggggaagcttctaccggagggtccttgtcatgctggagggtggcggcgggtgctgagccgtggtgcagccaggttgcagtctgacggggtctctctctctctctaggcctacacaatccagggacagtatgccatccctcacccggatgtgagtcttcactttgtcttcctctcacctttctcttctcatggttgtttacctacctgcatgctgctgttaattgctactaacattaatattacacaataatattaatcaacttctcagcgttcctgacctgtgtcgtatccatatgacctcgaataaccttttaacctcttagcactaattctgcttgtgttgaggacttggcctgatgtcaaattgtctcaattctgccgcagtcctgggttttcctccctcccacggggcctgggagggaactgagacgggctctgtccccgtgcagggcagtgaggatgtgctcacccgccacaggcaggcgtcagtgatactttctctgcgcctaagaagttgggtgacattatcaaacaggccacaaagataccttggcaagcacatttgagggcctggtgaaattaactccccctttcagagtccacatgaaaacatagggtccatctacacacacagatccaggctgtggaaagccagtggaataggcctttgtcttcattccagaatcagtgggatgccaggcgggcatagcgtccttggctccgcccgggccatgcggagctgggtcccatgcagctccatgaccgggggctccgacacctcttttctgctcctgctgggtctaggtgtaattccagtgctggaggaagaagttaccctcagataaacggtcggtgtaattccagtgctgggggaagaagttaccctcagataaacggtcggtgtaattccagtgctgggggaagaagttactctcagataaaccgtcggtgtaattccagtgctggaggaagaagttactctcagataaacggtcggtgtaattccagtgctgggggaagaagttactctcagataaacggtcggtgtaattccagtgctgggggaagaagttaccctcagataaacggtcggtgtaattccagtgctgggggaagaagttaccctcagataaaccgtcggtgtaattccagtgctgggggaagaagttaccctcagataaaccgtcggtgtaattccagtgctgggggaagaagttactctcagataaaccgtcggtgtaattccagtgctggaggaagaagttactctcagataaacggtcggtgtaattccagtgctgggggaagaagttaccctcagataaaccattggtgtaattccagtgctgagggaagaagttaccctcagataaaccactggtgtaattccagtgctggaggaagaagttactctcagataaaccgtcggtgtaattccagtgctggaggaagaagatactctcagatcatccatcggaggggaaccctgggcggctctgggctgtgcggctcagaccccttaggggccaagagataaaaggtgcaaactgtgagcaaagggcctctctggaggcggctttagggcccccagggagtgacggccgcactggcaggcactggggagaggagaggggagagcaacagagaacgagagacagacggccccaccggaagtgcttcgtgctgtcagcagatggggcaaacctggagttggttctgaggaggtttctcttctctaaaccattttgaacgtttgcccagctcagtagctgctcctcgtaacgcagttccagtctgtgtgctgctccctctgaactgcgagaggcgcctctgagctggttgggaggtggccgccaggtgagcgggctgctccagagccttctgcaaaccctgatgcttttgagttgggggcaaggacgtccatctgagtgagatgagaaggcaggtcaggagtgtttttaagagttaatgaacattaaataaatctttgatatagagatgcaatttactatcattgcaggaaaatttatattgaatggagaatagataacaatagttattccattaaaggcaacacatgaatcaaatggtagagaaacgctgatcaagaaaagcctttccccacctgccccagaggccgtttttagtggttcctggcgtcagacctttggtgatgctgctgtagctacatcaaggacatctcatcctggggtcagctgtagacaccagtgcctgaccccactaggaagccgggctgtggccaccacacaccggaaggcactgttggggctgccccagcctgcgcccagcagcagcgttgggcagaagcagaggtgtgtgtgtgtgtgtgtgtgtgcgcgcgcgcgtgcgcgtccccgtgcatgtgtgtggcaggggtgtggggggcaggtgtgatgtgtcctaacagaaagcctgtgtgaaggaagatgaagatggaagccaggggagtcagaggcgactttctggggtggcccagttccattaaggactcaggacaggtggtcacgcacatctagagatgcacgtgtgcagaggcaggttccaaagggggggtcacttgactttgcaaagctctggaacccaaaggaaaggcagtgtgcggtgcccttggtaaagggaaggttagtcgatggggtcagggtttgtgtttaccccagacagtcgccctgaagttggatgctcagacctgcagggaccctctggtgacaccttacggatttcctgtggccacagagcctaacgttctcactgtggcctttggctgagcacccgtctgagccagaatgcttgtggtctgaaatttccagaggccgtggctgtgtgccacggtgggactgcaggaccctgatgtttggtgattggcttttacttcgattggtggctttgctctttctcatgtgactttctcagtatctcttagaaatgggtagttgtgcagattgtttcaaattagtttaatgtataactaactgttaagagaactgcctcagtgcatgtggtaatgatttgagatacctggtgctatggtttaaatatgtctattcctccacaatttctctgttggaacctaatcaccaaggtgacagtattagagggtggggggtcccagggctggggagtgattgggtcatgagcgctccaccctcgtgaacagcattggtgcccctataacagaggcctcagataacagaggcttcagataacagaagcttcagagagtggcctcccctccatccctcctgtcatgtgaggacaagagcgttcaggcaccatattgaaagcagagacttggcccttcccatacaccaaaccagccagcactttgatctccagtttccagcccccataactgtgagccacacatttatgctgtttctgaattgcccggtctaaggcattttgtcatagcagcaggagtggactaaggcgcttggttctttactgtgaagtatctctctgtggaagacattctgtttctacatcggtgtcatgagatttgcagagcagctgttattaatagaagactggaagcttccatggtgcttttcttgcaggcgtgtaaaattgaagacttggacaatcacttaatcattaaacacaaaaataaaatgattgtttagtgacataggtaacaatagtcaggaagcaatttgtatctgagcttggtatttagtagaaatttttaaagcatcggtatttagtagaaatttttaaagcttcaatttcttactatatcaatataattatagaatatgttgttttaatttataatgtaattgaatacaaagtttatttataccacagtgccggcttatatacagatactagagtcattttttaggaacgtgatatttgacctggatgtgtgggcccatgaataagaaacatcaagcataagaaaatacattccttaggtttgagtatttctttatgtaaaactaaaatatgcatgtgttttctgtgcccagttttaaaaagtgtttttagcttgttcttatttaagaatcatctgggctgggcatggtggctcaggctgggtgtggtagctcaagcctgtaatcccagccctttgggaggctgaggcaggtggatcgcttgagctcaggagtttgagacaagcctggccaacatggcgagaccccgtctctaccaaaaatacaaaaaaatttagccagacgtggtggcacacgcctgtagtcccagctacccgggaggctgaggcgagaggattgcctgagcccgggaggtggaggttgcagtgagccaagatcatccctctgcactccagcctgggcgacagaacgagacccgtttcaaaaaaaaaaggagtcatcggcactgatctgccttcgcctgcttttctccagctcctcacacgccacatgcatcattttacccacgtcctcctcgaggcttactgtgctctggatgtgcaggtgttttgaagaggcacagagctgctcgacagggtgaaggacttaggaggactgaagtcaggctctccagtatggccactcggcagccctggagactatccatgtgcctctgtgtgtcctgcctgggtcagaccaagtgcagtttcagaaatgagaaagagaaacagcacctgagacctgggacctgagagcagagccgagagcgcccacacctggacagactgcttgactctcacccagcacgtctgcacctttaattacagcggggaagttacaccaggaaggaattgttttttctggaagaaatgagtgaacttcaaaaataccctcataggccaggtacagtggctctctcctgcgatcccagcactttgagaggccaagatgggaggattgcttgagcccaggagttggagaccaggttggacaaaagagcaagaccccatttctacaaaaaaatacagaaattaactgggtgtggtggcacacacctggagtcccagctactcaggaggctaaggtggggcagttacctgagctccggcagtcgagactgtagtgagcagagattgcaccactgcactccagcctgggcgacagagcaagaccctgtctcaaaaaaagaaaaaataccctcatatatacaaatctttatttctagtcttccagctctcctaatcactcccttacttaacgtccccatcatttaaaggggatgttgaaagcaagcaaaaataaaaacatgttagagttgacgaagagtttgccatgtaggcgattttagatgagcctttgcaccaaccctgtgaggcagatctcaggaccgtggggccagttccacacacgaggaagtggaagctctgagaggtgccttggccagagctaatgagccagggaatgggagggcttggcacagccgcccaggcagctggacgtgagtggcagatgtgcagcaacgctgggaatcaagcggacaccagtgtctactaagaagctggttcttcagtgaaagagtcgtggggaaattgtagaaatgtgtcgttgtaagtgggagccagggatgggaggcacgaccagatcctgtgctggatgcggcccttcatcccagctgtgcaatccccgggactctgtcggtgccacgcatttcccctggacacatgaagggcacgcgtgggctcttgtgacaatctcatgcacttgcagagatttgggcagattgttgcagagtgctttctcctcccacttgttctgtgtctccctctggaaccctgtggggaggtgggtgaggggtcccctcactgtagtgagagagtagtcaatgccgcatgctctgggcacatgccgaggggcccagcctctctcactctgaagcctggcaccttccaagaccttgcagctgcaagtggtgcagcggcttgcccatggccccacctgctgtcagagctgtgctactgcagccactcctttcatgaaacaagaggcccaggcaaccctcactgctggctggagttccatctttccttgcttggaacaccgcaccctctgcagggccccagtggcacggctctcacatgctgttcctcccagcttgcccttctcagaacgagactttgcatctttacaggaccctcgggcgactcactggcccgtggaggtctgagaaacactagtcaggaggcctgagaaggaagaacatgcatccagttggaagcccaggggagacatggaatggagagagaaaattccaagagacacacagagaaccttccaaaattagagaaaccatcaacaattcccaaacaggataaacaaataatacaaataaactcgacctggaacagttgagtggatagaaacagcacacgtaagatcgggtgtgcacgaggagatgcgaacaccgggaacagtcgagtgggtagaaacagcacacgtaagatcgggtgtgcacgaggagatgcgaacaccgggaacagtcgagtgggtagaaacagcacacgtaagatcaggtgtgcacgaggagatgcgaacaccgggaacagtcgagtggatagaaacagcacacgtaagatcgggtgtgcacgaggagatgcgaacaccgggaacagtcgagtgggtagaaacagcacacgtaagatcgggtgtgcacgaggagatgtgaacaccgggaacagtcgagtgggtagaaacagcacacgtaaggtcgggtgtgcacgaggagatgtgaacactgggaacagtcgcgtgggtagaaacagcacacgtaaggtcgggtgtgcacgaggagatgtgaacactgggaacagtcgcgtggatagaaacagcacacgtaagatcgggtgtgcgtgaggagatgcgaacaccgggaacagtcgcgtgggtagaaacagcacacgtaagatcgggtgtgcgtgaggagatgcgaacaccgggaacagtcgagtggatagaaacagcacacgtaagatcgggtgtgcacgaggagatgcgaacaccgggaacagtcgcgtgggtagaaacagcacacgtaagatcgggtgtgcgtgaggagatgcgaacaccgggaacagtcgagtggatagaaacagcacacgtaagatcgggtgtgcgtgaggagatgcgaacaccgggaacagtcgagtggatagaaacagcacacgtaagatcgggtgtgcgtgaggagatgcgaacaccgggaacagtcgagtgggtagaaacagcacacgtaagatcgggtgtgcgtgaggagatgcgaacaccgggaacagtcgagtggatagaaacagcacacgtaagatcgggtgtgcacgaggagatgtgaacaccgggaacggtcgagtgggtagaaacagcacacgtaagatcgggtgtgcgtgaggagatgcgaacaccgggaacagtcgtgtgggtagaaacagcacacgtaagatcgggtgtgcacgaggagatgtgaacaccgggaacagtcgagtgggtagaaacagcacacgtaaggtcgggtgtgcgtgaggagatgcgaacaccgggaacagtcgtgtgggtagaaacagcacacgtaagatcgggtgtgcacgaggagatgcgaacaccgggaacagtcgagtgggtagaaacagcacacgtaagatcgggtgtgcgtgaggagatgcgaacaccgggaacagtcgcgtgggtagaaacagcacacgtaagatcgggtgtgcgtgaggagatgcgaacaccaggaacagtcgagtgggtagaaacagcacacgtaaggtcgggtgtgcgtgaggagatgcgaacacccgcaggtctctgtctcattccactagagggagaagacactgagtgtagactctcaacgcacatgttaaagtttcaatgaccactaacaacaaagaagtccgatatgtaacctctgtgacaggaaacaagtgaggggaaaaattattaatccaacagaagaaaaggagtgaaataaaaaagaaactctggaaaagcaggacaattagaaaacaagtgtcaaaaattagtctaaatatgtggatgattgtgatcaaagtaaaattatgaaattccagttaagaagcaaaggctgccagactatatttttaagctgaacaaataggcaagcaaacaagcaaaaaataatttttttgtttttttttctttcaagagacacacctaaagcataagaacccagaaaaaatgaaagaatgggaaaaggctaaggaatatgcaacaaaatcagctggtgtaccaatattaacatcagtagggggaaaaaaacaagactttaagagaaaaactttactcattacatgttgatagaaaattcagctcacaagaagatataattcaaaatttatacgtgcctaaaacatagctttaaaatatattttaaaaattgacaaaacatagataatttgacagacattatagcaaaaacttggcacacctctctttccatgagtgataggccaagtagacaagtgtgaagaaggcatcaacagaaccacccgtgatcctgacgtgattgccgtacctcgaacgttacacctgccacagctgtagaattcatggagacatttacaaaacctcatcacataccagcccataaagcacatctcatcatctttcaaaaattggaatcgtatcgaccacactctcttagcacaaagcaattgcagtcatgcaccacatgacggttcagccaacatcagaccacacagacgatggtgatgccatgagagtatagtggagctgagaaattcctgttgcctggtgaccttgcagctgacctgaggttgcagtgcagcacgttacccccacgtgtgctgctggtgcaaacccactgcactgccagccgtctagccatctagcacctgccgttaagcacagctcgtcattctaaatgacgctgataaacaactgtgttactggtttgtgtattactatgctttttatcattattttagtgtattccttctaattatctaaaaaatgttagctgtaaaacagcctcaggcaggtcccgcaggaggtgtccagaaggaggcactgtgatcatcggagatgactatgtcaaacggtgtggttttggtgcagtgggagacaagtagactggatcagacatgagagcccaggatccctcacacaggaaggaagccgtctatgagacttggacaggacagagctgcccacgagagcctgggagagggcagatgctccacacagtgccaggacggtgggtcaaccacgtggggaaattgatctttacttcctgccataaacaaaaatcatttcccatgtgtcaagaactccaacacaagacagaagaatttagcagttttaggagaaaatatagaagaatgtcctattctgagatcaggggacgatttcttaaaacgtaagcacagactgtaaaggaaaatactggtgagttcaactttgtgaaatgttggaatactgtttctcataagacaccatgggagagcggggagaagatctgtgcagcaggagtgacagacaggatggcatctgaaatgctggggtgctcttgagaagtcagcaaaaatcaagcaataagaaacatgggcgaatgacagaaacagacattttgctggagatgaaatagaatgcaggttagaaccactgtgctgggggcctgtttcttggcctgagtgatagttgtatgggtgcattcattttgtgatcattcattgagttgcatcttaaatgcttgtaattttagtagttgtctatgtgttacattctgaaacaatgtgaaatagaaaagacagtttacagagaaacatcagtaatgggatacatcccctgcccatcctcctaccctcctctccctccctctccccctcctccctcccctccccttcctccctctccccctacatcctcccctcctctccctccctccctctcgcctgcctacctgactttcttcctctttcctctcagtggtttggaggtactggtgagaaccaaaagcctcattttttcaacagggcagaattttcccaaaaagtggaaggccccttggcacttagtcctgttctctcctttaaaaaatgtggaaattgagtccaaacgaggtgcagtggcctgactgatcccgggcagagctagggtgagcacccgcccatcctctccacagatgctcccccagcaccgcccagtgctagtccaggcctccctaggacgtcccctacatttgtaggtggggagaagagagatttgtttgctagtgtggtcatttcatcataaaaagcccaaaacgtatcaggagacatttttgtcatccgcagccacagctgctgctcactcacatccattcccccactttatagtcaaggaactgaggcctggagacaccaggccttcctgtcgccacggccacaagctgagccatcttggagccgactccaacccctgtagagcccagggagcgcccctccccgtgccccattccctggccatggggcagctcctgagccccactaggagtcgggggtttgcggatcccatctgtgccattcagcgtcctgtggctgtggatgaatttgccaggagtgtctcaccccgccgtgggcgatcttgcctgcagctctcctacccggcctgggacacttgcggtctttcctgacgtgccccgtccaggtggggcgccttcactaggaccccagatgcgcctgcttcctcctcctgcccccgcagggcctcgtgtatctccgggaggtagactgtcccggtgacttcagctggtgtccttgggacaggatgtcccccacaagctctcctggcaccctcgtcaggggcttccacacacatcccctcagataacccggcacacccgttcacgttacatcatggggcagcgcagatgccacaatgccctgccccccagcccagacctggctgcaaggccaggggttggggaggggcagggctggggagcaggccccccgatcctcccagggtactaggtactgaggaaggaagggcctttatcttgactctgggtgaactcttaggggagggctcccagctcctgagaggccaagttcaaacccacccaggagcacacagctgggaaggcgctgggaccacagtcgccgcattcctgactgtgctccctggtgtcagggaacccaggtgccaggggtggccagggcaagcatgggggtctggtcaggtgctcagcagccggccttctcacgtgcagatggcagctctgctccgagcgcccacaccccccagcattggtggcctctgtggcagcttctgccacccataccctgtgcagtgaggaagctgaggtgcctgcctggctgtgggtcgcaggagtccacacacagccacgctgggatttatttgggttgaatgttctgaagggaaaatgctggggaggtggtgccctccccaaatgtgccacctcccctgcctgctgggcagcaccacagaggagctttgcccagggtcctcctgagccccaggacaccctctgcagcacccagccttgacagccccactggaggcctgtggctcctgggaaagccaggcctgaggagcaccatgccctctgctgagcagccctgggctctccaaagggtggaagaattatgagcctcaccttgccacgtttaccattatcttctgctatttttagtttttatttaagaaatgaggctcaggtaaaataactttaaaaatggcatcaaagcccccttgaaaagtcttgtggcccgaggatgggaggagaagggctgggggcagcctgcagggaccggggacacaggcggctcccagctgagggcccgaggcgtccctccctcatgccttccacagaaccttctagcactagtgttctgtaatcccaggaaaggcaagacgcttctggaggtgactaaaaggcagatgtgtggcccctcaggtgttccccccaccccaggtcacctcatgggtaaagcaaggccctgcaggggaggggagtgggccaggcctagcacagggtgagaccagggcgaggtttgcaaactcatgcctctgtggatcccacaggggctaggctgattttagtgactagtgactcggccttgaatctcctagaagtgcagctggtcttcatctgtggctcctggactcccccagactctccatggcccactggccccagcctcctgtccacaccagctggtgagagggaggctgggccggtctaggctggagctgccggggagccagggagagaagacagcggcttccggagctgccttctgcacgccgggcattggcctgctcacagcctggactccattggcttcccccaggccaagtccttgcgttctcttgcatctgccatgtgtccgcatggccctctttctatctatctgtgcaaagttctgttactgccgttttaatttggtgtgacttgtactcgatgacaataaccttcttagctctcgtgtccctcctaccccagcagttgaccaagctccaccagttggccatgcagcaaaccccctttcctcccctcggacagaccaaccccgctttccccggtacgtacccagcccttttctcacctccttctcttctcacctggggactttctctttctgagctgtgttattcggtgcagtgcatagaacaggtgcagttggatttgtgagtgccggtgctgcggcgttcacatgcagcaggcttgctggggctggggccggggacagggtgggggcgggaggtgggtctcgctcccactgttgggggctggttcaccttacagctggccttgccatagccttgcttgtgaagagacgtctgcccaccgagggtctgcacttgctgggcagtgccctgtgctgcccgcagtctgtcctgggtggcccttcctgctgagcgtacccactgggccgccctggaggcttttctctccaggagcaagagcacagctgacgtggatgctcttctgcaggaagccactgcgtatcccaaggtggcacccagccctgccccaggagagcagtgacccgagtcagccctagcccagtcgctgtcatgaggccatcaagggtggccatccgtggcaagcccaccctgcccctggcatgcctggcagttgggtgtccctccctgcagaggcagcgccatgcctgtggacaacccccctctccccctggcgtgcctggcagctaggtgtccctccccacagaggcagtgccatgcctgtggctgtggccagagagagcgccggtgcgtgcgccagtcatattttgagcttccctagttgaagggaccctgcttatctccttgagggcaaaacattaaacctgtctcttctttgctctccaggagaaaagctgcctttacactcctccgaagaagctcaaaatctgatgggccagtcatcaggtaacacaaagccacactgacaggagaacaggccagggcagcagagcagagccccagtgggaggaggtgtgggggccctgccgctgcagcagtttccagcttccatgggaggctgtgggccagcctcaggtgctgccaagggcgtgggtggtgccatgctgccactgtggctggatggtggggcctgaggtgctcagagcagggcaccccggccatgggaggcggccgtgggagcaggaaatagaggtctcaccatggtgtgctttggaaatgggttttgtaggactacaagcaaacccttaaggaggaagatcagtctgtgctggatttgcctgcacccctcccgacttgcattaaaatgttcattcctcagatactgtggggtagcacatagatttgtagattcagtgaccaaggccatgaaacagacacagttgtttgcctggggcttagcaggttcctaggtgcccgtgaagaagatgccacacacgcaccacaccttgtggctccatgtgcacatggccggtgccacagtggcttcctggtggccaggcaggtgtcctgtaatgaccctcccctcaccaaggccctgaggactgcagtgcacacacatgccagccacagcagggttaaattgggtgggcagcgatgggaggtgtttgtggcctctttgaatgctgcggccaggagacttccagcgtgggcttggactgcaggttggggcagcctcctttacccctggtacctggaatgtcgtcatcttcataagaaacagactcacctgggccgtgctgtcctgagatgagtgaacacgtcggccatgccgtcctgagatgaacaaacacgtcggccatgctgtcctgagatgaacaaacacgtcggccgtgccgtcctgaaatgaatgaacacatcagccatgctgtcctgaaatgaatgaacacatcggccatgctgtcctgagatgaatgaacacctgggccatgccgtcctgaaatgaatgaacacgtcggccatgccgtcctgagatgaatgaacacatcggccatgctgtcctgagatgaacaaacacccgggccatgctgtcctgagatgaacgaacacccgggccatgctgtcctgagatgaacgaacacctgggccatgctgtcccgagatgaatgaacatgtcggccgtgccgtcctgagatgaatgaacacaacggtcatgctgtcctgagatgaatgaacacctgggccatgccatcctgaaatgaatgaacacattggccatgctgtcctgaggtggatgaacacctagtccatgccatcctgagatgaatgaacacatcagccatgccgtcccgagatgaatgaacacatcggccatgctgtcctgagatgaacgaacacctgggccttgccgtcctgagatggatggacacctggtccatgccgtcatgagatgaataaacacatcagccaagctatcctgagatgaatgaacacatcagccatgctgtcctgagatgagtgaacacctggtccatgccatcctgagatgaatgaacacatcggccatgccgtcctgagatgaatgaacacatcggccatgctgtcctgagatgaacaaacacctgggccatgctgtcctgagatgaacgaacacctgggccatgccgtcctgagatgaacgaacacgtcggccatgccgtcctgagatgaacgaacacccgggccatgctgtcctgagatgaacgaacacctgggccatgctgtcccgagatgaatgaacacgtcggccgtgccgtcctgagatgaatgaacacaacagtcatgctgtcctgagatgaatgaacacctgggccatgccatcctgaaatgaatgaacacattggccatgctgtcctgaggtggatgaacacctggtccatgccatcctgagatgaatgaacacatcagccatgccgtcccgagatgaatgaacacatcggccatgctgtcctgagatgaacgaacacctgggccttgccgtcctgagatggatggacacctggtccatgccgtcatgagatgaataaacacatcagccaagctatcctgagatgaatgaacacatcagccatgctgtcctgagatgagtgaacacctgggccatgccgttctgagatgaatgaacacatcggccatgctgtcttgagatgaatgaacacatcagccatgccgttctgagatgaatgaacacatcggccacgccgtcttgagatgaatgaacacatcggccatgccatcctgagatgaatgaacacattggccatgctgtcttgagatgaatgaacacctgggccatgctgtcttgagatgaatgaacacctgggccatgctgtcctgagacgaatgaacacctgggccatgctgtcttgagatgaatgaacacatcagccatgctctcctgagagggatgaacacctgggccttgccgtcctgagatgaatgaacacattgaccatgctgtcctgagatgattgtcctggttatgcagacatttctttatattatttgcttaactttaatgccctcctaggaagatttcccatactttcctcccttcaatcaaaatatcccaagttcaacaggtctggctcactcctctctattcatctaaggtctactttgttcaggaatttctgtctaggactcaggcaggaccaaggaaatcttttcagtgacattttaaatatcactgtttatggaatgtgtatagataactgaataaccaaataagtgttgttttgaaagtatctttattaaaagaatataaagaacagaaactctaggcttatatatgcaaaggaaaaataatggagaattagagatgaattggttcattcagcaccagctgatcccctcctgtgctggacggtcccacaggaccacgtctgccctgtggggtcactccctgccagggagactggctggccacagtgagaggtggtgccagtaccataagacaagatgagaggtggcattgtggacaaactgccccacccagggcccagggagggtgtggctggcagggacggggggcagggcagaggtggtggggaggaacaggagctgtgtggctttaacatggagttggggggcacaggaggcgccgtgaggaagtaggagctcattgggagtctccaaccattggaggtgcattttggggacccctctggtctgtctggaacctaggctgaggggcacagcagaggcaggaaccagcaagagggaagcatgggggtgggaggagggctccccagtctggggtattctgaaggtacatcagctgggcctgcgatggttaggaggggtggatcctggggtctccagggcccaggctgagctgcagaatccgagttacaagaaccacgtggggcctgcaaggggaagagcagagtgtcagcgttagacttgcaggttggagccgccacttgtccaggaaatggaaatgctgagcacgaagagcagagcagcctctggcccctcctgtgccagtactcatggggcttgcagcttccaagcaagagcaaatcatggacttgaactctgagaggttgtcttttatctgatggtactaagtggagatttgtaaatataaaagcttaggcttgatgatcaattagacccatattgtcactcttcaacaaagaaaggtatctatatagaaatgtgcagcttttcattggccctagcacttcatttttggctcagtgatgccattaggtctccttgctccaaattggaagaactgcctggtgggcctgagctgtctgagccaggctatgtgcaggggcctctggacagttacatcagaatcagaatgagaggcaactttgcatgctctgccatctgctgtcccctgcaggaggccggggggtgtcacagggaggtggggcactgtcgggtagagccgtgtgggcctcagaaccagtggtgtctcctgagaactaagggaaaatgggcactcagcatcagtgtgaccagcatggcctgtgccctgggtgctgcacagagaccctgagacatgctggatggccctgcccttcagccaggggcccaccagggtggctttccaaggtgtcacaagagagtatacaaacataacaggggagtgaagtcacgctgtgcacaaaatgaaaaaaacaaaatgtcctgcttgggtttctctttccttcttttgagagaggttgggactaaggaaattgggtggcagtttgggactgaagctcacagggtcctggccctctgggctgtgctgaccctcacacttgggccagctctacagccctgtctcacttgacccaggagagtgagggacaggcactggagtgtgactgttagcagccttccaccagcctaaccatgtccccttggtatacccaggtctggacgccagcccaccggccagcactcatgagctcaccattcccaatgatgtgagtatgcccgctgtacctgcctgtccctgggtagaaacaccaggcacaagtggctgtcagctctgctgtcctttgggcagagggacccactgcttggtaatgccttcaccaccccaaccccactgtttgatctgtgtcctccctcctttcctttttaaagtgggtttaatgcccataaaaagttatgtgtttttacatccctaagatgttgaacaagcaacaggctaaaggggacttcagatattaatcagtagtcagatgagagttgggctgagaacctatgttgctgtggaggcactgccctggtgcgggccaaaccttgaagaacaaggtggcccaggaatgctctagagtggacccacctgcagtattatctccatgggccctggcccctcaggaggtttgggattctccatgagttggctccaacagacttgaagctggttggatgtcacagacttgtctagattccttctagcactcgtcagtctattcatgccttcagcatacctgagggtgtggccttacgagctcccctcaacacacacagtcctccccagagtaagcacgggtcttgaggatagagaggactattctctgaatgcttgacttatccagaaactgagagaccagggagggcatgggccacatgtccttaagggatagctgccagagcagcaagcagagtccctgtgtgggctgtggaggtggctgccccacttacagctcaagtgtccaggaggcttttctgccctagagctgtggactttgggaatcttcactgttctgcccctttacacctgctgggcaggaaatctaagccctgttccttcctttcatacaagttgaccataggaagcacagatttggcagttcagggagatcaccagtcctgtgtgtggaagatggacagtggagcaggagaaaaagaggcagaagagagcagggtcgccagaggaatggaccatgaggctgtctggctggtgccactgacccgcctgaagagccatcttcatttgagcccctcatggcaatgtgcactctaggccttcttctatcccggttgctggtcaggcacagagtccccatgtctgctaaaagaagctcaggacactcacactccaggcagcattgtggtccagccttctggcatccccaaggatttctgaggttggcccaacttgaaaggcagcagcacagagccatctccccaggtgtggggtggcacagccaactggtccctgcattcttggagggaggggatttttccccaaccctttccctcactgcagtggttccttcagcatttggcttctggcatcctcctgagtcttttcctccaggtagtaaagccaccaggcttttcctgtggggttttccttctttggtgagtcagtgctcactaacaccaggtttggtgctcttatccaaacactcatttaaaatggaaatgagctttaagagaatgagacatctttggagagttggtcaacctgtttcctggggtctcctttgtacagatggatgctggttttcccagctcttcatcactcacttcccatcctcctcctggggatcttcctagggaagagacccacttctcagaaggaaggcagcttcctcttatcccagtgcctttgggtacagccttccatgcttcttcatggaaaaggctattgacgacactgtcagggggctttcaccagcacccccagattttgtgggggatgtatctgggctgcaccaaagctgatgttcctcacatggtggctgcctgctaccttcttggagaaaaggaaaaaataaaatgggcgtgcttgttctgaacttgcctgtcatctcgtccacgtccgtctcttggtcacagttggatcatgctgcctcagcgttcctgcagaaagacactgcttggaggcagggactcctgagactcacaggctccccagcacggccactggggacacaggccagtccaggggccccagccctttggttccctttctgacgatcactgtgggcctccctcaccacctatttcagtccttgctcttggtcatgcaggcactggtgcctgtggtcacccctactctgccctaagcaacagtcacccacccaccaaggctcatgcccctttccttggttcttagctgcagaatcagccaggccttctgctggggaaaggaatctaaggtgtccgacagtggtctctaggaggagaggctgcaatgggagttgttactgcagttcccgtggaatttggcattgacatctgattaggaggggccacattatttcagaatatttctatcgttcttctttgaatttgcaatggaggcacacaagggtgaggagagaggaggagaggagtctgctaactgctggcagggtttgcaggtgcaggtggggccaggtgggaggtgcccttgggctgcagggctcagcctagaaggcatcctcccctgcactgagccagctggcctagggcagggcaggtgaaggaggtccgacctccccacattcccttctcatggcagagagtgccagtatagaagtcacagtgctgttcaccttggcatttgtggttaggcgggcatgccctggctgctcaatgatgtcccatcagcattcagaccccacagctgtgtgcagaggaggggaaaggcctgtggcaaaggcagcaccctccagagcctggggagatgggcaccctgagcagcacattgcagggagcagagggagagggcggggtgagagcaggagggggatgcgtgccagagcacagctggagcgaggcagttagaagacaggggcagatggttaagagaagagggtaggccctgtttgcaggaggggcagggagatacttcctccagcaggctccgaggagagatccaacagcacatgtgcacaaggctttccgtgctgtgcgcttcagcagacaccacgcgctccagcgcagaaagtgttagggaggaaagcggctgcgtgctggccaaggaggggtataggaagtggggcagtgcgaaagcccaggagctgctctccctcctggatgttggcatcttacagggacctgtggtcatgctgccgagtcagctatgttccccctccccatgcgggccgtgctgctgtccctggcccccatcagagatgagcccttcagatctctctgccaccagggaggaagatgcagccaggcaggtgaatgtggccatgtgccaattaggaaaccaccctcctaaccccagtggcacactcaacaccacacacaggtgtgagcagggagagggctggactgcgggtggggccttgggagatgtgggtggggtctgggagatgtgggtggggtctgagaggtgtgggggagcccagagatgcagcaggagatagaagactcccagcagccctggattctccagagtgggggtctctgtggatatctacaaagactgagggttctgtagtccagtgagacagctgtcatttccttgtaaccagcagagatggcctctaaggtgagcagagttgagacaccataggtctcctcagggacaagggctggctggcagggcacctgtgtcccaccatggagctgctgctcaccccacagactgagccccttcacgcttgcaagtggacgtccctcctgcatgccgccacatggcccagcccagcccttccatccagcgtcttactggtgtaaggacagaaacctgctcctgtcactcaatttcaccaccgttctgacaccccagcagcctcacgggaggtgggagtggactctgcctcagggccctcggggacccatgtgcccagctgccctcctggtgccctgtgccgggcaccctccagtctggggctttctctgccacaggtctggccacgtctctttcctgtccaagctccagagctctcatccgtggcctatgcgtgcatgaagggactccgttccatccaatggtgggcattgagagatgccattggctcctgtgcagtcttctctgggggcccgagttgtccccgacgcccctcatggctgccccataggccccgccctcctccctcagctgcttcaaggagcaccctcattcttgatgactgccttggccagaggccactgtgttccatctttaaacaggggtcccaacaggggaatgaaaggaggcacccgaatggcctcagagtttaatctaagttcagcaaaagctaagttttaggcagcagtgagctttgctgtggcttcaagcacacgtttcttcttgagcatttgtgatgctgcctgtctgggcagaaggggtctccctgggatgtggccaagaaggtgcagacaccgctgggccatggtggagcctccctgctcagctgctggctgccacctgtgggtcgctcctggaccccggggtgaccagtgtggagcacccaggccgagtgactgtgcctcttggctgggtgggcctcctacaggagtgggtagcagggcgggtctgagaggggccagcagaggcacaggtgctctcagcctgacctcgggcaggtggcctggatcaggcaccacctgcaggcaggtgtgggcggggcctctccggggtgttgagctcaggtcttggggcagagtccaaggctggcggcccgtcccaccggccccctcgggcgcactgcccacagtcttcaggggctggcttgggctgttctctaagaaatccccccgtccttgtttctagctaataggctgcataattggacgccaagggaccaaaatcaatgaaattcgacagatgtctggagctcagatcaaaatcgccaacgccacggaagggtcctcagagcgtcagatcaccatcacggggaccccggccaacatcagccttgcccagtatctcatcaacgccaggtgagcatctcccaagggtctctgagagacgcccggaaagggacgcgccagccggcgttacatcacctggacggtcggggggtgggaggaggcacagtctgggccacactctgcctccccttctgtcccctctgctccaggctggatggtggggacaggatgggatggtgacagcctccatgtagacacggggccacctcactctcccgacctcccacccgaagcgtctccagggacaatcccggaggctagagaggaaggcaggtgctcctgtggcctcagacaggtggccagaactatcctggaaggcctgactcttgtccgctcagaggtctccagaaagaccaatgtttggggactttgctgttttgcctcctttttcattctcatggaaacgtgtagggacgggcaggacaggactctgcaggccgcttccttccatgggtccctgtgcacatgggagggtctgaagccacctgggtccctgtgactgcaccccactcggcctcaagccagtgccccacccccgccaagcacaccataccaccagtccccccgccaggcatgccgtaccaccagccccgccaggcacactgtaccaccagccccccagccaggcacgctgtaccaccagccccgccggcctctgatgtaaggaacatccgtcctctctccccaaggatgtcctactgcaagagccctgagctgggcttgtgggatgggacgggacgggatgggactggaggggaggagaagggaggggcctctaggtggacacagccctgcgtgggccctggaacccctgtcccggtgacccttctcttacctgcacgcccagtgagtgggtgagaggctgcctggagaggacgaggacaccccccgactttacccactgatgccccgctgggcttctgcctcgatccagagccaggttgggcctctttccatccctgtgccacaggcccatgggcaggaggctgggcaaagtgcagcattggcaaacccagggcgagcctggggatggggcttgtcagggaggttcccgcctgccagaccgcattactgacagccccactgggacccgtgcttggggccagatggctcttacccacatacacttactcctgtggcaaccaaagccccttctcagatgccaggtgtgaggctgggaaggccctgagcacccccaggggccgacccagggctgtgtagggggctccacatggggaaggcctcaagcccccatgcagggctggctcacacacctgacgtggtgatgggcatggcggggaccagggcggggaagaggcctgtgtgctctgctgtggtctccagctcaggacctcctgagctgaccgggatggcctgtcccagcgagcacagaggccacacagcccggcctcacgtctgcccactgatgagggcgttggttgtgaccgtctctccctctcctgcctttgtctgttccaggctgacgtccgaggtcaccgggatgggcacgctgtaatcctacccagcacccttcccccgcgtcacccacctgccagagcctaaggcccccggctctcgcactctgtacagcccaccttccctgcctcacagataccaatagagaggttttcttaattaacaaaaggacgtatgccatggagaaacacacccgcgcacacagctgctctctacagaggctgcaggctccgccgagtcccccctcagtgttattttatttatgacttacgctcccgtctgcccatgcaccggcatgcagtggtaattattttagaaatattgttccttggtgtcagcgtagctgtctgtcttaggagctgggtcggcgttccgacagcacttcctgtccgcccttctcctctgccatccagaaccgtccagaactgttgcctgagacccctcctctctcacacagccctgccatgctgactcggtttcccctcagagccattgttgtctgggctcgagtttctgccccaggttgtgtgctggaatcggggggtggctctcctgccacccatggggagcgccaggagaggagggtcatggaggatgttggggctctgaccccaggagtggggtggagggcggagcctgctgggggccctgccttcacagagatgccgcgtgctgggaaggctcttggggtcccctgagcgtcttccagggtggctggagagcacagacgcgccagggagccccctctgtgctcctcagagttcaataaatgtcgtggcccctcctcaccggctctggcttgtctctgcgccccccaatgcacccaggccccggcacttccttcccctggggagacattgccctgagcccaatgcttatcgagaagcctgggtttcttctcacacacagataccatttcattccccctttccacaacacacataagcacttctatttgtactttggcaaaactacttaaaatgacaaacacagaaacaccattcctgcccgggcaccaaaatgccagttcctaatttgtgagacttactcccttatagccgttatgggtaccagaggccatgcccggtgacccccagtgcttccacaggtggagcctatccgcctcacacctgcttggggacagtccacgtggctcacttggcagcctgtgctcaccttaagaagcctggctctgcccctgctcaatcctgaagccctgggtgtgactcaggccctcccctcaggtgattaatccctaacccaggcccagggaatggggggagcccccaggtgatttatcaggaaggacaagacccgggatggatggggagccaggcaccggggagggcaggactcgggggctcctgtcccagctctgcaggctcagggcaccacctccacacctggatcctggtgttcacgggatcttctagaaggtggtgggcctgggatgtgtggacagacatggctcactgacccctcactggaggtgtctgtcaagagtcagcagttccaggaggatgggagtctggccagaacctggggagcctccaggggcccaggacagcctgccccaggctcctagccagccacaaggcacccgctcacaggagccccttcctgcctgatcaggcagaagccggcctgtttcccagactccacctggcctgcctcagccacctggcccgtgtgccggcctggagggccccgactcagcctcctggacacactccttgcccaccctctgcccctgggaggaggctcacaggagtgagcccagtgtggcacgtgggcacacatgctggcaccttaggactggggttcccgccggtggggcccagacaccaggatgcggaagacacaggccttcctcagcacccgtgtcagtggagatggtcagtcaacagcgtgggtacaactgacaatgacagacgccgtggaaatgagacaccacgagaagagaggaatcaaaatgggatgatcatggaaggatccctagaaagtgcaggctgggcaagacctaagaaggtaagcggttagttgctcactcacctggaggaagaacagcaggcaatggagcactcctggtggtggggggcactgcaggtagagggagcactctgggtagagggagcactccaggtggggcaaaaactccaggtggaggtggggagcactccaggtgggggagcactccagatgcggaacacttcaggtggggggagcactccagatgaacacttcaggtggggggagcactccagatgaacacttcaggtggggggagcactccaggtgaggaacacttcaggtggggggagcactccaggtgaggaacacttcaggtggggggagcactccaggtgaggaacacctcaggtgcggggagcactccagatgaggaacacttcaggtggggggagcaccccaggtgaggaacacttcaggtggggggagcactccaggtgaggaacacttcaggtggggggagcatactagatgtggggagcacatcaggtgcaggggcagccagagctggggtggaagggagcccagagcaggtgaggaggggagacgggggagctggagtagcagggtgggggttgtgcagaactctcagcccctcaggactcgggaggacagaggcacagcagaatccagagccccagctgggcgtgagggggcctgagtggggactcagagccagggaccaggctccaaaccagagctggaggcatcctgtgactcagggcagctcacagggcagtgccatgagcattgattgagcacctgtgtgggcctcacaggaggccctggactctcctgtgatgggaggcgcgcaaagtggcaattctcagttctaaggaatcaagtgagcatgagcctcacagccctgcagatcagcggttcccatcctgcgccttcttacacctgcagcgacccagctcccagtgccccttccccacagtgtgagtcccagttccacccacaaccacatggtcaaggcctcgggctgaggaaacgtgcaagcttagaacaagggacactggggcaccccagccccggtgggcgcgcatcatgggcgtgggaaatgtggctgttagcttctggaagcctatggccgagtctccatctagcctgggcactggcacctggcccagggccacagggtcacaccctgtcacttacagcgagtgtccccaggtcgccagacatccccgcacctcggtgtcccgtggacacagcaggatctatgccccttgcttcctcaaggacagtggggtgtctgtgactgtcaggaaaggggcaggaattggctgactccagtggcgtaaggtagatgctcacagtaattggaaaataattggacattctcattaagcagcacatgtacccagggctttgtcagaagggcgacatctgagtccctcagttgctgagactgggaaatgaacagacaacagaaatgggttgctcacaattccggaggcaaggatgtccgagatggaggcgctgggttctgtgtctggtgagggctgctctctgcttccaagggtgccttgttaccgtgacctcgagcggaggaatactgcgtcctctgcatcctcgcggagcaggccggagggctcccttcagcctcctgtggaagagcattggccacctcatcacctcacagaaggcccacctcttactactgctgcgttggggattacgtttcaacatgaattttcagtggcctgcatgcaaggctacacaggcaatagcttgtgaccatggtggacagaccccacagaggcccagggacccccacctcagcgttggaagaccccctccctggggctgtgggaggggtctatgagttgcttctgacctgtaggatgtggcaaggggccaggatgtcactccctggcactgcgtaaggctccagctcccctgctggcactggtgaagcaagcagccattttggggctgccctagaatggccgcggcgactctctgcctctggaggtggactgcaggcacctctccgagcgagcttgggagccccagctgacaaccagccaacacctgaagcgctcactcctgcagctgcaaggaaatgaattctgccaacaacctgggtgggcccagaagtgggttctgccccagtccagcctctgcacgggaatgtgaccaccggctccccgatggcagcctgggagaccctgaagaacagaagccagctgagctgagccgactcctgacccaggaaccgtgagttaatacctgggtgccgcttcggcttctatgccttcggtcatttgatacacggctgcaaaagtaaggcagtggccagacacgtcactggcactccctcctgcttctgccttctgtaagctcgtgggcgggttgaggtcaatgggtgctcctggggtggcaggcatccccagcaggctgggcctgtccccagaggctccttggcccgtgtgacctcggatcaacacatccccctggcatggggctgtccatctgagagcctgcttggcacgagaaagtctctggtgttgaacgccattttcacagtgaacaatgagccggcattcgtcctagaataggcagtttgggtcttgtgaaaatttgaccatttgcaagtttttccgaacgttctgtttgagaagcattgcactgtccattgttgacatctctgaaaatcttactgggaccatgattttgtaaaatcaagctgcctcgccaacagctccctgtcacgggccacaggaaaagacgctgtccttacaaagtcgaattcatccaggcggcccttggatggcacagcggagcttctcttgctgttttaactgtatcttctttccgtcctttggtttccagaatccaagtcttctttcgtctcatcattttcttttccttctttgctgtcattataattatccgtattttcttggtaacaactgccaatcacaaatgattcttctctgtattgttgtggtcgtgaccctggagcttccggcgtccagtgtcggcagcagagttttgctgtgttttgctctgtttttaacgtttttaacgccccctgattttgcttcgtacatttagcctccagtcaattccttcctgctcatcgagtctgaatcatggcatgaggaataattctgaaacatagatgctactatatattatgtgtgtgtgtgtgtaaatccatatgtaagagcaattcagatgggttttttgttgttgtttgtttgtttgtttgtttgagatggagttttgctcctgttgcccaggctggagtgcagtggcatgacctcagtttgctgcaacctccgcctcccgggttcaagcaattctcctgcctcagcctcctgagtagctgggattacaggtgcccgccaccacggctgtctaatttttgtatttttagtagagacggggttttaccacgttggcaaggctggtcttgaactcctgacctcgtgatccacctgcctcggcttcccaaagtgctgggattacaggcgtgagccaccatgcctgtgctcagatggggttttaaactccaactgcctaatagtactccagttacataccactgtattcacatatgtagggatgtggggagggagctttgtcactggagtattgatatttgtctcttcatgccatttggcgtgccgtgcatgagtgcagatttgccgccatttcatccggaactgccactgtgtatgaggacaagacacagcagacgcagcaggtgtaccgagctgtactgagcccgtggtcccagcagggtgtgtctgctccgtggagctgcaggtgtggccctccccacccactgcctgtgtgatggtgtgctcagcactaccggcccattccccggggagagggttctcctgtggccacagtgggaattccattgcttgctgacagaggcacatggctgaggactgagggaacttcccaccaaccggctttcgtgctgaaccgtttgaacttcattctcctccacgacccgcatatcctaaagccggcaaggccgctctttgcctatctcctgaacagaggttgggctctggatgatccatcttcctccggagactctttgtccaacccgctggctcgcattgggatggatcaacttcatctcactgaagttgggtaggactccatgaggcttactctgctcccaagtcacccccgcttagggcacagtgcccagggctgcctctgggtgtccactggtccttcctcctgggtgggttttgaacttgacttgtcgtctgcccagcaccattagaccagagctctgtccagctttgagcagttttctgctggtcttcgtagccttctgttgcatgaggttcacgagctgcagatgcctggctgagcgagccagtggtacatggtactccgggtccgccgccgcacctcacgggcctctcctctctccaggaccctagcccctctcctgaggctgctgcagaagccctcaagcaccacaacagattttttaaaattcagcttttgaaattgtacttggtgggaatgtttgtctaagtaaacgccgtcacagaagtgctggcccatgaactcgaaggctttcaaagaatctcatggttgatgtaaaaatctcacgaggcaggagctttcattttttaaaattaatgtaatagatattctaatacttagtagacgaataaactgttctcaggaactgtggcgacatccagtcagtggtcacctcttgttcctggtggacatcacttagcaccagtgccggcagttttataaaacagaggataacgtcgcgggactggccggcctcagaattgctcagggtttggactcatggaaatccaaggcaccctgcagctcagccatgggagttcacctccaactctgaggatctgagggagggagggaggccctctccggggaccaatatttgcctccacgtggctaaggccagtgatgcaggctgtgcggtgtgttgacggactcggggaaggtggaggaaggaggcctgggggaggggctcctcttacccggagttgcatgggtggatttcaggttgacgggggcggggctgcatttttaggtgtttctactgataagaccaagggtagttgggaaaaagcccagcacgtcaacagctcgacagagagcagctccctgaggtcgccaccagcttcccgtggatgttgatgatctcatgtcctcagtcaaccccggaaccacagaagagcacagcgggagacctggggaaaggcagactccaccgggaggtcgggaagcacagttctcagccctgcccgggcccccgtccatcctgctttggaagagcacctggactctaggatgaggagacgaggcagcgtggagactcaccgcctccggaggacagggagggaggagccggtcgccgcaggcacggcctggacgtgctgggagccgcacttggtgttggccgttgggctgatgcttgtcaggagcccaggacaagctccgtggcttacctgggatgatctcatgtttctctgaggtaaaggttcatgatgagttttcctgcaccatgaaatacgtcaaataacaatttccactttcaatcctcgaacgcacaacgctataaaaatatataaaaactactttgacaggagtaaaaaacgtcatgctaaaaggattaagaagaggtttgttggttgatgaaaggacgtgtggctgtggcgagacctgaaacacaccccacgtgggcgtgtgcacttcgcccacttcatgccaagtgccggctgctttgtcggcttcgttcagcgtcacccagagaataacttctctttacctcccatggggattgtcttctaatttggagaagttggatatacctctattaagtgcagagctacacagtaataaaaaacacactctaggacattttgagaaaagcaaatgttccagcagaagcatctgggccgggcgcggtggctcatgcctgtcatcccagcactttgggaggccaaggtgggcggatcccttgagcccaggaattggagaccagcctggccgacgtggcaaaaccccgtctctactaaaaatacaaaaattagctgggcgtggtggcgcatgccagtagtcccagctgctctcgaggctgaggaggtgggaggatcgcttgagcccaggaggttgaggctgcagtgagccaagatcgcgccactgcactccagcccgggcgacagagaccctgtctcaaaaaaaaagaaaaagcagcgcctggctgtgaggattcccgaaggcagcaccacccctgagcagacccgtctgcccctccgaccgtcatgcaccagcccctcccggtgccctgtgtcgtcacatgatgcttgttgaggagcccaggcgtccacccccgcgcctcctggcatgacgccgacctcactccttggcccccggaattcccacaggtgggaggtggtcacagaagctttgtcgattccgttctctttttggcaaggacacttccaggtgcctctgcacgggcactgacccacaggtgggcacagggccatgctcccagcctgggcctgacgggccggggtgcaaccaccgccagcatctaccatgctgtgagtgggcggcggtgacgcacccacctgggaatggcagcgagtgcccggagtgccggattccccccgagctttcacgtctaaggattacgaggaagacctggactacgtgcctttatgagatgcctcctgtgggtccctgaggccgtcaggtgccacctcacccctgcgtgtcctgcggaaactgtgacctgtgactccggggcggggtggccttgggggcaccagcaagtgaagggtgcaccagggcactgggttggggaccttgcccaggacaacaggcagggcttgtccaaaagcccctggccctgttccaacccccaggagggttcgagccctttcgagggtcccatgctgtgtccagagcagccatgcacccaccttctccaccacaacacagccaccctccttctccagagtggccttttacaaagcacaattaccattacctcctgagtgaaacctgtcctcggggcggagactgccccaggcctggcctcgtacacacacccctcctgcccgcctccctccctccagccctgttggcactgccccgtggcagcctcccgcagcggccgcctccggctctgcctcctccagggtgctgtggctcctcctcaagggagggcggctgggggaggagacgcctcagtacagaaaagctcgcagctgttgttgggtctgatcccacctctcctgctgtttcctgccaggacagatgaggagttagctctccacttcccaccatgcctgcccctccttcacaatctttgttaattatattcttactctgtttccatattgaataactcacttaaattcttaccataaaagatgacaaagatacacaaaagtacagagaacctaaatacctgatataatgcataattgtaagacacacaattatgtttcttcgtcaagaaacagaaaatacccagcccctgactcagcttctagaagtaaccgggccctccccgaggtgtagcctgggcctgaacacacctgccccgggggcagagctgctttctctccatcccctctaaccgcccttcacagcatcctgaagattaaggctccctccagaggtgggaggtggtctgggcgtccctccccaggcagcaccaggggctaaacctctcttggagttcaccctgtcttccccatgggcacctagcggggttcctggaggcggagtctgcaaaaagatggaacttccctctgtctgcggctcccagggactccacacttccctgaagctcacagccttcagcagtttgttataaaatttccaattcaaccatcttgccctccgttgtggccttcaggtaagaaaatgccaggaccctgcaggtgcctgtctctgggtttcaggtaagaaaatgccaggaccctgcagctgtctgtctctggatttcgggctagagatttgtcctgtgacctcggttctctgatgggctcaagaaaagttgttaatctgcagtttgcacagcttgttactgaatggaactggggtcagcctgcccagcacagaaaacccagccccgacatggggatttgcagcgagagaaagcgaggcgttcagtgcagggcaccaggcaaggagaaccgggcaacccgtgcttaagactggcactctctgacggcttccggctcagggttactaaaagcaggaggcagaggtcacgggcaaagccagagatcaatacctggggctgcccattggcttcccctaaagggtgggacgtctcgaagccgggggctacaggtcatattctctgattcgtcattggttaaggaagggaaggaaactttacctgaaaacccggggccatcagaaaggaatgttagctctggcccatgggcgtgacttcctccaggcccctccggaggaaactgaggacagagaatggtggtcccagttcagtcctcagcacccccaccccacccgatgtctgtgagtgacgggatcttttgtttctctggggagccgagcattcggtctctcacctccttggctgttgctttaagctgttctgaccttcttgcttgtcacgttgctcactgactttttttttaattttattatcattatactttaagttctagggcacatgtgcacaacgtgcagttttgttacctatgtatacatgtgccgtgttggtgcgctgcacccattaactcgtcatttagcactaggtatatctcctaatgctatccctcccccctccccccaccccacaacaggccccggtgtgtgatgttccccttcctgtgtccatcactgttcaattcccacctatgagtgagaacatgctgtgtttggttttttgtccttgcgatagtttgctgagaatgatggtttccagcttcatccatgtccctacaaaggacatgaactcatcattttttatggctgcgtagtattccatggtgttttttaaagccagcgacgtgcctggaatttcccccgaagggactcaagatttccctcgacttctgtgtttggggccctgctccatctcgagttttctcttgttactgtactgttccttccagctcgacacatctccgggctgaatcccaagctattgatttttaatttcatcttgtatctggcaagtttgctaaattgtctttggctggtgattctgatggtttctgtggctggattatgtcacctgcagatgacagccgtctctcttcccttccaatctttgcatttctttctttctctttctacacttagccgtggtaggaataacgctcaaaatcctaaggaaattgaacactcaaaggattcttagcaaagcagttttacttctgcgcagaggggtgcctccttggccagtcgccatgagagtacatctgaacaaaggggcacgagagcctttcttcctgccacaagtcctgcccctgcccccgtgccctttccccatcggccggggtcgggttgtacaatctaatcccggttggctgaacatttgaatttttttagataaggtgagcacgtaaaagagaggaaaggggaaggggtgtctgtagtgagctagaaagttagtcctctttccaaataaggacaggaatgtgagctggtactgataatgcctggtactgtggcatgcctgggcatctaacaaaggcagaaaggaaaaaggaaaaaaccgtgtgaggggtactctgaattaaaagattgatcaggctatttgaagagaaacctcgccatatcccacagccaggacatccagtaataaaacttgaaattaggcaactttccctctgtccttactttgctaagagtttgtatcactaatgggtattgaaccttgtgggatgtgctttctgcattggccgagatgtttttctccgtttagcctgtgactatggtgggctacacgacagacctcccaatgcatgtgcgtcacattcacagacaagcgttgcttgatcacgtgtggttttaaaagcatacgctgttgggtttggcaagctaatattttatttaggatatttcccttcacgggcctgctatttgtttcattgttttgtgccaagcgcaccgggaatggtaccgaggcaggccaggtctcactcacgcaggcccccgggaacaactgtttccacaccgactgagggatgaggataaatattaaaagctgatagagccagcgcccttatgcaaaggctggactgtaaaagacgtcccctgagagttttgcccaggcctctccagggccttgaagcatgacaagataatgaaggaattcttaacaggacctgtttaggattaaacaagttttactggggtctgaagaaactccccagacctccacaaacaagcttccttggaaactaaaggagctccctcaacctccgtgatttagcagagggcaagataagggtgatcaccccagcacctggacccagttagattcagtaaatccactgaggctccagaggaaggtcttcaggactcaggccttagtgatagatgagaagttcatcacttatgtctttggatgagtgcacacttacacgcagacacagagcttagaaggcacacaagctctggaaaacgttggtctggcgataatttccaggccttctccctgtaaccggttaactcactcctctcccagttcatctgcgtctcgttactgggccgagagaacaagcagccccaccctcggtttggtctgggaacagcacccagcagctgagcaggcaaaagctcggattatctttagctggttttggaattggcttataccagccttttgccccttctctaagttctggcttgagccagtttgtctaagttaagcttgagcagttccttgagtttggcagagtctacctgggaagcctggggcaggcgcgcgctggcctcttccggggtcagctctggcattttgttttttcttgaaacgatctgggaattcaaactttctgaatgcagctgctcataacgttcttgtgatttctttgatccctctgtctgcagttatttctgtattttcagtctctatttttatttatattttcctctttttttgctcaatattgtcaaaatcaatatatcttttcaaagtatgatccttggtttttgctactcatattattttatttttctctatttcattgatttctgccagtatctttgtcatttccctttttcttattactttgggatcattttgttacattgctgttttttccaattatttcatttgtatgattagttctatttcttttcttttttcttttttttttttttttgaaagaaggtcttgctctgttccccaggctggagtgcagtggtgctgtcatagctcactgaagcctcaaactcctagactcaagcaaccctcccacctcagcctcttaagtagctgggactacaagtgctgttagaaataccaaaattgttcgaaatagataatcggtgccgcgaagaaaagtcagcacagacacaaaagatctctcagcaaggccatctttactttctgcagaaagggtgctcagtcacagatggaatgatcgcgagaggtcacctaagcaaaggaaaggcagacataattaacccttaagcatttgggtcgtccttactgttgtgtcctgcatccattggctggagctgggcctcacagtcttaaactgatacctgatttgctaataacctgaaactttcctaaataggtaattaggaaaggtctaaggaagcaataacatttccaaataaggaaggggcataggctgtgagctggaacgtgtctgtgagcatgtccaacaattacatgggatagggcttaacaaagagttattagcacaaagcaaggagaattgaagaaagtctttaaaagaaactattatttctaacacttatgatgtattctttaacaagaaggggaaatttgaagaggaaaacttttactctctacaagcgtgcaccaccacacccagctaatttattttttcatttattgtagaagcagggtcttgctttgttgcccgggttggtctgcaattcctaggctcaagcgatcctccacctcggcctcctgtagtcacctgggattacaagtgtgagcccccacgcccgtcctattgaaaatgtatttatgactgtatatttctaggtactcttaactgtgtcctgtgacttttgacatacggtattatcattattattcaattctaaagaggtttttcattccctcaagagttctacttacccaaaggttactagtaaaatgttattaaatatccaaacacatgagattctctcaggtatcctttgaatattcatttccaaatgttttgcatcatggtacgaattcataatctccatgacacggatcctttggggtttactgaggcatcttttatgacctaatccaatggtctctttttgtaagtcttccacgtctgcttgagtagaagtgtattctctgcctgccacccgctctatgtggatctaatagctggtgactgcgttgtcaagtcttgaacagctttgatgctttttgtctgatgtgatctatgtagaaggcagaatcatggcccccaaaagatgtgcaaatcctaaaccccagaacccatgaatacatcatattccatagcaagggggtattaatgttgccaattaattaaggtttctactcagttgacatgaaaataaagaggtaactctggcttatccaggtgggtgcaatttaattacaaacgcttaaatggggaggtcaggggcagagggatgatgtcacaaacacacccatgtgtgcttggtgcaaaacagtaaaacaaacagcaagaaggtccatgaaggaaagatcgcctctgtcagtgggagtaatgagagtggctgatggacaggtgtgttaggctgtttgcactgctataaagaaatacctggggttgggtaatttataaagaaaagaggtttatttggctcacggttttgtaggctacacaagcatggccccagtgtctgcttctggggaagccttgggaagtgatagtcattgcagaaagtggccatggaagcaggcacatcccatggcaagaacaggagcaagggacagagtgggcagaggagccaggctcctttaaacaaccagctctcatgggaactgagtgagaacgtgctcattgccaagaagatggctctaggctattcatgagacatccaccccgtgatccaatacctccccccggggcccacctgcaacactgtgaaacacattttcacatgagatttggaggagacaaaacctccaaaccatatcaagtggcacactcacaagaaaacgtgtcagtggccaagacgatttgcaatgaggactggatgaggctgggacccaactctctgtctctgacattcctgctcatctcatggacagaggcactgattgttctagaccatctttccaagggtgttgttttgtgacagccttgataatatgtccttccagatcaaagggcaggttgcttacaccctaatcctgaaggtaaagacgttttctccctccaaagcaaagagcaggcatgcttactgtccattataaaagattcacgttccctgagctcagggttcctctcctgcagtgcagtccacggtgtgtgcagatgccactgggcccactctgtgtcactgtttgggaaacggggctcggaaactggtgtgaaaagtatgctgatactctgttagaaaaaaatgccaacattctggctactgatattgctgtgagtaataaagtacttcatccttgaaaaaccaaaaggcccagttaagataaggtggacagaaaaacacctaaacaaaggtaaggcttgctatggagagtcaagccaacactgcctccagtgtaagagtttctagtgacttcgttccccttcttttcccaatgcaaagacagagatgccctttaaatggaggtttcagctgggcggtggctcactcctgtaatcccagcactttgagaggctgaggcaggcagatcacttgagttcaggagttggagaccagcctgggcaacatagtgagagcccatctctacaaaaaatacaaacattagccaggcgtggtgttgcatacctgtagcccgagctacttgggaggctgaggtgggagtattgattgactccaagaattcaagctgcagtcatctgcaatcacaccactgcactccagcctgggtgacagagtgagaccctgtctccaaaaacaaaaacaaaagaaaagaaatgaagtttcatttattgatgtaaattgttcttacaaagcatttcaaaataaccagctgaaaacagtcctatgccagaaggcatctttgagaagctaagttggctgcatcaccacttttccaacccagctcgaggttttggcttgatcactgagttagggcggagcccactgcagaatggggcaagcatttcctggactcagcacgctcgcttccaatcttgccttatagtcagagactggttcattttttatttttgtttgttttcaagattgaataacagatcagccagggcttttttcacaagcaaaaaaaaaagggagtttgggggcatagtacagatcacaacgagacagagctggacagagtgggagagcacagagtcagcaggagctggagaagaatttcgttgaccaagagattcccatgggagaagcaggaccaaatagagaaaacagaaaggactaattcttaaaaaatgtgtttttgaaaatttccaagtgtcgtttggacagattcagatacaggaaacttttgaacttcatttgaaagtccagtatttgaaattggactacttctgtgtccaccacagaagtattctttttcctcttaagaattagtgaatgactgtctggaactcaagcccatgagagcttcctctactgggaaaacagactcagccagagggagtgggcccatcagatggctcgtacaaaagtggacaatttcttttccaatggtcagaatggatttgttacaatgccgagaaaagtgatgttagagtgaagtctgtcaaaaccatcaccctaggagagcatcataacactttcccaaaaagtaaaaattcataactccagggaagaaaaatgagaatcactcatttttctaccatccaaagataaccagtgctgatactttgttaaatttcctttctgggggtccttttctgtttttttgttctgtttcattctgacaaaacaaaacaaaacactacctcacaccctataccaaaaaaaagtcaattccagatggattttagatctgcatgtcaaaagtaagacaatgatcttctagaagtaaacattggagaagagcttccagagcttgcagtgggcaaagagtgataccgaggtcacaaaaccactaaccataaacgaagttgataaacaactataaaataaagaactagaaagacaaaatattcacagtacacttgtctgacacagagcctcattctagaacgtgcaaataagaagacagcccaagagaccaatgagaaaaagacttgctcagactcttcagaagacatgagaaatcagtgggcaacaagcatacacaaaggtgttcgacctcattaccaacaaacatgcaaatttaaaccacagcgtggaactgctgcctggccgacagacagctgaaatgaaacaggcagagatggcctgtggacagaggatgtggagcaaatagaacttccaatgatggctgctggaagtgaatagctcctctggaagatgagtggtgtctcctgaagctgagtatctgcgtgtctgtgaccttgtagtttctacttccagatgtggtcaagagaactgtgaatgtgtgtgcaccagaaacatccactgggacattcatagcacccttctcatgacatctccactccacaggccacccaaaatgagtgagagagtaaaatgtggagtgtctgcgcactgggatgctccacagcaatgggaatgaacagcctgctcagacacacatcaacttgggttgcctcagggaccttacgccaagcaggagatgccagacacagagtccatcctgagagagtctgttcctgtccaagctcagaaacacaggaagccacctgtgctgtagcagcacgcggagatgcatcctttctggtccaccccacggccctcattgcagtcagggatcctctcccagaaagtccctgctgccagcccctgcccttccagggtgcactctggacgttgcttccgtgactggtctcaacacctctctccactgctcaggcagcggccttggctctgggagcctggaatgtgcaggaaccagctggccttggagtgctgcagactccaaggtgcgtcacctgcagttctgatccctgttctggatgcaacccaggaccctgcccttgccaagcatcccaggaacactggcactgatggctgaggctacatccaagacagacggtgaggaaggccccaaggaaagggccgtgtgggacacattgtccttcccaagatgatgagtctgagcctggcaggggaggcactgggagggcctgttgtgggcagttcattcaatggacacagggtggcaccgctctgtgtcctctaatgaccattagacacctctaaccatcacatgatgtgcagctcagcttttccaagggcctggaagtgaatatttcaggagataacgtgaataacccactgtattcatctgttctcaggctgctaataaagacatacccgagactgggtaatttataacagaaaagaggtttaatggactcacagttccacatggctgtgaggcctcacaatcatggcagaaggcaaaggtggagcaaaggcacatcttacatggtggcaggcaagagaacctgtgcagaggaactgccctttataaaaccatcagatcttatgagacttatgcactatcacgagaaccatactggaaacactcaccccccataattcaattacctcccactgagtcactcccacaacgtggggattatgggagatacaattcaagatgagatttgggtggggacacagccaaactatatcattccactcctgaccctgctcacatcctcacatttcaaagccaatcatgccttcccatcagtctcccaaagtcttaacttatttcagcattaacttaaaagtccacagtccaaagtctcatctgagacaaagcaagtccaaaatctattagggcagtcattaaaccttaaaattccaaaataatctcctttgactccatttctcacatccaggtcatgctgatgaaagaggtgggtttccatggtcttgcgcagctccaaccctgtggctttgcagggtacagcctccctcctggctgctttcatgggctggcattgagtgtctgtgacttttccaggttcatggtgcaagctgtcagtggatctaccattctggggtctggaggatgatggccctcttctcacactaggcagtgccccagtggggactctgtgtgggggctctgaccccacatttcccttccacactgcccaagcagaggttctgcatgagggctctgccgctgcagcactcctctgcctggacatctaggcatttccatacgtcctctgaaatgtaggcagaggttcccaaaccttaattcttgtctcccgtgcacccaacaccatgtggaagctgccaaggctgggggcttgcaccctctgaagcaatggcctgagctgtaccttgtccccttttagccatggctggagttgaagcagctgggacccagggcaacatgtcccaaggctgcacactgcaggggagccctgggcccagtccatgaatgcatttttccctcctaggcctctgggcctgtgatgggaggggctaccacaaaggtctctgacatgccctggagatattctccccattgtcttggcgattaacatttggctcctcattacttatgcaaatttctgcagctggcttgaatttttccccagaaaatgggtttttcttttctaccatagtcaggctgtaaattttccaaactttaatgctctgtcatctctcaaacactttgctgcttagaaaattcttctgccaaataccctaaatcatctctcttaagttcaaagttccacagacctctagagcagcagcaaagtgccgccagtctctttgctaaagcacagcaagagttgcctttgctccagttcccgataagttcctcatctcatctccatctgagaccaccacagcctggagaccaccttattgtccatgtcagtgtcagcattttggtcaaagccattcaacaagtcaccaggaagttcctaactttcccacattttcctgtcttcttctgagccctccaaactgttccaacctctgcctgtaacccagttccaaagtcacttccacatttttgggtatccttacagcagcacccccctctctgcagtaccaatttactgtattagtccattcctatgctgctaataaagacatacccgagactgggtaatttataacagaaaagaggtttaatggactcactgttccacatggctggggaggcctcacaatcatggcagaaggcaaaggaggagcaaaggcacatcttacatggtggcaggtaggagagcctgtgcagaggaactgccctttataaaaccatcagatctcatgagacttattcactattgatgcaggactttgctcctagttcagctaaatctgggttcttgtgtcatgaccaggacaagttaggcatgcagacgtattgaagggtgaggggaatggaatttattgggcaaaaacaaaaaaaggaaaaaaactctcagcaaagcaggaggggatccttccaggaggctcccatcttgcagattgagttccaggccaccacacaggagctgaagaggccaggctcctccctcttgcacaagatgtgaatttcctgtggctccaccccattctcccagtgcacaggcagattggagattctccggggaccctccccattatctgcctcctgtgtctatcactatcacggtaacagcacaggaaaaatccgccctcatgattcaattacctcccactgggtccttcccacaatacatgagaattgtgggagcaacaattcaagatgagatttgggtggggacacagcccaaccatatcacccacttcctgtggcactttgtgtcttccacttgattttctcaaccatccaccagaatagacactgcatccccattttacaggtgggtaaactgtggcccagagacaccacagctttcctggggattacacacaagtatatactggagccagggctagaggccagccctctgacttcactgacctacttttcatatacttttcatcagaggctctccctacaggatagttttacaaatgctaataaagaaaggttgttttccatttaaataattttcaacagctaaaacgcagagctctccatttaaaacaacaacagaggagactacttaggaatgtgtaacaagaaatgtgcaaatcttatatgagaaaaccttaaaacactctggaagacacgaggatgaggtcattaaatggatggatgcccttgctcttggataggatgactccacaccattgaacgttttccacacacactttataaatgtagtgcaatcccagtaaaaacaccaacttttctattgatgtagacaaatagatactaaaattcatatggaaaaacaaacaagcaagaacagccaggaaacagaaaaaaactccctacaagggggctggtggagaagctgcagcctacattagctctgtgacggaaacggtgagacaccagtgcacagagaacaggccagtggagcagaacagaaagctcagaataaaacagggcaccaagcacttatggaaatttatgtttctaaataaagatggtgatatgatttggatctgtgtccccaccaaatctcatgtcaaattgtaagccccagtgtttgaggtgactggacaatgggggcggggttctcacgaatggtttagcgccatcccctcagcgttgttttcgtgatagtgagtgagttatgagatctggttgttttaaagtgtgtggcctctcccccatctctctcttcctcctgctccggccatggaagatgtgcctgcgtccctttcgccttccactgtgattgtaaatttcctgcggcctccccagaagcagaagccaccatgcttcctctatagcctgtggaaccatgagccaattaaatctcttttcttcataaattactcagttatgggcatttctttatagcagtgtgagaatggactaataccgaaaattggtaccaagaagtggggcattgctataaagatacatgaaaatgtggaagcagctttgcggaagcagctttggaactgggtaacaggcagaaattggaagagtgtgaagggctcaaaagaagataggaagatgtggcaaaattcggaacttcctagagatttgttaaatttttgtgaccaaaatgctgatagtgatacagacagtgaagtccaggctgagaaggtctcagatggagatgaggaactcgctgggaactggagcaaaggccacttttgctatgctttaacaaagaaactggcagcattgtgcccctgccctagagatctgtggaattttgaacttgagggagatgattttgggtatctggtggaagaaatttctaagcagcaaagcattcaagatgtggcctgggtgcttctaactgtctatgctcagatgtgtgagcaaagaaatgacctaaaacttgaatttatatttaaaagggaagcagaacataaaagtttggaaaatttgcagcctggccctgtggtaggaaagaaaagcctattttcagggctggaatgcaagcaagctgcagaaatttgcataagtaaagagaagccaagtactaatatccaagacagtggggagaaggtctccaaggcatttcagagacctttgcagcagcccctcccatcacaggcctggaggcctaggtgggaagaatggtttcatgggccaagtccaaggccccaacaccatgggacactgctccctgcatccctgccatttcagctccagctgtggctgaaaggggcccagttacagctcaggctgttgcttcagagaatgtaagccataatccttggtggcttccacgtggtgttaagcctgcagctgcacacagtgcaagagttaaggcttgggagcctctgcctagatttcagaggatgtatgaaaaagcctgcgtctccaggcagaagcctgctgcaagggtgaagccttgtggacaatctctattcgggcagtgtggaggggaaatgtggggctggagcccccacacagagtccccactggggcactgcctagtgaggctgtaagaagagggccaccattctccagaccccagaatggtagatccactgacagcttgcaccatatgcttggaaaagccacaagcacttaacaccagcccttgagagcagctgtgggggctgaatcctgcaaagtcacaggggtgaagctgtccaaggccttgggagctcacccgtttcaccagtgtgccctggatgtgagacatgaagtcaaaggagattattttggagctttaagttttaacaactgccctactggatttcggacttgcagggggcctatagcccctttcttttggccacttttccccctttggaataggagtatttgcccaatgcttgtatccccattgtatcttggaagtaactaacttgttttttattttacaggctcatagatggaagggttgtcttagatgagactttggactttgaacttttgagtcaatgctggaatgagttaggactttaggggactgttgagaagggatgattgtattttgcaatgtgagaaggacatgagatttgaaggggccaggggcagaatgataaggtttggatctgtgtccccaccaaatctcatatcgaattgtaatccccagtgttggagatgaggcctggtgggagatgattggatcatgggggtgcatttctcatgaatgggttagtaccatccccttggtgctgttctcatgagagtgagtgagtgagttatcatgagatctggttgtttgaaagtgtatggcccctcttgcatctctctctccctcctgctccaggaacataagatgtgcctgcattccttttgcctcctgctgtgattgtaagtttcctgaggccttccagaagcagaaactgctatccttcctgtagagcctgcatatgtgagcccattaacttctttttaaataaattacccagttatgggtatttctttttttcttttcctttttttatttttattttttttttagatggaggtttgcttttattgcccaggctggagtacagtggggcaatctcggctcaccatgacctccgcctcccgggttcaagtgactctcctgcctcagcctccccagtagctgggattacaggcgcccaccaccatgcccagctaattttttgtatttttagtagagatggggtttcaccatgttgaccaggctgatcttgaactcctgacctcaggtgatcagcccacctcagcctcccaaagtgctgggattacaggcatgagccactgcacccagccagttatgggtatttttttctacagcaatgcgagaatggactaatatagatggcatctcaaataattaaagcaaagttggactttttaataaatggtgctgggacaactcagtagctatttggaaaaagttaaaatgggttccatactgtggcattagatgggtatatattggtgttatgatatatataaatgggtatatattggtgttatcacatatataaatgggttttcatccatggttcctggctcatgcctcccctacccctcgttagtcttttgttacaatgtcgggtgtgttgggccacaggggaggcctctcaccttctcctgtccttcactctaacgtccccaccttgctgactgtgggtcttaagaccctcacctgagagggtcccaccctagaccctggggaaaggagtgttgatgtcatgaagcttctataaaagcccacgagaacagtgttcagtgagcttttggagttgaatacatggaaggtcctggagggtgctgcccggggaggacatggaagcaacaagcccctcccccttccctccccctcggcctcttcatgcgtatcctttgcaacatcctttataataagctggtaatgtacataagtgtttccctgggttctgtgagccactccagcaaattaatcaaactccagctggaagctggttggtcagaggctccagaggcccacacttgccactggtgggaaagagggagtggtcttggggacggaccccttacactgtaggaggtgaaactagctctgggcaggcagcgttggaactgaattagaggtgcccgctgcctgatgtgtggggaaacctctgcacatttggttgcagaagtcttcttccatgttgacggttgttgtggtgtgagagcagaggagaaacagggttagagtttccccggcacacacacctcacaccatacacaagaatacaccccagtggatttgggatctgaatgtaaaaaatgaaacaagtactagaggaaatacaggtgaattcctccataccctgaatatgaggaaagatttttctaggaatcaaaacaaaagattaatttgactacatgaaaataatagcattctgcatggcccaaaacaccacaaaggcaaaggaaaattgagagacgaggagaaggtgtgtgctgcacaatcacagatgcatagctaatattccatatattaaaaaattcaatatttgagggggaaaacatcaaaaactcaacagaaaaatgggcaaaagacatgaaacatgaatagatcatttctccaaaaatgtataaaaatgatctttaggccgggcgcggtggctcacgcctgtaatcccagcactttgggaggccgaggcgggcggatcacgaggtcaggagatcgagaccatcccggctaaaacggtgaaaccccgtctctactaaaaatacaaaaaattagccgggcgtgttggcgggcgcctgtagtcccagctacttgggaggctgaggcaggagaatggcgtgaacccgggaggcggagcttgcagtgagccgagatcccgccactgcactccagcctgggcgacagagcgagactccgtctcaaaaaaaaaaaaaaaaaaagatctttaattatatgaaaagttgttcaacttcatttggaataagaaataaaaattaaaactacagtgagaggtcctctccaatctcgtgttgtgacagttacagtattgatgaggccgtggcctctcactggctgacgactccaagctgcacagccgtgcggaaggcagttcaatccgataaaactccgtgacccagcaactccacgttacgaattcacaccgaagaaaacctccaacgataggaagacttgtaggcacaaggtcatttgatgcagtataattggtggttgtgaaataccggaaaaaattaaatgctcctgtgtagacgtgtgttggctaagctaaggtactgccacatagtgccttcatgcagctgcacagagaatgaggatggtctctatgacccaacacggagtgatttcaatgtatgttgttaagtgatgaaaaaaggcaaagagcaaaagattatagtaggctatttggggtgagaaaaaagagaaataagaaaataatatacatgcatcattttacttttgcaaaaagaaacacagaaaggctaaatgagaattgagaatgtctggttgcctccaggaggtgggtggggcagggcagaaaggagggggagacgggagtgaccactgcgtgagcaaacccttctgtaactccaaacttcagaacatgttattgtctcccctactcagaaactaataactgaaaccaataagcgtggggaaacaaaatggaatcgacactcatttcatttcaaatggataatataagcacactggatgcaagggaaaggggaggataagacattttttaacaggccaggcatggtggctcatgcctgtaatttgggaggccaaagtcggcggatcacccgaggtcaggcattcgggaccagcctggccaatatgctgaaaccctgtctctagtaaaaatacagaaattagccagacatggtggcaggcacctgcaggtgcaggtgcagctacttgggaggctgaggcacgagaatcgctcaaacccaggaggtggaggttgcagtgagccgagatagcaccactgcaccccagcctgggtgacagagcgagactctgtctcaaaaaaaaaaaagaaatttttgaacaaagtattttgaccatgtactcataggccaaagatccctcaaaattataagtaaatattataattgtataattatctatttatatataattatattattaaaaaattataaataagctctacacagtaggtttgcttttcacacaggtagggattagcaaccctgaagctgctttctgtgtattctcggatgcagcaaatagacaattacactgtggctggtgggggtctggtctccactctctgaaaaggtgttacagtggcgggaaggcagccaagcagacacacaggtgtgcatgggtcagtggtgttacagactgactgtgtccctcccgtgttcatatgtcaaagcccttaagccctaatgtgagtgcatttggagatgggacctgtaaggaggtagttatggttaaatggggtcataagggtggggttctaatttgacaggactggtgtccttctcagaggagacacagagattgttctctctctgcaagtggacagagaagaggccatgtgaagaaatgagaaggcagctgtacgcaagccagggagggaggcctcaccagaaaccaaccctgacagcaccttgaccttgaacttctagcttccggaactatgaaaaaattagtttctgttatggaagcctcccacggtatggcatttcattacagcagccccagtacactgagggatggtagctggaggtcaatagatgaataacaaaattagacggatgatagacagggatatcattgtccgtcttaaattaccagactcagaaaatatgattaagcatagagtttactggagcccagagcttaaggacagccacctgggagcacaggttcaagctgccctaaatcgaagctcccattagcagcagcctctgactcccgcccgagggcccccagcactactgtggaattccggccggaacacacagcctggacctggtcatgagaaacggccccacaagcccaacttgagatgcattttacagaataagtggcttaaacgtctcaaaaacgtcaaggtcaggaaaggtcaaattaaaggagacaaagaggtaagagaataatgtaacagtgagccagcaccattcctgcctctgcaaaggggaaggtgaggggattgttcccattatcaggggaaaggggttctcaggagacctggagaaacgcccaggcgtagcctggcctggggcaactggagccgaccactgcagtgggctctggcaggcactgcgtctcccccgaggtctctgctgaaaacaacgaccacggaggccctgatgcctcctacctgggctgtgaccctggcctagggctcctcgcacctcctgcaccccacagcctccgggccaggctccggctcccacccagtccctgcagccaagggaagccgctgcctgcaggcctggagggctccctgttccagctgctccctcactggcctccggcagggtcaggacagagagggggtggcaaatccactgaccccagcggaagcctcgccagagtctcccaggcaccggtggacccaggcatctggggccagcggggaggccacggaaaggggacagtgctggctctgggcccctcgggggaccgtcctgcactggtgcccatgggcagcagagggcgcccctgaccatccctccatggcgtccgcaggagcctcaccagcctcagggtccaggggcacccacccagctgtcaacctagctgtctggagtgagcttcagtgggaggggaggagggggcctgcgattgtgcagggacgaggctgggggagcagagactccagaaaccgtgtcccacaccccgcactgcccctcactgtgcagccccagcctccctcctagagccccccagctgctaggctgtgacaattgcttgtgtatctggacccagcaggctacaggtcactgtgaccttggggcctggggtcccaaagccaggctgcctgcccccgtttcccccaccgccatctccagagccaccatcaccagttctgccaccctcggccctccctgtcactgcagggcagccctggactcgctcagaccctgagttcagaccctggggtgcagaggctgatggcccggcgctggcctcctgagccctcctcacccctgggcactcactgagtactgggcctgctctcctgagggcaaaagagcacccaacccctcccccagctctgaaacaaccctcagatcctgatgcttttggggtcacatgtttggggagggaactggcagtagcccaggagccctagatcacggaggtcaccctgctgaacgcgagggtctctgcctcccaagggtggggactccagaggccgggcacctgggagggccttgctctgggccctccggcctggctgtggctggcaccctgggaccccagacccagcccagagcagggatggctgcgtctcgctcccagtttgtcctgatcccagagcctccagccacagctccgtaaggtgggcactgagatggccctgaggcctggaggccctgaacggagatgaggtctctttccacagaccagccgcgttcccaccgcaccctctctttggggtttgattggcccagggagtgtgagtgttcctgagaagcccagatgttacccaggcactcggccccaggctctgtgactcccatgtggggacaatggaaaccagatgctgggaagctgggctgggtgggcgggcccctggcagctgtgtgctgcgtccatctggactggtctctgagccccgggcctgtggacctcggcctcatgggagccccagctctgtcactgttactccctccatcagctcccaccgacagagtggacattctcttgacaacttgagaaaacggagcttctgggagcctgtgtcccgacccgagctcaggcaactagtgggtgacagagctgggaccgcacccagttctgactgccccagctttcctggcacatccagcctggggtataccaggcaggatgccagcagtttctctgagccacggtgtggtcaggcagagagacggagggtctgagtggccccctacagatgctgtggtcctgcgtggaaaccctctgggtgtctgaggagtggggtgatgtgggactgtgaccacccatgttcagctccctgcagagtggcaaggagccccccgcccccgtctctctgggacccagccggagtgggggctgctggtctgtaagggatcctaaccctttcttccctactgccccagcctcgttaaaactgctgcatgccggcgggtgagcgggacatggggcagcccccgcagctgagctccccactgccgggggagggcctgtgtggagctccgagaccaggtcctagaagcccctgggccctgccctgcgctgcgaagggaaccgggtgtctgagcatggggccggcaggaccgacagcatcggggcttgaaacccagtgctcgggagcccgcccctccccccacgaccttttgggcccagaagccatgatgggggcacagaggagggagtttcgggccccggcccggggtgcggggtctcacacagggaccccaggtctgagctgtgccactcgtgcagccctggccctccgcagcctcggcaaccccacccgagggctcccactgctgcccacagacatctcagggtctcccgggccgggtcagcggcgccggaacagggtctcccgggccgggtcagcggcgccggaagtgattctcgtcagcaggaatgcgctggctgcccgggagccttcagggtgggctctgggggccaggtgcggcctcagcgccgtcccttcccgggaagcctcctccctggggtccacgccggctcctgctggctcccccattccgctgaaatctgaggaaaaggctctgggaacgcagccagactcccccacagctcagacggctgtaaagaaatattcctgccagatgttcagaggcggaggccagcatgaggtaacgggaaaggcttaacccgtccagccccgcagcctcgcagccgcctccggggcccagctctaggggctgcgggccccgtgccgtgggggacgtccctgccgcgtccgtgtcccgggggccgggcctgcctgcggcgggagcccaccccgtgcggtcagacgggctcagagcgctcttctgcagtctccagccctccctggagggcgtgttggaccagcccctgatgggcgcccgggagccacgggatggggcgtgatgccagcctgggagagggatccactcgggggtcctcaggaggcggtgccagcccccggcatggcttgggggagcctctgtgttgccagcgctgggcagccctggaccccccgccaccctttgcctcacgggccctgggtttcagggcagtggcctctcaacccagcgagatcacagcgccatcgagacagtctttcagtctttttttttttttttttttttttttgcgtctctttgaaatgacagttcccagaaccagagcttctatggcggattctcaccagaaaatgaaattctcagcttacaggcaacggaacaaaatgaaatcaggccaatgcacgcggccccgggaagcaccagggggcctcagcgagctcctgagtttcacactcagtgcgggggtttccgcctcagcccctcttagcgggagtcactaaaggaaacgcagagagggcgggaacgcaaccccagcaccctgcggctcccgccacggggtcgcgccctccctctgatatccagagcctgcggctcccagaggcgctcccggaacaaaccggggcgcgcagagctttcttcgccgctgtctgggggccgcaggactgtcccagggcccgtgattgacggaccagtccccggcattgagccttgtgtctttccagttacaggcgatgctgccggaaacgtgtgttttcctatctaggagtcagtctgtcgcagaccgattcctggatcgccgaggtcgcccactctccccagaagcctgctccctcccgacccgaccggtgggaggccgcgtccccgacgcttgccaggagccccgcctgcagccgaggcgtcctccccgcgccgcgggctcctgtggcaacggccgcctcccggctggcctcttttctgccttctgccttcccgttggcgactggggaggcccgtggtcaacgaggccccagcgatcacctgggggacgtcctgtagggagagcctgactcacaaggaccagtgttgagccgtcgcacccccgcttgggaccaggatgggctgcactttccccacccgcggccctgggacccgccccacccgaagcccggggagatccaaccgcaggctgcctccggccagcggactcattcacactccgcaaacaggctggggccagacgccgccctgccctaggtgcccagcaaacacgcgggccagccagacccctggaccttcacagggaggaggagatggagatgggttcaccccccacaaaggagggaggggaggggatggccgccatgcccaggtgccgggacaggagccgagggccgcgtgcaccccttgggcccttggaggggccggcatgtgcctctctgtccctgtgccacttccactggccgtacagggccaccaccgcggaaaccgcatgtgtaacccctggaaacagggtcctccttgatgagtcatgttctaagttgggaggaaaattcactggatagtggaggcagtagaaagaaataaaaaaagtctttgttccacagatgcttggagggcttgggtcctcggtgtttatagtgggtgccgccttccaacaccacaccctgggagggagtcgccggacggcgttccggaaactccacagtcactggggagggggcacggacagcccccaccacctgccctccgggcacaaacgcagggcctgtcccctgcccgtgggcgcagctgtcctgctccctccccgaaggcactcggacttctgtggaaaaagagcttatgggatggaaaatccctggatgagtttcctcccagcctttcctgggggtggaggacagacctgcagccccgagcgagctcctgccagcgcctggagagtggagggcggggcccagtctcagcactgcagccgggccctgcggggctagaagcaccgtcccctccgccgtccaccctcactgcgtgggtctcgaggcctccttgtctagaaaatttccccagctggggcctgggtttttggagcccatggagggcaggtcctccacatctcgggtgccctgggtagggcagggaggcgactgacgcgtggcgcagagcttggccggccgtggtgataggagagggggtggctgagagacctgggaggaaaaagatttttaaagggggaagtgggaccctgccttggggctggggttgggagttccgtgtgggtgtgggtggggaagtatcgggggacctgccctgataatcacgtaggttcttttctatttttcctaagcgtcggccggcttgagaaataaagggacagagtacaaaagagagaaattttaaagctgggcatccgggggagacatcacacgttggtaggatctgtgatgccccacaagccgcaaaaaccagcaagtttttattagggagtttcaaaaggggagggagtgtgtgaataggtgtgggtgacagacagcaagtacttaacagggtaatagaatatcacaaggccagtggaggcagggcgagatcacaggaccacaggaccgaagcaaaattaaaattgctaatgaagttttgggcaccactgtcactgataacatcttatcaggagacagggttttgacatcaaccggtctgaccaaaatttattaggtgggaatttcctcttcctaataagcctgggagcgctatgggagactggagtttatttcatctctgcagcctcaaccataagagacaggcccacctgggggggctgtttataagccaatacctccaggtgcgtattctctttctcagggatatcccatgctgagaaaaagaattcagcgatatttctcccatttgcttttgaaagaagagaaatatggctctgttctgcctgactcacctgcggttagagtttaaggttatctctcttattccctgaacaattgctgttatcctgttcttttttcaaggtgctcagatttcatattgctcaaacacacatgctgtacaatttttgtagttaacacaattattacagggtcctgaggcaatatacatcctcctcagctgacaggattaagagattaaagtaaagacaggcataggaaatcacaagggtattgactggggaagtgataagtgtccatgaaatctttacaatttatgtttagagattgcagtaaagacaggcataagaaattataaaagtattaacttgaggaactaataagtgtccataaaatcttcacaatccacgttcttctgccgtggcttcagccggtccctccatttggggtccctgacttcccacaacaggggagggggtacggttggtccaaaaggggaaggacagaagcggggcctgggccagcagccctggggctcccaccagccaccagcagcactgagtctcctctgcaactttccctgtggacaaaggcagtttcctgggatggtctttccttcccgttccaccacttttatgggtttaagaaaaccactaacacaggacagcggtggataattccccttttccccgcgctgacgtttggaggcaccagggctcctcaaggtggactggggggctcctctccctgaacgcagggtcctgatgggggtgggggtgggggtgggggtggagggcaggcaggttccagaaacagccctgccctcccctgcctcccgggacagcttcctccaccaagcccacctcatgctccatcctcatcccctcttagccaggtcctgctggaagaggaggctcgggtccacccgcaggagtcagagaggccctgccagggacactgcacattcaaggccctctcctccatccttcttcctctccctcctcccaccctctccctcctcccaccccctctcccctcctcccattctctccctcctcccactctctcccttctcccaccctctcccttcccacacctggagactcagatccccccagggctgtggacgactggcacagtggggtaagtcctgctccccacagctgcttctgggatcccagactgggcccagagtccccatccacagaagggccggcaggcctgagaaaggacagccaggtcgccagggaggggatgtggctcgcccccttcttccctttctctggaagtgcatttacctccccccacacacaggcggggttgcagggcccttcccagccagaccctgcagtgcagctctctgggaggccccccagggcagtggtttcctggctctgtgcttcctaggatcctggaagccgactgggctggggttggggggtggagccccatgggagaaggatctcctgcaggaatggcctggatgggggcttgggggtggacatgtgccagagacacctgggtaacttcaggagagaggagggagggggagagaggagggagggggagagaggagggagggggagagaggagggagggggagagaggagggagggggagagggggggagagaggagggaggaggagaataggggatgggagagaggagggagacggtgaaggggagagtagggagccggagaggagaatgaggacaggggagaagagggagggggagatgaggaaagggggaggggagcaagtgtgagaggagggagggggaaaggagggaagggggagaggaggggacaggagagaggaagaagggggagaggagtgagtgtgagaggagggagggggagagaggggaaaagggggagaggagggagggggagaggagggaagggggagaggagtgagcatgagaggagggagggggagagaagtgagcgtgagaggagggagggggagaggggacaggagagaggagggagggagacaggagtgagcgtgagaggagggagggggagaggagtgagcatgagaggagggaggcggagaggaggggacaggagagaggagggagggggacaggagtgagcgtgagaggaaggagggggagaggagggaagagggagaggagtgagcatgagaggagggagagggagaggactgagcgtgagaggagggagggggagagaagagaaaagagggagcaaaggggacaggagagaggagggggggagcggagggagctcacccgctgtgggtggggcaggttgtggaaatcagccccatgacaacagtaagctcagccaggactgggattcaggatgttttattttcatgctttatgtggttttcatgttctccctgagacataagcatcacttacaatcagaaaagatccctgatgaaagtgcatgaaggaacacaaagcaggcgactgcacgtctatgaacacgctcacggtacggtgcacagagcaggcgacagcacgtctataaacacacttatagcacggtggccacggtggctcacgcctgtcatcccagcactttgggaggccgaggagggcggatcacctgaggtcaggagtttgagaccagcctggctaacatggcgaaaccctacctctactaaaaatacaaaaattagctgggcatggtggcatgtgcctgtagttccagctacttgggaggctgaggcaggagaatcacttgaacccgggaggcggaggttgcagtgagccgagattgtgccactgcactccagcctgggcgacagagcaagactccatctaaaaaaaagaaaaacgcttaagcagaaacacactgaagtattagctctgaatcccactcggtagtgaaactagatgttgctttatgattttaaaaaattcgctatgatgaacatgtatcttcttcataagagaaagagtcaagtttactctgagtcatcattgcagatttcctgtgaagcagaggcacctctgggccccacccaggcctgggaccgccctgagcctgagcccctcacacagtgcggccccagccctgcctcggagaagcccaggccaggatgaagcctgggaccgggggaggagtcggaccgcggccctggagctcaggatgctgcagcctggggtgtcggcgttattcccacgcatctccacagctcccgccgcacccaccccgcggacctgctggcggagccggtggtatactgtgaactgacttatgaaaccacctctgcaaggcaaaacaggccattggccactgggccccgtgaacctgtccctgggcgtccgcatctcttccatcttacagaccgtgtgtcagccacctgctgctgtgtgcctgtggtgggaccctcactgcagggaatgctgcattcttggtgtttgcttacacaacgtgttcctatttcctttcccaaatctgcaagcactccttgcagataaaacagctcagactgggagaggccaagagaacacggaggtcctgaagccccctgtgcttgagtcaggagcccagaggctggtgccacagctccaagcaggcagcaccaaacctcagcacccacagccacagtgtggatgacatcagtggcaggtaaattgactgtacagtaagtgtacaaggccaggcacggtggctcatgcctgtaatcccagcactttcggaggccgaggcaggaggaccacttgagtccaggagttcgagaccagcctgggcaacatcgtgagacccccatctctacaaaacatacaaaattagctgggtatggtggcacatgcctgtgatcccagctactcgggaggctgaggtggagggatcacctgaacccaggagactgaggctgcagtgagctgtgatgaggccactacgttccagcctggatgacagagtgagccccttagataataataataataataaggaggaggaggaggaggaggaggaggaaaagaaggagaagtactttacaacttctgtaacgtaggtgtggggaaaatattgaaggcaatccaaaaacagtcactgtggagttgtggaattaagtatcaattttaaaggttttttcaaatgtttctttaacatggtttttggtatgaacaatttgtgtacgttttaaaattataagacatttaggctggtgttaggcaagtctcagcagctccagctttgggaaagctcttctgggaccttctgtgggccagggatgcatctggccacatctggagcccacccccaggtgatatcagggacagcccctctctcctctctctgtctctctttctgtctctctgtctctgtctctctgtctctgtctctccgtctctgtctgtctctcctctctgtctctctctgtctctgtctctctgtctctgtctttgtctctctctgtctctcctctctctgtgtctctgtctctgtctctctctctgtctctctctgtctgtctctctgtctctctctgtctctgtctctctctgtctgtctctgtctctcctctgtctctctgtgtctgtctctctgtctctgtctttctgtctctctctcactgtctctgtctctctctgtctctctgtctctgtgtctctctgtctctgtctctcactgtctctctctctgtctctgtctctctgtctctctgtctctctgtgtctctctgtctctgtctctctgtctctgtctctcctctgtctctctgtgtctctctctgtctttctgtctctctgtctctctctgtctctgtctctctctctgtctctgtctctcctctgtctgtgtctctgtctgtctctctgtctctgtctctctgtctctctctcactgtctctctctgtctctctgtctctgtctctctgtctccacacacagcatatataacaactatattgtgagcaactttgtcttcccacggtacaaactgaaatatctttggcaaatacgtatccgactatactgtgaagaaatattgacgtgaaaaaagaacgcggagatctgataaagcaacaattcagctcacggcgaggtcctctgcaggaggcggttggtgggaagaggcgagtgagcctgcccgtgcgtcccgcatggagacgtctggattggaaactaccgaaagatgtttcaaggaactctccctgggtgacacgctggttttcagacgtttgattcagctgctgcagtttcctcctccctgacacgggaactgaactgcaggccgcggcgagccagccagggaaaccgccttctccctgggctcggagctgctgccggttctggagggagagaccccagcaaggaggtggtgactcatgggccgctcctccccgccccgccccgcccctcccctcccgccccgcccctcccctcccgcccctcccctctcctcccgcccctcccctcccctcccctctcctcccgccccgcccctcccctcccctcccgcccctcccctcccctcccgcccctctcgccccgcccctcccctccttgccctccgctctcactctggctgggagcagaaggcagcctcggtctctgggcggcggcggcggcccactctgccctggccgcgctgtgtggtgaccgcaggccccagacatgagggcggcccgtgctctgctgcccctgctgctgcaggcctgctggacagccgcgcaggatgagccggagaccccgagggccgtggccttccagggtgagtggtggcttggggtgcaggctccagaccccccgctctttgctgccggccagggccagatgcgcggggtcccctcccacgcgtggaactgcagactgggggcctggagcccctgaaccccactccccgctcggggcggctgcagcgcccagctctgccccaccgggccttggccggggcccctagaggctcagcattcagcattctcagcggggccggaccgcaggcagctcgggaggggctccctggcgagggggagctggtgcggggctgtctcggcgccccgtgaatccgtttgacccctcacctggcagtgagtccagacgcacggcccccccgacccccgttctagaagaagtcgtgcgctgctggttctgaatccagcgagaaaccttcccgtgaggtctcacttgtccggtcccgtgccggggacgccctgcccttcgggggaggttgtgaaggtttctgactcccctcgaggcacaggagcggtttggggtctctcactccaccccctccccaccgtccccaccgagggacgtcctgctgccttttcccgggagagcctctccgggcccggggctctgtgctgcaggcgctgggctggccgggagggcaggcccagcagagactcggggaatggggcgagagcttgaaggcccctctcctccatcttcggccagactgccccgtggacctgttctttgtgctggacacctctgagagcgtggccctgaggctgaagccctacggggccctcgtggacaaagtcaagtccttcaccaagcgcttcatcgacaacctgagggacaggtaggagggacgccccgtgaccttcctcctgtgcttctgggcctcttggagggaggggtgggggcccaggggaacacgggtgcgacggcctcaacctcctaaggttgggcgagcgttgccctgaccggggcccctcccggcgccctccagagtgaggccggggccctttccggcgccctccagagtgagctggtctgagcctctcccagcgccttccagagtgagctggtttgagaccctgctcgcgggggtggcacctgttcagcagggccgaggtgacagtgaggctgagatgtagggaagagaggctcccgcaggctgaccgagagggctcagcgcactggcccagacacgcagtcctgcctggtgcgcgggagcccctcactaaccacctggaccctggtttgttccgtgggcagtgagagcctctacctgggtcctggatcccacgttctgaaggtccccgactcgggagccaggaggggtgtcgctctgcagccccagggcccccaggcttggttctgggcttgggacacggcaccctctgctccacgttcctccatctgtgcgtgtggctgaggacagaccggggggagaggggagtcggtcctgtgggtgcacagggccgctgaggggggggcatgtagaacggggctcccccactgagacgggtcctggcagtggggacacagcttagccggcgtaggaacccccgtcctccttgaccctgctgactggccgctgggccggagcctcccgccaccagaaggggcacagtcagaggctgccggtaacagcagggtggaccttccagcccacaccgtgcccagcaggagccattggtaccaggaaccctgagcttagtggacatggccaggcccgtgcggcagtgtttgggggggggtctggctgtggatggcaccggggaggggcggccgcgtggcccagcgtcccccgagtcgcccttgttgcctttactcagtctccccatgactcagtttcccacctgtgaaatggggcggagtcatccccatgtcgctgccactggattcctgcaggcgccgtggtcactctgctgaatggatgggagggtgggtggggcagaggtgggcccaccccaggctggggcagagcagacccctgagagcctcaggctcaggtgctcagagggcagcgagggggctgctcagatccccggggtgcctccttcccccactgtcatgctgccccactgcaggcccaaggaccccaccccagcagggccacacactcagggctcctggtctgagggcctgagggatcggggcgcaggtcgcttgctggccacacccgcctgcacagccttccaggagggccggcctcagggccacagggcaagtccagctgtgtgtcagccacggccagggtggggcagcctgtccatctgggtgacgtcgcgccctgggacgggtagcgatggcgccaggggccgcccgcctcacgcccgccgtgcctgttcctggcaggtactaccgctgtgaccgaaacctggtgtggaacgcaggcgcgctgcactacagtgacgaggtggagatcatccaaggcctcacgcgcatgcctggcggccgcgacgcactcaaaagcagcgtggacgcggtcaagtactttgggaagggcacctacaccgactgcgctatcaagaaggggctggagcagctcctcgtggggtgagtggcccccagcctcctgcccacgccagttctcacgcgtggtacccagcctgggctggggttggcctggggtccctgtgcggcttcagctgcagcctccctgttctcttggaggctgcacggcctccctgacccactttgtgggcaggaaagagacggagacagacagagacagagagaaacagaaacagggagaaacagacacagagagagacagagacagagagagatagagacagagacagagagagacagagacaaagagtgacagagggaccaagacaggcagacagagacaaacagagacagagacagagacacagagagagacacagagagacagagacgggaacagagacaggcagacagagacagagagagacagagacagaaacagagacagagggacagagacaggcagagagagacagagagacagagacagagacagacaaacagagacagagagacagaaacagggacagagacagaaagagagagagacagagggaaacagagagagacagagacagatagaaaaagacagaggcagagagaagcagagacagagaaacaaagacagtcagagacagacagagacagagacagaaacagagacagagagacagagacagaggggcagagacaggcagacagagagacagagacagagacagcgaaacagagacagaaacatacagagacagagagacagagagaagcagagacagacagaggcagagagacagagagaagcagagacagggacagagacagagacagaaatagagagatagagacagagggacagagacagagagatagagacagagagggagacagagagatagaagcagagagagagagacaaagacagaggcagagagacagagagagaagcacagacagagacagacagagagacagggacagacagagacagagagaccggaaacagaggcagagagactgagagactgagagagacggggtggttttccccacagcatcaacaccaagcagggctaggatcactgaaacagactcatcagacccgaagcatgcgctttctcggggtttttctggactgaggggtttcctctcatcccagtgtccagctgtggggacgcaggggccgcaagccccggagtgtccagaggggaacgtggcctccccacacccagcccttcacgaggcctcaggatcccagtgggggtacccgaggctgccctgtccagccaggcggtgcggggggtttggggagagcctctccccgaggtcggtctcagagggccacatggccggtgtgggccggacattccctttccaatggttgtgcccacttccctccagagttggtgccaagctgggacctgggggacttggagtctcaggaagtcgtccgctgtctgcagggggtgcatgggggatgtggccacacacgtcagagtgcggccccctgtggaagccacagacagacacgactcccctaaatgagctcgcccttctggccgagatgctcagcgtccccagcaggctgcccgactgccctgcgatactgccctccttcctgctgctcccactttccctttcggggggttggatttggggcattcagggatcgccctgttgtttgctcatcacacccatttcctgcaagagccacggtgaccgagcagccttgagttgaggcagcttgtgggtagacgcggcgggcatctcggaggggcacgctccctgccaccctcagcctccactcactggtcaggggctttgcgccccagggcaccccaggaaccgagcctcctttggggtcatgggtgcctctcctgggagggcgtggattttccaaagcagtttagagaaatgagacccacaggcgttatttcccatggtgaggttcttttcagtaacccccaccgtatagccaggatcagcaaagagaggcggctcctcccggtgagacagggaccagcacctcccggacaggcttgggtctccctccagttcccccacctagtctcgaggtctcacgctgccctctcctgtccaggggctcccacctgaaggagaataagtacctgattgtggtgaccgacgggcaccccctggagggctacaaggaaccctgtggggggctggaggatgctgtgaacgaggccaagcacctgggcgtcaaagtcttctcggtggccatcacacccgaccacctggtaggcaccggccccccccggcagatgcccccaaccacagggagtggcggctgcaaggcccccggcagctgggaccgtcttttggtcctcgggagggtgtgggttctccagccggccacccttgcccctgagaggccagcccctcctgctgaggagcctggagcgccccagcccagcctcccctctggccctgtgggaagcggccccggccgtcaggggtcccagccctgctcagcccaccctgaacactgcccccaggagccgcgtctgagcatcatcgccacggaccacacgtaccggcgcaacttcacggcggctgactggggccagagccgcgacgcagaggaggccatcagccagaccatcgacaccatcgtggacatgatcgtgaggcccctgcccaggagacggggaggcccgcggcggccgcaggtggaaagtaattctgcgtttccatttctctttccagaaaaataacgtggagcaagtggtaagagccctccccaccacccccagccgtgagtctgcacacgtccacccacacgtccacctgtgtgttcaggacgcatgtccctatgcatatccgcccatgtgcccgggacacatgtcccctgcgtgtctgcccgtgtgcccgggatgtgtgtccccctgcgtgtccacctgtgtgtctgcccatgtgcctgggacatgtgtccgcctgtgcgtccatccgtgtgtccgtctgcccatgtgcctgggtcgcatgtcaccctgtgtcccagccgtatgtccgtggctttcccactgactcgtctccatgctttccccccacagtgctgctccttcgaatgccaggtgagtgtgccccccgacccctgaccccgcgccctgcaccctgggaacctgagtctggggtcctggctgaccgtcccctctgccttgcagcctgcaagaggacctccggggctccggggcgaccccggctttgaggtgagtggtgactcctgctcctcccatgtgttgtggggcctgggagtgggggtggcaggaccaaagcctcctgggcacccaagtccaccatgaggatccagaggggacggcgggggtccagatggaggggacggcgggggtccagatggaggggacggcgggagtccagatggaggggatggcggggtccagatggaggggacggcggggtccagatggaggggacggcggggtccagatggaggggatggcggggtccagatggaggggacggcggggtccagatggaggggacggcggggtccagatggaggggacgtcggggctccagatggaggggacggcgggagtccagatggaggggacggcggggtccagatggaggggacggcggggtccagatggaggggacggcggggtccagatggaggggacgtcggggctccagatggaggggacggcgggagtccagatggaggggacggcgtggtccagatggaggggacggcggggtccagatggaggggacgtcggggctccagatggaggggacggcgggggtccagatggaggggacggcggggtccagatggaggggacggcggggtccagatggaggggacggcggggtccagatggaggggacggcggggtccagatggaggggacggcggggtccagatggaggggacggcgggagtccagatggaggggacggcgtggtccagatggaggggacggcggggtccagatggaggggacgtcggggctccagatggaggggacggcggggtccagatggaggggatgtcggggtccagatggaagggacggcggggtccagcaggcaggctccggccgtgcagggtgtggactgtcccgggggcgctgggggcttctgagggtgtctctgtccgccctgccctcagccgcactctgttcagaaggacctttctggaggtaggagggtgagaatgtgggtcccctgcttctgtgtggctcacataggatgaccttaaacgttagaattagctgctgataattaaaacttgccatgaggctgctcatggacctcagatttctggcttctcctaaaaaccatcaaacccagcagctgtgggcccgagtcccatggccatttcctgggggtcgagctgtgaccctggggggcttctgtgctgcacgtccctcccacctgtgcctgggggtcagcaaagccgagcagacaggaacgaaggcagggagtggggggagctggcgtgcgggttggagctcccagacccaggctgaccagatgtgatggggaaggtgctttaaagcccttgatccctgaaggctggatgaagcgtctttttaaaaacctgtttcgtgagccagctttttagaaagaaacggggctgccccaaccttgacctgttttgtgttccagggagaacgaggcaagccggggctcccaggagagaagggagaagccggagatcctgtgagtgcctgactgtggggtgggggccctaagaagctggaggcggggaacgactaggcctcggaaacttccggaagagtggctgggttctgagtgccaaagtcacactgcctgttccttgtgggtgggagcagacctggaggggccacagcccagccatccttccacacagccccccaggcagcccgtaagcccccctgccagggaggggctgggtggggaggtggcccagggtgctcaggccggcaccgtccggggcccctgccgtggctccttggcccaaatcctatccatagacttccctcccccagctccaccttggagggcctcggcaccatgggccccgtgcagcagggcccctctctcggcctgaccaggcctgggctggagggaggggtgtggggctgggtgggactggcccctgcccctgctcctccgggggtgtctcaccatctcctcctgtgttccagggaagacccggggacctcggacctgttgggtaccagggaatgaaggtacgtgccccccctttcctggcccgagcccggtggtgccctcagccttgcacagcactaacaagccttcctcttcctcttcttccgctgggtgtgtagggagaaaaagggagccgtggggagaaggtgagtgaggctcgacctcggagctggtctctccaggcgcagatgtgccatcctggacgagggtgtccccggggatgaggacagtgtccctgacaggagaccacgtgtcctgcagacccgctccaccgcccctcgccgtcccctccatctggaaggacaaggacagccacccaggcacccagcaaaggcgcctgtgtcactttcaccccaccccagagcaggggtcccccgggcggttaccctctgcggagccgggggtcccccgggcggttaccctctgcggagccgggggtcccccgggcggttaccctctgcagagcggcccctccccatcactgtcagtccccatgattctcagcagtgatgttgtcccctcgggttgggggcacccaagcccctgcctcgcgtgggcctaagccaggcttgccctgccctccccaccccaaataccccctcacacccgcttcctgtctccgcagggctccaggggacccaagggctacaaggtgagcgtgggctgctgggaggggggagttctgcccccacggcagcatgtctgacctgcatctgactcctgccttcgttttcccgcctcacagggagagaagggcaagcgtggcatcgacggggtggacggcgtgaaggtgactggggggagataggatggacggggagggacgaggaggaatggggcgagatggggagggacggagtggacggcgtgaaggtgacccggggagggatggggtggacagtgtgaaggtgaccaggggaaggacggggagggacggggagggatggggtgaggtgatcccggcaggagggacagggaggagtggggtggacggtgtgaaggtgaccccaggggggtgtctgctaggcagggctttccagggagggtgtggagggcatggagggcaccaagtctgacagttgattggcctcagtttacccacttggccgtcagattttctagttttcttcctctttccagggggagatggggtacccaggcctgccaggctgcaagggctcgcccgggtttgacgtaagtcacttcctctcactgatactttaaaactagcgctgtcagcagcacctcgtgtggaccgttttgacttctgtctgggcggtctggggctgctgccagaggccgcggtggcctctgccggtggtgtcatgctgccctcttttctccagggcattcaaggaccccctggccccaagggagaccccggtgcctttggactgaaaggagaaaaggtgagtgacttgcggcccctggaggaccagggccttcacggttggccaagcgctgaattggaaacctctcctggaagcaagtcctggtccgagcatgtcggccacccgtgcggcctcagaggggaggagctggtggaggctggaggcaggcagaggagcagcggggacagtgcccaccgtggggacagtggccgtggcgctcccgcccagagccttccctgcagcccgagggccttcaggcctccgccattctgtcccccgcacctgccgctcgctcggcacagatgggaccccaccgcgtcactcctagcctgcgagccgcagcccagaatggctctcagaactgagaatgggctgggtggcactgagggtggcgagtgggcgggagggtggtgagcgggggcgggaggagggtggtgagcgggtgggagggcgagtgggcagcgggagggcgggagcacgaggcgggagaaggagctttttcgtctgacagctgagtctgccgttgctggtgttttctctggagtttctttgttgaagctgaagtgttggggaagacaaaggcgaatgctgaccccaccccaaacattcccagacgagctcctagaacccagcagacggtttccaaatctcatcttcaagttcccagattaccctccaggccctagatttgagtttgccaatttgccagcctggcaaagctgtgccttctctaatgggaaccaaatcctgccccttagacaagatggcccttggctgggcctcacagggaacaaggttggagcattccaggaggtctttgtgcagggttgtggatggctgagggtgctggggggtctgggctcagacagtgttggtcagagggagtggcctgaagtatgggtgagaggccctggatgtggcctctgatggctgcacccctggtgcacacccctgccagcgtgtgtgactcccccggtcttccccagggcgagcctggagctgacggggaggcggggagaccagggagctcgggaccatctggagacgaggtgaggagcttcacagcccccacacatgccaggtatgggcccagggagggtcaaggagatggagcgaccattcaacccttgttccccacagggccagccgggagagcctgggccccccggagagaaaggagaggcgggcgacgaggtgagtgagggctcctgacaccttcctggggaagtgcatggcctcagcttctgatcctctttgctcggggtctactccacgtccctgagaccaaatgcagtgtgtccaccagactaacgccggcgtctgtttctcttcatcccaggggaacccaggacctgacggtgcccccggggagcgggtgagtggggcaggggcagcctgcgctgttggcctcaccatgtagctgtggacgtggcctctgcggcccagtctggccctcccagcactgagagccatggcctcctgcccaagacaaatgggtttcttcacccacacgtccaggatgcctcttcccacagtctcagagcgggtgggacctggggaaccaggagattccggcctctgcaaccgtggggcatgcggtggaggggtggcccctcccaggggtcctgctgggggagtcagtccaggccaggcctcaagccccaccccagctgggtgtgagttccagcagctgaggcttctcccctccatgtctctccactcagggtggccctggagagagaggaccacgggggaccccaggcacgcggggaccaagaggagaccctgtgagtcacagttcctggagctgggaaccaccccaggaaggggcaggcggaggctggggctgggtcaggcctccagagccacaggacacatcatgaagcccctgtggcccctcaacgtggccagcccatccccacgccgtcagggagggcagcccctgaagccggcgcccagccatgtgcctgatgctgggacctgtttcatgtgaaggcgttgcccgtggacccggtgcccactttcccaccaggcggcttccacgtttctgcatccgagcttgggttcttctttggaataattttccttagttaaaattcccagcgtgaggaagttgggtcagtaccccagacgggaagctaggcctgcagggcgcctgcctgggaaggcttgacatggaaaactcaccccagagccgagatgccggcggcctcagaggccaccccccaccttcagctccgtggaccgtgggcctcgctaggccaccccacagcccagcctcagggtgcagaagcacagggcccttctctgtccctgtgacttgctgggaaatctgtgctggatgtggggcggggcagctggcagactccgggcgtctcagtcccatccggctcagggagagccagggcctggcgggcagagtgaaggggagagaatgccctagtgtgcccagccgagctgccaggcctcagaggcagcgcccccgggtgcccccttgtccgagaatcaagacatgcgactgtcgtgtgctgtgacagacaggcggggctccagcagggccagagagctgagccggggccagagtcgccgccaccgagggatttggctccccagtggggggtgggggatttctgacctcctccctgggagctccccagaagcgcacagcccccgtggaggggtcggggggacgtcaaagcagggatcgtgtgacttagtgactcagactgccttctaggcccactcctctgagatcaggatatgagactgacagccaggcagagcccagaggaagggccagccacgcagctccagcttcccggcgggccacaagtccatggctacaaacacttgccgggtccacggagcttgctggagaagcagggatgcacgcagggacgcctctggggccccaggaggagctgccggcctcctgaatgaagatagccatagccagccacgccgatggccacgcacgtgggccgaggaaacgcttggcgaggccaggaaggggctgtgcggggagggaaggccggaacagcccagtgaccacctggacagcatgctgtggctcccagcgtgcccgggcagccatcctccccaaggatggcccagctccacactcacggctcgtttctcttcagggtgaagctggcccgcagggtgatcagggaagagaaggccccgttggtgtccctggagacccggtaggaagcgctgtggggttggggggcgttggccaatttgggttttgggggtagaagtgctccagcagctcacgcactgggggtctgttcatttccgtttgagggcctctgtgtttccgtagatctcgggggtgtccctgcgtgggagccggctgcagggggtgaggcgcggcctgggccgggctggtgtggattgttgagagcaggcccagcgcccgggggcctgacgctgagacgctcagcccaggtggagaagcgctgtctgggggcccatccggggcaagggtgcctcacagtgaggaagaggtgttggagcccctgggagacactgggagcttggtcagcatctgtttttctgggtcaggagccaggcatgactgtggctggaggtcaactggggagtgtgaggctatggaggtttccagaatcccagggtgtcaggatgaaaatgcactttcatctcattctaaattcccttctccgagcctctggaatcgctgtgcacgccgcacggctttctgtctcttcccccattctgatgactgccatgatggtggctccagtgtggtgttgcccgcaggctgggctgggccgttgcatcctcccggagctcacctgccccacggggacaggaaggcctccacacggtcacgcccggagacagcaagtctgtgctcccgagcttgtctgcttctgtggacaaatcgaccttacggctccatgtgcgcagctgcccacacaccgagcacaaggccagaccctgggcacggcagctgtctcagacgtccagcaagatggggcctcagacccagggagatgggagaggccgtcccagtgcaagtcacatttgtatttctgtgcacgaggtgaaatcgtgcttttgtggtgccaacgggtgttacacagctgttaaaaatacctgtgtcatagatgaggaccagggcagggcttggcaggcggggtctgggccgttcgtccacctggtcctgcgtgccgctcacggcaggggcagaaagggctcccgacaccttcctggggaagtgcacggcctcagtctctgatcctctttgctctttgagctcccggggctccagccctgaggatgatctgacctcccatgtggtcacccaggacagggccaggtgcagggcacagtgcgtggaagaggccatgcagccagtggcagattgtggggaggggacggcccagggccacgttccaggcttgggaggctgctccagaccttggtagctgaaagtctcagtgggaatgagcgttcagaggccaggacttgctcggagaattctaaccacaccctgcctgttttatatgttcagttttcaaagtaatcaatagccactataagaaaaaaacaaagccactttcaaagggttgtggtaagaggcagtcctgtgagcaggccggctgcagggcctccagggctgtggggcaggctgcacaggggctggtgggtcccatgcctgggggtctgggaatagtctctaggctgctgtcctggaggaggtttcccccaacgcctgagaccagggcaccatgtgacccatgactcacagttgcctggctgaggcaggcacttgttcacctggagcctccctggggcctttcggggcccgggggtgtggataggtggctttggagccacatttgtccatcgggacgttgggctcccagctggccttccgggctttccctgctcccagaacctccctgctcagcccttgccagccttacccctcccctccaccctgcccagcatggggctctccctgtgtggatgccagaagcagttgggccctcagggctggtcccaggaggtgcccccagtgaggtgctctgcagaaactgcccagtctggcctcctgctgtctgtggcacagtctgactgtgtgtggtgaggtccaggccttctgcctcccacttacctggcccagggcacagagacctcctttccatccttcctcctggcccccttttcgtgttcccaaggcaggatctcagggtaccagactaacccctgttgaaccccaagtttggtgagcttctggacctccttgaggcccgtgtgcaaagtccccagtcaagtgtgcagtcctgactgctggggcgttgaccacgaagggtgcaggagcttcacagccaggcctgggtgcttgcacagtcggggtagagagagcaatacactagatgcctcctgtctgcctggtggaggccacggggtcaggatggtgaatgggccaagtctggtagtggggaagttgtaaacatttgaaccaccggacaggcctcatcgggaagcatcagcctaaccacaggccagggacaggcgtctgagcaggcacaggccagggacaggcgtccgaccaggctcatggctggggccaggtgggccaggtgggccaggtgggccgggcgatgtgtacacggctcccttcttggctcagctgggcgcgctgggaagtgcttggggtgcctgggctagactccgaagggcagggactcgccgctggagttgtccacggagcaggccctcaaaggtgggagctggggccagctctggaaatagacccccacagggtcctcatgagatgtgggggacccaaggaagtccagcaggcagcctcaggtgcaggtgggggcagggtggtgtccaggctcagcccacagagggtcctgcggttgggggtgggctaaggggaccaggccaggcccaaaggggaccatgagggagggcagtctggggccactctgataggagaaggggcaggtggtctgcggcctggggacctgtagcctcacccctccgtggggacctgaggcaccagccgggcactcaccgaagtcatctgggacaggcttcacccttccgtgggggcctgaggcaccagccgggcgcccaccaaagtcatctgggagaggcttcacccctccgtgggggcctgaggcaccagctgggcgcccaccgaagggcttcaacacttgtgcccaggcccttcgtgcaggcccttcgtcagacccaagagtgggcctggctctccccctgcactgatgggactggggccagagcctgggggccctgatgcctcttggtctgagaccctcagcttagggtcagggagggctcaggctgggtgaggcctgtggtccaacgtgccatatccatctctctacagggcgaggctggccctatcggacctaaaggctaccgaggcgatgagggtcccccagggtccgaggtgagtcccactccccacccacacccgcccacccaggggggcctgaggatccagaacccactgtctgcccagtgctggccccgtgccctctgaggactctatggccctgggtgtcctggctcccgatgggacctctcccggccccaggagggccctgcttccctccaaggtcaccatgctaagcctgctcccctcacgcctcctcttcctcctcagggtgccagaggagccccaggacctgccggaccccctggagacccggggctgatgggtgaaagggtgagtgtccaacagctcgggccctagggcggaggcctggccgccagaggccctgggaagccccagccccgcactgtggagctgcctggggtccctgaccgggccgggagtgcccgcagcatcactggctcctggccacagtcggcacctgagccagaggccgcctcggcagggcccctcctgccccgagatccgggtcccagggtccacggggaccagcagggtggccccaggggagggagccggcttctgggctgacggaggggccctgcgggtgaggtgctcccgggcctgtgccagccagtgggtatcccaggccaggccgattcgcacggtgacggctactctgctcccccagggagaagacggccccgctggaaatggcaccgagggcttccccggcttccccgtaagtgtccggaggctgagcccacaggaacatgcccaagctgcctgcggcgccctctttagtggactgggcactcttgggtgggcgggctggccccaggaccgccggctggcccaggaattccatggccgggattctgtcagctcaggcccttccgctgtgcgcccctcacagcctcccctctcaaatcagaacccggtatcactgccctgcttttccatgacaggggtatccgggcaacaggggcgctcccgggataaacgtgagtacgccccctcctccatctggctgtgggcacacaaacattcacagtcacagggacacgcacgtgtgaacacacatgtgcacacaggctcccgagcaaacacacggggtacacaggcacccacggctgccccactgtctgtggccacagccccagttggcatcggctcctgcaggccctgcgaggctcccactgtggtgtggcctgtgggtctcctcacggccctgactgcccggtgaccgatctcccctcggtgcgcagggcaggcccagccccagaggccgccccacggctctctaggccactccgggacccagtttctccagcccaggaaatgtgtgtggtgggggaagggaagagaagagtgcctctcttatctttatttttttccttttaaaatttccacttcctaaaaacaaaataaaacccttgttaaccaagtgctctcccgtcactgcagggcacgaagggctaccccggcctcaagggggacgagggagaagccggggaccccggagacgatgtaagtgtggatgggaggcagggccagccccaagtccacctgagccagagggctgggcccttgaagggcagtggaccaggacccgcttggggaggcctcatgggccccggctgctggatgctctgtggacggggccagcgcgcagatgcccgggtggtgcacggtctgttgacacaacgctgttcccttctagaacaacgacattgcaccccgaggagtcaaaggagcaaaggggtaccggggtcccgagggcccccaggtgggtggatgtggctgggtgaggccacggtgggctgtgcctgggacgccggatgctggggctggggaatgctggaagaggctgggagagtgggaggcggcgggagggaattttggggagcacgtcatctgggaggccctgggggtgggaggtgccggtcaccagggccaggtggtggccagggcagcagagccgagcccagggacacagcgggtcctcagggtggggcccacctgggatggccgcctggaccaccagtgtgcgaagccccagctgccctcacagcaccgtcactggaggacgaggggctgggtagggagggaccgggcaggggtgggcttgatgaggggcagggccctgggggtgggggctgtctcagctcaggaagcacagtgggctcctcaccctcagagctcctctactccgtttctcggacagggacccccaggacaccaaggaccgcctgggccggacgtaagtggggctctgtgaacattgctgggggcgaccactgtagcttccatcccttggggtgtgggtcctgtccatgggtgctcctgtagacgctgctcacgggggggtgggttgtggacaaagagctggtgccaggccctagggacccgtgacggccatgggaggacccgtgaggatcatagggggatgtgtgaggaccatagaggggacatgtgaggatcatgggggacatgtgaggatcatgggggggacgtgtgaggatcatgggaggacgtgaggatcatggagggggacatgtgaggatcatgggggacccgtgaggatcatgggggacccgtgtgaggatcatggggggggacgtgtgaggatcatggggggacctgtacccatgaggaccatgaggggacccgtgacggccacggggagacccatgactgcgctgtttctatgaccacgtcaggggtccagcccagtagcaggggtgtagtgggcagagccgggcacacctgcaaagaacctcctgcccaaaccccgccctgtgggggccccagggagggtgacctggagatccagcagcccacagtccccgctgggaggggctgtctatggccccagtaccctcgtctctccctccccaggaatgcgagattttggacatcatcatgaaaatgtgctgtgagtatctctgagaagccgtcctcgttagggagagcagggccgccagcctggcctgttccactcctagaagggtgtctccactgttgggggcctgggtctctgggtacatccttgaggaggctcctcagccagcccctaccggcctccaaagccctcccaggcccccgggtccccgcacaggctgagagtccccggtgcggtgcagagctgccacgtggggagggcggccggggaggcggggaggcggggcaggaggccggggaaggggggaggccggggaaggagggcggccggggaggcggggaggctgccccaagagtaaaagcctttctgacgtgcgcaggacgcggccctgactggtctaactgactctttctcttctcctcagcttgctgtggtgagacccaggctctagctcctgagagaatggatcccgggggtcggggagcgaggcctgggtcccacacatgtcacaggacagcacatggcactctggtccccgcccgcagctccctgcacctgcccgccccctctggggcctgctccaagccagcagggttcccgggtgttgggctgggccccgccctctttcacccataactgaaataaccaggagcaggcttgggggggtccctgctccatcattctggcccacaggccccaccctagcctggctgagcaacgccagccctgaccagccgccggacagagcagcctttacggggccatgggagggggtgggcttttctggggctgagacggggggaccccaacgtgtcaggtgaggatgtggcagccaaggaggggccagggcggtggaggggaggggccagggcactggaggggaggggcgtgctctgctgacaccgcccccgcctgcagaatgcaagtgcggccccatcgacctcctgttcgtgctggacagctcagagagcattggcctgcagaacttcgagattgccaaggacttcgtcgtcaaggtcatcgaccggctgagccgggacgagctggtcaaggtgaggcctcgccccgcccggctttctcaagcccaggtgcaccccgaccctgccggccgcccctgcccgcgccagacctcagcctcccgaggccaccgctgcatccctgtgacttccctactcatgacaaggatgccaggcacgcgccagcccgtccaggcctccagctccacctggcgaggctggcccattgtacacaggcgccccagatgagggagggtctccccctctccttgaagggcggtagtctggggtcctgagtgctgggtgtgggcttgtccctcgtggacagaacccaggagggcttcatccaccaaggaagattgctttgcagggtacccaggtcccgggggctgtgccaccctctgggcacccggagccaatcgcagggtacccaggtcccgggggctgtgccaccctctgtgcacccagagccaatcgcaggggacccaggtcctgaggtcctgggggccatgccaccctctgggcacccgcagccaatagagtcacccttgggaagcttatgcggacctggggcagcactcgcgtcctgaccccggtgccggtcccacagttcgagccagggcagtcgtacgcgggtgtggtgcagtacagccacagccagatgcaggagcacgtgagcctgcgcagccccagcatccggaacgtgcaggagctcaaggagtgagtgccccacgcggccaggaccctcccacccctcgccccgaccgctgttcccacggcaggtcggccctgacccctgatcccaggtgggctcggccccgcggcaggcctggccccaaccggcccttcctgccctttgctatgcagagccatcaagagcctgcagtggatggcgggcggcaccttcacgggggaggccctgcagtacacgcgggaccagctgctgccgcccagcccgaacaaccgcatcgccctggtcatcactgacgggcgctcagacactcagagggacaccacaccgctcaacgtgctctgcagccccggcatccaggtggggtggccacccccaggctgcacctgccccgcctagggcgccccgccagccagggtggccttgtccccagaaagacgagggcagagcaggctgcgccacaccgatactgtctgtccccacaggtggtctccgtgggcatcaaagacgtgtttgacttcatcccaggctcagaccagctcaatgtcatttcttgccaaggcctggcaccatcccagggccggcccggcctctcgctggtcaaggagaactatgcagagctgctggaggatgccttcctgaagaatgtcaccgcccagatctgcataggtgcgcatggggccacccgggcagtcccagatctgcgtaggtgcgcgcggggccgcccgggcagtcccagatctgcgtaggtgcacgcggggccgcccgggcagtcccagatctgcgtaggtgcacgcggggccgcccagggccgtcccagatctgtgtaggtgcgcgcaggcgcccagggctgtcccagaggcctcctcccagctcactgttacctccaggggcacggccaccctgtaggtgcgcacggggccgcctggggctgtcccacaggcatcctcctcccggctcgctgtgacttccgggggcacggccacccctgtgctcggccgggaggtcctgtgacatctccttgcggggttataggtggagcagtgggctcacactgcacggcttttctcttttacagacaagaagtgtccagattacacctgccccagtgagtacctcggcggccgggacacgtggggaggagggcaccgtggttggggcgagggctctgagaggacggggctctgggaggagggcctggcggtcacgagagtaggtgcatggctcactccggtggctgagcaccaccgtgccgtgccctctctggggagcttagacgctctctggccggcccactgcggctgcatcaccagggcctcatgctaacggctgcccaccccgccccgcagtcacgttctcctccccggctgacatcaccatcctgctggacggctccgccagcgtgggcagccacaactttgacaccaccaagcgcttcgccaagcgcctggccgagcgcttcctcacagcgggcaggacggaccccgcccacgacgtgcgggtggcggtggtgcagtacagcggcacgggccagcagcgcccagagcgggcgtcgctgcagttcctgcagaactacacggccctggccagtgccgtcgatgccatggactttatcaacgacgccaccgacgtcaacgatgccctgggctatgtgacccgcttctaccgcgaggcctcgtccggcgctgccaagaagaggctgctgctcttctcagatggcaactcgcagggcgccacgcccgctgccatcgagaaggccgtgcaggaagcccagcgggcaggcatcgagatcttcgtggtggtcgtgggccgccaggtgaatgagccccacatccgcgtcctggtcaccggcaagacggccgagtacgacgtggcctacggcgagagccacctgttccgtgtccccagctaccaggccctgctccgcggtgtcttccaccagacagtctccaggaaggtggcgctgggctagcccaccctgcacgccggcaccaaaccctgtcctcccacccctccccactcatcactaaacagagtaaaatgtgatgcgaattttcccgaccaacctgattcgctagattttttttaaggaaaagcttggaaagccaggacacaacgctgctgcctgctttgtgcagggtcctccggggctcagccctgagttggcatcacctgcgcagggccctctggggctcagccctgagctagtgtcacctgcacagggccctctgaggctcagccctgagctggcgtcacctgtgcagggccctctggggctcagccctgagctggcctcacctgggttccccaccccgggctctcctgccctgccctcctgcccgccctccctcctgcctgcgcagctccttccctaggcacctctgtgctgcatcccaccagcctgagcaagacgccctctcggggcctgtgccgcactagcctccctctcctctgtccccatagctggtttttcccaccaatcctcacctaacagttactttacaattaaactcaaagcaagctcttctcctcagcttggggcagccattggcctctgtctcgttttgggaaaccaaggtcaggaggccgttgcagacataaatctcggcgactcggccccgtctcctgagggtcctgctggtgaccggcctggaccttggccctacagccctggaggccgctgctgaccagcactgaccccgacctcagagagtactcgcaggggcgctggctgcactcaagaccctcgagattaacggtgctaaccccgtctgctcctccctcccgcagagactggggcctggactggacatgagagccccttggtgccacagagggctgtgtcttactagaaacaacgcaaacctctccttcctcagaatagtgatgtgttcgacgttttatcaaaggccccctttctatgttcatgttagttttgctccttctgtgtttttttctgaaccatatccatgttgctgacttttccaaataaaggttttcactcctctccctgtggttatcttccccacaaagtaaaatcctgccgtgtgccccaaaggagcagtcacaggaggttggggggcgtgtgcgtgcgtgctcactcccaacccccatcaccaccagtcccaggccagaaccagggctgcccttggctacagctgtccatccatgccccttatctgcgtctgcgtcggtgacatggagaccatgctgcacctgtggacagagaggagctgagaaggcaacaccctgggctttggggtcgggagcagatcaggcctcagtgggctggggccggccacatccaccgaggtcaaccacagaggccggccacaggttctaggcttggtactgaaatacccctgggagctcggaaggggagttgagatactgcagggcccataggaagaagtcttgggaggctccacctttggggcagaggaagaagtcttgggaggctccacctttggggcagagcaagaagagggcggagggcagaggcagcgagggctcatcctcaaaagaaagaagttagtggcccctgaatcccagaatccggggtgcacggctgttctgggggccgctaggggactaagaggatcggccgagggctgggctggaggagggcagcagggatgggcggcgagggtgagggtggggcttcctgaaggccttcacctgcggggaccccggcgagcccctcaggtgccacaggcagggacacgcctcgctcgatgcgtcacaccatgtggccaccagagctgcgggaaaatgctggggaccctgcatttccgtttcaggtggcgaacaagcgcccctcacagaactgcaggtagagacgggcccggggcagacgcagtgaggcggtgggcggggcccggggcagatgcagtgaggcggtgggcggggcccggggcagaggcagcgagcggtgggcggggcccggggcagacgcagtgaggcggtgggcggggcccggggcagaggcagcgggtggtggccggggcccggggcagacgcagtgaggcggtgggcggggcccggggtagtcgcagtaggtggtgggcggggcccggggcagacgcagtgaggtggtgggcggggcccggggcagacgcagtgaggcggtgggaggggcccggggcagacgcagtgaggcggtgggcggggcccgggtcagaggcaacgggtggtgggcggggcccggggcagacgcagtgaggcggtgggcggggcccggggcagatgcagtgaggcggtgggcggggcccggggcagatgcagtgaggcggtgggaggggcccggggcagacgcagtgaggcggtgggcggggcccggggcagacgcagtgaggcggtgggcggggcccggggcagacgcagtgaggcagttgccagcctctctcagctgcctcatgggattcgcactgcagctgcggccctggcgcgacaagggctggacttggccagcgggacggtccctcacggcgctgaggcccacactctgcgtggagcctccccgtgcccaggctaccctgcaaggtcctcggagaggcttcctccagccccagcccccacacagctccggcccaggcccgctcttccccatcccagttgctttgcgctgtatacggccaggtgaccccgagccggccctgagccctcgtcccggcttcctcccctgtaagctgggtgaaggactccatggcacccacctgagagggttgtggcgaggcccaggcccctcgtgcccacacggccggcggcccatgcctggcaggggctgggaggaggctggggcgaccagaggggagcggcctgtcctggaggaggcccagggaccctggtgagagggtctctcccaagtgctctctatgggacccccttcctctgcgcccgtccttcacggacctctccgggtcacccctgggctgcacactgggttcaggggggccttgaggtggggcccctgttcccaagtcccggcggggtttctcctgaacctcaacccatcctcacctgcgggcattcccatcccccaacgcctgggtcaccaggattccaggcaggaggggcggtgggggttaccaaggcccgggttgccatgcagaacccccagccaccacgcagacccccacggggcccagggaagctcctggtctcacactgcacctcacacttcctgtgggggcagactccaaggtcccggcctctcatcttgtagaaactgaggcacaggagggacacacactcccacggccggtcaccgtggcccccacacctcccactggactgacacctggccaggctccggacacccgtggcacagcctcagcccctgcggcccctgctccgtggcccccaggccccagctcccatgtgcacgtcctgcctcaggcctggaggcccctcggccccaaataatcagacaattcaacagcaaaactacttttttcaggctggcaggactctgggcaaccccctgcaacagccccctgccctatcacagccacccttgcctcccaggcacggagaccccaccatcaggtcccagccttggttcatccccaagcaccctgtgtgttgggatggcgatgctggctgagcccctgcatccccactggaatcccttgggggctctctggccacccacatctctccctctccttcccactcctcccaggagctggggctccgacaccctgggcttcagggtcaggagcaaatcaggcctggatgggctggcgcaggccagatccaactaggtcaacccaagaggaccagcccaaggctctggatttggtactaaaacacctcagccaaggggccttagggctgctgtgtccagtgtgtgcccaagaccctcttcctgaagggatgtgagaagccacgaatgtgagtttccccgtgcattcggccattctcacactgctctaaagaactgcccaagactgggtgattttttttgttttttgttttttttttttttgagacagagtcttgctctgttgcccaggctggagtgcagtggcgcgatctaggctcactgcaagctccgcctcccgggttcacgccattctcctgcctcagcctcccaagtagctggattacaggcgcccgccaccatgcctggctaatttttttttttttatttttagtagagacagggtttcaccgtgttagccaggatggtctcgatctcctgacctcgtgatcctcccacctcggcctcccaaagtgctggaattacaggcgtgagccaccgtgcgtggccaagactgggtgatttataacgaaaagagattccattgactcacagttccagatggctggggagtcctcaggaaatttacaatcacggcagaaggggaagcaaacacgtccttcttcacatggcagcaggagagagaagcatgaaggaggaacttccaaacacttataaagccatcagatcacatgtgaactcactcactatcacaaggacagcacgggggaggccacccccgggatccagccacctccctccctcaacacgtggggattacaatttgagatgagatgtgggtggggacacggagccgaacagtatcacctgcttcaagaagggaagtgccttgatccctgaaccatcctccaagctggtggccgcactgtgcttctcacctgtggcctcccaggtcaggaggagaggctaggacccccttttgttctggacgttccccacacagaacagctcaactttgaaaaaataggaaagaaaccttagcccatcaggcccacacttgttcccagtttagaaaagtgatgtttcagatcatcacaccaagtctccagataggagggcaaagccagtcaccctgatgctctgagtggtgtttcagatcatcacacgaagtctccagataggagggcaaagcctgtcaccctgatactctgagtggtcagagaccccagtccttcctggaccatccacagcatggctccttgactcctaggtcagagcaggctcctgcctcttcctggcccctcctgtcctggtgcaggaggagctgggacccactggcctcaagaaggcagggggttggcaggaggcacagagccccgggatctcaggcctgtcaggagggtcttcccctgcaaccatcaatcctgatccagaaccgtgggggcagtgccaggcctgcgctctctccttgggagcctctggctgcagttccctcccaggaagggtcctcaaggggacagggacccagggggtctgagggggctttggggcctagcagactgtgggggtcccaggtgtctccccagcgcccgctgccagcctccaccagctcccctgtgaggccagccccacccgcccacctcaaaagctaccctagatccaacagcctgagctggggacatacagggcctatttgcccacctcgggacccctgtagctgagtgccatcctaaccaccatccatcaccgggggttgggggtggacggaggcctgaggccacttttgtttttcctcctgccactgcagctacgatagcccaacgccgcgcaacgatgacaaacgacctcagctgtggctttgctgtgaccctttcctggacagcaccagtgctggggtcctcactttcctttcttggattttgtttctccttgttatgttccacttttaatctttcgagatgtgttgtcttccacgcatgtttgcagacagcagtactcacgtttccaaacccaatccaatcatctttgctctttatggaaaagttaaacacattcatatttcagacaaatgatatttggccttttcaacgcattttttatgctacgattatggaagcatgtggaggggttgtttccattccatccaaggtcagtttgcctgtgcggttccctgacgcccgcccgagggagacctccgggttggtgaaatgactgagcacaggtgtcctcccaccctccgcgctggctggtccgccagcactttctgcagagacagcttctagatggcagcgctccccacacaggttgcagaccatgtccctctccttctcgcagctccaggtggtgatgcctcaggccctgcaggctggggaccacatcttgagtgagggtgcggtgtcgcctcagggacatgagttaaactgtgagagacgccccctcacacccctaaaaggctgaagctggactggcagcaccagcgccggtagtctgcaaggatgtggggtgactgcagccctcttgcgggctgtggggtgcagctgctttagaatctcccctccgtttctcaaagcccagtacgcacttgcccacctcagccaagctcctgagcgtttgcccagataggtgaaacacagaactcatgcgcaagtccggagagacgcgcacggatgttcacagcagcttcggttggtgagtggactgggagcagttccgcccccacccagccagcttgaaacaggaggctgagcctccagtgaggtgtcgacgcattgatttcagctgtgagaccccagcacaggccccagctgagccgcgaccaggcgtctgaccacagagccggcgagatggcacgttggtgccgctgagaccccagcacaggccccagctgagccgtgaccagacatctgaccacagagcaggcgagatggcacgttggtgccgctgagaccccagcacaggccccagctgagccgtgaccaggcgtctgaccacagagccggcgagatggcacgttggtgccgctgagaccccagcacaggccccagctgagccgtgaccaggcgtctgaccacagagccggcgagatggcacgttggtgccgctgagaccccagcacaggccccagctgagccgtgaccaggcgtctgaccacagagcaggcgagatggcacgttggtgccgctgagaccccagcacaggccccagctgagccgtgaccaggcgtctgaccacagagccggcgagatggcacgttggtgccgctgagaccccagcacaggccccagctgagccgtgaccaggcgtctgaccacagagccggcgagatggcacgttggtgcagctctgaggcactgcttcaatacacggttgtgttagaatgaatacgcctcatctttatccccaaccctgtgagctcttcccatatttctagtagacttttccctccctcccccaaccccttgctcctggaatggagccaccattcacccaaggtgggtgcccctcctttcttccacgcggagtgggggcagctcctttgatggctggtttgcacgtcgaccatcccttcccataggtctcctggggaagtgacaccttccctcctcctgtcagccccaggaccgactggccccacacacagacccgcgcaggagcagcagggtctggaccccaggcagtttggtccatcctgggcttagggggcctcctgctgatcttcattctcttccttggagaggacagggcaggagcaaacacctccaagggagtgacctcttcacagagtgacctctccaagggagtgacctcctcacgggagtgacctctccgggggagtgacctcctcacgggagtgacctctccgggggagtgacctcttcacgggagtgacctctccgggggagtgacctcttcacgggagtgacctctccaagggggggtgtgtgcatgtgtgtgcgtgtgcacgtgtgtgcatgtgtgtgcgtgtgtgtacgtttgtgcgtgtgtgtacatgtgtacgtatgtgtgcatgtgtgtgcgtgtgtgactgcatgtgaggatgtctgcctccaaaagtgggggtaacaatagtgtgcagcctgttcttgttcctgactttggcagaaacgccaaaagtgtgtcccactaagacactgtttctatttgtccataaaaatgaggaaataaatcttgtttttcatagatggagatgattatataattagcacctttgaaatcgtggaagcctggtgatttggggtcagggatcgaagggagcagttctgatttttgtatgtgaatgtgtctgcttagattttctatatttacttagttaatttcagtcagtcatataaaactgtcttttctttcaggtttttcagtgtttgggtccggtgttacagtaatcttctaagatttttttccccttcttataggaaatcacttggtgattaggccaccaagaacatcattctgacaatcatcggaattttaatatgtctgtgaattggatgatggcattgtatcagtggtatcaatgttaaattcctgattttgagcactgtatgtggttatgtaagagaatgttcttgtttttaggaaacacatactgaagtatttaggaataaaataatactgactccactcagcgacgggattagcttttgtttagtagtttcaataagcaactttgcaaatgtgcaatggccacaatgtttttaacaaaggttccatttggaataaatttgctaataccacttaagtaagaaaatggggtgtgtaaagtaaaaattctaacacataactaacatattttggtgtgtatttttacagcagttccatgtctattgttttctgaatatccagagtaacccagaatgttctaaaatgtaggaggaaaacacaggacctcacacaagctgcagactaagtttctcttgggaaaaaaagtgataaatgttactaaattactgacacccccctaacaaagtttgaaaaaatcgagttttactgatggtgcactgccatgtttatttcttcacactcccatagctatgaacattgtacatagtccttgtgtggacacatactttcatttctttgggtaaatacctaacagtggaatggctgtgttatatggtagttactattaactttttaagaaatagccaaattgtttccaaagtgatgctaccatttaacctcctcatcagcagtgtatgagcactgcttcacaccctcagcaacgcttggtcggatcagtcctttaaatttcagccactctcacagatgtgtagtggtgtctcgctgtgctttcatttgtatctccctaattactaatgctgttgagaatttgtcatgtgcttatttgccatccatatttttttttgttaagtgtctctttaaatcacttgcccatttaaaaacattgttagttttcttactattgggttttgagagtttttaattatgttctagaaaagtgactttagtcagatgcatgatttcaatagtttttttgccaaccttgttttcattctcataacaatgtatttcaaagaacagaagtttttaattttgatgaagtccatctcatctttttgtttaatgaatcctgcttttcatatatgtaagagctctttgccaagcccaatattttcctctgtaagtttcatagtttcaggttttaaatgctctgttttgaattaataattgcatatggtacaagatatggatccaagttcatcttttttcaagtggatgtccaattgttccagcaccgtttgttgaaaaaactatcatttctttgctgatttttattagctccctggttaaaaaaattagttgtgaatatacattaggatttatttctggactctatgctgctccattgatctatttgtctatcttatgccaatattacactgtcctgattactgtggctttacaagtcttgaaattacagagtgttaattttccaatgctgttgtcctttttcaaagttgttttggctattctaggtcacttgaattcccatatgaatttaaaatcagcttgtcaatttttataaaatagcctgttggaattttgattgaatcagcagaccactttggggataactgaccacttaacagtaacgatggacacagttgacttagttcattctgtgttgttataaagggatatctgaggctgggtaatttataaaagaaagaagtttatttaggtcatggttctgaaggatgtataaggagtatagagatggaatctgctcagcttcttttgtacagctttagaacatggtggagaaggtcagaaaggaagcgagcacatgcaaaggggaaccaaccctgatgtgcatcctgactttatagccacccactctctcaggaactggtgcattcatccagaaccaatccagtcaccttacagacaaacatgcagaccacagcaacagtataattctccatttatttggatcttatttatctcagcaatgttttataagtttcagtgtataggttttgcttatatttgtatagatttataccctaagcagatcatattttatgtcaatattgtaaatggtaattttaaatttcaatttataagtatttgttaataacagatagaaatacaattgatttttggattttgagcttgtgtcctgcaacaccgctaaacttattatttgtagcagctttaaaaagattccattgggctttctatatagatgatcatattgtctataaataaagacagttttacttctgttattccaccttagatgactcatttctttttccaccttgttgcactggctagaacccctattccaatattaaaaagaagcagtgaaagtggccatccttgtcccgatcttagagtttcccactaagcataatgttagctacaggtttttcagagatgcactttaacaagttgaggtacttcccttctattttgtgtttgttcagagttagggtttttttttattttaataaagaacagatactggattttatcaaatgctttttctgcatcttttgaaataatcacaatttttctcttttctagtttgttaatatggtgaattacagtagttgattttcagaacttaaaccatcttgtaatgttcatttatttacaaattttttaatgttttgttctgagataattgtagatttccatgcagttgtaagaaacaatacagaaagattctgtataccctttacccagtttcccccaacgttagcatcttgcaaacctatagtacaatggcacaaacaggatattgacatcaacaggaccatgataaagaacaattccatcaccacgaggatcctctgtgtggcccttttgtagccatacccacttttctcccacctcaatcccctccactactggcaaccactaatctatagtccatctctataatttcatcatttcaaaactgttatatgaatggaatcatactatctgatctttttggatggattttttcactcagcataactctttgaaaatttatccatgttatttcaagtatcaatagttcataattctctgaaaatttatccaggctatttcaagtattaatagttcatttctttttattgctgagtagtctttcatggtatgaatgtaccacaatttgtttaaccattcatctgctgaaggatatctaggttgtttccagtttttacctattatggataaagccactataagcatttgtgtacaggtttttgtatgaacataaatcttcatttctttgggataaaatcccaggagtacaaatgttgggtcatatggtagttgtatggttagttttttttaaaacttccaaattattttctagagtggctgtatcattccctctagcattatgttgatccaatttctccacattcttgtcagaatttggcattgattatagcctttattttaaccattctgatagatgagtaatgatatctcatggtttcgatttgcatttccctgatggataataatgttgacacgttctcatgtgactatttgcaattgatacattttctgtagtgaaatatttcttcatgtattttgcccagttcctaattgaattgattctttctgttgagttttgagagttctttatatattctaatactagtcctttgtcagataagtgatttgcaaatattctctataattctgtagtctttttatcctaatagactctttcactgagcaaaacttttcaattttgataaaataaagtataatgtataattttttttccttttatgtattgtattttggtgtcaagtctaagaatactttgtctagcactagatcctgaaaaaattttctatgtttccaaaagttttatacttttatatttttcatctggttccacaacccattttgaattaatttttatataagttgtggcttaggtcaagtttcgtatttttgcttatggacatccaattactccagtaccatctgttgaaaagcagttttcctccactgaattgtttttgcatctttgtgcaaaactgagtactctttcagctctgccctctcttgcttctttccttgtgagaccctggtggcatgcatgtcagatcttcagtcagtcccacaggtcctaaggctctattcttctcttgttattcagattggataatttatattatcttccagttcactattctttgtttccttcattcttctccttttttaatttttttttttattcgagacagagtctcgctctttcatccaggttggagtgcagtggcacgatctcgactcattgcaacctccgcctcccaggttcaagtgattctccttcctcagcctctcaagtagctgcttcattcttctcttgaaccatctactgagctttttattttggttactatagttttcaattataaaatttccatttgattcttctttacatcttctatttatttgataggactttctattccattgctttgttgaggctatttttttttcatttgtttcaagaatgtttgtaattgtttgttgaggcggtcttatcatcactattttaaaccctttgttagataattttagtatctgtcatctcagcactgacatttttggctgtctttttcattcagtttgaaatcttcctggttcttggtatggttagtaattttttattgaaacctggacatttttatactatgttatgagactctggatctcatttaaaaacttgttttagctggctttctttgacactggtctagcaaagggagggagggaggcactaccttgttactgccaggtggaagcagaaatccaggctcccactaaggcctgtattgatacccaagaggaagggggtaacttgttacttctggatggtggcaggatttctggctcaccatgtggtctccactgattccactctaggggaagcctcattactgttgagtcatggtggaggtcttaactcctcactaagcctcctccacctcaccccactggggaggtaaaggcttactttattactgctgagtaggagtggaggtttaggttgtttgtggtttccactgaactgtgaggtgtggggtgtcatgccttatgatcaactggtggggatagaaatactggctctctacttggcatgtgacatcattctcatgctctacttggcatgtgacatcattctcatgagcatgaaaatttaggctccccaacttgggctttgcttgcataggtgagggtgaggccacaaagtttctgtcttcctaggttgttcctatcctggtcctctggctagaaacagtaaactcttattagggatatttttgtctgccctttggtgtttctaggtttccagcttcttcagctccatatctgggatatacaagggaaaaggaaaacccagggagctcaacaccatatcattcttcaaattcccgtgttcctagcagatctgccttctttgctccacctttcagaatatttttctatttgtttcacatataattttcagggtctttttgttgtacttggcaggaggaatagggaaaagcatatctacgccaggtcccagagaggaagtctgttccatgtggttttattgctatgttatttggtgcattaagatttcatggttggctgagcaaggtggttcaggactgtaatcccaacactttgggaggctgcttgaacccaggagctcaagaccagcctggacaacatggtgaaaccgtctgtattaaaaatacaaaaaattagcagagcgtggtggtacacacttgtagtaacagctactctggaggctgaggtgggagaatcacatgatcctgggaagttgaggttgtagtgagccatgattgcaccactacactccaccctgggtgatgcgagtgagaccttgtctcagaaaaaaaaaaaatcatgatcaatatacagtgctgttttaactcacttcataatttatgtcttgaatttaatctgcctttgtttctctaggttttaatgtgccctttctgaatcactttgttgtggatgaatttcttatttacttggactttactacatctttcaataggtaagtatatttaatttgcatttgacacattttgttttaatgccagcattttacattttctatttataatgttttattttctaactctcactgtatgaacttctttcagaagtgggatgttttccttatggtgatctgaaagggttacactgttcaattattccacttttttctttcatatattataccctatattagtctccctgggctacaataacaaagtaccacagactgggtgacttaaacaacagaaatttactttctctcacagttccggagactggaagtacatcaaggtgccagcataggtgatttctggtataggggaggatctcttcctggcttgaaaacagtggctctcttgccaggttcacacatggaaggagattgtgagggtatagaaaaatatttggtgtctctaaggacactgctcctatcagatcagtgcctgacccttatgacctcatttaacctcaattacttcctgttttaaatacggccacactggaagttagggcttcaacatacaaatttgagagaggaggaggcacaagcattcagtccataaaacaccccaacactctttttgtagatttagcactttagacaatgtctattgaacatatacgttaaaagataagaaaagcagcagaccttctcttacctacttttctcacctctcctcctcttacctactttctgatctttcctgattataattttttttttttggacagagtcctgctctgttgcccaggctagagtgcagtggcacgatcctggctcactgcaacctctgcctccgtgttaagcaattcccctcccccagcctcccaagtggcttggactacaggtgcacgctgccactctgggctaattttttgtattttagtagagatggggtttcatcatgttgcccaggctggtcttgaactcctgagctcaggcaatctgctggcctcagcttcccaaagtgctgggattacaggcgttaagccaccgtgcccagccaattcattctcatttttattttagttcttcctatggctccctttagaactgttacttcttgatgtttttccaacttagaaactatctgtgccttcccactgtgaaagaccagtattctaatacacttacactcctttccccaaacctcctgatttgtcaacttcacctcataaggatttatgtcattttcttccgagactatctaaaagttgttgagacttggctttccaagctggcaaccccagccctaattcataaggaatcaccatgggtctggtgggggcaggaggaagtaaggtgagaaaggccacaattcctctgaaattcccacctcctttcccatctccttcagccctctccttttagaggaatcattggggggcagagaggggggcattcccttgggctctgacttctgtcctctcccactgcagcttccaggcagagtggaggcaggtgctgctttgatgcaaggagctgatttcccttcctccactttcaacagtaaaggctgttgctgtttgtcttttcttgctcaaaccgttgtggttcatatccttgggtgtgagggtagtgagacagggggcttcacccagctccctaaaccagaaatcactgacaattcttcacaagtacagagtaggtgctatggtccctaaattactgaagagaaaactgggactaggggaggtgacttgactttctccaggccctcaggcagtggatggtggggctataacatggagccttctccctccttgtcctgtgcttttccttctccagttgggtagagacagaaacattttctaaccacaaaattaagagagcttcattcaccagaggtgtcttggtggaaagagctctcattttctttgtaaaaattcgacaagtactgagatgaagggcaaaagtgttggcacccattctcctcattatggctacttcagaaaagggagttggcataggtgtacctacaatgaactgaagagtttacagtcactaggggaaatgtgggagggaagagaaaatgctgaggctgtggaggggttaagtctgggggatagcaaagtggacttcagaagtccaggtacatcttagtgtttcacaacatgaataccctccgccagcaccccatgtagcagaaagcttttgaggagtgccacattgtagagttctgcacccaggtgaatatagggcaggactgcctacagcatacagaccctggtcctaagacgtgaaatcaggaggagagtcttcatgaagtagaagacccccccaccccaccccaggagaacgctggactttgacatgcctagactcaaagccaaatgtatctggctctttgaaggaagagcagaacttgaacttgacagcttccttgctttagtccttgttactgtgccagaggcggcacagtgctgaggttaagagcataggctctggagctgacctgcatagactcagatctcagccgtcagggcctccatttgctcatctctgatgtgggagtaataacatcacccatggcagaatgctgtcctgagggttcaagtgatctttgcaatgcacttagaccagtgccaagggcgtggtaagtacgatgggaagtatttaaatacaatgtgtaaagctggataaaagtgtctatcgcatggctataagatgaggtgaggctggatgcggtggctcacgcctgtaatcccagcactttgggaggccgaggcgggcagatcacgaggtcaggagatcaagaccatcctggctaacacggcgaaaccccgtctctactaaaaatacaaaaaattagccgggcgtgatggcgggcgcctgtagtcccagctactcaggaggctgaggcaggagaatggcgtgaacctgggagacagagcttgcagtgagctgagatcgtgccactgcactccagcctgggcgacagagcaagactctgtctcaaaaaaaaaaaaaaaaaaaaaaaaaaaaaaaaaaaaaagatgaagtgaggaggggatgaaaactgcctcactctctaggctgctccacgcatatgagctgcagccatccactgctgcgctttttgttaagacagcattcctaggtcagatccccactacttttgccttcatgttgcttttctgtgggttctgtctcctgttcagcatatttatatatcttttgccagttggatctgaggtttcccctagggcttgcgtttgatctcttctcccagatggttcccaaatgtggcggaaaaggctgaggtcagctgccatagtgctgttcagacttccctgtggtagagcacgtacaggatggctgagctgaggcttgcgatgtctgaaccactccaggagactgaggggacaagtacggtaagaagtcccagacacacaatggacttcccatgtgtcaagctgcctcccactaactgggggcacagaaatgaccctgcagactccaggcacaaatcgggaagggacctggagccatcacctggactcgatggtcggccatctcctccaggtggccttcagtcccaacctgagcaggctttcagagcagaggtcctctgctggcttcacatgcataatttggaggtgggagaatctttaaagattctgatgccaggcccaacccagaccaagtcactcccaccatctgggctagagcccaggcccagctagctgccattgacttggaggaaaagcagcccacaggctcaggtctgggatgttagcattccttacgtgatctggaagctacaaaaaccaaacaaaacactttgttcaaacaccacatggcggaggatgagggccactcgcagctgcgcacgaacattccttccgtgagggagatgagcttcctcgcggcctttctggaggactcggattggcaatacttgcaatgtaacaatgtctcccaaaccagcttcccggaaaatgaaaagcacttcggcattcaccctggagcaggaggagctttcaaaacctgcaacaggccccagagctcgaaggccctcaagggtggggttctggctgctgccgtccgttctgctccagccagcggtgaactcagtagcctcggcgtccccagaaaccccgccctcggagcctgggctcccgcttccacgcttgttcccctggggtcctgagggtgccaccacacggggacaggggctgcagcgagacagcaagtgcctggggagtccgcacacaccacacgataagcagccgcagacccggagctgaggctgtggtcccgaagagaaacccttcccagattcccccaggctcctagtccttgcatctcattggctggaggggcatcacgtgtgcatctctaaaccaatcacaggctagatgcacggtggcctggctcctgcttggctctggatgtgcatttccagtgatgtggggcttccagcggcatccatgttcatccaccttgggctgcccctgcctcaccctcccagctgagtgggagcctctttctggtccagagcctcctgctgggctgcttggtgaccgcctggcttgggccacctgggcccgctggtggcggtttgcacagctggggctgtgtagtccccagcggctggccagacaggctgtgcctgctctcactggacccatggggtaactgaggcacagggccgggatccaaacgcagcaccgggtccacagccggcggtgttgatgactccactgagcaggtggttggtcccagcttggagtcgtctgcgtctgccccctcctctggggaatcgggggtgatggcatcacccacacccgtgtggacggtgttgcaggctgttacctcacacgcctcaatgtcctggttcagccaccttctgaagtggatcctctgccttcccatgtgtcgcagatgaggcagtgaggcacagagaggtcaaaggtgcccacccaaacaaacgcggctagagttgaggagccagtgtccgcaatccagggtgactgcattccgagcaccacgccgtccacctgtgcggacgcgtccgcgctctagggtgagcttcaggatggtgtccaggccaggcctgtccgttatgtgtggttatggcaagtctttcctaactgtccagagttttgatggactcaagctctctcaatatcaggaactttaaaaaaggaaagagtccacccaggtctgaatgtagatgttcctgatgtgagcaaagaaaaaaggaaaccccaggaggggaagcttataattttcacctcagtggccaggaccagggcagtgtgggctgcggagggtgactgcaaggcctggggtctccaggatgacttaggagccataaaacttcctccgctcggtttctgtcgtcaccggtctgctttgctgcagtgacaggcagtaaaactgttatcttcaaaatgccttgtctaaaaggcagccaagaaaggaaaaccagggaaatgcatcccattcatgctgatgtcaaaagaagaggcgattccagaaaaaaagcctttgaaggagcaagataatggaaacacagcttaacatgtggtccgggacttagcatgggaaaggcgtcacttttccagaagcatctggttcaaagtgttggtgtcatgtgagaagaaccagcataatactggacgggggtcttgtgggcaggctgtgaggggctctacatgacatgcttgctccctcatgccttacactgcagtgctgagtaccctaagacctgaacccagaaatatctgcatgtggacccaaaggtatgggtcaaaagtgtgaaatgaaacagtattttaaagaattaaaactagaaacaaagataatatccatcagcagggaatggctaaataaattccagcatattcatactggagaataacatgcagccactaaaaagaatgggagagcatcagggaagtacaagttaagactttatgaggccctatcacatacccaacagagtgacagcactctaaaaaggctgataataccaaatgtggtgaggacgtgaaacaactggaactttcatacactcctggaatgcgaagtgattccatcatgtgggaaaataggcaatttctgttaaagctatatatacatctcttcatgatacaatcatttcaccctaagcaaagttagaaaaatcagtgaaatgtccaacaacaattcacagcgacttcattgataacaagccaaaaacttgaagcaactcaattgtctatcacttggctaatggagaaataattgtagtgtaattcatcaatggaatagtatacaacaataaaaagaataagcaatagagacacatgacagtatggatgaatctcacagacattatttgagcaaaagaagtcaggcacagtagagtacatactacacacttccaattattaaacttaagaaccggaaaaatccaaaccatgatgctagaaatgaaaataatggttttctctgggagacaatattgactgggaagaataatgatggaaatgttctatatctcgatatgagcagtggtcacacagtgtaaatatatctaaaatttattgagctatacaattgagatttgggcattttgccatatgtaagttattcctcaattttttaaaaaaagaagacaaggaaagttaatgattaactttgatttttttattttttattgtgcttttagtactctaccaataatgaaaaggcattacgtctgtttgaaaaacaaagtataagtgtttaaagctctaaattataaggtaaacctatttgtgttcacatgaaaaaaatccatgacacactttgactggaaaaagaaagtagcagaatgccagatacaggagagttctgctttatattaacatgagaaagactttgttcccatgagaacaacaagagaaactcaaacaaaattaaaattgtacttttctaaaagactggggtgggggtcgtggtcaggcagcagcatgaagaaagccttgagaactgaattccagaaagaaacaagcataggcaagaaagagagatgacagctcccaggcttcctactgaggtctgaggaggatcggcctgctgtggataagaaactttatggggacaaagtgctgtctgctgaactttgggtggcagtatgaactgatgggacaaattggagtctagaaaagccacaaaggcaaggatagagcacataacctgagcaattcaccttccccactccaagttttgacataaacatagcagtggaggaagggtggctaagcagaaataaaccataagatctcatacttgctgtgattaatggattccacacccctgcctgagttgaaactgcaaccagccccctctaagaccaaacactgacaagtctgaaaaactctatctcaggaatttgaagttgagtaatcacaggttaaagctgcaatttttttttttctcaaggagattctaggagaaagctgagtgattggcttctcaccctcactacattctgaggaaaggaaatgcatgtctaaggaaccaaaacaaaaatgcttcaatcttcattattcatttatacacaatgtgccaaacaacaaaaatatataaaacatgcaagtaagtgaaaatgtatggtttatacttagaagaaaacaaaatctctagaaggagatgattatcagatgaaccagtaattgggaagagaaaatactaaaacaattatttcaaatgtgggtgaacaaatggtatatttcaaaagatgaatgtgaatactaatagaccatatgaaagaaaaaaatcaatgggtgggcttcaattgtataatgcagaagaaagaatcacgaacttgaaggtcactggaaagtattcaaactttttcctcaagacaaaggaaaaagatttttcaaaatatgaacagaacttctgcaaaatgcgggattataacaagaagtctgaaatataagaatttgggatctaaaaatgagagagagaaaatggaagacaaaaatatctgaagaattaacagtttagataaaatggataaaaaccttgaaaaacagaccttatcaaaactaacccaagaatgaacagaaaatctgaaatagaatttatacttaaaaactttctaaaaaagaagacttctgattcaaaacctacagaccaatatccctcgtgagcataaatttaaaaattaacaaaatgttagcaaatcaaacaacaatacattaaaagaggtaatgtgtcatgaccaagtggagtttattccaggaatgtaattcaaaaatcaataaaaatttttcaccacattaataggttaaaggacaacattcacaagatcatctaaataaattcatttaaaactttgggacaaaatttaatatctgttcataataacaactgtcaagacacacggaatagacagtgacatcttcaacttgtaaaattacagataataccatactttataaggaaatgctgaatgttttcaacccaagattgggaacagggcaaggatgttggcgtttattatgtctattcaatgtttgtactaccgaagagcaataaggcaagaaaactaaaattcataaagataggaaaggaaaatgtagacctatttgttcatagagaacatgattgtgtacatagaaaatcctaagtatcaacaacaacaaattactagagctagtaagtgaattaagcaagaactcaggatacaaagtcaatatacaatcatcaaatgaatttttatgcactagcaaacaacagttggaaagctgaaaccatttaatggaaaaaacaccattagtagcatcaaaataaaataatattacaatatttaggattaactttaatgaaagatgcacaagaactgttcacagaaaactataaaacattattgagaaaaattcaagacttaaatgaagatatgttcatgttcatggactggaagggtacatactgttaagatgtcaattctccccttttctttttttcttttttgagacagagttttactctgtcagccaggctggagtgcagctcactgcaacttctgcctcccaggttcaagcgattctcatgcctcagcctcccgagtagctgggactacaggcacacaccaccatgcctggctaatttttgtatttttagtagagatggggtttcgccatgttggcctggctggtctcgaactccttgcctcaagtgatctgcccgccttggcctcccaaagttctaggattataggtgtgagccaccgtacctggcccctcccaaaattaatatacagattcaatgcaatctcaatcaaaatcacagccagctttttaagaacagaaagtcacaagttgattctaaaatttacatgaaaatgcaaaggacctagtagacaagaatttttggaaaagaataacaaaatcaaagattttacactacctgaattcagaacttagtaaagcactggtaattatgagagtgtagtattggtgtaaaggcagataaatagatcagtggaacagaatgtagttcaaaatggaccaacacttacatagccagtttattttcaactaagccaccaaagcaattcaatggggaaaagaaagtcttttcaacagactgtgcttgaaaaactggttaactattagggacaaatatttatcttgatgcctgcctcacaacatacataaaaaattaattcaagctggcacagtggtgcattcctgtagtcccagatactcgagaggctgaggcaagaggcttccttgagcccaggaatttgagtccagcctaggcaacatagcaagacaccatctctaaaaaaatttttttttaagttttttagctaaaaagtttttccctcctgtcttgaacttgcaaattcagccctaaatatgtagtgtttggcatgtggcttccaggccagatgtgaccccagtgaggttatcacagagctcagggaacattttcaaaacataatccagaatctgacatctcttataaacagctttcatttaaggggaatctgctggatagaggacggtttggcctgccaggatttttgtaagagatttggtctcttcctttgctccgagctttctccagctatgttggcattaacctcagttgggccacagaaccagtgttacatacccagagaagcaactaggtcaatggggcagctgaaacccacacatcaaaagggttaagtcagtgctttttatgtgaattaattgtctttttggagcccttcttcaaaattgtttttttaatccactgtgtaacaccctgcctttaagcaataatgaagcaaacaggcattattcatagcagcaaccaaagtccactaggagactgccattcaccccagtgctggaggaacccagctgacccccacaacagcaaatagtaaaacctcaccctcattcttcagcactttctcagggatttctgaggaacattactgggacactctggaatgaaatcacaaagtaagccagggactgagcatctggctgtcttccttctataaatctcactgccagaaaaataaaggaggtagctaaaactgcaacccaatccacctgtggtgaaagtagagacctgacccatctcccaaccagtgatgcactcagggctgtaaatacttgtggggaagctaatctctcccccatctcctctctcagcccctgacaatttggtatctgggtggctttagtttagttgtttgcagtccacatcaccagcctcaaccccctatcagcaagctcgcaccaaagcacctgccctgcatctactatgtacagacatctccatatgccccataaagatgatgatgatatcttcattttacaaatgagcaaagtaagactgagagatattgggtcatttgttcaagactgcacaaaaatcagtgatgatttggattcaaatccaggcctgcccagctccaaagtctgttctctttcaaacaaacacgtcattctccctgacactccattatcaacaatgattaaaaaagaaagactccatgacctcatgagtgtacagccaattagggaagaaagagcatcattatgtggtgaagtcccctggttgctctcgccatccacattatctaagaccacagttgtgggaagaggggcggcaccacaggagagcacttagtgagtcgtccaggggcctcggttctcattctggctctgtgccaaccttaagtgtgatctcaaggagctcactcactttccttacctcagatataaagcagagtccaagttttaagcagaaaaaatagcacccaaccccctgtcccccctccacacacactcatacattagagtttaactacagaacctcagggataaggatggaataacctgcaaaggaacaattagatcaacagcagacttctcatccagatgaatagaatcaagaaaacaatgaagaaatagctccaactacaacctattttatacccagctaaggttttactcaagagtgaaggtataataagaataattgaatgtgtcctaaaagaatgaactgttgttttaaactggactttagaaaaactatagtgggctcagaacaatgtctccaggcagcagagagctctcaaagcaagaaaggtcctcagggcaaaaataaaacccaggtcattgtcagcaaaatgtagtctcagagtaaagatgaagccacacatctgacacaaaattattgttaagatttttggtagctggaagttggattctgctgaaaaaaaaaaaacctgaaattttgttaatttgggaagtagacagcgggcagaaatctgatgggccttgataaggctactggttagagtttaaagagaagtaattaaaatgttcttggaagtggagataaagggagttcttgttacatggtgtggaagtttggcaacactgtcacctgagggaacatggaaaatagaaaatattcctaataaactgatgacctagctaaggcaatttctgggcagggggtgttgaagatgcttcctggattctttcagctgcctgtaataaaattcaagagcaaagaggtgaactgagaaacttttcaattttcaagtaaaatttagagaaattatagaggaacagtctgtcttgccagaatatgattctcaaagtaaaatcaagcttaaggataaaaatcaaatccaggtcactgttcagataacatggtctcagagtaatataaaaccaaggataggactattttaaatagggtcttaagaggtccctagttaagacctctgctgtggtctgaatgtgttccacaaaattcatgtgttggcaaattggtccccagtgcggtggtgctgggaggtggggcctgttgggaggtgtttaggtcatgagggctctatcctcatgaatgcatctgtgttgtaaaaagggctttggggagtggatttcccttccactctccaccgtgtaaggacactgcacgaagcccttcaccagattctggtgccttgatcatggacttctcagcctccagaattgtaggaaataaatttctgatctttataaattacagtctgtggcatttgttatagcagcacaaaaggactaaagacagcctcagaaatatttaaagtaatgcctcaaagaccatttcaaataagtgactttctaaggatcgtacagatgtgccttttatgttaaccaatagatattctaagaatctgaagatcaccatcccacagtagcctcacagagaacctaaggtacagaagaatcttttttaggtgtggccttttttttttttttttccccgacagagtctcactctgtggctgggctggagtgcagtggtgcgatctcagctcactgcaatctccgcctcccaggttcaagcgattctcctgcctcagcctcccacatagctgggattacaggcacgcgccaccacacccagctaacttttgtatttttagtagacacggggtttcaccaggttggccaggatggtctcgatctcctgacctcgtgaaccgcccacctcggcctcccaaagtgctgggattacaggcatgagccaccacatccagcaggtatggcttttatctaatgcaatttatataaactaaaacccacaatatttctaaaggaatcatatcaactttatctaaaaggaacagagacgataccaacttacaagaagtctttgggcccctgcacttctacaagaaggaagtagataaaacaacaacaaacctcagctgcaaacactggtcatttcttatgaaagataaaagatgactccgagggtcacagaagcactcagagaacagagctgtggcacgtgtcagtacctcacttccggctgtgggtgagtaacagtttactctgcggctacaccacatcgcgttcgtccattcaccaatcgatgggcacctatcagctgagtgatgctgctgtgcctttgtgtgagcgtgtggtggttgttttcagttctcttggcctgggcctaggagaggaagagctgggtgtcctttagcgcagctgtcttggtgaacgcgaagcagtacctcactgtggtgtttcctgacatttccctgacgtctaacaacgtcgaagacgtttccacatgtggattagcagtttgtaagtcttctttggagcagtgtctcgccgagtcctttgttcacttctaaagtgggttcttggtcttcttattacagggttgtagcaattcttcatatatcctggattatagactgttatgacatatgtgatttgcaaatgtttttcctattttgtgagttatattttaattttctcaagtgccttcagaaggacagaatgtttgatttttacgaagcctgatttatctttttttttttttttgtagcttgtgcttttgatgtcattgctaatgaaccattacctaatccaaggtcctgatgatggctgcctctgtgttttctatgaggtttaggtcattgattcatctaagttaatttctgcatctggtgtgaggtggaacataaatccatgcttttgcacatgactatgcagttgaccccccaccgtttgtcaaatagactttctctcccattgaatgtgcatcacccttgctgaaaatcaacggactacaagtgtgaaggtttgtctctggaccctactctgttccgtttttccgtgtgtccgtccttaagccagcaccatgccaccctgattactgtggctttgaaactgggacgtgtgagtgacccaaattggttcttacttttccagatggttttgacaatgctgcgttccttgaatttccaacagtgggatcatacttcacaatgagatttggaggagacacacatccaccacatagcttaggagaaggggctgcaagccacggacacaggcagaagctgggctcggagctggagctggaaaaggcgaggacaggggttctccctggagccccaggaggggatggagcctgtaggcactttggttttagtccagtgagacccacgtggactttcattgcaatgtaaactaatagatttgtgttgtcttagcttttatatttacttcctaacttcttttggataacaaagaggttatccaaaagatccataaccatctgaaaagtgcttaaaaccattagttatcaggaaaatatacatttaaaattacaacgagttaccactacacactcaccaaaatgttcaaaattaaaccatcagtacaagcgttggaagcatacagaaccaccaaacaccgggcttgggagggggcagctgacacacccagtcccgggcctcggagagggcggctgacacccccagtcccgggcctcggagggggcggctgacacccccagtcccgggcctcggagggggcggctgacacccccagtcccgggcctcggagggggcggctgacacccccagtcccgggcctcggagggggcggctgacacccccagtccctttggcaaaccgcttcgcagtatccactgacgctaagtacccctctgacgatgacgcagtcccatgtctaggtatttatgcaacagaaacctgtgcttgggtcacatgaggacccgtcacgagtgttcagagcagcctgaacctgacagcagccaccagagctggaccgaccggcggtgctgcagccgcggaccactcctccacaataaaagcactgtgaggctcacgtggtgtcgatgaacatggagaatccagacacaaaacagtgcctgcggtgccgtccgtcgacatcagctctgagacgggcaaggcctagtccaggaggcagcacggggtgcggggggggacccacagagaggcagcacggggtccaggaggcagcacggggtgtggggggtacccaacgcggaggcaccacggggtgccgggggggacccaacgcggaggcagcacggggtgtgggggggacccaacgcggaggcagcacggggtgtgggggggacccaacgcggaggcagcacgcggtgccggggggacccacatggaggcagcacgggatgccggggggacccacatggaggcagcacgcggtgccggggggacccacatggaggcagcacgcggtgccggggggacccacatggaggcagcacggggtgccggggggacccacatggaggcagcacgcggtgccggggggacccaacgcggagcggactcgcagggcctgtgctttttcctttggaaatgagatctcggttttaaaatagttacagatatccactaagaattcattcccttgaagtccagtaactcctgttagggatatttatcaacaagccagcgtggaatgtaaatatttactcaatctctggaagccgtgtaatcaccaggtgtttgtaaggattcccactgacgggagattagaagggactttggttcgattctctgtgccagggatgaccctgaagaggcccctgaggaagcgaaaccctcccctgcccagctgcagaaggatcgcgccgccgggtctcctgcggtgtggacgggcctctccagtgtgtgccagcctccaatacccccgcgtcacctgcggtgtggacgggcctctccagtgtgtgccagcctccaatacccccgcgtcacctgcggtgtggacgggcctctccagtgtgtgccagcctccaatacccccgcgtcacctgcggtgtggacgggcctctccagtgtgtgccagcctccaatacccccgcgtcacctgcggtgtggacgggcctctccagtgtgtgccagcctccaatacccccgcgtcacctgcggtgtggacgggcctctccagtgtgtgccagcctccaatacccccgcgtcacctgcagtatggatgggcctctccagtgtgtgccagcctccaatacccctgtgtcacctgcggtgtggatgggcctctccagtgtctgccagcctccaatacccccgcgtcacctgcggtgtggacgggcctctccagtgtgtgccagcctccaatacccccgcgtcacctgcggtgtggacgggcctctccagtgtgtgccagcctccaatacccccgcgtcacctgcggtgtggacgggcctctccagtgtgtaccagcctccaatacccccatgtctcctgcggtgtggacgggcctctccagtgtgtaccagcctccaatacccccgcgtcacctgcggtgtggatgggcctctccagtgtgttccagcctccaatacccccgtgtcacctgcggtgtggacgggcctctccagtgtgtgccagcctccaatacccccatgtctcctgcggtgtggacgggcctctccagtgtgtaccagcctccaatacccccgcgtcacctgcggtgtggacgggcctctccagtgtgtgccagcctccaatacccccgcgtcacctgcggtgtggacgggcctctccagtgtgtgccagcctccaatacccccatgtctcctgcggtgtggacgggcctctccagtgtgtaccagcctccaatacccccgcgtcacctgcagtatggatgggcctctccagtgtgtgccagcctccaatacccctgtgtcacctgcggtgtggatgggcctctccagtgtctgccagcctccaatacccccgcgtcacctgcggtgtggacgggcctctccagtgtgtgccagcctccaatacccccgcgtcacctgcggtgtggacgggcctctccagtgtgtgccagcctccaatacagtcttgtccttcaacgaggtcttagggacaaggtacaggggcaattatcttgcattcacagcaacaaataagtcagtatgatgaactttctactgtggtcagctggaaaatttcatccttgtcagcgggcacacaaagaccttccttagttcccagttaaaaagaaaaggaaaaacaggaactgtcggcccgggtgtgtgcatgtagcccaggggccccacaaagactgacccggcttccatccctgaggccccgcagagactgtcccggcttccatcctgaggcccgcagagcactaggctgggggtgcgcctgggcaggaggctgcacggcaaaggcacggggtgtgccatggagtttccccgggagccgcagccctgcccactctacagggcccccgggaagtgactgccttgccagacaacggaatccagggcccagccacggacaatcaggggaaggcgtggagggagcgaggagagacgggagccgggcattggagggattaccaggtttggggtcctgcaggcagaattcaggcggcggggtggggacgcatcgcccccatagtgagcagggtccatgcagtgcagcccaacgggggctttgtcctaaggactgtgggcagctgctgagggcgtttgggaacacccctcccggaggggtgaggcggcccagcctgcggctgccagaggacacaggttctgctgcggaacctgcagacatggccataacaggccacagtgctcgggcccacacagcctggacccacatggccctgtgtcacctcctcaggggcaggcttcagggcctcgaccctagaggctgcccctcggttctgctccatggacggcgcaggcaggcccaggcctgtgacgagttcacggaagctccaggatgacccccgctctgcgccctcctccagcattccagaccacaaaccactctgggctaaaacgaggcatcgccagagcatcccacttcctcggaaagctgcggtctggggacgcgtcttggccctgaagaggctccagatggctcccatcaggcctctccgcctacgtgcggccgacatggagtgacagagcgtcggggacacagaattcagagctgggcctggggctgctttgagatactgatggctgccagggggcacagagacccgtcctgcagacagggctgtgagggccacagggggcctcggggagaggcagtgggagggaggacagtgggggcctccagctgggtgagcagctggagcgaggggggcccggggcttgtgatggtgctgccgaccctagaggtgccggccccacgatggagagcacgtagtgccccccgggagtcaggaggccgggcctgacctcgggggctgcagccaggggaggccggcaccccagataacccccaaagaactgcaggccctgaggcgaggccagagtgggggcgggggcaggtcccagccgaggaggtgctccgtgctgcctcagcagaacccatgatgggctggcccaaggctctgaaggtggaaaggcctcacacattctgccccggctgacgccttccttgggccagtgctcgggggtgtgtaacaaacgccaagacgcattgtaaagaaggaagcctgcgtttccatcaccggcttaatatcaaacaaaagtgcaattttgaaaatgtagtccaaggttttctgtggtgcggaaatggccaggccagacctccgtgggtggtccttcgtgtccacgtcagcgccctacatccacactgtgggcaccatgacctcacatgcggagcggagcagggccggcgcccggagagccaggctggtcacgaacgaggcctagagggcgtcaggccccaaagcactcacaggcttctcctctgtcctcggggccttcagacacctgcatgcgccgattcagccacccgcgcgcgccgattcccctggccatggggtttccaaagtgtgtgctcagaggacagtttcctccaggatgacctgtcagtggctctctgtgccggggacgtcgcgtgctgggtcccggtctgaatgcttcctaacgatttacccagttccttttctccactcaggaggcgtttgctgagaggcacaggctgagcccccgtgctgatgccacgaccgagggaacgggtctccctgtcggcgtgaactgacccggccaggcgtccactgccactcggactgtctcccaggcacgtggcgcccacacgggcagaacacgccctccacacacgcggcttcgggcagaacacgaggcgccctccacacacgcggcttcggggcttgtcatgaaaaaagctgaatgctgggggtgcagctttcaccaacagaatcccgtttggaagggacgcggtgagacatgatccaccctaagttgtgatcctgggtgagccgccgtccacaccctgctgagggtcccttcacccactttattctccagaaaaccctgcccatcagggctgagtcccacgccttccctctccgtccaggcctggctttgacctctggggtcgtgtggggcacaggggacaccctatccaggcagaggccctacggctatctggaggaagtggtgggagctgggcttctgcctggaggatgcacccagaggggtcacagtccacacagagacacacgggtgccttccagatggctgagccagtccagcccagaagggcctgggggttgggggctgcacctggcctgtccccaccagcagggctcagggcttcccaaggtgtgtgggggacggggcagcacctctcaaccaggtcacctgaaacccgaactgaaaggcatcctaagttaagacattaactcccattgtcaaggtgccatcgtcaattctgtctccaaatccttctttgttatttcatgtattcacagagtgacgctccgtgtttcgttcagcctgcaggcctgcagaagctgcatctcgggatggccaagagcccggccaggccccacggctgcacccaggacgggattcatgccccatgcctggcttctcacgaccacagagtgcctttcccgggactggatggaggcagagtgagagaagagcctggagcaagtgttttggaccacagtgatcaaacacggagcccgtgggaggacgtgggaggacgtgcggggctttgccgggcgagcccgatgctgctcacggcacctggagtgttcgggccgctatttgggcggtgttctgagcagccgtcagaccttgagttttgctgtcaaaagctcttctctcctgccccgaaatatacccagtccatgccccaagaggaaaggcctttgtgccaggtgggcacccggctgcctcttggcaaagacttgttggaaaaatgagtgagtgacgaggctgctggtcagcgtgtggcctgtggcgtcactggggcctctggcggctgctggaaccagaagaggagcctgcgctgcaacccaggccgcaccacatcagggtctcactgggagccggagagcttgttcccaggcaaccctgaaacagagaagtgtccttggaggcttcacccacgcagacccacggcttcctggtagaagccgtctgcacccccgcactgacctggctctgtgaggagagcggggaggggctccagggaaacatcctggcgttggcgtagccagcctgtgagtcacggggaagccggctgcccggatgccccccaaggacccggtgagtccacacacagtacagcagggcctgggcccgcaccaccgccttttcctgcaggcccctcatgtccactgactgcacctccagggactctgcccggcaacccaggcgcccccgacacaccccaccacacagctccttctgcctcacccacaccccgccagaccctgagcgctcacgaagtctccttgtcaagaactttgagagccagttgctaaacacagatgttatttatttatttgagacagagtcttgctctgtcacccaggctggagtgcagtggcacgatctcagctcactgcagccttggcctcccgggttccagcgattctcctgcctcagcctcctgggtagctgggattgcaggtggccaccacgcccagctagtttttgtatttttagtagagacggggtttcgccaagttggccaggctggtctcaaactcctgacctcaggtgatctgtcagcctcagcctcccaaagtgctgggattacaggcgtgagccaccgcacccgggctacagatgttatttttaaaattacataaacttacaattaaatacattaagttaaataccatggtcacaaaggtgccttctgcctctgcatctgcgcggtggaaacaccactgcagcgttcaggagcttcctgaggtggtgtgttcccagctggaatcagcactcgcgacgaatcccaggtgctcttcctcagggccagtgggtaaacagttaccagcatggtaggcctcaccacaccccaccgctgccacccgcgagccagccacgtcccgccctccaccctccctccagcccttcccaggaccctctgcgtgtccctggtcctcgcggcctgcatctgagcgaggccccctccatcctccctccagcctctcccaggaccctctgcatgtccctggtccccgtggcctgcatctgagcgagtctcccgggggctgcacagctgtccctgggccttcagcttctgaccgtctctttgctgcagctggagccctttcttgggcacctgcgcacactcagggcttccaccccagatctggcgtcccccagagcagctctgtctttgaaatcttctccttggggtgtcctctgtgaacaccctcacttcacctctggcaccagggccgctgagtgaccaacctctcctcctgggggttcagctccctctggtttcagtccctccccacccagcggggacacggccactcacttccaggtgggctccccagccgaggtcagtccccaggccagggaagacaggctgggcgcagggaccaggggggcctgtgggggatcgtggcagggaacgatggcactgcggccgcaccgtcaaagcccacaggccttcttctccatcataggtgggccgttcagctgcggctggggtcccagggcctccgagatccctcttttccattccccacagcatgggctctgagccttcctcctcccacgcctgtttccaccccagcccagctcccttgttctcagcagagggccatgaactgtgagcctctcttgtgtgtttgagggtgccatgtggtgggacttggctgtgtccccagccagtctctccgggaattgtaatcatccccacacgtcaagggcggggccaggtggagataattgaatcatgagggcggtttcccccgtactgttctcgtggtagtgaataagtctcgtgagatctgatggttttataaagaggagttcccctacacaagctctcttgtctgacaccacgtaagatggcgcctttgcttctccttcaccttcctccatgactgtgaggcctccccagccatgtggaactgtgagtccattaagcctctttccttcataaattacccggtctcaggtatgtctttattagcagtgtgagaacagacaaatacacaggggaggttggcccacatgctgccgaccgacatcatctgtttaaagctgactccttgaaaatcagctgtgagtaaagggggcgttccaaactcaggcccttagagccagcgtgtgtggcccagtagccagagcacagtatgcctctcggccagtgggaccaggggctggggcagaccccgagctggagcctgcatccagcccccgaacgttctcccactgccatctacttggccaagaggtacctgaccaagcttggtaccttggagaatgccacaaataaaaattagcccagcggggttccggcatctacttactgcaaaccctcacttccttcacacgtgtctctgcaggcaggtctggtctggggagtttctgcccatatcacaggcagagtctgaccctccaatccttctctcattctcaggttcacaaagctgagtgaagtccaaacaggaaaagcccaaatagagccacactcagacacaccacaactcagacacatcacaactcggacacaccacaactcagacacaccacaactcagacacaccacaactcggacacaccacaactcggacacaccacaactcggacacaccacaactcggacacaccacaactcggacacaccacaactcggacacaccacaactcggaaacatcacaactgagacacaccacaactcagaaacaccacaactcagacacaccacaactcagacacatcacaactcagacacaccacaactcagacacaccacaactcagaaacatcacaactcagacacaccacaactcagacacaccacaactcagaaacatcacaacacagacacatcacacactcaagacacatcacaacctaacttctgaaaactaaagacaaaaatataaaagaacaacaattgaaatgactgcaaatttcccattagaaaccatggaagcagctgcgcacagtggctcacacctgtaatcctaacactttgggagactgaggcagatggatatcacctgaggccaggagttcgaggccaacctggccaacatggcaaaagcccatctctactaaaaatgcaaaaattagccaggtgtggtgcacacctgtagtcccagatacttaggagactgaggcaggagaatcacttaaacctcagaggcggaggctgcagtgagccaagatcgcgccactgcactccagcctgcgcaacggagtgaaaagaaaaaagaaaaaaagaaaccatggaagccaggaaaaagtggcactttgagacggagccttggctcactgcagcctccgcctcccaggttgaaacaattctccttcctcagcctcctgagtagctgggattacaggcgcctgcaaccacgcccagctaatttttatatttttagtacagacggagtttcaccatgtttgccatgctggtctcaaactcctgacctcaggtgatacgcctacctcagcctcccaaagtgctgggattacaggcatgagccactacgcccaacctggcacattgtttaattgctgaaagaaaataattatcagttcaggagtctatatccagcaaaaatatccttcagggatgagggtgaaatggagacattctcagatgaagaaaaactaagaaaatttgctgccagcacatataccctaaaagaatgcctaaaagagttttttcagatagaaaaacatcaggaatgaaggaagagcaacaaaaatgataaatattgaggaaatgtaatagactgttcttcagttctttaaaataatgtttgatgatgaaaagcaagtactgtagtattgttgggcggagtttcagcacatgcagatgtatcaactaagacggactgcagcatgaaagatgcaggtccaggaagctacacggtggcaagagttccacaaaacacttgaaatgctaaaatactgattccaaggagactgtgaaaggtgaagtatgcatatggtaatccccagaaaaccagtaaatattctacagagctatatcatcaacaacacaataggtagcttaacatactgaaaaatgttcaaataaccaaaagacaggaatgaaaagacaaaagaacaaaaaaatggaggaaataagcagaaaacaaataataaaatggtaggtttgaatccaaacatatcaataatgacattaaatgtaactggtctaaattaaaagacagagacctggtgccatggctcgtacctgtcatcccagcactttgggaggccaaggcaagaggatcacttgaggccaggagttcaagaccagcctgggcaatacagtgggacgctgtctctacagattttttttttaattacccaggcatatggtgtgcgcctgtggtcccagctagtcaggaggccagggtgggaggatcgcttgagcccaggaggtcgaggctgcagtgatgtgatcatgatactgtactccggcctgggcaacagagtgagaccgtatctctacaaaaaaaattaaaaattaaaaaagacagatggtcacaatggatttctttaaatgacccacctatatttctaccctcaagaaactcacttcaaagataatattggtaggtcagtgttaaaaggatagaaaaagatatatcatcatgcaggcacaaattttaataaactgaactgcctatattaatatcagataaagtggacttcagagaaaagaaaattatcggcagcaaagaggtaaattacgtgatgataaaagggtcaattcagcctgtaatctcagcactttgggagaggatggtcatcgagaccatcctggctaacacggtgaaacctcgtctctactgaaaatacaaaaaaaaaaaaaaaaagccgggcatggtggcgggcgctgtagtcccagctactcgggaggctgaggcaggagaatggcgtgaacctgggaggtggagcttacagtgagcagagatcacgccactgcactccagcctgggcgacagagcgagactctgtctgaaaaaaaaaaaaaaagggtcaattcaccaaaaagatataacaatcctgagtgtgtgtacaacttagaacacaggttccaagtatgtgaagcaaaacccatgagacagaaatggaataaatccggaattatagttggagacctcaacacttctgtcccagagcaaacagacagaaaatcatcaagggcatagaactgaacatcaccatcaaccaacttgatctaattgaatttatggaacactccacccaaccagagcagaaaacaaagacttctcaagggcacctggaacatttaccaagagaggcgggtgatgcccagagtcattaaaaaatcttaggccagccaggcgtggtgtctggtgcctgtaatcctggcactttgggaggacaaggtgggaggattgcttgaggccaggagttcaaggccagcctgggtgacatagtgagaccctgtctctattttttttaatcttaaataaatctgaaagaaatgaatcatacgaagtatgttctctgattataatgaaattaaactagttataacagagatacatgcttaaaagttaagcactgtactgcttaaaagctggttaaaagttaagcaccgtaccactaaataatccagaaagagaaagtctctagggaatttaaagataatatttaactgaacaaaaatgaaaatatataaaaacctgaagtatgtaactaaagtagtgattggaggaaaagttacaacactaaatgtctatattacgaaagaagaaagatctcaaaagaataatccaagctttcacctcaagaaattattttgagacagcaaaataaacccaaagcaagtagaacaaaggaacagaaatcaatgaaacttaaaacatgatggagaaaatcagtggaaagagagctggtttctgagacaattaataaaatcataaaactttagcaaaattgacaaaaaatgagagaataaataatatcaggaataaaagaagggatatcaaaattatagactctgtagacgttaaaaggaaaacagaatactacaaatctacacacacagattcaacacattgcatgaaattaaccaattactcaaaaacagcaagctaccaaaacatctccaagtggaacagataatccaaatagttctataactcttaaataaatggaatttctttaataaattccttagttaacatgccttccaaaaaagaaatatccaggcccggatggtttcaccatctggtgaattctaccaaacatttaaagaggaaatagtaccaattccatctaatatcttccagaaaatagaagaaagagcacttcctgtgtgattatatgaaaccaatattaccctgacaccaaaagaagacaaaaacaacattttaaaatggcacactaatatctgtcatgaacaaagatgcaaaaatcatcaacaaacttagcaaatcgaatacagaaatatataaaaataattataagccatgatcatgtaggatttattccaggaatgcaaatgctcttcgacagttgacggggtaaataaacttggacatccacacagggaatactactcggtaacatgaaggaacaactattgagacatgcaacaatttaatggatcttaaatgcattatactcaatgaaaaaggccaatctctctctctctttttttctctctctctatatgtatatattttatcctatatagtttcatttacataatattcttgaaataacaaagttgtagagctagagaacagataagtagttgccaggggttagggtttgaggcagaatgtgactgaaaaatgaatgaaaaagtcatatatcccgactgtgatcatagctgcacaaatccataagtttgtgaactacgaacagaaaaaatacatgtgaaaaactgacaaaatctgaacaagatctgtagctcagtgaacagtttggtaccaatgtcagtttcttggttttgatatgctttgattttgatagttatgtagataatattgaaagcactggttgaagagcatatgagaactctgtacgttctttgcaacttctctgtgagctctaaaattatttcaaaattcaaactttttttaaaaaaaaggctgggtatggtggcttctgcctgtaatcccaggactttgggaggccgaggtgggaggattgcttgagcccaggagttcaaggtgagcctgggcaacatggcaaaacctcatctctaaaaaaaaatacaaaaagttaaaaaaaaaaagggggggagaaataattagaacagatactgcctgaaagaagatacacatgcaattggccagtgagctcaggaaccagagctcagacccaaccaccatcagggacacccagaggagaaccgcgatcagagcccacggcacacccacaaccatagtggaaacttcaggcaagtgtttactgaggatgtggaagaatcggaactctcaggcaccacttgtgagaatgtaagatggtgcaaccgccctgggaaaccagcagcttcacaggaagttaaacacgcaactgcctcgtaccccggccactcgagtccacgcgtttacccacaagaaacagaaggacacatcctcaccaaggctcaggcccaagtgttcacagcaggcttcatcacaatggaccccaaaccagagcaactgtggcacagccatgccaggggacattcggcaatcacaggtgttttttattttttatttttttgtttttgtttttttgagatgggagtctcactctgtcgcccaggctggagtactatggtgtgatctcagctcaccgcatcccctgcctcccaggttcaagcaattctccggcctcagcctccggagtagctgggattacaggtgcccgccaccgtgcccagctgatttttgtgtttttagtagagatggggtttcaccatgttggccaagctggtcttgaactcctgacttcaggtgatctgcccacctcggcctcccaaagagctgggattataggcgtgagccaccaccggcccggcaatcgaacttggatgcacctcaaaaacaaatgccgaggccagaagagtccatattgtcttactccaccacaggaaagccacacacaaacccatccatggtgacaaagtgccagtcagtgattgtatgaggtggggcggtttgttgcggatgatatgaggggtctttttggggtgatggatgttactgatgatatgaggggtctttttggggtgatggatgttactgatgatatgagggatctttttggggtgacagatgctgtggatgatatgagggatctttttggggtgatggatgttactgatatgagggatctttttggggtgatggatgttactgatatgagggatctttttggggtgatggatgttactgatgatatgagggatctttttggggtgatggatgttactgatgatatgaggggtctttttggggtgatggatgttactgatgatatgagggatctttttggggtgatggatgttactgatgatatgaggggtctttttggggtgacggatgttactgatgatttgaggggtcttttcggggtgatggatgttactgatgatatgaggggtctttttggggtgatggatgttactgatgtgagggatctttttggggtgtggatgctgcagattgtatgagggatctttttggggtgatggatgttactgatgatatgaggggtctttttggggtgacggatgttactgatgatatgaggggtctttttggggtgatggatgttactgatgatatgaggggtctttttggggtgatggatgttactgatgatatgagggatctttttggggtgacgctgcggatggtatgagggatctttttcgggtgatggatgttactgatgatatgagaggtctttttgaggtgatggatgttactgatggtatgaggggtctttttggggtgatggatgttactgatgtgaggggtctttttggggtgatggatgttactgatgatatgaggcatcttttttggggtgacagatgctgcggatgatatgagggatctttttggggtgatggatgttactgatggtatgaaagatctttttggggtgatggatgctgcagatggtatgagggatctttttggggtgatggatgttactgatatgagggatctttttggggtgatggatgtcactgataagagggatctttctggggtgatggatgctgcagatgatatgagggatctttttggggtgatggatgttactgctgacatgaggggtctttttgggtgatgcatgttactgatgatatgagggatctttttggggtgacagatgctgcggatggtatgagggatctttttggggtgatggatgttactgattatatgaggggacttttggggtcatgggtgttactgatatgaggggtctttttggggtgatggatgctgcagatggtatgaggggtctttttggggtggtggatgttactgatgatatgaggggtctttttggggtgatggatgttactgatgatatgaggggtctttttggggtgatggatgttactgatgatatgaagggtctttttggggtgatggatgttactgatgatatgaggggtcttttggggtgatggatgttactgatgatatgagggatctttttggggtgatggatgttactgatgatatgagggatctttttggagtgatggatgttctctgtcttgattgtgttcatggtcacacagttatataaatttgccagaactcatcaagctatacactttaagtgggtgcatcttcctgtatgtaaacggcacctccccagagatgattcttcaaagccctcctccttttctaacctcctcctgggcttgctgtaactttgtggtccctgacagctgcacccaccgccctccatgccctctaccctgctgaccaactccccgtccaccttctcccagttggcccagctcaaggggcagccccctgcatcgaaagcagttagggcctcctcctccggcaccacctgggaaaaggtgactgtggcctctggaaaggcttcctggctccggttgccaggaagaggcattcgcactgcctccctcctctgtcccagacagccccagggcctctcactaagcccagctggccgaatccgtgcaaagctcctctccaaaccgacttgagtaacttctctggctgaaaatgggaagcagttgcataaccagacatctgcggatccaattcctgagaaaatgtaggcagatgcgccggacagttaggagaggccctgagaagatgaagacacgggccggaggccacacttggcctgtctcccgttggcctgacacattttgcagctgcttatcagggggttaggagaacgctgaataggaggctggggaggccaattccacagcgtatgacacacgcgtaccactgcttccaagggaattcatcaaaccagttctttgcgtaatcgcctaatgcttcctcctgggggaggggatttgtttattgatcttcttcccttcctatagatctgttgttcataggcatgaggtgaacacgcgcattttccagccaggagaacgttccgctcagcacgcacacctggagacagcccagccctgagcaggaaatgcctgctgggcttgaagagggcttcctggggtgtgatggatgattgggttctttttaaagaataggaggccccagtcagctttccaagtcccacacacaggaggtcggggggacaggcccctggccagctcccatcctgctgtggtcccagcacccccagacctcccggcagctgacccagactcttgggacctggcaccctcatccctggaggtcaacactccaatgtccgctgggcgtctgacctggaggacagggctccaaggcacagcccatggctgagagtgaagaaacggcgccctcatggcggaccctccaccaagcggccagtgaacgaagtgtgtttgtacgggagggcttccagccgccgcgacccccaccatcgagaaaccatcctctgggcccaccgcagaactcactgtgcccacagcggggctctctggggagggtcctcggagcacagtggcgagtggacggcaccctgaccatcccgggcaggctttccaaactcggctggtggacagcttccctgctgggtccctgaagtgaggccaggtcacccacaagccaggagcattggccgcaccctggcagcccttggcatcctctctcattggggcgtcacgttgtcccagggagccaggctggtgacactggggtctggaaagaggggcctagccctgtcacacacactgtcagccctccaaggtggcacggggacggcgaggccgacagctgcttgtgcggaactgggctggtcccatcggctctggaatcagaccccctgaggcttggaaataagatggaccggggtcaggcgatgctcagttgaaggcagacaccgctccccactttgctccacaagcacaagctcttcccagccaaggcacagcagggcaggggccgccaggcacagtgaagggggccagggcctgcagtcccccatccagagctgggcagggagccatgcaggctgcgaggtggggtggctgctgcagctcccaaggggtctggtgtggactagagggcgagtggagaacctgggacctctgcagggcgcacagccatttccacacacagcccacttcagaccacttgctgcggtggtcactggtggtcagcccatagcaaagcgtctggccctgtgcccccaccctgccagcaccaggctggacagtccccagcggctgcacggtggcctgggcagctgtgatgggagaggcccccacagacgaggccccaagtcggctcctggctctgccctggaccggctctgggttctcgagaggctggcccagccctgcgctgctctgagccatgcggaccccgtggggaggaccccatactgcagatccctcaccggtagcccccactccaggccagactgaaacaccgcggtgggctcctggagcaccccccacgcccggggctggctggcctgggaggaggggacacaagaacttgggacggcagttctcaaaatgcagtctggggaccgcagaggttcctgagatgctctggggggtctgtgaggccaaacttattttgatgatgaaactgacacattatccgtctttctcattctcgctctcacgaatgttccaagtacaaaacccacgatgcagtttcagatctcacgtcccaacagacctttaagacaggaccacttgttgtgtttggggatcgaatcgaagcttatccacagttatctgagaggactgccgaggcactcctccctccaagtgcgcggtgaggccagactttccacagatttgcccaaaaccccattgcagtggcttgaacacagaagcagctccgagaaccagctgtctcccgtgaagccagacaccgaacagactggaaaagggaaaaacagtgcatattcctcacagatcttccgttcgggaaacgataatttaattgttttaattaaaaacataatatgtgaaaatgtagtgggtttatccttgttaatgtgaaacggatcgatacatcagtatttttggatttctgttttaatttctgatataatcaatgttgatagacataacttgtgcaaacaaagctcttcacggtctcccaagatctgtgggtgtggggtgggatcgtgagaccacagtgtggggagcaggtccctcggtcaccgtccaggctcggcagcccctcggcacggggcatccgcgtccagagtcctacaagaaggagcctcagagaacagagcccctggcgccccagcgtgagaagcttccaatgctttctcagcatctttttccagataaaaatgccagcccttcctctccaaagatctgaaccgcctagggttttcttggcctggcatcacgccttccctcatccggcaccaacccttccctcccgtctctatggtttctcccgctctttatcctcacagccctgtggaaagacatggtctgtgtgcctggaaaacgatgcaaggccgtggtgcctgtgacgtcctcagactcacaccccaatgcgggggactgaacgtttgtgttctccccagttcacaggttgaaggccttgcccccagtgcagctgtgtctggacactgggcctctgggaagtgatgatggttaaatgatgtcaggaggatggagcccgggtcggctacggctgtggccccagtgacgccggtgtactcaggcgcctgccagctgggaagaggcctcaccaagcccagccctgcagcaccttggccttggccttccagcctccggatgcgagaggataaatgtctcctgctgaagccgccaggtctgtgttctccttgtggctgcagcagccgcactaagacactggccacacctggtttctccacagccgctgcagccacgaggagaaggccaccctctcgcgttcaaacacaggtgctttttaatttccatagtcagttgcgtcaaggtgtaacttacataagagaaagtgcagatcgtaagggttagacttcgatgccttcttgcaggtgcacccaccgtggaaccacagccacagtggagctgtggaatgtgcccgtcacccacagcccgcctctgagtcactgccgtcacccacagccctgccccgacccacagcctgcgtctcagtcactgcccatcacccacagccctgcatctcagtcactgcccgtcacccacagccctgcctctcagtccctgccgtcacccacagccctgcctctcagtcactgcccgtcacccacagccctgcctctcagtcactgcccgtcacccacagccctgcctctcagtcactgcccgtcacccacagccctgcctctcagtccctgccgtcacccacagccctgcctctcagtcactgcccgtcacccacagccctgcctctcagtccctgccgtcaccctggctgctcctggagttgcacagaaatggaattgtgtgcttggatgcctccgtgcccagcccctgtccctccgcgattcctccttgctgctttgcggagcagttgttggccgctcacagctgggcagggcccgtcctggcaacagacccctcctgctgcggtggttccctcggtggtggacggggctgtcggcacattttagctgtcaccaataaagctgctgtgaacatccctgtacacgtcgttgtgtggaatgagtttggtgtgtcttagggaactccttgggagtggaatgcctgagtcaccaggtgaggacaaactcagccttttatgaaactgccaagtggttgtgacacttaaactcccaccagcactgtgtcatcgtctggcagccctgcaaccccccaacgtctggtatctttttaatttgagatgttccagtgggtatgtattggtgtgtcaccgtggttttaattcacgttaaattaactacttgggctacacacacacacacacacacacgcacgcatatatttggtattataccaataccacggtcttatttactatagctttatagtaagtcttaaaattaagtagtttaaaacatacaactttgttctaagattactttattcaaagccttttgaattaccatatacatattagaatcagctttttgatgtccatgaaaaagacactgattggcatcacattaaatccaaatatcaaagatttaatgagttttgaggaaaaactctaagcttaaaaagtagggtttcctaattcgtgaatacaatatatttctctactttttaggtctttaattctcagcaatgatttttagtacgcaatgtactgatcttgtcgtattttctttttttctttcttctttttttgagacagggcttctctctgtcgcccaggctggagtacagggatgcgatcttgactcactgcagcctcaacctcctggactcaagccattctcccccctcagcctccccagtagctgggactacaggcgcccaccaccacgcccggctaattttgtattttttgtagagactggggtttctccacctcatccagactggtcttaaactcctgggctcaagcaatccacccacctcagcctcccaccgtgctgagattataggcatgagccaccgcgcctggcctattttcttagatttatccctaagtaatacattttctttgatgctattgtaaggcctttctttgatgctacaataagtccttttaaatttctcattttccagttattcactttcactgccagaatatgcgatgggctctcgggtatgcagtgtgccagtcagccccaccctgacacagcggagcagagagagacggtcctgacggagcaggccagggatcagcaccgcccactgggcctctgacccctctgacccatgacctccaagccctgcggtcagtctgtgcccaggcccagtctgtgctggagccctccctgcagccccctctggcaggacttcagagggatccccagctcctggcccacatggccgcatctggcccaaacacacattcctttcgccactctcctctgaatggaatctggcttgccccgcacagcctctgcctccctctgccccgcacagcaccctccctccctctgccccgcatagaccctccctccctctgccccgcacagcccccctccctccctctgccccgcacagcccccctccctccctctgccccgcacagcccccctccctccctctgccccgcatagaccctgcctccctctgccctgcacagccccctccctccctctgccctgcacagcccctccctccctccacctcacacaggccccctccctccctctgccccacgcagaccgcctgcctccctctgccccgcacagggatcctgcaggttcagggtggagtggcctagcccaagccctcagcctttccttgtgagtctgggtgacttctgaaggggctgagaaccgcttagtggtctggaccctcccttgggggcttatgagccatcacacctcggtcctgccatggagacctccggctgacatctcctcagagcctccctggtgtccagagccccagcaggcagtgctaagccggccacactgaaggccaggaggcagcgcacggggacgctggaggagcacctggtgagctgggaggcgaggccctgggacgggacaagtagcagacgtctcagcgcacacaggctcctgccggacccggaggggctctctgttccatgtggtcctccagggattcgggctccttggccctgagggctctgcccacctagcaccttggggctgttccttgaaccccctgccccctagggtggggacaggaatacgtattacttagggataaatctaagaaaataggccaggcgtggtggctcacacctgtaatcccagcactttgggaggtcgaggtgggtggattgcctgagcccaagagtttaagactggcctgggcaacatggtgaaactcccgtgtagaccgtctctacaaaaagtacaaaaattagcagctgggcgtggtgggagctgggccgagggtcaggcctggaggtggtgcccatcactgggtcccgctcaagagagaagaggctgggaagccaggtgcagctgtgtgcccacaggcgggtgagacaggactgggcctggatcccgcacccgctcgccgcgcagctcagcgcaagcggcctccgggggcctcctctctgcaaggggagcgcgcgcccggccctgaccctgcctgctgattctctggaaggttcatgtccgggactcctcggtgaccctgggcagagccacccacatgcgctgcctcccctcccaccgcctgacaggtctggagatgcccagagacttctggcatccaccagcagcgaggagcgtccctcccgcaaggcttggcctttcccctccagctttggcacaggacgcgttggtctgccgtttcttttgtgcacaaccatcagtcatgatgtcagccctgagctggggccacagaaccctgagcaaagtgggacataatggaaagcaaacaaaaaagaaagaaaatgatggtttcaaactaaaaacctgagttcacatagcgatagatttaaaactattttagaaaacactcattatctccctggcctattttttattaaattgaccaaatctgtggatactcaattgcttgtgatgactgcaagcgcgcatccgagtccccagggaggcagcttcccttcgctcttcgccagcgcccctcagtcctaactttgaggagggcacacgtgagatttccttttaccaacagagaatctccaaatccagccttttaccagaagcctctccgagaaactggggtgagtaaatcgccgctgctgctgccaccttcagagaggccttgggcgcccgccccgacagccccacacggtcccggaactcgggccaggcaacgccctctcctccgtgcggggcttagtcatcgccgtgccgcttggcagtggtctgtggccccctcaaaatgtttccatttatggagagaacgtggccttccagatttgctggcacagatgggaaagctcaagcgctcgggcggcctcagggtttctctcaagggcagcagaggtcagggcctgcaggctggatggaagctccccgcccggcccgggggtctctgtgctgctgcgctcccgcccggctccttcacaaacctccaccaagtgtgggacgtgggcgtgggggggtgggcggtgcccaccctgatgggcactgtggtcgtccactggttctgtttgtttaaagtctgggcctgaaggcctgcatgtctcaccacacaggaccctccctgcccgtgacgggtggcagatggggtgtaggcagcccccgtgctgccccttccccaacccgggggtgcacttgtgtcggggctggggtggccgtagtggccctagatgtctgcagctggtgggcaaaggcaacacaccctaaacccacacctggccctcgggcccaccacggtgcacgcacccagcagctgaaactgcctggctcccccagcgtctctcccaggaccacagccccccagcgaccgctcagcacttctgtggcttcggcggcagcgcccgcggcttcctgtcactctcccagctggctgaaggcacagaccctcagcttccacaacccacaactccgggaggggattcccaaccacagacaggggtctttcccccgcaggaaacctcccacccttcttcaggctgtcagtgaaacggcagccacttttcaaaataacagtttctccctttacgtgacattaaagaggaaagcactctgccttcacctcagttccgtcgcccacacgacaatctctagggggctggggctgtgagtccccaccacgcaggtgcccagtgggcggggtcggggagggtggtgggatcgatggtaaggcttccagctttattccacgtctcccttgaagaaactgacttctgtgactggaaagatcgggtgctcctgcctagaaagatccaagccgtccaacgtacagctgggctttcatgttaaacccagggagtggggtctgatccctgctcacagcctgggcaggtagcaccgtgctggggagacgtccaaacgaaggtgctggggctcagctccctgcaggtgggtcccgcggctcctgtcccccgcgcgggtgatgtggcctcgccgtgttcccgatcggctccccacagaggctgcacgtcttgtgcatcctcagtgtcaaagtaaaatgtctgaaaagttaaaaacatgcctctctccaaatgcagggtaaagacacagctgagcctctcttcagcagggagacggcagggctggtgcgggaggggtcggaggagcagggacagtgaggcctcaggagagacactggggggggaggctgtggggcaaaaccctgcgccctacacagcagagaagctgagcccagcagcgcggtgcttccgtgcacctttcctagagagagacacgaaacttcacagaactggagccctgaatgaaccatgatgccaaacatgagcacacaggttcacaggcccaacaccccacaggcccacacagtcacaggttcacaggtccacacgtccacacacccacaggtccacacactcacagattcacaggcccaacaccccacaggcccacacagtcacaggttcacaggtccacacgtccacaggtccaacaccccacaggcccacatggtcacagattcacaggtccacacactcacaggtccacaggtccacacgtccacaggtccacacactcacaagtccacaggtccacatgtccacaggttcacacatccacaggtccacacactctcaggtacacaaactctcaggttcacaggcccaacaccccacaggcccacacagtcacagattcacaggtccacacgtccacaggtccacacactcacaggtccacacgtccatggtccacatgtccacacactcacaggtccacgggtccacacgtccacagtccacaggtccacagttccacacactcacaggtccacaggtccacacatccacaggtccacacactcacaggtccacatgtccacaggtccagcagtacacgggttcacacgcagtccacgggtccatgggttcacacatctacagtacaaaggttcacaggtacacagatccagaggtccacaggttcacacatacatgagttcataggtccacaggtaaagtggtccacaggttcagacacccacaggtccataggaccacacattcacaggctcacaggtctgccagtccacaggtccacaggtccacaggttcacaggtccacagcactaacacgacaagaagctggcataccataccccagtgtgatgctgaatggccccatctctttcccacttgcccatatccaagttttaaataacccaaggttacaagtaaggacaccaggacataaacacttccccgagccctattctttagtggctttgtcgataggctgtgtagacatggatgcccacctgagcccattgctcagtgtctgtatggacaggtggtgtggacatggaagctcgcctgagtccgtccctcagtgtgtgtgtgtggacaggtcgtgtggacgtggacgtttgcctgagtgcgtccctcagtgtctgtgtggacaggtcgtgtggtcatggatgtttgcctgagcccgtccctcagtgtctctgtggacaggtagtgtggacatggacatttgcctgagtccgtccctcagtgtctctgtggacaggtcatgtggatgtggacatttgcctgagtccgtccctcagtgtctctgtggacaggtcgtgtggtcatggatgtttgcctgagtgcgtccctcagtgtctgtgtggacaggtcatgtggacgtggatgtttgcctgagcccgtccctcagtctctctgtggacaggtcgtgtggacgtggatgttcccctgagcccgtccctcagtgtctgtgtggacaggtcatgtggacgtggatgtttgcctgagcccgtccctcagtgtctctgtggacaggtcttctggacgtggatgttcccctgagcccgtccctcagtgtctgtgtggacaggtcgtgtggtcatggatgttcgcctgagtccgtccctcagtcactctgtggacaggtcgtgtggacgtggacatttgcctgagtccgtccctcagtgtctgtgtggacaggtcatgtggacgtggatgtttgcctgagcccgtccctcagtgtctgtgtggacaggtcgtgtggacgtggacatttgcctgagtccatccctcagtctctctgtggacaggtcatgtggacgtggatgtttgcctgagcccgtccctcagtgtctgtgtggacaggtcatgtggtcatggatgtttgcctgagcccgtccctcagtctctctgtggacaggtcgtgtggatgtggatgttcccctgagtccatccctcagtgtctgtgtggacaggtcatctacacagccccatctgccttcagcaagcacaaggagatatcacacaccagggtgaaacagtcacagaggccgccaaagcagccacatccagaactttctaaaggttaaagggttgcatggatgaaggtatttattaaaaagttagtaagtcatgttgaagaactcatttttagaagttcttctgagagagcccacacctcacttttcctgatgtaccggtcacagggctctgatggaggagggctgtggacccactcccaacccacagccttggtggccctgggcaggccacccttccccaccctggctctcagtccccattcatcatgggaccttcagttctacagctagggaaggattgtggtttggagaagaaatgcagccccggtcatgccacagtatggaggggccgtcccttcccccagttcctcttgtcccccctccgaagcgtcgttctgcagcttggcgttcagctctgactggcttcctttagccttgcttttccagtgaggggtgactgtggtgaaacaaggatcatgagaatccattcagccaaaactcacagtggaagtaggtcacagggtgaccacagtgagtcatgctggagaggcttagcccccacctccctcggctgcctgggtcctctggggatttccagtggaaagtctctacttctgactcaagaaggatgaggtggcccatcccagtgggaacacttaaggaagtcaacgcaacggaaatcgatttgaaataaacgtttagtaagcttttctgaatctgtttgccagaccctgttcattatgtcaaagtaggcaagaggccgcataaatttggatggtattggaaacagttatcatgcaagagtcctttccagctctcgaaagatggttgagttggaaacagatggcgatggttggggcacatttcagacatggggaaaaacataagagaaatgagaggcagggacctcatgctccgtccttggggaatggaaagggtccctttgacagggaaactccagcactggctgtgtcgccgactcctgaactcaggtgctccagggagagagcatctcttcatgctctgacctttatgccaaccctttctgaaaccacctctgcaaaaattataatagtggggaaagtatacagtgaaagagatcttatctaaccagccccatcttacttttaacctccaaactgcctttggtcattcctgggcttggcaagctaacttgggaggaatttggtttatagtttaaatgataatacccctttcccaaaactaaaccacctttgtaaacctaacgaaagaccaccaggttaggaggacgagaggcacctgaattttgctaagatgtaggcaaaaacgatgaccagccattatgccagaggtcacaagatttgcaacgtctccacttactcccacagatcacatcactattgtagaacctgagattggccttttgggaagtctttacaggcttctgcatttctgatgactgccccactctgacccgtgactctgggctcaactgctactgcagcccccacccagaagtggactcagtgcacaaggacccttttccatccgtaagactgcctccccagccaatcaacagcacccattccctagacccctgctcaccaaactattgttgaaaatccctggcctctaaattttcagggagattgatttaagtagtgactctgtctcccatgtggcatggccagccccatgttaattaagctctttattgcaaagccatggtctcggtgaattggttttgtctgtgcagggggaggaagaacccaccaggaaacactttcctccttcctgacttggatctgtcctggtgccatcataatcccagagccccaggctccatctcagagctgagtttgggtcaccctctgccttaagccgtccaactgctgtcagtgtagacgcttccttggtggagacgtctcatctccaccccacttttccccttcccataccatgttaggccccatgtgtgacctctattttggccgttgtaagccattcttagattttctacaaaccagacagaaatttctctaactcccagcaatagtggttgcttccctgtatacagcacagactcaagttctgggtttccagaaaggtgcattaaagggtgaaatcaaatgttcagctctgtgggaagctgagaagtgcaagtgcctctcatctggccagaaacatttatgtggtcaagctgtgccaagctctgctgaaggcagcggagcaccatcccctgttgtccttcctcagtttcctcttcacccatccccttcgagcactgtctacaaaagaagaaaatgcacatttgaagaaaagacagctaagtggagccaacattttggtcatatgaatcactcgttggtttgtttgtgatatttgtttctcattaagttgtgagaagaacacagaggaacacacaagcacttggaattgttctaaatcttgggataaaggatctaactctttaaggctcaacccttaagaccctggagacttcactaggaaccttcctcaggctgttttctggcttattctgcacagggcaggttggacagagaggctgcatgaccaccagtgtctagccctggtggactctggcttattccacacagggcaggtgggacagacaggctgcatgaccactggtgtctagccctggtggacaccggcttattctgcacagggcaggttggacagacaggctgcatgaccacaggtgtctagccctggtggacactgcctttctcagggttttcttatttgctgtgtcttccatggctgcctcactcctcatcagttatgggctatagtaagccccagcaacaaaccctgacacaggcaagtctgcctccaccatgcaccatgggtcatccagctaccggtctacagagcagtgtggccaggggtctggcctgaaactcaggaaaagaaggaccctggcccattcccacctactaaactgcagatctcaagcactgtttaaaaaaatctttagacaaattaaatttagcagtttacttgagcaaacaacaattcacgaatcaggcagcacccagaacctccagaggttcagcaagttccacccagaaacatgggcaggcagcacttatagacagaacccggaagtgagacacagaaacagcctgattggctacagctggacgtctgcctcatatgggtgtggtctgatctgttggcagcctgtgattggctgaagcttggctgctgtgattgactgaaactcggatacttgttaaaagaataccagaagcccctcaacttacagtaaggttatggcccaataaatgcatcataagtagaaaaaatcatgagtcaaaaaatgcatttaatgccccaataaacccattgaaaaacaaaaaaaaatcataaaccagtgtcagggatcacttgaacatgcttagttaggttgcagcttgtttacatcctgaggtaggttgcagttcactacatatgggggcagcttcaggccaaacttaatttaacagcacccataacccaccctgggagcccgcatgtgcccacagccccacagaggtcctctgaccccaaatatgcccaacaagaggctaggcagcctggacctgtcacctgaaggggaagccagatcctccccacccagagaggccagaagttcagtgcctgtccaagtcacctgcacccaccgggagggagccctgcccttcagaagtcacagggacctggcaccaggggccccgtaaagcccagcagcatctggggtgtgggttccactcgctggttgtggaaactgcaggggatgctgagggtcctgccagccctgcccggagcccgtccaggatcagtgcctgtgcagtagtcacgcctgccatctccgctgcctctactcacgctgatttcatcggactcgagagaaaggggggccacagcagcgttttcacaatagctaaaaggtggaagcaatccacgtgtccccagtggatgaatggataaagaaaacgtgtctatccatgcaacggagtatcattcagacgtgaaaaaggacgaagtcctgacgcgtgctacaacgtggatgagcccgagacgagttctgctgagcgaaggaatccagacacaaacggctcctgttgtaggattcatttatacgacttggtcagcataggcagatccacagagacagaaggcaggctgggaggtgccaggggctggaggactgaggaacgggcaggggggcatctacttcacgagggcgaggtttcctcttggggaaatgaaatgttctggaactggaccgaggtgggggttgcacagcactgtgaaagtactaaatgcggctgaactgtacacttttaaaaaggttaaaataatggatcctgaattttatctcaattaggaaggaaggaagtgaggaagggagggaggacggaaggaaaggaggaagagaggaagggagggagggaggagggaagaaggaaggaaggaagggatggagggatggagggagggagggagggggagagaggctgttcgggtctctcgtggtgggcacctgacgcctgtcatctgagagtgctctgctcccctgggaggcatggaggatggcactggggggtgcttgagagatggaataaacacgccaaggcccagaggggccacccagctgctttacagggaggcaagagccagggactgcccaggtgaccggccagcagcagggccgagtcccgcctgtgtcatgcttgcctggccctgtgtgcggcgccccttcctccgggcctggttgaggggagacggcctcaccccactgcttgggagtgcgctggcagtgcctgcagctcctccaccctcgacgtgggcgctgcgggatgaactggaggttgcatctggctgtgggccttttccttaagttcacagcctccacctttccgcccgattgctgatgctcagtgtgctgatgggaccttccctcccactcataaccacctagaatgcagccggtgtctccctgcggctggtggtgtttcagagctaacagtccgcacaatgtgtcactggccctggccgttactccatgcggagccaccactcctggcccctttccccatggaaaagccagctcctctcctccttcctgtggacaccgggcgggggccggaggggccaccagcaaaacagagcgcgctgggactggggcgtggccgactgtgtctcttccatgctctcagatactttggaagtcagtttggatttttgtggaaactttattttttttactttccctctcgtttctctggtaacctcaaaaacaaacacacacagctgtgtcacctggctccctgctacatttttccagcagacacctagggcttggactccagaggtccaggcgccaagctcactctctgttaacccctcctgtcccgctcaggccacaccccagccctgccacagagctgggtgggaaacgcctcttccagggccccggggagaaggaaccggggctgctgcctccacccgcagaagaggtttctccccagacctttctagcagaaaatgaaacaaacaggaaacagccctgcttccgcaccaggctgaagacccctgtctctagaagtcacagaatgtgttgctggaaaggcaggagcctttattccagccttctcgttgcaaaattaggactccaggagcaaagagaaggccgcacagtgaatgggtggcagagccagaacggggaaccctcattcctggaccgcctcctgcctgaccttcccgccttgcagcccctgagaacagcagcgcctgtgcggccggaggcccccgggacccagggcggctgcttctccaattcctttcctgctgacttgttctatttttgttctaaacaaagaattccatgtttctacccggttttgaatcccaaatatatactgtgacaacacaaatttcctaacacatacagcgttatcagccaagttccctgcccttcattaattcaccaaatggttgttcagcacgtactgagagcaaagcgctgtgttgggggccgggggaaggaggcctggtgtgagccctgctctccgacaaggcgatgcagagacaagtcggtgcacagtgcaggccacagcgcgtggctcacgggtgtgcatggaaagccaccaccctccgtggcgttctgcaggagaatatctgttgctttggcctctcagcaaacacaatttagtatttacatccttattctcacacccaaaggaaacaaaaatatgaaacaattatgaaaatctccaggtgtccaccaggctttgcaagcacagccgttgctcccagctacgtggctgcaccgacgctggccacggttcagccactctgggtctctgctggagggaaggacggcggactcaagctatcccgttgttctctaagcaaccttatcttagggagcaccagccatacgttagatgagggtgtagacacagataatagacagtgcttcacagcttataggaaggttaggggagagaatttcaagcaaaataatcatttgaaaagcaacttctaactctcccatccaggagccctttagaaacgtatctaggctagcaattccccaccctctttaaaaatgcgtgcgggctgggagccagagggaaggctgagctgccgcccagaagctgccctgccttcgtggaagtgagaagccagcaggagcagctgggggctgtctgcaaggctccctcctgcaagagacccaggcccaggacacagggccagagggaggggactgttgggccatagaccccgacgcccctgtctctgtggaggtgggtcgctggggccacggccgcagctgggggctccagaatgtccagccacagagtctccgctcctgtgcaggctctcagctcccgccctgcatgctggattgtaacccatgtggcctcgccgccgcaggctggagcgtaacccgacacaaactcggggtcagtctttcccttcatctggctgaaaaggagctcggctgggaacgtccttcagtcccagacaggcccctctcagttccagcatcaccctaaaaatgaggcacttagacagagacctccctcaaaaacactgaatgaagaaaatcactggaattcattttttaaatactgcccctcagaagaaaaaagacaagaggtgctagctcaggcccttccagaagcagaggccggatgggcctggatgcggagcgtctggggaggaagaggaagggagccggggaagcagagagttcggtgggagtggggcctgggactccagctcaggtgggggagctcagacaggccaacagtgttctcgagctcagctcagcactgcaaggggtcccgtgtgtcccaggaacggagctgggagcacgcggccaggcccactgaggtggaggagctgggagctgcccatcattccactccctgcgtaccgcactccccgctgtctcactcgctcccctgggcattggccagagccacttcgaggctctcaccggcctctcctccctgccaggggtctcggggccacaactgatgcacgtccctccctccattccgaatccccccacccgcagcagctatcacccgggcaagtctcaatggctcccctggggcatggctcaagccctgtggccagtacaagggggcacggggcaccaggcgagacgcctgggtttcacacacgtgcccccggccaatgcctcctgccaagacggtgacttcccttcttacctgctggtcctgggacataaggagtccaaagtgccctggcagcagatagaacaccgggtctaaggacaccgggtctaaggggactcggaggacaagaccgtcaaccccgcagagatcagaggtgcagggcaggaagcaccacattcttccaggactgctgggagtgaccggagtgggcatttccgctcccagccttgggttcctggacccatcaattcttcctgatgggatgcagcacatacaagcgcctgattctgcacagacactgcaccctgaaggagccatccgcccccctgcaagccccactctagtcggggaccccaatgacattgtagtctctgagtaacagattcagactctgcgtccagttgtcttcacatgtctgaacctcctcctttccgtctacagccaccaagttaaataacagcggataattttcttcctgcccatcgacccatctgcgtgtgtgtgcatgcatgcatgtgtgtgtgtgtgtgcatgtgtgtgcatgtgtgcctgggtgtgtgcacgtgcatgtgtgtgcatgtgtgcctgggtgtgtgcacgtgcatgtgtgtgtgcacgtgtgtgtgtgcgtgtgtgtgcgtgtgcgcatgtgcctgggggagtgtgtctgtgtgcatgtgtgtgtatgcacgtgtgcctgggtgtgtgtgtgcacgtgtgcctgggtgtgtgtgcacgcatgtgtgcatgtgcctaggtgtgtgcatgtgtgcctgggtgtgtgtgtgtgcacgcctgtgtgagcatgtgtgcctgggtgtgtgtgcatgtgtgtgcaagtccatgtgtgtgcatgtgcatgtgtgtacgtgtgtgtgcatgtgcctgtgtgtgtgtgcatgtgtgcctgggtgtgtgtgggtgtgtgcgcatgtgcctgggggagtgtgtctgtgtgcatgtgtgtgtatgcacatgtgcctgggtgtgtgtgtctgtgcatgtccctgggtgtgtgtgcatgcatgtgtgcatgtgcacacgtgtgtgcatgtgtgtgcatgtgtgcctgggtgtgtgtgcacgcctgtgtgagcatgtgtgcctgaatgtgtgtgcatgtgtgtgcaagttcatgtgtgtgcctgtgtgcatgtgtgcctgtgtgtacgtgtgtgtgccagtccatgtgtgtgcatgtgtgcatgtgtgcccgtgtgtgtgtgcgtgtgtgtgtgcgcatgtgtgtctgggtgtgtgcgcgtgtgtgcgtgtgcgtgtgtgcgtgcctgggtgtgtgtgcacacgcatgtgtgtgcatgtgtgcctgtgtgtgtgcactcgtgtgtgagcatgtgtgcctgggtgtgtgtgcatgtgtgtgcaagtccatgtgtgtgcttgtgtgcctgtgtgcctgtgtgtgtgtgcatgtgcgtgtgtgtgcatgtgtgtctgggtgtgtgcatgtgcgtgtgtgtgcatgtgtgcctgggtgtgtgtgtatgcacacacatgtatatgcatgtgtgactgggtgtgtgtgcattgtgggggtggggggagtgctgaacgtgccttcgcagtgacaactccaactctaagtcggtaccacagggctcattctcgccttccttccctgtgtgtctaacgcttcctctccagtcaggagaaacctgcttcatgccacccaccgtctccttactgatctgttcgaccctggaattcacgtgaagcattttcagaattgtacctcgtgagaaacaaatgaatccagaaagtcaaccagagggtgatgcagcacatggtggctcggagcacacagcctctccgaggccatcacagacgcactggtgtggggggctcccctcagaccctcagcgatggcactttctgtaggccgcagaggtaggggccgcagagccaagcttgctagcatccatgggacgctgaggccccaaataatagagaccagatggcagcgcttacccccagggccgagctgagggggcggccagaggcgcttggcctgcagggagccgtggaggctggcggagcacggcaccctgggaaaggtggcaggggcaagagggtcacacaggtcataggccagcccagcgggcagggccctgcacgtccttctcactggcacctctgcaggacccgagagggggcatggcccagaaaaggtgttcaataattgttgtctgagtgtgtaataaaggaacaaatgaatgattggaaaattcacagactgcttccccgactacatggagggaaaagggtaaccatttggtacatggtaaagttcaagcatcagaaatgccggattaaattgaataaatgtgccaacgattaattcagtggcttcaagaattaatgcccaaaaggccaggcacggtggttcatgcctataattccagcactttgggaggctgaggctggtggatcacttgaggtgaggagttcaagaccagcctggccaacatggtgaaaccccatgtttaacttactacttaaaaaatacaaaaattagccgggtgtgatgatgcacacttgcaatcccagcttcttgggaggctgaggcacgagaatcacttgaacccagcaggcagaggttgcagtgcgccgagatcgcgccactgcactccagcctgggcaacagagtgaaactcagtctcaaaaaaaaaaaaagaaaagaaaaagaaaaaaagaaattagtgcctgaaggagttagcaaggacccctccaaagcccgcctttctcttggccactcatgtgcgctctcagcatgtccagaagctcctgcatttcttcgtctgcaacagaaggctggcttgctgatcgactgattgacaacttctttaaaagcagagcctccagtcatctttcagatggctcattgtgggccgtgtctttttaggttggcggcacccttcttttttaaaagtacacctgttggtggaaagttaacactctttgaggactggatgagcttgtatttcgctaaggcgctgtggatttggaagcaagaaggtgccagggctgtgcaggtgaacctgctctgcgattccatgaaagagcaactgccccaaataccttccctgccacaggcctgaacgccttcatcctcagtgtgaacccctctcgggaccgaaggcactgataacatgggcatctgctccctgggtgggcttgcacgcctctgcagggtctctcgttaacgagagaccctgagaacctggcacctgggaggaaggcatggatttccgtgggtgtggctcacgctaggtggtggtgaagccctgcagagtcaagagaggacaagaggacaagtgcgtggaggaacccacagaggaggggcaggagccaaactctccatgagcccctggacccccgagcagctgagatcacagcgctccagccaacaaaaggcaagcagtgacgtgaagagagccctggagtcagagtgagaagtcctgggctctggccacagctctgcccacttgtgaacatgatttttgtaagttcatgaatagaaggagaggaattttcttagtctgcttgtgttgctataacaaaatacctgagactgggtaatttatcaataacaaaactttattttctcacagctctggaggctgggaagtccaacatcaaggcccctgcaagttcagtgaatgggcaaaggcccatttctcatggaaggtgctgcctgggggtcctcacacggtgggaagaatgaaaaggggaaaagggacaagtgccacgtcctcagatggcagcagaaaagcaaaaggcacacgcaggctccccccgcccttttataaggcgctaacctgctcatggtggtggagaaggcctcacctcttcatacgccaaaatgaagattaactttctttttttccccaaaaagcatagttcttactgatacacagtcctaaccacttgagtggtgggtgaagtgggagaggatctcttttgaatcataatgcggcttcactgttaccaaatacgcaggctggtggcatcacagatgtataaaccagtgacaatgtttagtttctgctagaatgacaaggtgagcgtcagcctctgcttctgtaagtatcctgaatttaggatttgcagctgtaatctctccaacttttctttctgatgatttgaaaccaatggatagcacggtagacaggcaggtaattgcagttaccactgtctgttcaggccgggcacagtggctcatgcctgtaatcccagcactttggaaggccaaggcaggcatctaggaggaaggcatggatttacgtgtgtgtggcccatgctgggtgtggtggtgaaggaagtggtgaggtcaggagttcgagaccagcttggccagcatggtgaagccccgtctctactaaaattacaaaaattagcatggtggcatggcatacaggcatggtggcacattcctgtaatccaagctacttgggaggttccagggaggcagaggttgcagtcagcagagattgcgccactgcactccagcctgggtgacagagtgagactctgtctcaaaaaaaaaaaaaaaaaagatatgccaagcaaatagaaattataagaaagttggaggtgcaactttaatgtcaggcaaagtggacccaggacaaacaatatcataaggaataaagaagaaagataaagaagtcaactcgtcaagaagacagcatctgaaatgaatattcaccaaatgcgaaattctcaacatccatgaattaaaaacggacagaactgaaaagagaaatggattaatccacaattataatacttataatggcgatttcaaccccctttcagtaactgttagaacacataggcattagagttaatcaaaaagtcaataattattcatctaaaagtcaacattttgaagacatccaaatattctgaaatcaagcaatgcacttctaaataatatttcagtcaaagaaatcaaaagaaaatttaaaaatattttttactgaaagaaagtaatatttttaatgtcaaaataaaaggtatacctaaaacagtgtttggagaaaaacacacagccttatgtgcttgtattaaaaaaggagaaaagtctaaaatcaaggatataggtttctacttaagaagctagagaaagtaaaagtaaatcaaaagctaagtagaaagatggaaattaaaaaagaaaagagtggatatcaaggaaactgaccaaaaaaatggagaaaaccaattaaatcaaagctggtttattgaaaatgtcaataaaattaataagtatctagatagattgatcaagataagaaaaaagaaaaaacacaaattaccaatatgaggactaaactggagcacagcactacagatcttacagatgttaaaaggatcataaggaaatattatattataaagacctcaaaattgacaacttagaagaaatggaaaaattcattaaaagacacaaattaccaaattggataagggaaataatagaaagtctgaatatagctatagactaaaagaaattaaaattattaccaaaaccttccaaaatggaaactccaggcccagatggctcctggatgaattctatcaaatattgaggaagtaataatgccgatcttcacgaaagctgtcagaaaatagaaaaatttccaactcattttttgatgccaatatactagtcttcaaaacagacagttgtctttttgggtttttttttttttttttttttgagacagggtctcactctgtcactcaggctggagtgcagtggcatgatgacagctcactgcagcctcaacctcccaggcgcaaacgatccttccacctcagcctccccagtagctgggactctaggcacgaaaccaccatgcccagctaatttttttttgttatcacttgtttgtagagacagggtttcaccatgttcatcaggctggtcttaaactccaggctggtcttgaactcctgggctcaagtgatccacccgccttggcctcccaaagtgctgggattacaagcataagccagcatgcccagccaaaacagacagattttaaaaggaaagagacctgtatgccaatatcactcacaagcctacagttaaaagtccttaacaaaatcaaattcagcaatgtattttttaaaattcatcatgatcaaatgggatagatcccagaaatgctagactcatttaatattaaaaaccaaataatacaattcaccatattaatataaatttttttaagacagagtctcactctgtttcccaggctgaggtagagtggcgtgatctcggctcactgcaacctctgcttccctgattcaagcaattctcctgcctcagcctcccgagtagctgagattacaggtgcctgccaccacccctggctaatttttgtatttttagtagagatggggtttcaccatgttggccaggctggtcttgaactccttacctcaagtgatccacccacctcagcctcccaaagtgctgggatttaaagatgtgggccacagtgccaggcctataatgatttttaaaaaacatatgatcatctcagatttctctacatctatagaaaaagcatttgtcaaaatccaatagctgtttatcataaaaactattagaaatcagaaatagggaaactcttcaaacctgacaaagaatatctatgaaaagcttatagctaatatcaatttaatgagaaaggttaaatctttcctcttaaggagcagtgcagtggtgaatactctccccacttctcttcaatggcatatgcagagccctggcctaagcccagactttttatgagaaaaataaataaaaggcatacaaattgggaagaaagatgtaagactgattgtctttatacacagacaacatgattgcgtatctagaaaacttaggaaacccaaaaagctactagaactgacatttgaatgtagcaaagtcacagaatacaagatcaatgaacagtcagaaattataatttatgaactacaatttatgatagtatcaaataacaataaatgcttagggataaatttaacatttggatctccaagtgtagtggctcctcacacctataatcccagcacgtttggaagcttaggtgagtccagttcaagagcagcctgggcaacttggaaggacagcctgtctcaccactcctattcaacatagtattggaagttctggccagggcaatcaggcaagagaaagaaataaaggtattcaaataggaagagagaaagtcaaattgtctttgttcacagatgacatgatcctatatctagaaaaccccatcgtctcagcccaaaagtttcttaagctgataagcaactttagcaaagtctcaggacacaaaatcaatatgcagaaatcgcaagcattcctatacaccaaaaacagacaagcagagagccaaatcatgagtgaactcccactcacaattgctacaaagggaataaaatacctaggaatacagctatcaagggaagcgaaggacttcttcaaggagaactacaaaccactgctcaaggaaatcagagaggacacaaacaaatgggaaaacattccatgctcatggataggaagaaccaatatcgtgaaaatggcaagtaatgtatagattcaatgttattcccgttaaactactattgacattcttcacagaattaattagatgaaactattttacgattcatatggaaccaaaaaagagttcttatagccaagactatcttaaacaaaaagaacaaagctggaggcatcacactgttggacttcaaattatgctacaaggctatagtaaccaaaacagcatgatactgctaaaaacaacaacaaaaaaacaaacaaacaacaaacaaaaaaacagacacacagaccagtggaacagaattgagaactgagaaataagaccacacatctacaactatctgatctttgacaaacctgacaaaaacaagcaatagggaaaggatttcctatttaataaatggtgctgggaaaactagctagccatatgcagaaaattgatactgggccccttccttacaccttatacaaaaattaactcaagatagattaaagacttaaatgtaaaacccaaaactataaaaaccctagaagaaaatctaggcaatgccattcaggacataggcacaaagatttcatgatgaaaatatcaaaagcaattgcaacaaaagcaaaaatttataaatgggatctaactaaagagcttctgcacagcaaaagaaactatcatcagagcaaacagtcaatctacagaatgggagagcatttttgccatctatccatctggcaaaggcctaatacccagaatctacaaagaacttaaacaaattacaagaaaaaagcaaacaagcccattaaaatgcaggcaaaggacatgaacagacacttctcaaaagaagacatacatgcaggcaacaaacatatgaaaaaaagctcaacatcactggtcattacagaaatgcaaatcaaaactatgatgagataccatctcacaccagtcagaatggcgattattaataagtcaagaaacaacagatgctggcgaggctgtggagaaataggaatacttttacactgttggtgggaatgtaaattagttcaaccattgtggaagacagtgtggtgattcctcaaagatctagaaccagaagtgctatttgacccagcaatcccattactgggtatatacccaaaggattataaatcattctattataaagatacagcacgcatatgttcattgcagcattattcacaatagcaaagacatggaatcaacccgaatgttcatccatgatagagtggataaagaaaatgtggtacatatagaccatggaatactatgcagccataaaaaggaataagatcatgtcctttgcagggacgtggatagagctggaagccgtgatcctcagcaaaccaacgcaggaacagaaaaccaaacaccgcatgttctcacttataagtgggagctgaacaatgagaacacatggacacagggagggaaacgacacgcactggggcctgtcagggtgtggggttgggggagggagagcattaggaaaagagctaatgtgtgctgggcttcatacctaggtgatgggttggtaggtgcagcaaaccaccatggcacacgttcacctatgtaacaaacctgcacatcctgcacatgtaccccagaacttaaaataaaaaaaatactcttagcttctgtgtgtgtttctgtgtgtctgtatcgtctcctcttcttacatggacaccagccattagattagggccacctaatcccatagagctacaggacacaggacgtcctggttcctggagcattgactgtaagtcagacgttatgtaatacaattctctcttcacaaagagaaacggataaaatgtgtctactttgtcattttggattggagaagagaacgtccatggctctttgaatgaatgaaccatttcaccaagtctcagtggccccaagaatccttaataaataccctactgctggttcccccgtgctggggtggggcagatgagtagcgtagcaccgagagctcatggtccttctcaggacagtggtttcagacactgggtaagggtgtgtctgaaacgcacaagtgtgtccctgcttctagggagtccccagaacacagcaggcacccgcacagaccttccacacggatggctcactcttctccacgcaccagtaaagatcacccagccaggaggactggacttggccctgggacacctggtggtctcctgcttcggtctggatgcccccgtgaagtcgtaaaggcccccaggtggacccaaggaaagcggggaggagagggcttcctcgtggggctccagaaaccaggcactcgggcccctgcctctgcgagacgtgttcactcattttgcggggtccccagtctctgcaaagcacagcaccgacgcaaggctggtctctctgcttcgcaggactcggtggtgacatgggccgatggtggaggtgcaggcaccacggccttcctgctccccactggggtggaacctgcaaagctccttcgttgaagtggtcactcccagtaccttggaatgtgacttatttggagacagggtgtttgagaggccctgaagtaaaaggaagccatcggggtagccctaatccaatccgactggcatccacataaggagaggagatgagacacagacattcccagagggaggaccacataatgacatggaggagacgccatctgcccacgattcctgtccctggagcattgcagtgaggccggtgtggggcagcctcaggggcgtccacaccaggtgagacggggggtccagagagacgacgggcttgaggggtcctcaccctgcacctgcagcaccaaaaactcaccgaggccctcagggtcctccttcccgcaccagcggttctcttgcactttctcctcactcgggactcaaggggccacccagagcagccaccgcaggcgccctgcatggctagaggggccgccagggtccatgctcccggagccttctcagctccaatgcagaaagcgtgggaaagaaagacgtattccggggtttgtgcatcacaggcttaggctctgaggggagtggaagtaccagggcggagaggaaccttcagcaaagatcccacgtggcagaggctgagctggagagggtgacctcagcagggaagtgaggagagcacagagcagccaaccagttcctggcagctttgggaccgtgtcttctggggactgtggccaggttcaggctcagccctcacccttggtggtgactccgaggccggcagagccccaagtcagcctgtcctgggcaggcacaagggtcccacagcagggtcacccggagtccccaagctgggcaccctaaggggtgtcaccagaggaaacacttgggtctgtggctgaggctgaggacctggctgggcagaggcccccatggccttcatgcctctgagaaagggtcagaaaactcctgatgatggaggttaaacagccgtggtccctggggcatggaggcctgaatgccactgagccaagttatgtggaaacaaggaaggcagcatccagcaccactgcccatgggagactgtgggcgtgaccaggtcctgcagggttgcagaggatgcccaggggaccggcagcccggggcttgcaggagggaccccaggcccactgagctgcaacttatcaattaaacccaaggattcaggccacgtggtcccagatgtgaagtcgagccccaaagccactatcagactttgggatcccagccaggtcaccggcctccctgctcccggctccctcctggtccaacatggactgggggtctgaggagtccacgaagctatgtgctcgctgctcagacactcacccccacacgtgctgtcactggcggctgggctcataattggaaacagacccatgtgactcagaggaagccagcactgccccagctcacgcaggccctcctcggagctttaacaaggggctagcttcctgtgagccccactgtgtcccactgacatgtcagccacaccgctgagttcatccagccagggtgtcttggaaggttctgttcccacgcacgtagccaacagcaccaggctacacacacacgtgtggacacacatacacacacacacatgtgcgcacacacatccacacgcacatgcacacacacgtgcatgcacatacacacccacacacgtgcacacacacgcgtgtacactcgtacacgcacatggacacacacacgtacacacatacacatgcacacatccgtggacacacacacacacatgcacacatgcgcacacacacgcacacgcacatcgagctcccatcagcccctcgcggccacccaggacacaggatcacagtgagctgcagtgaccactcagggctcccaacgcccgttccggggacccttgctggggactctgctttggaaaatgcaacagagaacagacgtctgcagaggcagccgcacaactccctcactcccggggaggtgcagcccctgctctgtgggctcaagaggaggtgtgccacagaggtgctgtgggggtggcatggatgtgccttgtgggtgccccggggggtgctgtgggggttccctgggggtgtcaaggggtgggccacatgggcgagcccccgatggcgtgttgcgctgctcccagacttgtcctgtcagcgtggctgccgcccattctcctcgcgtccccccctcctccctggaaccaggtccagatgtgaggttctgccctcgtggccaccagcctcccagcagatgaccaggaagtcgctgtgagcatctcacggggatggagaagcacattcagtgagtgtcaggaggatgtcagcctagactgggtgaggtcccaggtgcagccccgtgggtcataaacagcagctaaacctgcagggcccagggcggtgcagctgccgaggcacagaagacgacaaggggcactggcaggaggcccccgagcgcctgggctgtacatgcagataaaagcagcagacacgtggcctcaccagctcccactgcagcccagcctgcaggccaggagtctggggctcagccagtctcacgcagcaactgcagcctggtcccgggcccggggggacggccgtctccaagctcactcggctgacagccaacctgttcccggttcccggcagctttgggactgtgtcttctggggactgtggccaggctcagccctcacccttggcaacagtcccccagcccctcacaggagtccccaggtgcttccaaccctacaacttctcttctggccccactcgaggtgccataggcctcccgtcatgaggccaggtccacccagtgacctcccacctaaggtcaactgatgagcaccccaactactctgaaaacgggatgtcacagagcaggagtgacgccggggtacagacccaggccacccagtctcctgcccaccaccgaggagaggacgctgaatggggcttctgaggccaagtgcgccaacgcagacactgcgtagccccagaggcctcggggacaacgggatgaggagggcactcgaaggcgcccggcacacggccgtctccttcgtgcaccaggacctcctcccgagctcagacacagaaggcctgctctgcagaaaacatgggtgtctgaccattaccagtcactcactaatagcccaaattccttcctgataaatgtgccgtgacacattcacctggacctagccaccttcggaacattttctccgagtgacaaatatgactgcacggcccgggctctggaaagtgtgtcatgtacaggaacggccgaggtcgtttagctggcgtgggggtgggcacggccctgcatccccccagcagtgaggcagggacagactgtgaagcctcccccaggccccactgaagaccccccggtccccaaccctagggactgaggggtgggcccagagcagggacaggggagcctcagggtctctgcagctggggcctcccagcgctccccctggcaggtggcctgggccagggcagctgactcagagccccggatggcagggaggcccgaaccagctgtggcacccacggccgcacccgacagccatggaaacttcccgacagcagtcgctgtttcacagctgaggaggagaggggagcagcccaggggccctgcagcaggtgccatgtggactcggcccagccgtccaggaccggaagagcaggcgcagccactggagggctacggattccagggcttagaaggaggtgccggcggctcccagggagcaggccatttgcttgttctcagcagcccctaccacgggacagtgagaaccttcacaccacacggaggaacccgcaagacacgcatgcccctctcacgggtggggaaactgaggcacccagggagcaaatgacttgcctcaggtcaggcagaggatgaatggggtccttcatgccctgtctctcccaggctctgagtagctgagcgccgttggccgaggcagcctgggaatagggaggcaacaggagcctggacggcaaagagggggtgagcggtcagctcccccgacccctccacagaccccgtccaccgtgcagggccccagagcccagggtccagaggccgcccctcaaacacactgtggctttgcagtccctggaggctgccgtgcgtgtctgctgtgggcggtacaaggacgggggacagcagccccccgaggccaggccaggtgggggcaggggtcctgcagatgcaacctcggggctcccgtcagggcggctctcagggtcaacagcccggcccaccctccccaggcaaccgttcaccccgcctcagtcacggcttggacgacgacgctcgctgctcagccatcgtggtgtgaccccgggaggctgtggtcagtcccagagtgagcaggcctgggggtgctgtgccccctcctggcagggacccacccacttgatctctcttcccatctgacccttgctccccagagaccctcccagtcccgacctgtcccacaggctgggccttgacagagaagccaggtgggctagagggtcctctcactttgggcctctgtgtccctggggtgccacgcctgggactgtccacaccaactgcaggggagagaagctcaggaggactcaggacctggcaatgccaagaaaatgaccccctcctccaggaaggccactgggcttccactcaggtggggaggctgggtgaccagtccctgggacgtgagctgaggccagaagacatgctggcagggatcggggccttgagcattcgtgggggcagagtggggcgcctgataaagggggtctctgagctggtgggagggggcccctggagagctgggtggggtgggggactcagagtcttgtccagagggacctgagcttggaagaggtgacctggggggcagccgggcaggcaaggtgctcccagcctgcaggccatcgtcaccatccaggtcttattgggaggccctgggccgcacccagcagccctcccccgcctgccaccacatctgcacgtgcggggatctaataagtgagttgggtaattgggtgcgttgagcagggagggggccacatgttgctggtctcaccctcgaccgcatctgcttactgagaggaggtttgcccggtggagtctccacagggccctccaaggctgggcctcagaccctgggggagggcaggcggcagcctccagggagtcctgactcgggagaaattgaggggcccctgtggcatttcggttaaaccagccccagaaaatcccacccctgcgacgactgtgggccccggaatcaggccctctcgaagtggcttccagctcacaagttcatagccaccccccggctgccgcccacagcaccgcgccctccacgcggggctgcacgtttgttccgggtctcaaggctgttaatcctcaggacagctggttctgtttagggcttgatttgtccgacaatttaaaattttcttcctgccggaaagcggctccttcaaagggaagagaggcttctctgcggccgacgtcgctgagtcttccaagacctcagcccacagagcgggaggggcccagagggcagcgtgagtgcctcagaccacgggagggagctgcccaggagccaggaggaccagtgcccccaaagaaacgcaacagggcacgcagccccaccacgccccactcctcccgacctcaaggaacagagcaggcaggagtgggagggaggcgcagacaaggcctgtgtcctgggcctgtaggggagaagctggggagagcaggccctgtaccctgaggatgtggaatgggcgccccaccgcagatggctcctagggtcccttccaggcggtattcctaatttctgggcatgtgtcatccctgtggctcggctgcacgggctgtgagctgctcccgatgcctgtggaacagggggctgctccccacccccgccaacatacagggcagcggagatgcaagcagcaatagcctgactttgaggctggatgtccagtctctgggtccgaacccatcccaggcgagctgtggtcccagaccccctagtgcagctctgggggggacccagggccctgtcttgagctctgtgacgtcccctcccctctgaaactggcaactggtcccaggcagtgtgaccaccccacacccggccctgtggctgctgtgagtgccctctgaccctgccctgtggtggcttcctgtgagcagcggcagcagacccatctgctcccgtgttcccgtctgaaccctcctgccgtcctgggggctgcgggaggggctaccagccagacgagggctgacccgggaggcgagtacagtggtgccggggagggtcaggggtctcggtgagaattgcgaatggtcaaacccagaggttgcacccgaggccaggtccagaggggagcccaggccaccctgagggacaggtccctgggtggggcgggagccggaaaaggaggaacacactggaatgcgtcccaggttctccatcaagctgacgttggcatcagggtaaatgtacaattctaataatgtgagaataaggctcattagaggtagatattgggttttgttaaaaggtatttccagcctgtcttaaaccaatcacaggacttctctcctcttgtgtccatcaaggacacttaggtgcctccaggtttggctgtgtgtggtttcacaccatcatgccagctggcacgcgcgtgcacccagtggtgctgacacctccacagtgagccagggaaacctgcctgcggctgccaccgccccaaccctggtatcctgggaggttcctcacgggcagctcgcccgacccaggtgcagtgaagagtcccctgtgactgaggaggagcagtgacacagccagggcacagtgtgattccaggactcccggaccccacccctgtgaccgaggaggagcagtgacacagccaggacacagtgagactccaggactccccgaccctgcccctgtgacagaggaggagcagtgacacagccaggacacggtgtgactccaggaccctgcccctgtgaccgaggaggagcagtgacacagccagggcatagtgtgactccaggaccctgcccctgtgaccgaggaggagcagtgacacagccaggacacagtgtgactccaggactcccggaccctgcccctgtgaccgaggaggagcagtgacacagccaggacacagtgagactccaggactccccgaccctgcccctgtgacagaggaggagcagtgacacagccagggcatagggtgactccaggaccctgcccctgtgaccgaggaggagcagtgacacagccagggcacagtgtgactccaggaccctgcccctgtgactgaggaggagcagtgacacagccagggcacagtgtgactccaggactcccggaccctgcccctgtgactgaggaggagcagtgacacagccagggcatagtgtgactccaggaccctgcccctgtgactgaggaggagcagtgacacagccagggcacagtgtgactccaggactcccggaccctgcccctgtgactgaggaggagcagtgacacagccagggcatagtgtgactccaggactccaggaccctccccctgtgacagaggaggagcagtgacacagccagggcacagtgtgactccaggaccctgcccctgtgactgatcgcctgggtgcttttgccccaccatcctgaccactgtcatcatggaccagtcagtggcactgctatcctcagacaggctggcctgggctgaatggtggccttcaaacttggtcatcatcccaaataaaatgacaggcccagccacacaacactgaaatagaaaacaggcaaacaatagagacaatcaacacaacaaaaagctgactctgaaaagatcaataaatttgatacaactctacctatactgattttttaaaagagagaagtgacaaattattaacatgagaaatgaaataggaaacatcactacagatctgacagacattaaaaggacaataaagaaatatgatgaccaactttatgccaataaatttagacaacttatataaaataaacagattccttgaaatatataaattatctaaattaactcaaaaatattcctatagttattaagaaaattgtgtgagaggtcttcactggagaattatatcaaacatttaagaaagaagtaacaccaattctgaataaactctttcagaatatagaagggaaggtaacatttcaaaatttatttgatgagaccaaaatcatcctgatacccaaaccagaaaagaaaaacacagaccaacatctcaaatgaacataaacacaaaattccttaacaaagcattagcaaattgaacctgccaatttatataaaggatactataccatagctaactgtgcttatgcaattttggcttaagattttttaaatcaaacaatataatttactataatagcagaatagaggtgatgaacaatttgatcacctcaataaatgcagaaagtatatttgacaaaatgcaatgcctgtttgtgaaagtactctaagaaaactagaaattgaagttaactttctctaaaataaaaactaaaaaaaaaagaagttaactttctcaacataataaagagcatcatcaccaacaaccaccaaagctaccctatagttaataccatatttctgtgaaagacagtggactttctctctaaattcaggactatgttaaggacatccattctcaccactgctatttgacattgtactggaggtttaactagcggataaaggcaagaaaaagaaataaaggtatacatattggaaagaagaggtgtattggtctgttctcatgctgctgtagagaactgcccaagactgggtaacttataaaggaaagaggcttaattgactcatagtttaacatggctggggaggcctcaggaaacttacaatcatggcagaaagggaagccaacatgtccttcttcacatggtggcagggagagagaagtgcagagtgaaagggggaaaagccccttataaaaccatcatatcttgtgagaactcacccactatcatgagaacagcatgggggcaccacccccatgatctaatcacccccccacaagatccctcccccaacatgtggggattacaattcggattacaattcaagactaaatttgggtggggacacagagccagactacatcatgaggtaatattgtctgtattcacagaggatattattttgtgcttagaaaattctacagaatttatttaaaaagctgcaagaaccgataagtgaatttgacaaggcacaggatcaatgaacaaaaattaattataaggccaggacttctggaatggtggagtgagaacctccataaatccagttttccttaaaagcaaagaaattactagaaaaagtatcaaaatattctttttcagagctctacagattaaccaaagtattgcaacaacctgaaaagcatttattccagaaaaaaatactgtaccttggtaagaattaactactgacacatagcctatcataaatgaacctcaaaaacattatgctaaatgaaagaagccagacacaagagaccacataatgtatgattccatatgattccatttacatgaaacatccagaaaaggcaaatctatagagagaaagcagattagtggtttcctggggtggagggtatgaaagggtattaacgataaatgagcataagaagtcttattggggtgatgaaaactttctaaagctgatttatgattatgattataccatttggtaaatttgccaaaaattattgaattgcatactcatacttgaatagggtgaattttatgttatgtaaaatatacctgaataaacctattttggaaagaaaaacaaactaagcatactctttgccagtttctcagtgctagggagaaaacacctagaatttagggccctcgaaggaacagaaccctcagcaaataccttagactctcagctggtcccttggaaagttaggctctaggattaggggaaaactggtgatatatcagtattcacaaagacataaacttagatttgaactacatccaactgtgattggaaaaaggtgacctgtccctacaccaactgtccaccaaaataacactaaatcctataaaaagtaagataacattaaacagagcttctacaatatttcatacacaatgtccagcacttaatcaaaaataacccagcaagaaaagagacaggaccgtatgcctgtatgggggaaaaaacaaacaagagaaacagatccatgggtggccttgatttgggagttatcagacatgaactttaaaataagtatgattcatgagacattagaagatgagatagttgcgttaaaaaaagtaattgacactgaagataaaacagaaattctaaaagtaaaaaatgcaataattaatgttaaaagctcaatggataggattaatagcagattagacataacagaaaagagaataagttaatttgaaaataggtcaaaaggaaatgggcagactgaaggacaaagacagataatatagaaaagcatataagagatgcatggaagatgatgaaaggctctaacctgtgaaatttaaggcccaggaggaaaataaagacagaaaggggcagaggcaatatctgaagagatcataaccaagaacttttctaaaactgataaaaaatatcttaccacagattcaaaaaagaaaatctacacataaaggacatcgttcctaggtacatcataaaactgctgtaaaccaaagacgataagaaaaccttgaaagaatccagaggaaaaaagcacattttatttaaagaaacaacagaaagatagatttttttccacaaatctgaaagccagaagataatggaatgtcatcttcagagtatcaaaagaaaataactgctaagttggaattcttacctagggaaatatctttcaaaactgaaggttaaataaaaggctgttgaaacaaatgaaaactaaggaaatgtgttgctaacagacccacactaggcagtctctaaaatagcctgcagcaatcctgcctcctggtattcctgaccttgtataatcccctccacctgagcacaggctggacctagtgactgactgctaacaaacagattacggcaaaagtgatgagatgtaattcgaagactagcctacaaaaagttgtttacttctgtcttgctgggccaccgtctcattctcctctcttgccagctttctctctcacagctcccactctagggcaatcaagtttctgtattgcacatagggagctgtggtgagaagctggtgtctccagccagcaggggctgaggacggccacagttgcgtgagtgagcatggaagttattctcccccactccagccttgcagcaagggctggcaggaggccttttaccctgtatccttttgtgccttttgacttttgcacagtggccatgcattatcttccccaaaataaacaataatgtcataactatttaatgccaatcactagtaaaaggtaaaaattaataacaaaaaggcaaagaaaagtaactgtaaacatgcacctaacaaagagggcactctgcaggtgagcacatccttctcccatatcagacggaggccctgcctccaagatagaagatggcagtcacccgggactttcaccctttctccctcaagagagtttgtcagtgttggtgaggagtacatccagagatttacaacacccttatccacccatcacgaatatgtatgtcttcagctacatggcatggcctttaagatcagaggctacatctttctatgatccaatctcctgaaatggtcagtgcttgcctttaggagaggatggtggggatagacaaaggttatgggaatgggaatgggaaaaggtgatagtgttgttgttgttggtggtggtggtggtggtagtagactgaaaagagtcacaaaatctttgcagctcttcacattgggtgctggagcctacttctccattgcctgaatcctggttggccttgtcacttgctttgaccaataaaatgtggcaaagtaatgtattgtgacttctgggcccagatatcaagaatctttgcagcttctgctctcattctcttggaatactgacgccatgtaaacaagtctgagttagacttctagagaggacacatggaggagaaccaaggcaccctggccaaaaccctacaagacctataagtaatgccatcttagatcattcagcttcctccaagccttcagctgatgggcaccacataatgagttcagatgcaaccatcagaagagctgcccagcagagcccagtccaaagtgtcaacccacaaaaaaacagcaaattaaatgggtgattttttaagccattaagtgttagaatggtttgctatggagaaatggataactgattcagattgtgatacggatggtggtgacagtaagggtgagggtaatggtgatagcagtagtagtagtgacagtagtggggaggtcttggtgatggtgatgatgatggcaatggtgataatggtgatggggtgatggtgtggtggtggtgatggtggtggtgatggtggtggtggtgatagcagtagtagtagtgacagtagtggggaggtcttggtgatggtgatgatgatggcaatggtgataatggtgatggggtgatggtgtggtggtggtgatggtggtggtgatggtggtggtggttgtggtggtggtggtggtggtggtgatggtggtgatggtggtggtgatggtggtgatggtggtggtgatggtggtggtgatggtggtggtgatggtggtggtgatgatggtgatggtggtgatggtggtggtggtggtgatgatggtggtgatgatgatggtgatggtggtgatggtgatggtggtggtggtgatggtggtggtgatggtggtggtgatggtggtggtgatggtggtggtggtgatcgtggtggtagtagtggtggtggtgatggtggtgatggtggtggtggtgatgtggccgtggtgatggtgttggtggcggtggtgatggtggtgatggtgatgatggtggtgatgatggtgaaggtggtgatggtggtggtagtagtggtgatggtggtgatggtaatgatggtggtggtggtaatggtggtggtgatggtgatggtgatgataatggtgatgataatggtgatggtggtggtggtgatgataatggtgatggtggtggtggcggtgatggtggtggtggtggtgatggcaatgatggtgatggtggtggtggtggagataaccatgggattactggtggcagtgtcaactctggactccctaagtcatcagagaaaaactgaattttccttcatgtggattttgtgtgttttgttgtgttccagttctttgaaactatgcattacctttggagttacatgtacctatttccaattaaatctctgggccctcttctcaggaaaatagagtttttttcagactttggggacttgtggcactacactctgggttggacctgcggtgagaagccctgtgctatgcttacctgacattctcatgtcacaaacaggtcgtgccggctgctgaagtatttgtcagtgtggctgtcctgcgccagcagggaactgagttgtgtgacattcacgtggccccttcagttagcaccgcacggttggttaagaggagggttttattcaggcataaatattttgaaatatttgtaatcaaatcccacgtagtatagacaacctcccagatggtggaggggaaacacaccacccccctgactgggagagaaaagaccgcggttttctttcctgccacttgtcctcctccgggagcctcggtctcctctctgtgggacagggcagcctcccctggctcctcctggtgcaggatcgatgaggctcttgcccacagcctttgtcccccgacttcctaccacctggtgtcctcaccccatctgggccccgagcacacagcctctggtcctggtttccactgaaaatgtaaactatggtccacgccacattctccagtactcctgtgctattgtgaaagtaaaagacaaaaatacacgtgcttggcagcccgagagcctgggtgagattattgagaataatgcggtggctctggcttaaaaaataaaagccggaggatctaccaccagctctgaacacacacccgtgacacaaactgactcatgtgcaattgcccattagtggcaggtcttgccatttttcgtttttttctgagtcgagatcagctgcggctggggagaacattagttctgtctgtcggctccatgagtaagcagaggaaagtctgactacagaggcatcttctcaaatgtccatgaaaggctgcaagcccgagagtaacgcccctgctgccctgagtggtccacgtggtgtccagagtgtgagaaagccacagagagcttttccacacggagccacttaaggcctgcctcagcctgagaacacttgggcagaaaaggacagcacggcttcctcctcctccaggccgggcctacaagcacccacagttccgacagagaaagtctcttcttaatggtacgcatgtgtcttactgtagctcccagttagtcccctaagcgtgaaccaccacccacccatgctgctcccctcccaccatctctccataaacaggacccaacgcagccaaaaactcatggtcatgtgaccttggcatcagcttgctcgttaggaaccgtgcctggaggtgctctgagcactgactgccaacctcagcagggccctttgtggtgttgaggtgtggtgtccgcagggcagcctgcagcctgctggggtccagcctggggcctcaggtcctgggaaccctggttgaggctgggctgcctcagtgcccctccgcagcctgctgcacccaagcactctgagaaaaggagcaatcacccaacttcagtctgaaaatgagaatgttgagaagggcatgatgaggggaagcagaccagagcccaccggcaagggtagaacgtcagccccgccctagtgggacagacaagagagaagcctcctcacaccaggaggcagtatagccggagccttccctccagggctctcaggagagcctgtgctggttcatgaaaaagtgaggcctctgggctttgctgctgcagagtgaggtcagagcccacaggccccacagatcatcctgcctgacaagcacaggaggcaccactgcttgaattcagagggcagctccgagggtcctaggtcccctgtgaatctccacagaatcctgggacctcagagcctgcatcagttggtcccccatgcagggacttagtgactctgcagccccagtcagggcctgctctgtgccaggcattgctctgcagacccaaagggactccaggccagtcctcatcctcagggcccacagtgtaacacagaggccgtgccgcaggctctgctcctctgccagcaagctgtgcagtcttgggcaggttacttcagtgctctggtctcagcttcctctgcaagtggtggcagggctgtgctggaggcatgagaggggtgtgggagctgcaggctctggcaggtggcacgctggggttcttggagaggggtgtgtggctgccaggggactactgctgtcattgccatctgcagagacaaacagaaacccaacacggcagccatcactggggccccttcatgggagggatagggtggaaattgcaggtcccagcaaggcctcaaagcaagtgcccagcctcccctgatcagtccaacctgaagccaggtcctggtgtgcacagagatgcacggctgggctgccccacctgcttgggccacaggaagcatttctctaaaggtgagcagcttcctctgcaggtgacacggcctccacccaaacccagaggctctggctctcccactgcggcttgccgcagccccacacttgcctgctcccacactgacacctccaacaccacaggggctgctgggtcacgtggcccagatggcagggctgctcagacagtcattttctgctcctggccgcctcgaagctggcagcctccatgtcagccaagccgtgggtcagagcagtgcccccaggaattaaatatgttgccttcagaacccaaaaaggcctgtcaggccctgtgcttcctcctttgaagtaggggatgcaagatgtagcaatttctcttttactttagaggatgtcctggtatgaacctgatcactggtgccctaaaaacttccatgaagttaggtccctgaatcctcggagttcacctcccacccacagatgcaaatgtgtctcataaggcctctagctcatgaccctcctgttcctcctcctgcccattatgtcgtcactgtaatggatcagtgtggtgtccggtgcactgctcaggtgcccagatcttttcaggcaatattaggacagaggacagagttagcgtggccctgcactaaactgggaatgagtattgttgttcctcccatgtaaatgcaaactgtttccgatcctcttttctaattggaatagaaaagaatgcaatggccaatcactggcctcattaatctgctacgatgatacgtctgacacagcagatgcaactggagctactaccgggttcaggctaagtggtctggcgtcactttctaggatccatcagtctttgcaatgaccaggccagagaattagacacgacagtccaccaccctcgcctccgtgaggcctttaacggtggtgccatcctcccaggatgcaacgtggtttgtgatttactctcttggccatggaaaggggacttccccactatgatgtctgtcaccacacaggcctgggatccaatatatggctactccagccaccaagtacataaattataattacatactcagggggcagggaagcggccactggatggtcttctggcccaggggtctcactgtgcccaacactttagccaggattcctttttattacctggccccgtcagccccttctctaacagggaggccacagcgacacttttggcctccagtatcaaggtccactcacatcccgcgtccatttgtcctcaaaatctctggattttcccagcgtgcagccagctgagtgagtgacagcgggattctacagaacatccttgtcaaggtattgcctggtccttccttctggtgacctggccacctctgcaatcaatggttccagacaggaaattagctcaagtccaggaatggagtagggaaccacgatattttactggagtccccgccctcggcctctttcttccttcctctgccgtccgccagggcggcttggctcaacatgacccatcgctttctccaggcttctgggagccatcccagaatcatctttgacccacgacctgcagaacttgccaggtaactaatcctatgtgccaagcaagtgcctccgcctcaatagttcttctgtccccctggataaagcaccctggaaatctaataccgggggtgttccctggctcctgcaggcacatgctggctgcctcgtgcagttcctggacatgcaacctctctactccctggtcaggcctagcaggtccccatccaggttaccctggactttctccctagtcactgctggcagccaagagacaaggtggagcagcccccagtgagggcacctgctgctctggtaggggaggcccctggagcatcttccagcacagaggaagtgctggcttccaagggcaggaggggcccctctgcaagctctgaggggacaggggtctgcagggccatgccctcagggcttccacctggatgtctcagcccatgtttcagggtcccagattttcccaaccggggtccagaccttcacataggccagccgtggccaggcatcaaaacatgcctagagctaggtggtccccacagtcactgtcggctcctcagccatactggttctacctctgccaaacatgggactccttttcagcaaccagagaggccctttgttctcacaccaagcctgatgggcaaccgtgggtaacgtcgcaatctccattcatccctctgtggagcatcaaccccactccccccatgcactgaaagggggaaactgccacacccacaaggcctccccttccaccaggaaaacgtcccagatcactcttggtgaaaacatttaacaattggggccctaactttgtgccaaagattacccatatccccacatcaaccagaatggtgtcctcggtgttggccgggaaacggccaccgcaccagctgagtctcaggcccctcctgcaccacttgtgttaattggggtcttccaagaggcaggtgccatggaagctctgacgtgactggagatttatcagtgcaatgtctgtgaaggatgctgggggggtggccaaagaggacggaagcctcagaccacaggtgagacccctgtgaaggagatacggggagccttggccagcacgtgcccctagacagtgctggccaggccgagggagaacttctggagccaaggtaacccctaaaggattctggtcttgtgaggaggggcctggcttccccctgggagctgctggcttggaagcaggaggcattgcccaggtgagagttcggcatggacccaggggagtggcacacggtgcccgccgtcagctgtgctcaggagcagcaggcaggagccctggactcatggctaccatgtggctgccacactcaggcacacttaggcacatacactcacactcaggcacacttagacacacacattcacactcaacctcagacgcagacacacaccacacactcacagatgcacacagtctcagacacagacacacaccacacacagatacacacaccacagactcaaactcagtctcagacacagacacacaccacacactcagatgcacacaccacacacactcagtctcagacacacacacacaccacatttgcaaacctgctcatcagaagagggacctcgcccccagccgctccgccaccttccaggacagctctgaagggagccctgtcccggagcccagggacctctccccaacccggctgcgcctcacctcaaggaggaaccccggccctggctgggggactgtgaccagggtggggagtggggaccccagacagagccctaccagggacccctgtcactctgtccccggctgggctcaggtggggacctcacggtggtcccagggcccagcaccaagcccacctgtggtttccagcgggaaaggggtggcaggggtggctcgccgcatgcccaggctctgccccaacctccgcgcccaggctctgctgtccctgccctcccggctccccaccctcaggccccaggagcggcagtttctgcaggagctcctgacccggggcctctcgcgggaggcctgagcaagccggacacaggacacggggtaggggaggggtcggggggctgatggggggaaccctgcaccccccagggcagctgctaccaaggggcgagtcccagggcccccgtcggccctgcgtgcggggcgcggtccccaacacccagggccccggaggcggacacagccccagccaggtcgtccgggaaatggggcgggggcgacgggcggccgggcccgggacgcgaagtccgagcagcagcgggcaggggctggcgggggagctcggcccgggctgcaggggggtccccaccctctccacctcctccagcctcccgccctcgagggtccccgcttccctcccatccccctcccgtgcccccggccccctcctcccatccgcggggccgcagcgcttcctggcggcggggcgggtcaggccggcggggcggggtataaagggggcggcgccggccgcggttccctccctgctgcttactcggcgcccgcgcctcgggccgtcgggagcggagcctcctcgggaccaggtgagcgcctcccggaccccgcaccctggaagccgctcggcccgcggggggtgaccccgagtcctgggaaggcggcggcggcggctccgtccctcgggtccccgggaagggggactccagccccagggacggcggggggctcggcgggttcggggctcctcctcgcggggctggggccgcgcctgcccctgtggctccgcgtctctgggtccgaccctcgggcgcgcgacttggggccacctccccgcggcctcctctggggcggagccggcctgggcggggtgggggggtccctgtctgcgcccgagctcggtgctgggacccccgctcccgagacgaccccggcaccgcacgccccgccaggccccgcgtctgcgagcggttcgggtccggctccggcccgcggggaagacgccccggctggctgggacctccgggggcgcagggcctctccccgggccggacggaaggggcggcggggcggggggaggaggggctttcggtgcccgagggcgggactgggcggggaggggacgcgggtggccccgacgccccatcgctgcgcccctcccggcctggagcccaccagggccccgccaggcccaggagaagctgcagacggaggcggctccccagggcggcgggacccgggctgacagcgacccgcagcccctgccgggccgcccacacccgccctgggactccgccggggcgctggtggaaccgctgggcctgggtctccactgctggcaaccgaacggatcggccctctgtggagccgcaggtgtgcgggcgagcggcgcccatccgggctgtgccagcagaaccccggtgcccgcgcctaggacgcccctggagaagggaccttccctttggggtcggaacccagaaaggaggggcctgcgatccgcggagctccttgttcttgggataacacagctctggcttggaggcccccttgcacttcgactctggtgattatttcaagaaaggccagaccgggcacggtggctcacgcctgtaatcccaacacttggggaggccgaggcgggcagatcacctgaggtcaggagttcgagaccagcctggccaacagggtgaaaccccgtctctactaaaaatacaaaaaaaaattagccgggcgtggtggcaggcacctgtaatcccagctaatcgggaggctgaggcaggagaaaatcacttgaacctgggaggcggaggctgcagtgagctgagatcgcgccactgcactccagcctgggtgagggagcgagactgtctcaaaaaaaaaaaaaaaaaaaaaaaaaaaggaaagaaaggcccggtgagatgctttctcttaaacacggccctgcacgttgagttgctgcctcctgtggcctatttcacgtttatgcaaagtcgggcgcctgatgcggggctcacccgccacaagcaggggtcctggtgctgctcatggaaggggccctacccagcccgcggggcactggctgggacggggctgcccaggtccgcccaggatccaaacacccagccccgcccagcggcccttcctggcctgcagtggaggctgtaatgggcaggggtggtgggaatcccagctcacagggcgcctgctcttagaagggcggcatctgggtccagaggtcagaaacgtcagatgcccatcccagaagtggcggggaacctgtctccacaatggatagcagcactgtctttttttttttttttttttttttctcatttcatagataaggaatgatgccttgttggggggtttgttctgcatgtctttggtttttgtgcagtacaaggctatttgggctgtttgatcactgaccgtgtgtagtgatgtgcattgcctggttgtgatgtccccatgttcctaatggatgttcgctttttgggtttttttggttttttgtttgtttgtttgttttttgagacagggtcttgctctgtcacccaggctggagtgtggtggtgctatcactgctcactgcaatctgcacatccctggctcaagcgagcctccacctcagcctccgagtagcggggactacaggcatgcaccactgtgcccagctaattttcttttaagagacggggtctcactatgttgcccaggccatggatgtgtttgtttgtttgtttgtttggggtgtttggggggttttttctttttttattgatttgaaaaagctttattttcccgaattttttattgtggtatacaatataaaatgtactgtcttaaccatttttaagtgtgcagctagttcagcgacagtaagtacattcatagtgttgtgtagccatcaccaaggtccatctccggaactcttttcctcttgtcaaactgaagcccatggagcaccaactcgcatcaccccttccctcccctggcagccaccatcctactttatgtttccaggaatttggccatttaggtgactcatatgagtgaaatcgtatgaaatgtctccttttgtgactggcttatttcacgtggcttaatgtcctccagattgatccacactgtaacgtatgtcagcattcccttcctttgtaaggctgagcagtattccactgcatgcatgccctgcattttgtttacccattcgtctgttgctggacacttgtgttgcttccacgtttgagctactgtgaatgatgtggccatgaacacaccacacagatacctcttggagatcccactttcacttcttttgagtatgttcccagaagtggaaatgtggatcatttgattttttcatttttttgagaattaattgcctcactgtttcccacggtggctgcaccattttgctttcctgccaacagtgcacaagggtccagtttctccacatctgcaccaacaggtgtcattttccgggttcgcttggttttttttaaatgttaaccatcctaatgggtgtgaggtggtatctcactgtggttttgacttgcatttccctcatgattagtgacgttgagcatcttttcatgtgcttgttggccatttatatatctcttgggagaaatatctgtttaagtccttgacctatttttgaatcaagttgattgttttttgttgttgaattttaggagttctctgtatattctggatattaatcccttattagatacacagtttacagatattttctctcattctctgggttctttttactctgttaatgatgtcctttcactagatagatgcaaaaaatgtttttaaattttggtgtaatctgatttatctattttttcttattgtcatacccaagaaatcattgctcagtcccatgtcacgaaggtgttaccttatgttttcttctaagggttttaaagttttaggtcttaaaacgtaaagatccattttgagttaatttttgtatatggtattaggtaagggtctaacttcattcttttgcatgtggatatctagttgtctctgcaccgtttgttgaaaagactgtctttatcgaatggtcttgacggcttgattgaaagtcatatatgcaagggtttctttctggactctctgttttattctgttggtctgtatgtctgtctttatgccagtgccacactgttgatgactgcagctttgtagtaagttttgaaattaggacatgtgagtcccccagctttgttcttatctttcacgattttttttttttttttttttttttttttggctattcgaggtcccttgagattccatctaaattttaggatttattcactatttctgaaaaaaaaaacaatcactgggatttttatagggattacattaaacctctagatcaatttgggtggtattgacatcttaatatagtaagtcttccaatctatgaacatgaatgtctttttttaaatgtcctcttcaatttctttcagaaatgttttgtagttctcattgtacaggtctttcacctcctaagtcaatttttaagtattttattatttttgatactatagtaaatagaattgttttcttaatttcctttggattgttcattgttagtgaatagaaatacaagtgatttttatgtgtttactatgtattctgctattttgctgaatttgtttattagttgtaacagtttttgtggaatttttagggttttctacatacaagatcatatcatcagtgatcagagataatttacttatttctttccaatttgaatgcctttaatttctttttcttgcccaattgctctggccagaacttccagtacagtgttaaatagaagtagtgaaagcaggcatccttcctttatttctgaccttagaggaaaagctttcagtctttcaccactgagtatgatgttcactgtggctttttcgtataatatggcttttattatgttaaggttgtttccttctattcctaatttgttgagtgtttttatcatgaaagggtattgaattttgtcatatggtttctctgcatcaactgcaatgatcatgtgtgagttttttttcctccttcattctgttaatgtgtattacattgattgatttttttttttttgtatgttgaactatccttgcactccagaaataaatcctacttggtcaattcattaaattccatttaattgcatcaaattataccaaatttagtttactattaatagtattttgtttaggatttttgcatcaatgttcataaggaagactggattgtagttttcttttcttgcaatatctttgtctggtattggtatcagagtaatgctggcctcataagaatgagttaaatagtgttcccttctcttcaagttttttgaaaattttgggagggtttggtgttagttctttatgtgtttggtagaattcaccagtgcagccatcaggtccagaggttgtttgtcaggagatttttgagtattgattcaatctccttactagttatgtctattcagattttctatttcttcatgatttgattttgtcttgataggttttgtctgtctggaaatttttccattccatctgtgttattcaaattgttgacatatagttgcttatagtacactcttataatcttttttatttctgtagaattagtagcaatgttgccactttcacttataattttagtaatttgagtttcttctttttttcttagtctagaatctagcttaaggctggtcaattctgttatcttttcaaagaaccaacttttgttgtcattgattttctctattatctgtctgttctccattttgtttatctttgctctgatctttattttttccttctttctgctagcttgttctttttctagttccttacattgtaaggttaagctcctatttgagacctgtcttttttaatataagcatgtatagccatcagtttcccccttagcactgctttcactgtcgaacaagtttttaaatttgtgttttcattttcactcatctctaagtattttataatttcccttgtgatttcttctctgatccttggttatttaacagggtgttgtttaatttcgtgattttttaaatgtccttgttgctgatttttaactttactcctttgtggtctgaaaagatatcttgtatgatgtagatctttcaaaatctattgacacagactttgttgttgcaactaaccccgtcattgcaagcccttctccgtctggttgaagtgacttccaggagatttaaagggctggcacccttttctcccttcatttttctctttttcctcttttgagacgtagacattgaagactagcacattcaaaagcaaccatatatgtggagaaaataaaaaagtcattgcacatgctcaggggaagtcacgggcttagaaaagacctaagaagaccttaagtttatactttatgctgatccttagcacagagacagcaacaatcaaaattataaaaacaagaaaaaccagcaaactctggggaagaaagagattttgatttcacaaggcatacaaagaaactttcctatttcaaaggaaaaaaaaacaacagaaactgtcactgaaaaagacttggtggtagatctactagacaaaggctttgaaagaactatcttaaagatactcaaataactaagggaaaatgtggagaaagtgaaagaaaatgtaggaacaaatgaaaatatcaataaaaagctagaaattttaaaaagaaaccaaagggaaattctggagctgaaaagtacaataactgaaatttaaaattcactagagaaatgcaaaggcagatttcagcaggcagaataaagaatcagggaacttgaagatacaaaaatggaaattattgagtctgaggagcagaaataaaaagattgaataaaggtgatcagagcctaaggggtctgtgggataccatcaagcaaaccaacataaacattgtaggagccccagaagaagagagagcaaagggagcagagagactatttgaagaaataatggctgaaaacttctaaaatatgatgaatgacatgaatataaccatccaagaagcccaaaaagctccaagcaggatgaactcaaagagacccacactgaaacattctaatcaaattgtcaaaacccaaagacaaagattttgaaaacagcaagaaagaatgattcatcacatgtaaggaatcctcaataaaactattagcagatttctgatcagaaactttgaaggccacaaggcagtgggccaatatatccaaagtgctaaaagaataaaaactgtctaccaagaagcccacatccagcaaaactgtcctttaaaagtaagggagaaattaacacattcttagatcaacaaaagctgagaatgttccttaccactagacctgccctataggaaacgccaaagggagtcctgcgggttgaaataaagggtgatagacagtaattcaagtgaagaagtaaagatctcagccaggcatagtggctcatgcttgtaaccccatcactttgggaggccgaggcaggaggataacttgagcccaggagttcaagaccagcctgagcaatatagggagaccctatctctataaaataaaaatatttttaaaaatcgaccaagcatggtggtgcacacctgtggtcccaactactggggaggctgaggtgggagaatcatttgggcctgggaggttgaagctgcagtgagctgtcaccacaccactgcactccagcctgggcaacagagcaagaccttatctcaaaataaataaataaataaatatctcagtaaaggtaaatatatagacaattataaaagctaatattgctgtaacaatggtgtgtaatgctgctttttgttttctacataatttaagagactgatttaaaaataacattatgcttttggacacataatatataaaggtgtaattttgtgacatcaataactaaaagggttggggacagagccattcagggagcagagttttgtttatgccattgaagctaaactggtataaattcagtgtagactgttataattttaggatgttaaaatgcaatccccatggtaacaacaaagaaaataactaaagaataaatacaaaagggaatgaggaagggatttaaatgtttcaccatcaaaaaaattaattaaacacaagacagtgatactggaaattaaggacaaaaaaatccataaggtatacagaaaaaaaatgcaaaatgaaagaagtccctctttatcagtaattactttagatgtaaatggattaaactctccaaactctctctgttaaaagacagagattggcagaatggatttagaaagccaaatccaactatatgctctctacaagagatgcactttagatccagaaacataaatagattgacagtgaaaggatgggcaatgacatgccacacaaatagtaaccaaaagagagcaagagtggctatactaataccagacaagataggctttaaatcaaaaaaggttacaagagggaaagaaggacatcatatattaataaaaggctcaatacagcaagatataataattataaatatttatgcacctaataacagtccatcaaaatatttatatcttacactgggaagattgttgctggctctcagtctgcttccagtctgctcatattgcttttgttgtaatgatggtcatatgtgggagctcagtgtcaagagggcagacttgagcccacactgccaggcttcagacctcagctattagctgagtgccctgggcaagttacctcactgggccttggtttcctcatctgttggagtggggatggtaatagtacctatgtccaaggccataagtccaattgtgaatgttgaatgaagggatataggacagtatctggtacacaattattatagatttttcattgacattttatacattctgttttcttcaaagactttttggttcctgttttgcactcagatacttccttttcctggagtttatttgggagcaccatgtgaggtagtacctttatttctagtcacagggtgagccctcatcccagcctgcttccaccactctgaaaggccaccatgtcatagcctaagttctcgtgtgttgttatgcccatggttgtgtggagtgttggcctgttccagcaccaaaaccaaaactgtaattttatcgtttcatttgatagcacaagctttctcatcactctattttttattttgctcaactcttcttgctttttctaccaagtaaaacttggattcattttgcaaactcctatctacaaaaatgcaaaaaattttcttggaaactttaattaaaattgcattctattatagattcagttaggaataactgatatttttaaatcagtttaagatagtgggatgatttcttatccaaaaacaaggtttgtctttccaatatatttctcaaaaatttttttgagtttttttcataagtcctgcacatttttattcagttgattccttgggtttatgttgtttttcttactagtgtaaatagcatttttctgcaacattttctaactggttgttagaaaatgtttcttctaactgatagaagaaaatcaataactttttgtatgttgaggactaagctctgatttttttatcttgcctatattcttatctaaggggtctggggagtcatgccctacaaaccataaattctcatcagatggttttatctaaccctatatgctgtgacttactttccatctgactctggcatgacactacacgaccaagaagaaaataaaaatattttaccccaaaacatgtttctttgccacattttgaaatggccctgcaaagctgtcctttactggggaaaatttgcatctgtaaggaatctctgttaacatagctagctctttttcttccaggccctcccaattctgaagagattaaccgagagtctagcagcttttaaaggtctcagtaggaaacacttgtcattgattgtctctaagggcagccactatgagacttcagaagaaccttggtctccacagtcttttatcttaacctgagcatttcctttctatgatcccaggtctttagacaaactcaaccaattgtcaaccagaaaatgtttaaatttacctgtagcctggaagccatctctccccgctttgaattttcctgcctttctggattaaaccaatgtatttcttaaatgtatttgattgatgtctcatgcctccctaaaatgaataaaaccgagctgcaccccagccaccttgggtacatgttctcaggacctcctaagggctgtgtcatgggtcatggccactcatatttggctcagaataaatctcttaaaatattttacagagtttgactcttttcatcaatgatatatttttctaagtggctcactaaattttctctccctaatctcccctcctttctctttctttctctctttctctctgtctatatatatatatatttttttttctcttttttaaaaaaactttgttcagatgattttctgggtagacaatcctatctttaataaggacagttttgtctcttcttttccaacagttatacttttatttttactgtcttattgcattggcttccaacacaacactgaatggtagcgtaagatctgcactgtttgcccccaccccattttttttgtactgtagtaagcattcttctaatgcaggattttttaacccagggttagatctacgaatggaatccctgaattcctggacatgatttctgtatatgagcatctatgcatttgtgtaaggtgaaattgtgtagactcttaaaagggtccatgaccacaaagataagaaccactattttagctttttgtgtaaaatatgatgtgagctcttgatttgaaatgtatatcctttatagagttaattctactcctaaatttcttactaggttttaccttgtctggctgttgttgtttcttagttagaaattgatgtttcagggatctattgaagcaattgcatattttttcccattttatgttaatgtgacttacattaatgtattccctagtgtttgtggcaacactgtactttaacttcatattatagttctggtatagtggtccttaatatgctattggattttagtttttaatattggctagaatttttgtgataatgttatgggatttttagggtgtcacttttctggcctgaaacctctatggccagtggcgcctttgcccaagttcttgtcctgtgtccaggaagaatgaggtacacagacaagtggagggtgtgcaagacagagaagctttattgagtgttaggggagctcacaggagacccgcagggggcagcccctctctgtaggcgggttgtcttgtcggcgggttgtcttgtcaaatgttcagctctcagcagagagaaggccctggagtgggtggctcctctctgcaggcaggtcatcccattgtctctgcagctcttagcagagaggaggccctcgagagcgtgtctcctctctgcaaacagggcatctcaactagtgttcagctctcagcagagagaaagccctggagagggtagctcctctctgcagctggtcgtcctgacatcccttcaggtcctgaagctctcagcagagagagcacctcctctctgcagctggtcgtgccatgctctgccctgctctgactgagcctggggcttttaaaggcctcagagaggggaagtgcatgctgattggtccatgtgcagccatgtgcaggcccagaagaaagcaccttgagttcccctctggtccgtaggacgggcaacccggcccccaggcttcaggcctgccccagcctgaaggtggggcttcactggggacccatcctcttctgcccaggagcctatctgcctcctgcagccatccatggtgcccaggctgctggtaccaaggggcaccggtgcccagccaccctcagcacccccccaagcctcccctcctgcacttctcagtgcccacagtttggagggggccaagtcagcagggggctggcatgtcagcactgccacaagcatgcacccacccggccaggctgtgacagtgcccaggctcagccccaactctgctctgagattggagtgggtggtgggagcgggaagaagctgggcagcgggaacaggcacctccaggcctacaagggaaagaggggccttccctggctccccaagagtgcagcgatgcctgggtcagcagccccagttggggcagctgaaactgcaccaggagtgggggctggctcctgcctcctccatggagcagaaggcccagatccacagccacgacttgggcagttgtacctggggaactctcacctcgccaaactgcaaggggcagggatcccacttatccccggctcctgctggctccgtggagcatggtacctggccatgtcctctcgcagcctggggcagggtctccagacctgggccagcatcccagacaggggcaacaccgccgtgagctccccttcacccagcacaccacccggcccggccccatggcagcggcccccagggaggcagtctgcggggttgggggcctgtctgcctcttccatgggccctccctgagcagccagtgtgatggcagcggccacaccagatgggctgccgctgccatcagtaatatttatagtgatatttatctgtagagttacttttagggacttttttttttatcaagctttggtcacaggttatgcaacatttaaaaatgaattgggaaaaagtttatctttttatgttctaaaacaagttaaatagcatgaagtgcttgtccttgaagctgtgaaactcacccacaaactgcctgagctggcacctttgggaacggacttcattcctccctgggccccaggctgagcaggtctggcctgggtcacctcatccactccagacgccgcaaaatcacagcaacccttcagggccctctcctggcagcgcctcccctagtcccggtgcttggacactcctcccatctgcaccgaggagagggcggcactccaatccctgcattacccctggaactgcacgctctgaaccaggcccggtgccctttctgcccagctgcccggctgctgccagccccactctgcggagccagcagcacagtgaggcccgtcctgatggcctcctggagctggagcttaggccaagccacagggcatcagggaggatggacgttcaagggctggatctgtttgccccagggtcctggcacccaacagaaaggaaagccaggctaatgacggctgtgtccctacacttgacagagtcctccctccctccttatcaaagtcctgtttaaagggaatggagccaggctggagagagagtgcctagctctgcaggggagccggtctggggaagctgggatctctctcccgccctcccctctgcactgtttccagggcagccccaggcagtggggggcgccagacagtggtgctccattcccttccatgccgacgcgcccagctacccactccacccagccctggaggacatggaagggcctcaaccatccaaatcccacccaaaactgagcccagaggcacccactaaacatctgtgaccccacccagggtggggcaagagggcgcaagccccccagtccagatgctggtgacggtgtgtgctgggcgcagaccccgcttccttgaagactgagggcagtgcccccaatcccgctgacctgctgtgcgtgcgcctgccatgggggagggtgccaggggagaggcactgggggtgtctgagcgacccccacccctgttgcaggacttcagggccacaggtgctgccaagatgctccagggcacctgctccgtgctcctgctctggggaatcctgggggccatccaggcccagcagcaggaggtcatctcgccggacactaccgagagaaacaacaactgcccaggtgccaggggtcgggggccgggggctctgggcatttggggggcagttgggaccagtacccaggtgccaggggtcgggggccgggggctctgggcatttggggggcagttgggaccagtacccaggtgccaggggtcgggggccgggggctctgggcatttggggggcagttgggaccagtacccaggtgccaggggtcgggggccgggggctctgggcatttggggggcagttgggaccagtacccaggtgccaggggttgggggccgggggctctggcattcgggggcagtgaggtcaaacccacaaacaggcacggggccaggaaacggggctccaacagcagtccctcctgaggctggctcgtgacaggtcctgtgccccacagagaagaccgactgccccatccacgtgtacttcgtgctggacacctcggagagcgtcaccatgcagtcccccacggacatcctgctcttccacatgaagcagttcgtgccgcagttcatcagccagctgcagaacgagttctacctggaccaggtggcgctgagctggcgctacggcggcctgcacttctctgaccaggtggaggtgttcagcccaccgggcagcgaccgggcctccttcatcaagaacctgcagggcatcagctccttccgccgcggcaccttcaccgactgcgcgctggccaacatgacggagcagatccggcaggaccgcagcaagggcaccgtccacttcgccgtggtcatcaccgacggccacgtcaccggcagcccctgcgggggcatcaagctgcaggccgagcgggcccgcgaggagggcatccggctcttcgccgtggcccccaaccagaacctgaaggagcagggcctgcgggacatcgccagcacgccgcacgagctctaccgcaacgactacgccaccatgctgcccgactccaccgagatcgaccaggacaccatcaaccgcatcatcaaggtcatggtgagccgcgggcgggagcaccgtccacgcgccaggggtggccacggtgggccgtccacccactccgggcctcactttacccctctgtgagtgcggaggccgaaggaggaagctccgggcagggcctgggccactcaggtgtccctccatccccacccagactcgaggtgcagccgccccaggtctcgaggcacacggctaaccagcatgtctgtcttttctgcagaaacacgaagcctacggagaggtgagtggcgcttcccttcctgccagtgctggccggcagctgacccagcagagatgaccgcgccaggctgccgactcctggcgcctccaggctggaacagatgagaggagagggagtcacctgctccatgttggacctgaggccttggagtctggagaaagggctcccagccaaagctaggctgtttagatcccgtgagggtcagcgttagggtcacccacagagcacgtgttacaaggagaggtcgagggtctggcctccgggcaggtgggatccatccaccctggactcgaggcccgagcccagcccagcaggtcaggggagaaggaactgacatcatcggggtccatgacatccccacctccctgtgtgtcccagctccagctctcaggaaggggagcaggcatctgagatctcccccgtgaggcttcctgcaaaaacgtgccctgcctcagaatcgctgctcagtaacagtggtttcattgccgtgtacaaatggtgcctccctcaccagtgccccttgctcttccatccttttgtaaaatttattcttttatatttgtttttttagagacagggtctttctctgtcacctaggctggagtgcagtggtacgatcacggctcactgcagccttgaactctgaggctcaagccatcctcccacctcagcctcccaagtagctgggactacaggcacctgccaccatacctggtgtgcgcatgtagttccagctacttgggaggctgaggtgggaggatcgctttcgtattgtttttttgtagagatgggatctcactatgttgcccagcctggtctctaactcctggcctcaagcagtcctccctgcctcggcctaccaaaatgttgggattccaggcgtgagctgcacccggcctttcttcccttctattttctgtcatggcttaagccaggcttggttttttaaacttgcctagaacacctgaccgagagccaaactctttggcttgtccctgatgggggcagagcctcacagcaccccatgtctcacagctccctcacgcccgcccaggttctcagggcatttcagcatctccttggcccctgctgagagtcgtgggctacacgttctgagaccctgccctgccacctgaggaatgtcccacccatgcaaccttctgtctctgcttcctcgtttcagtgctacaaggtgagctgcctggaaatccctgggccctctggccccaagggctaccgtggacagaaggtaagatgcccagattacctgcagggtctgcgctaccaggaagcccctgatttgttttgaaatccacacttggccgggcgtggtggctcatacctgtaatcccagcactttgggaggccgaggcgggcggatcacaacgtcaggagatcgagaccatcctggctaacatggtgaaaccctgtctctactaaaaatacaaaaattagccgggcgtagtggcatgcgcctgtagtcccagctactcgggaggctgaggcaggagaatcgcttgaacctgggaagcggaggttgcagtgagcagagatcacgccactgcactccagcctgggcaacagagtaagactctgtctcaaaaaaaaaaaaaaaagaaaagaaagccacatttaaggccagctgtatctcaaattgtctcaacacttctgtccctggagaaactaaaactctatatgtctaattccttttaaatagtatattgagaaaagcagaagcttgtaaaaaatgagatatgccattaaaatactttggtaagcaagcatattcaagtaagtaaaatgtgagatgcactacacttaataatatgattgctcattaatatgaaggaacctcttttgtggcttactaaataagcagttttagggagcctggtttgaatgtcccctgcattttctggtttgaacatcccctgcattttcctaacagaggtgcatcaaataaagtccttccaaaactcactaacagagtatgtgaaactccaacaattcacatctgttaaaaattataaagaaaagcataggaggagaaagtagcttctaaggagatgaaataaggaattgaccatcatagaggatgttactgctacgtagcttcgtgtttttctaaatttggataacagctgtctagaccagtaggtatctggatgtactttctccaggatgagacatctcgaggctgcaggtcaaatcctgccatctccctccctggcttctccagtcctggtggcaatgccgaccctactacagctgggaatgaatttgccacttggggcagccttggctgcacacagcagtgcagtgacccgttctgttgggggggccactggaagctgccacagggatcactgtggttagagtttgaggggtggcaaggtgccaagcggagcccaggacagggcacagctgtgatgttccagaagcctctgcccacctcatcccctgccctgagtttcctcccttttcttccttttgacctcttaattcttcccctttcctctgctcctctttgcacttaaattgggagcatatcaataaatagatgaatttatttaataaagttctgtatcataggttaaaattttaattccaagagagtgtaacctttatgtggtgttctgaagtcctgatctgtctaaagttacttagataaaggaattaatctttgtagtgacggtgacccaggcatcgctggagaatcagagcccagtgttggccacagtcacagctactgggtgcagaagggacccccacgggccaggcacccccaccccaggggtctcttctggctccattttgcaggtggctttgtgggaagcttccctcagagctgggagaaatgggtcaaagcaaacccttgtctgacagaggctggccctttggggagcagctgacaccaagacttctccacttgggcaggggaatcagtaacctctgctgtgtcacctctcagaggagctgtggcagggtccccagctgcctaccgcccaccctaccctgcctcgatgtactcttttctctgcttttagggtgccaagggcaacatgggtgagccgggagagcctggccagaagggaagacaggtgagtgtccttgccccacgcccgccccgcctgcagcccagcgccccagggctgggctcacactgctgcgttgtccttcacagggagacccgggcatcgaaggccccattggattcccaggacccaaggtgagtgacctcggccaggggcttggctccaccctgaggccccagcactgccaggcaggctccccccagcccagcctcggcctcagcctctacgaccctccccccagttaccaaggaacagaagcacctcgataacttgatggccgtcccaaaacccagcctccagcccgacccagggctcagcctcctccgcagactgtttgtcgagaacactagatgccagcggcccaccgagcactcccctcagcctgcagggctggcccttccctgcctgtgtctctgcagagctcctcactaatgcccctctctcctcctgcccccagggcgttcctggcttcaaaggagagaaggtgaggctcttgccctgacagacctcagacctgcgccagcctcggcccagacccacctcttggcgtccgccgcagcctgtcactgctcctggggcaccggcctggtcttttctcagtggtggctttgggggctcctggggggtcctgtggccttgagtttggcccaagggctttgccccccagaggcagcagtgcccatgatgctttgaggcaccgagctcactgcgccggctttcctcctacacagggtgaatttggagccgacggtcgcaaggtaggctggctgggtaggcagagcccctccttcctgctgctcagggcagaaggaccggggctaatggagttccctcttccttctctcttcagggggcccctggcctggctggcaagaacgggaccgatggacagaaggtagagggagcctcgggctcacagctggactggtctcacagaggcatcccagcctctgcagggcccccagatccagcctgatctgtcagcttacacatgtgtacacacgcatacacacacacacacacacacacacacacacgaacttcagctcctgccacatcccactgccccacccagggcttcaccagcctgcatctaattcatggctgcacatcccggcttggggcagctccacagctgcacacagaggccagcaacaagcctacccactcccaggtcaaaccacaggacagccccacccactccttccatggctccccgtgggaacatcctctgtgcccagggagctctgccctcagggcctctgggaggcagccagggatggcctgttcctgcacaacggccactctgcctccccggagacagctccacagcagccgtggcctcatgtgggcacccgtgtgccaggaggagagcgctgcagccctgcggggcagaaccgggtgggctgtgtcttggtcgttggcacacatggaccccagaaccccgccctgagactcctcctgcccccttctccttcagggcaagctggggcgcatcggacctcctggctgcaagggagaccctggaaaccgggtaagggccgtttgcacccctccttcagcctcggcccagggggtgtgggtgcctgaccgggtgggagggtagttgctgctgcagtgggagcgtgggttctcccggcagcccagcagccccagcccagcagccccagcccagcattctgccgggtcggagtcatgtgaggaactccccctgggagctcctggcggatccccgtggcctggagacctgatgcatcccaaacttcggtgtcactggacagctccatttccctgagcagcagatccaggcctggcctcttggtcactgagcctgggcctcacagtgagggtgggaggtgcgtcccgggctgggacaatggagcacttgggccctggctcatggggagaaccccacccgccgtgtgccgagctccacctctcactcctctctcagggccccgacggttacccgggggaagcagggagtccaggggagcgaggagaccaaggcggcaaggtaagtggccttgtcagggtacggggcaggcggggtcaccagcttccaggggcctcctggaggcagccccagctgagaagctgagcagagagggcctttctggaaacactggtcagtgaggagccaatggccgtgggatgtggtggagggtgccctgcccgttgcttcatcagcttctaaccagggcttgggcggccccgccgctgctcaccgaggcctcggcaacaaacccacctcctcccaggtggagccccagggagccccacccacacctcctggagctccccatgggaacgttggtgccccaggggctctgccctcctgggccgcctgcagtgtcgccccgcccctggcggccccaggatccccaagggcttttttctgggagcttggacttagggcttcccactttctgtccaccttccctcagcccaagcccaagtctggctgagtcctctgagcagatgcacaggcgtcctgcccgtgacacacactctgccctcagctggcacggaggttccagcagcccccagccagcatctggcatcccaggtgccccgtggacatcagggaggtgcagtcccaagcccgaccgtgggtcctgcccccgcagcgggcatcctgcaccccccttcccctgccaaaagacgtgaggctgattctgcaaacccttccagggggaccctggccgcccaggacgcagagggcccccgggagaaatcggggccaagggaagcaaggtgagcccctctgcctcttcgcctgcagctgagctggccacactcacgcccatggcccagatgaacagtcacgctggccaccatctctgctgtcaccatggtgccgcattgggctctggggacacggggagggacaggaagaacaggccatgtgccctgagccaccagcccctctgacctgtgccctcctcacgaggctgaacaagttccaggggaccctgcagggcccccatgtgcctggcaagcagattccgctggaagataataggggctccacaccacacaccgcacaggcgtgaccatgcctcagggcccctgcctctgggtgactgtgctgtcctctccttcttcaggggtatcaaggcaacagtggagccccaggaagtcctggtgtgaaaggagccaagggcgggcctgggccccgcggacccaaaggcgagccggtgagtccctcctgcccctgcctcagggccccgctctgggcatcctccttgcagcttgaggaggaccatgggggaagggcacctgggctgtaggcaggatcccctgctggcaaggcacagccaggcccccatcctcccaagaagtggacccggaccaccccacgggaccccccagagctggacttagaggtaaagcccaggcaggtcctccatggtgttccctaaacccagcaccagctgcccagggcatcctgtgagggctgagcagggcccgtcccagtgctgaccactccaaggggactctgtctgagcatggggcctgcctgggagtgaccgcagtgactggacagcaccaggtccccaccaggccccagcccatcacctaaaacgccactcaccagacatccaactccacctggagcctccccagatcattcctaaatcctcggcatgggcgggaccgacgcagcagagggacgagggctggcagcagagccactggcgcaggctgaggctgttgggaaggagcctggggatcgaggtcccaggtcccaaagccagagccctcctgtagagaaggagcatcggccccggcacagcccccaccctccacaggctctgggcttggactcagccccctccctcacccacacgcctgttctctgcaggggcgcaggggagaccccggcaccaagggcagcccaggcagcgatggccccaagggggagaaggtgagtcctcgtgtggaggcagcccagggtctcactgtggtgcccatgggccctgctgacgagggccccaaccccattcctcccagagaacaacagaaccccagggcctcactctccagagttcactctctgcagagtctgggaatgcagccctgagatccccacaccccattctctgctgaggaagctccactacccacccaggcacaccccgcacagctgtgcaggcaccattcacccccggcccactgaggcaccactcacaccccccggcccccactgaggcacctcttacccccagcccactgaggcattgctcacccacgtgacctcaggggtgatgctgaagggctgtgtggtaaaaccccggccaccagctccccttgacatcaggtgaaggggcttcctcccaggaagtggacgaggtcctacccacgtgtgggtggcctcagggggaccgagagacaccgtgctcagagcggcagctacaggcaccgggaaggagctatgggtgaaacaggcgactgttgcaggtcccccgggacagacggggttcttcctcccaggcccccttccccaacccccggccacacccgcctctcacatgggacccaggccggaggcctcagctgagacccgtggggcctcccttcccttcccacagggggaccctggccctgaggggccccgcggcctggctggagaggttggcaacaaaggagccaaggtaggggagcagggtgggccgcaccccaaggtaggggatctgagggggtgcaggggggctgcaccccaaggtagggtggccgggactgcaccccaaggtaggggacccgggtgggtgctgcaccccaaggtaaggggggcccaggtgagggctatacctcaaggtaggggacccaggcgggtgctgcaccccaaggtaagggaccaaggcaagggctgcaccccaaagtaggggacccaggtgagggctgcaacccaagataggggtgcttaggcaggggctacacccagaacccagcctactccactcagtgtgctcagggctgaaggtcaagtggagccacagcctccggggagggtcataggggccggggccagacccgtcttacccccgaggccctgcagtgtccacaggattgatactggggactccagggtgctgctgtcagtcaagagaaccccaaattcctcccctttcttccagggagaccgaggcttgcctggacccagaggcccccagggagctcttggggagcccggaaagcaggtcagtgtcagtgcaggaggccggtgccctctgaccccacgggtgggtctcccctatccatgtggggacagcctggagctagccactgtccccatagcaaacccaggcagcagagcctggcctcagaagccaggacctgctcccctagaccccgagtacctcatacccaccctcagccccagccccccatcctgccctgaaggacccaggttgtggagtcaggggcaaggcagtgggcctgaggtcctggatgggccacagggaaaggaggagctgggaccctcaagacagaggtccacggcccccacaggcagcaggaggagctgcggccatgtggcctggtggtcagggctggacggggcatgtcaggtgacccctgggcatggccagtccctgcctgtgctgacttctgaatttctctcctgccctcagggatctcggggagaccccggtgatgcaggaccccgtggagactcaggacagccaggccccaaggtacgtgcccctcccccagcaggacgtattaggggttcggggcagctgcctgaggagcaggacagggggccggcctgggggaccctgttgccggcagacgtgcctcaggacgggcctgtgcctcctgttctcagctctggagtgaggggatgcctccggggtccaggaagcccccctggctctcctcttcagcagtgacccttgggtgtgcatggcacatccttcctgaggcagggcctgagggcagctacgtggcctgagtagggtcctccccgcgtgtgggcaggcttcgggtctctaggcacgtccagcccccactggaggtggacagggcgaggttggccctgccaggcctctgctcacagccagaactcgacggcacccctagcccacttccaccccagtgtgcaccttgcgccctgttgagcacagccccccagccccaccccgtcctatgaccatgctgaccgactcaacgtcctcctccagggagaccccggcaggcctggattcagctacccaggaccccgaggagcacccgtgagtcacagcctgggatggcagctcccaggagtgggtggacattgtcccaagggccctgaagattcctagtagttccctcaaggcctcctctgtgcagaagaaagtgtgaggtccctcctgcgggacagagtggtgagaaggcttcgggtgactcagtgaaggataggtccagcccagcatcaggaaaagagcacagctcagaacgcagcacagtggcctcacccagagtgtgaatgagcgagggagggaaacggggctgcagaaagctgcccagagggaggaaggagcactgggatctgaggctgagtcaccctggcttctgtttgcttcacagggagaaaaaggcgagcccggcccacgcggccccgaggtatgtgtgggtcctggccacctgtgcccacccagggtgggggtctgcacgcccaattgctgggaacacaatgcccaccgtcactgacaggaccacccctgtcttgagatggtcctggctccccaaggcccagccatgtcacctatgctgagctctgggggagctgtcagccactggctggtcccttttcaaccaaagttcaggctttgcaaaaaaaccacatagatgctcccgtttaaaggaccccaaaatgccagatcgatttttccacataaaaatctcactggtgtccctggtagagacagctcctctgtcccaggctaacatgtgttccctgtcacagggaggccgaggcgactttggcttgaaaggagaacctgggaggaaaggagagaaaggagagcctgtgagtgtcaccgtcccgaagcccacagcagctgggcagaggcagggaggggccctgaggctgagcgtgtgcatctatgagtacaggagaacgccaggcagcttggccccagccatgagcaccacccccaccttcctaaagggaacggctggctcaggggccccctccctcaacccagcctcccttccagcgtcccctccccagtgaccccccaacatcccccccacagcatcccccacaagggtcccctccctagtgacccctccacaacatccccccagagtcccctcccagcatccccactacagcatcccccaccagggtcccctccccagcgaccccaacatagcatcccctccagagtcccctcccccaaaagatgcctccacatagcatccccctcagagttcctacacacagcattccccaagggttccctccccaatgtcctccccacagttatcccccagaaggtgctctgtgcctccaaatccctagcctggccaagggtttaaccagggctgcaggttggtctggaactgagcacaaaacaagggatggataacgatggatggatgggcaagtggatgggggtgggcaaatggatggatgggaggatgggtgatggatggatgagtgaatagaagagtgggtggatagaagatggatgaatggatggattgctggatgagtgggtgggtggatggataagtggatacatgggtgaatgagtagatgtatgggtgagtaggtgggtaggtgggtagatggatgggtgggtgggcgagtgtgtggttagatgatggatggctgaatggatgagtggggggatggatgggtgagtgggtgtatgtatggatgggttagtgggtgggtggatgaatggatgggtgcataaaggatggatggatgaatgagttagtgggttggcagatggatggatgggtgagtcagtggatagatggatgggtgggtggatagaggatggatggttgggtaggtgatgggtggatgagtggatagatgggtatgtgagtgagtggggggatgggtaggtgggtggatggatggttaggtgaatgagtggatggacagacggacagtgggtggatggatgagtgaacggatggaccgatggatgaatgggtgggtgggtagaggatggacggacaggtgagtgggtgggtggatggatagatgggtaagtgagtggatagatagatgggtgggtggacagaggatgggtggatgaatggatgggttagtgggtggctgggtggatggatgatggatgggtgactgggtggatggatggatgggttagtgggtggctgggtggatagatggatgggtgattgggcgaatgggcgaatgggtggatgggtgggcgtggagttggtgggtacatgataatggggtggaatacccatggattggaatgagctgttttggctgctatttctgggacacccagctctgccaggcccctacccctctggtgggccaggctctgacggtggccactcatggcctttctagctctggtgccagcatagggaaggaggaggcacagccttgtcttactccttgcacctgttagcccccccccccgccaagggaggacccgtggttggggacagcacagggggccctgctgtgtgcagggactgtccctggggccactgaagcccacctgttcttgttccttctcaggcggatcctggtccccctggtgagccaggccctcgggggccaagaggagtcccaggacccgaggtaggttggtggccagtccccatgccctccccccaacctgccaggccaacacacacccaagcctcgtggttctgcccacggtggacccacgtatcagtgggcagtggcctgggagagactcagccacccagccttggccccagagtctcagcctcatccttccttccccagggtgagcccggcccccctggagaccccggtctcacggtaggtgtcacatggggcagaaccagtgtccttctcctgccaaaactagacaccaagagcagcaggggtgggggaaggtcagctggcacggtcagagagcaagatcagtggaggaggtcagagggcaaggtcagagagcaagcttggttggggaaggtcacagggcaaggttggtggggggaggagggtggcagcgaggttggtagggacaggacccgccagcctccccgcatggctgcctccacacgtgggctggaatgtcccgggacccccaggccaggaccttgctgtggaaactcttctggggccccggggggactaccctgcctgccgtgtgcattgcaggagtgtgacgtcatgacctacgtgagggagacctgcgggtgctgcggtgaggcactgcccacggcagggtcggggcccatgcaccgggtggagggcgggagtgcagcagggctgggtcatcgctgggtcctgcatgtgcacgtgaccctagggtctgaggtctccccggtaccccccgatgaccctgccacccccccagactgtgagaagcgctgtggcgccctggacgtggtcttcgtcatcgacagctccgagagcattgggtacaccaacttcacactggagaagaacttcgtcatcaacgtggtcaacaggctgggtgccatcgctaaggaccccaagtccgagacaggtcagcggggcaggggcgggtgcagcattgcggggggccgggcggggcgtgggaggcgatgagatgggagaagtccagacgcgtccctccaacgagggcctctgcatggctggggatgccccagaccccgaggcctctggcaacgacctcacgcgtgcggcttgcagggacgcgtgtgggcgtggtgcagtacagccacgagggcacctttgaggccatccagctggacgacgaacgtatcgactccctgtcgagcttcaaggaggctgtcaagaacctcgagtggattgcgggcggcacctggacaccctcagccctcaagtttgcctacgaccgcctcatcaaggagagccggcgccagaagacacgtgtgtttgcggtggtcatcacggacgggcgccacgaccctcgggacgatgacctcaacttgcgggcgctgtgcgaccgcgacgtcacagtgacggccatcggcatcggggacatgttccacgagaagcacgagagtgaaaacctctactccatcgcctgcgacaagccacagcaggtgcgcaacatgacgctgttctccgacctggtcgctgagaagttcatcgatgacatggaggacgtcctctgcccgggtgagcgtgtgggcgcggggcagtcggccgaggagcagcaggccccagccgctgtctagcgtgagccccagggacacccctcacctgagggatgaatgtgcagcccaggatcttgggctgtgggtgggaaggggtcgggccctctcggggctgcagggcagaggccagctgcaccctgagcctgtctaggcagatcagtgaacggccgctgagggttcgctagggactgaccctggcctggcccggcctctctcctctcttccagaccctcagatcgtgtgcccagaccttccctgccaaacaggtaatgcagggcaccctgagccaccaccccagactagcaaagcagccctggtgtccttcctcctcgagggccgggctgggggaggggccgtgcagggacccggggggcggcggagccactgcggaggctgctccttagggagatggccccaggatggcagcacaggggaggaggggcttggggaaggcaggctcccaggaacgcaggaacagcatcacgaggccatgaggtgggtgctgctagcctggcgctgtgctcggcatgtggccactggtcttgaaggcccaccatgggccttgcagtctccctcagctgccgcccagctcccatgggctggccgtgcatgtgccactcggaggaagccctggattcagtgagtgaaaccatcccggggtggaagcactgacaccccccagcaccagcaggtcttgctccaaccctggcctgcctcggagctgcagctgcggctctcacatctctgggagtgggggagcccatgtcccggatgtggcccacgtgggtgtgaagctggagctgggggtgccgtccaggctctgctggacgtggtgctgcccccatggtgcactgctgcaccgtacctgggcccacaggaggtccccgggggcgttaggagctgagtccccctcagtgagccgtcccctccaggagtgtgagggtagggatgccatggagacagggtgggagggtccgacctggaggaccacagggaggaaacctcagggtctgcggtacgaagtcagcgcttcctcagcacgcgggtcgcggtgtgcgttcgggcgttccatggggagctcccggtgggtgagctgggccactgagcacattcacaggccctgaggctgccccaggggaggagccgtggactcagagccgaggttccccatacgtgctgcgacagagaacctagggcttgcacctgggtctggctgcccttcagcaggcgggcagcctctggccccacaacagtgggctgtgcttctgccgccaaggtgcaggcgtcctcccccagggtccacatcagcagcaggggcacctggaccctgagggcaggaaccagaccttggctcctccacccaccccctcgttcctgatggggcagggaagtctcgggaccccatgatgggcgacatggcgatggtcactgtgggtgctttgctatcaggtggggggccttcctctccactctgggtccagtgtgagtggccgctatggcttcccctccactccaggttctatcgtgagtgggtgggtgctgcgtctgtggatgtcacgtgacctttcctctttagcctatcattgtagttgggagttagttagcccgttgagcgtcattgaatttccagtgttgagccagccctgcgtgcccgggataaacccacctggccgtggtgtgtggccctgtttatgcacgtgggccctgattcgctgatgcctgcctgagggtttgcgcttatcggcgacatcagcctgcacttttcttttctcgtgatctctctggttctggcctcagggtgacgtgggcctcgtagggtcctgtggtggctcctccccagacggtgacatggagtgagcccattctccctcctgggagtgggtcactcaggccaccagagcaccacagggaaagcagccagggaggacacggaggcccttgaagctctggcctcttctgaggcctccaggacctgacagtgagtgggagcagccctggcagaacccctcccctcctctcggccgccctgacacctcatccccgacactcagagctcatcctccttcccagctgtttccaatttcaaagtgaactcgaccttgtggctccaggagatgcagcagggacagtgttaaatcggctttcaccagcccacacggccaggcatcctcctcggccctcctgggcactgggtggacaccactggctgtggcctggccctggccttctccagacagccctgtccaccccaaagcccagccaccctgggcctgcagcaggcctgtggagttctcagttgcgtggggaccagagggtgctggagaaacaaaccagacgcagctgaaggcagtcagggcagggcgcaatcagcgataagagctgcataggggccacagcgtaacctgagctccagtcggtggaaagaaaaggcagagacgttgcagaggccaggtctgctcaggggaagacagttctgggtgtagaggactcacatcccagagaggctgaggaagggtttaccaccgcaagctttctcaggcgggctcttgaggggtggctggggtcttcctggcgacgggcctgcggcactggaagccctactggagtttggcctgtctccggcacaggtttggacggagctgttttgtgctgaaaggttttctcggggtccgtggtgtcccccaaaggtgccaccgtgcgggtctcctagctccctgccagcttcctgtccctgtgctcactgcccccacgcctcctgccaaggccgagccacacacccgctccacctgcatttcctctaccgactcgccagcccaaatgccgctcttcactctggcctcgctgagcggctgcccgaggaggagctctaggccgacgcccaccgcaggccttacagtcttctctggacgctcccttgcagatgcaccgtggcctggcggcgagcccccggtcaccttcctccgcacggaagaggggccggacgccaccttccccaggaccattcccctgatccaacagttgctaaacgccacggagctcacgcaggacccggccgcctactcccagctggtggccgtgctggtctacaccgccgagcgggccaagttcgccaccggggtagagcggcaggactggatggagctgttcattgacacctttaagctggtgcacagggacatcgtgggggaccccgagaccgcgctggccctctgctaaagcccgggcacccgcccagccgggctgggccctccctgccacactagcttcccagggctgcccccgacaggctggctctcagtggaggccagagatctggaatcggggtcagcggggctacagtccttccaggggctctggggcagctcccagcctcttcccatgctggtggccaccgtgtcccttgctgcggctgcatcttccagtctctcctccgtcttcctgtggccgctctctttataagaaccctggtcattgaatttaaggcccaccccaagtccagaatgacctcgcaagacccttaactcactcccgtctgcagagtccttctttgctgcatcaggtcaccctcacaggctccagggtttgggtgtggaagtctttggaggcccttacttagcggcccagctgggctgccgtgcgtctgggatggggctgagggagggtgctgcccaggtgctggaggatgttccagcaccaggttccagcggagcctcggaaacaggccccagaggctggtgagcctcgctgggtgtgggcactaatcccgtgcatggtgactcgtgggcgctcacggcccacctggtggcaggtgaaggcttccggttgggcagcagatagtcctgggggaagctggcagtcctggcaccatgacgtatctgggctggtgtcatgcacagtagggcgaatggccacagctgcctgccagcagccctgatcccggggtgtctgcacccttccagcccaacctctgggtctccaaaagcacagtcgggggagcatccaccaggcacaacctctgcggtcctcagaggactgagcagagaatcccagggtccacaatgttggggagcggcagggatcaccatccaaagggagcggcccccacggcgagctgaccccgacgttctgactgcaggagccctcatccaggctgggctcctgccgggcacggctgtgaccatttctcagggccaggttctcgtccccacacccactgcacagggcaggccaggctggtcttcccactgtggggatgaaggatcctccacaggaggaggagagcagagtccacagacatcccaacagcctcagcctccctgtgcctggccggcccccacagcttccccgtctcctccaggccccacagacactgatgaatggacagagacccccaaaaccagctgccccttgcatgtctgtctccatatgtttggtgacagcagtgaaaatgttattagttttgagggggtttgggaagcccagcggtacctgaggagtttctggacatttaagccggttcctaggtgtggccttaacagggaggctgcccttcctttcactgaatgagctgcgtcactcataagctcactgagggaaccccatctgccagctcgtgcgtgctcagacggcgtccatgtctcaagcgttctgtgaaggctgcggtgcagcgtgaggtcaccctgctgtgttcagagctttgctcactgcctgcggggctggaccgttgcacctccagggcccccagaaaccgagtttcgggtcagggtcctctgtgtgcattcctgggggtccatgtaccagctgtgacgacgtccaggggttgggctgagaagcagacacccttggggaaactggctctgtccctcccctcccccatcccaggagctgaggtcttggtgaggccacagggccaggtccacgcaaggactgtccgtgtcctgtcctgtggtctctggccccacgtgacacccacacgtgtggtaggcagcctggcctgggttgtggctatggccaggcccccaagctgtccccgatgcccagggctggtgaccacccaggcaggtgggggccccacttggtaacagagtcatagggcagaacccacctgggctgccacagaaggtctggctgcccctgtgcccactgctccccaccatggccaatcagaagagtcaggggctcctggtctttccgggagggacgtggcccagccagctctaggtgttctgagcagctctgggacccagcgattgaggggtcaggctgggggtgtcagagccagggtcctccttaagtacctcccacactacacagacagtggcccttttgtgggcagcaaattcttgagccatgaaaggatgctttgggccccttccctcccaggagggcagcctgtgcagggatggtgctcagcaggtggacagggcctggggcctgtgtcagggtctcaggcctgggagcaccagcagaggagatggcggctcccagcagtgccgcctgaaagtgtcttgggctaaggacccacacccagggctgccctgcagaaacgcccccgcagagcccagtggtctgtgaggttgcaggcagggtgcgaatggaagggcacaggtgcggggctggcacctgcccggtcctgcccacctcccctccgcccagcccgcacctgcgtctccccacagagctgtccgtggcacagtgcacgcagcggcccgtggacatcgtcttcctgctggacggctccgagcggctgggtgagcagaacttccacaaggcccggcgcttcgtggagcaggtggcgcggcggctgacgctggcccggagggacgacgaccctctcaacgcacgcgtggcgctgctgcagtttggtggccccggcgagcagcaggtggccttcccgctgagccacaacctcacggccatccacgaggcgctggagaccacacaatacctgaactccttctcgcacgtgggcgcaggcgtggtgcacgccatcaatgccatcgtgcgcagcccgcgtggcggggcccggaggcacgcagagctgtccttcgtgttcctcacggacggcgtcacgggcaacgacagtctgcacgagtcggcgcactccatgcgcaagcagaacgtggtacccaccgtgctggccttgggcagcgacgtggacatggacgtgctcaccacgctcagcctgggtgaccgcgccgccgtgttccacgagaaggactatgacagcctggcgcaacccggcttcttcgaccgcttcatccgctggatctgctagcgccgccgcccgggccccgcagtcgagggtcgtgagcccaccccgtccatggtgctaagcgggcccgggtcccacacggccagcaccgctgctcactcggacgacgccctgggcctgcacctctccagctcctcccacggggtccccgtagccccggcccccgcccagccccaggtctccccaggccctccgcaggctgcccggcctccctccccctgcagccatcccaaggctcctgacctacctggcccctgagctctggagcaagccctgacccaataaaggctttgaacccattgcgtgcctgcttgcgagcttctgtgcgcaggagagacctcaaaggtgtcttgtggccaggagggaaacactgcagctgtcgctcgcccaccagggtcaatggctcccccgggcccagccctgacctcctaggacatcaactgcaggtgctggctgaccccgcctgtgcagaccccacagccttgatcagcaaactctccctccagccccagccaggcccaaagtgctctaagaagtgtcaccatggctgagggtcttctgtgggtggacgcatgattaacactagacggggagacagcaggtgctgagcctgttgtgttctgtgtggagatctcagtgagtttttgctgttcagaccccagggtccttcaggctcagctcaggagccccacagtgaaccagaggctccacaggcaggtgctgacctgacaggagtgggcttggtggccatcacagggcaccacagacacagcttgaacaactaccagtatcggccacaggcctggaggcatcagccgggccatgcttcctctggagggctagaggaggactagagaagggcctgccccggcctctccccagcatcccagggttcctgatctcctggataaggatacaagtcaccacactggactggggctcagcctgctctagaatacctcacctaagtcacagtggaccaggctcagcctgctctaaggtgagcttacccgagacactggaccagagatcagcctatcctgggataagctcacccgagtcacactggaccagggctcagcctattccgggatgagctcacccgagtcacactggaccagggctcagcctattctaggatgagctcacccgagtcacactggaccagggctcagcctattccgggatgagctcacccgagtcacactggaccagggctcagcctattccgggatgagctcacccgagtcacactggaccagggctcagcctattccgggatgagctcacccgagtcacactgggccagggctcagcctattctaggatgagctcacccaaatcacactggaccaaggctcagcctgctctagaatacctcacctaagtcacactggaccagggctcagcctgctctaaggtgagctcacccgagacactgggccagagatcagcctactctgggatgagctcatccgagtcacactgggccagggctcagcctattccaggatgagctcacccgagtcacactggaccagggctcagcctattctaggatgagctcaccagagtcacagtggaccaaggctcagcctgctctaggatgacctcactggagtcacactggaccaggactcagcctattccaagataacctcacccaagtcacactggaccaagctcaccctgctccaggatgatctcacctgagctcactgcatctgcaaggaccccatttccaaacaaggtcacatccagaggtctggggcttagggttaggggttggggttggggttgggggtcaggggtcaggggtcaggggtcaggagtcagggtcagatttagggtcaggtttagggtcagggtcaggtttagggtcagggtcaggtttagggtcagggtcagggtcagggtgagggtgagggtcaggtttagggtcagggtgagggtgagggtgagggtgagggtgagggtcaggtttagggtgagggtgagggtgagggtgagggtcaggtttagggtgagggtcaggtttagggtcagggtcagggtcagggtcaggtttagggtcagggtgagggtgagggtgagggtgagggtgagggtcaggtttagggtcagggtcagggtgagggtcaggtttagggtgagggtcagggtcagggtcagggtcagggtcaggagtcaacatgtgaaactggggaaatgcagttcactctggataccctgaaactttgttgtcctttgaaaagactcactcttttcttcatactccaccgctctgtcatctgaccacacagcctgcagctccaggggagtacgtcagttattttctcttcctttcctccttttcccatcccacaaaaaaactacgcaaatgccagcaggagatgcagaagaggcccgcctgttttgctaagcccctgcgccctgagtgtcagccctcagatctctgtgctccaggtgaacaccgcgggtcccgcaggtggagggaggcagaggcccctgcaggtgcacaggctccacccacaggagctacacaggagctgcccagggcctctgcagggagagggcgctcccctctctcgtgccagctcccacgtgtgcagcctcggaccctgcagggcaggaacgtcagtcccactggaagggacttccagctacctacaggctctacccacagctccacccagcaactgccgctcaccattggcccttcaccaattacaccacaccagcatcccctcaccagcatccctcacaaatgtcccctcatggtcccaacaccaatgtcccctcaaatgtcccctcatggtcccaacaccaatgtcccctcacaaatgtctcctccctcacggtcctaacatcaatgtcccctcacaaatgtcccctcatggtcctaacaccaatgtcccctcatggtcccaacaccagtgtcccctcacaaatgtccccttcattgtcccaacaccaatgtccccacacaaatgttccctcacggtcctaacaccaatgtcccctcacaatgtcccctcatggtcccaacaccaatgccccctcaccgtcccaacaccaatgtcccctcacaaatgtcccctcaccatccccaacaccaatgtcccctcaccaatgtcccctcccagccttccctcctgagtcccctccccagtctcccctcccagactcccctcccagcctcccctccccagcattccctcccagcctcccctccccagcgttccctcccagcctcccctcccagcctcccctccccagcgttccctcccagcctcccctccccagcctcccctccccagcgttccctcccagcctcccctcccagcattccctcccagcattccctcccagtctcccctccccggcaccccctccctgtcaccccctgccggccggatatgtaggaacctttcatgctgagtgatgatggccctgtacccacacacaccttgggtgttttttctccctgtaggattcttgtcatttgtcttggatgatgacatcttttttcatgaacaagtatgttctattttcagaatgggaaatctctccaataaggcatttgagttttctgcttcactcaaggacacagtaatcttctttttaatatcctgcagtgctgactaacaaatacattcatacatcatctgtcacatgtaatagtccatctagaagtaatttgagagtatagtgatttgctaaattattttttaatggagaacttctctggagacaggaggctggctgggcagggagctgaggcagggaggaaaagtctcccaggagccactggttgaagggtggacgggaactgaggacagggccagtaccgtgctctgtggaactgtccagacctgccgggagctgcacctgggaagcgaggctatccttccagcgtcgaaggtcctgctgtccctggggtttctgtcccatgcacagaaccagggcccctttccctcagacaaggggcctcacagcccagggacctgcactgaaccccaggtcctctgaatacctgtgaccctgcccactgtgggctgcactgggtgtctggggaccctggcgctgaggtctgtctcctcacgctgcaaccccattccctccaaccctggctcccatgggccactgaccatatgtcctgctcctgccccaagacccgcagctcagctctcagccctgcccccaaaaccgccaacacacaacacaggtttggtgccaaaactttactggaggtcacatgggactaggggccttctgtccctgccagcgcctccattcccaggcgatgccccgctgcctgcccacctaccctccgggccccacacgaacaagctgtgtccccaccgaggtcacagctctgccctctggggatgggcgagggaggggccacagagcccggagaggcctcccgcaccgtcactcctgccgggtctccaagcagtccagcaccagtgcagcctgggtcttggcttcctgcaggaggctggaaacacgatggtggatctgatggacacagggaaagaggggtctggtagttccagtcttcagcccagcttgctgggcagcaacctccgacccccactgcccacagccagtcggcaatcaccctgaggctgtgaatccaggcccccacgtggggtccgggcaccacacctgcctcctgctcacctggtccttaaatgcctcgtctgtgatgtccctcaggttgatgagcacgttgaaatatgcgccaaacacgcccatctccagggctttggccgccacctgcaaggaccccagggagcccctacatggatcaaggctgagcaaactgccggaaggagggtctctgcctgacgggctctgggacaggccggacttcgtcctcctcctcacaaggagcccagcgcagcccccgctttcgccccacagagggctaagccccaccactgagcttagaaaacaaaactttctcttatccaagcagggctcagccccacaggaggcctgggagcagtcacactggaggctctccgccactctaggaaccaggaccacagttctagagacaaagtcatcccctggagggcccccggaggcagcttcaggctaacggcccgcccactgcccagggacacttcccagggactgaggggacacttctctgggaccagatgctgaaaagaggcgtctttcctataaagaacccgaagaccatgaggtcttagggcagctgcagaaagtgctgagcccatgagagagacgctccttctctgggaccctctgcccagctgtggcccctgtcagtgtgaggcatctacttccaagagctgccttgtgtgctttctcgtgttttgttgtttttgacccagggtcttgctctgtcaccaaggctggagcgcagtggtgtgatcacggctcactgcagccttgacctcctgtgctcaagcaattctcctgcctcagcctcccaagtagctgggaccacaggcaccaccgtgcctggctcatatgtatctattgtacagccagggtcccactatgttgcccaggctggtctcgacctcctctattcaagtgatcctcccgcctcagcctcccaaagtgctgggaccacaggcgagaaccattgtgcctgggctgacataggtgttttctagaacaagacagtgggggtgatacaaggggtcttgggggagtatacacttatacagtggtcagggtgggctctgcagacacatttgggtctccgtctgtggtgccgccgtgagcgagatcttagaaggcagcggacaccccggccctgttggaggaggccaaagccccgggaactgcccgtgaagtgaggtctccctacctggctcagcccagccaaccaccgtgctctccagcaactcagccccaacagctgcttcctgctttgcggcaggaggcctggggtcccccgggcccccctacctggaggtctgaccggcaggccaggttcccacaccgggccagttcctgcagggccggccacagcgaggccaccgtctccgccagcgtcagcggcacagagactgcccgcctcagaccctcctgtagggccgccgtgcgcctgaaaggagcaagaggagagcctgagcacagcggcacacacaggcaggcagtggacacactgcaccccaacagggctgagcaggctgcagaagcgggcgatgggaagtcattcccaaacacccagcacgcccaggccaaccacgccccgtcacagcacccaggtactcgggatcctggccaccaactccccagacacagaggcccacggtgcggccggccctccaggctcacctgtccttttcctcaggtgtgttcttggggagcctcattgcttcctgccataaagagacagaaccactgggcgagggaccgtagggggagcagccatgccctctgagctcccacaaggggctgtagcaaggagcatgtcccaggcagggaccagttctctgggaaccaagcttctgttgggccagtggtttatagcccttagcatcaggcttggtggaggagcagggtagggggggtcggggcacacagcagatggtcagagacccggggatgtgagaagcaggtagttccctcagggcccttattctcagctaaagagcctgagggcccaggaggtcccctgagccctcagaacctgtaggcaggagtggctctgggcctgtgtctccaacacaagcagctgcaccgcccccaagcctgggcataagaggctcagactgtgcagaaggaccaagagcaaacctcaaagcccctcatgtccctgccccggtcacaggcactggcctttcctaggtgctcatgtgtgtagctcacggcgtcaccgtaaggcactcggctcctcggacccaccccgtgtggaagagcacagctgggaccacacaccaaccttccaaggacccactgggagccctactcacacggactgtggccagagccctggccaaggggttctcagtggggaatatgctcacttcatcttggaagattcagccaactctccaccagaaagtcatcatcaacagcccctaccctcgaccatggatgagagcaaatgctccctgggcgccagccagatctggatcctttgaccattccgacagcagtgatcgaggaacagaaatgcccagtgtctccctgactggctggggcatcatccagaccaggcctcctggctgcagcccctctcccaggctgtcctctgcacaagggtctgtagcagttgcaggcggaggcaggacagccatcctcaagctgcgactcgcgctacgaacactctctcacacccaggccttgcggtgtccatggtctccctgggcagatcttggccaagggtgtgctttaggtggcctcatctgcgtccggccgaggcctgcccgcccggtccgttttgttttctgtgatttatcgtgaggcttggttgtgttggtggtggggaaatacagttttctattccatctggaaattacttatgtatttggtgcaaggtacagatatctccttatgtttttcaaaagtcgacctttgcattgctcagagggagcataaaccaatccagcactccccgtccaccttcacattgctcacagggagtgtacaccaacccagcactccccgtccaccttcacgtgcctcacagggtgcgtaaaccaatgcagcactccccgtccaccttcacattgttcacagggaatgtaaatcaacccagccctccccgtccaccttcgcattgctcagagggagtgtaaaccaacccagcactcccccgtccaccttcacgtggctcacagggagtgtaaaccaatccagcactccccgtccaccttcgcgtggctcacagggagtgtaaaccaacccagcactcctcgtccaccttcacattgttcgcagggaatgtaaatcaacccagccctccccgtccaccttcgcattgctcagagggagtgtaaaccaacccagcactccccgtccaccttcacgtggctcacagggagtgtaaaccaatccagcactcccccgtccaccttcacgtggctcacagggagtgtaaacccacccagcactccccgtccaccttcacgtggctcacagggagtgtaaaccaatccagcactccccgtctgccttcacattgctcacagggagcgtaaaccaacccagcactccccgtccaccttcacgtggctcacagggagcgtaaaccaatccagcactccccgtcagccttcacattgctcacagggagcgtaaaccaatccagcactccccgtctgccttcacattgctcacagggagcgtaaaccaatccagcactccccgtccaccttcacgtggctcacagggagcgtaaaccaatccactgatttcgaccactgatgcctagcacagtctcactgtccccgctcatggttctctaaaccacacgtcttgtttccttcctgtcccttgattacattttcatctatgtacttttcctacttgttttttaattattcaccttattttaaatttctaaacataaaattgttcctatgttttatatacatatgtttacattagagacagggtgtcgttctgttgcccaggctagagtgcagtggtgcaatcacgactcactgcagcctcaaactcctggcctcaagctacccccacttaagcctcctgagtagctgggaccacaggtacctgctaccacgcctggctttattttttttttttctttttgggtgggtaaatacagggtcttggtgtgtggtctaggctggtttcaaacacctgagctcaagggatttgcccaccttggttttccaaaatgctaggattacaggtgtgagctatcatgcctggcctatttctaatatttatacttaaattcatgactgtcttcaaatgcctgtccgggtctaaagttcatcaacccattaaagtatagaaaagatcatcttgttctggggaggccatttgaactgtgatacaagacccaaaaaatataaagtcaggattgacacattccacgacataaagattaagagtcattgtcagaagccccacacgcaaagtccaaagacgaacaacaaacggggaaagctgagcccagaacaaggcctgcctcccctattaaaaaaaaaaaatactagaaggcagcgaaagccccaagagaaactaagataaaaggagtcaaaaaatattcaccagataacttcctggaaaagaagtaaaaaccactgctaaatgtacggaacatgcttaacctgcccggtaatgagaagcgcatcccagaaagcagggttctgcaagcaggtgttgggtgccctgggcccccccggggaggggggtgcttcccccagtggaaaacccaaggggccaggctgggagcgggcggggctgtgtgcgaggggaaggaaaggcggagctctgaggcagcaagagaggcgagcactgggcgggctgtggcgaaggcggggtgaacccccgaagggcctatctactgtaaaaagtaaataaataaaacctgaatttttaaaatgactggaaacggtgatcagcgtctacacctccctgcaaacagtgtgtccggaattggttccttctgatgttcagatacgtccggagtttcttccttctggcgggttcgtggtcttgcctgacttcaggagtgaagccggagaccttctcagtgagctcttacaggtggcgcgtcgggagctgtttcttcctcccggtgaggccgcagaccttcacagtgagccataagctcttacaggtggcgcgtcgggagctgtttcttcctccccgtgaggccgccgaccttcacagtgagcgttaagctcttacaggtggcgcgtcgggagctgtttcttcctccccgtgaggccgccgaccttcgcagcgagtgttacagctcttacaggtggcgcgtagcacagctgttagctcctcccggtgggttggtggtctcgctgacttgaggagtgaagctacacaccttggcagtgagtgttacaggtcgtaaaggtagcgaaggcccaaagagtaagcagcagcaagatttagttcgaagagcaaaagaacaaagcccccacagcttggaacagaacccgccacggttggcgcttgctggtttcggtggccagcttttatgcccttatttggccccgcccacatcctgctgattggtccactttacagagtgctgattggtccattttacagagtgctgattggtccgtttttaaagagtgctgattggtgcgtttacaaacctttagctagacacagagcactgactggtgcgtttttacaatactttagctagacagagaagttctccaagttcccaccccagtagctagacacagtgctgactggtgtgtttacaaacctttagctagacagaaaagttctccaagtccccaccagacccagaagcccagccagcttcacctctccacaggaccagaacgggaccctcaggcgactccctctgcaaatccgggactgtttatccgaggccctcatcttggctccctctgtgcctgtgtgtggattccacgtgcatttggggcctgcctttctcacccagccttgtaaggtagacttcccaacttagggctgggggtcttgtggccctcccagaaacacaggcgcccccaccgccctgctccagaggctggggcacatgtttctctctccctccctcccactctgtccctccctgtctctctccccacctccctctctccccactcccctccctctctccctaccccccctccccatctccctcttgtgggcggcaagccagccaggtgcccaggcaagagaccgagggcacgagctgttttagtacaataaaatatataaaataacaagagttgtactagatatagatcatagatatgattatatataattattaatcattagtttgtagcaattactctttaacattataataatctttgctctgcaatcataacctaggaaaaaccaggccatacacagataggagttgaaggggcacgctaaaaagtgaccaaaaaacgagtgtgagctctttgtcaggcctgggcagggccactagagggctccttggtctagcggtaaggccagcgtctgggaaggcgcccgttaccaagcggagcatggtctatggtagtgtcagtgccaaagaaaagcatccgctacttagcagatcggaaaaggcagtctccctttctccaggggagtttgaagaagactctggtccaccacctcttgtaaagggcccacccgcagttatcccgaggcctaatcgtctccctgtgatgctgtgctttagagctcatgctcctgtttcacttttatgttccactctgtacacctggctccgccctctagataacagtagcaaacttagtaaaagtattagtctttaatctttctaaaaagaggattaaaaaaaatgatgtgagctgtcctctctctctctgcctcagctacctaacagggaaggggcccctgtgcggtggacatgtgactcacgtgaccttatcaatcattaaagatgactcacactctttaccctgcctcttttgctttgtatccaataaataacagcgcagccaggcattcagggccactaccggtctccgtgtcttagtggtagtggtcccccgggcccagctgtcttttcttctctttgtcttgtgtctttatttctataatctctcatctctacacacggggagaaaaacccacagaccctgtagggctggcccctacacctctctcccctctctccctctctctccctccctctctctccacctacctctctcccccctccctccctcccctctttccccctctccctctctcccctctctcccccctctccccctctccctcccctttccctcctcccctctccctccctctctccccctctccctctctccccttttccccctccctctctcccccctcctccctctgtctccctccctctctccctccctctccctctctctctgtctctccccctccctctctccccctctccctctcctccccctccctccctccccatccctccctccctctctctctccgccatctgcctctctccccactctccctctcttctctctcccctccctctctctctcttttctgcccttccctcctgtcctctcctgggctggaactgcttgggagcatcctgaccttgtcactgccctttcccaggctctctggcccctgccctaggctctgagcacccagcacccatctgtgggcacatcctgccagctgatgctcatgttcctgtcccgtttggagggaggtggggtcactgcctgcctgagtgggtgttatctgaagatggtgtttctgtcttatgctgtggctgaaacgggtcgtctctggcctgcctgagagcactcatcactgtgttcctgagattcttgcaggcctcctttcctggaattgcaggcttctaaagaagggccctgccttgctccaggtctgtggggtcccccaagcctgggctcctggctcccctgctgggaggggcctgttcccttgtaccggctgccatggcctgtgaatgtggggtcaccctggccgaaccctcaaaccctgctgggcccaagcacttgccggggtgagggcggtgctggtggtcaaggtccagacagcggccagtggtgacgccctcaggcccctcctggtccccagcccctccccagccggaggctgacccgcttctcactggggccccagctgggggttcgctgttggtggggcccggggagccctgctgtggccgccactcaccaggtaggcggtgaaggcctcggcgtcggcatccaccagcgtggttagcttggccgaagcctcgcggaagggcgggatcaggcgccgcatcgtcgtgtccagggactggaattggcgccgcccgtaggtcatgaggcccaccatggagcccagcgccgcaccctgcgagaggggtggatgtgggggtcgcagggaccccagacggcccgggaccgaccccaggaagagccaggggcccgggtgatccctgcgggggtcccacccgtgtggcccccacgtctccacccagggcggccccaccgcgccctccccaccccgtgccctccccccaacagcgcccttccccctccccgccctccccccaacaactgcgcctcccctgcccctccccccgcgctcaccatggccgcagcggccgccgccaccgagccgcccccgggggccgcagagcgggcacccacctcccccacgaaggcgcgcagggacttgctgcccaggcctcgctcaggcccgcgctcagggaccaggtacctgcagggtgggcgcggctcagcgggtctggccggggttggtggggggagcgcagtcctcccggggcggccccaggccccacgcccgtctgcacccacggggaggtgaccactcggctgagaacctgcggggacccggccggggtctctgtgcccccctcagcccccagaccccggcttggcgcaggccgagtaggcgcccaaagggaggcgctgggaggactcagccgggtctccacgcagggaccccagcgccccgcaaggcccgagaggcagagcccgggaggggtgagaagagggcgggagggcagaggctcactcgatgatccgctccttagggctgaaggggcacagggagtccaggcccagccggctcaccacctggaaaaggggcttggagtggaaacggcctcggcgcgtctccaccaccaggaaagcctcggaacccgcgggtcccacccttgcggcagccgccccctgccccgagcacacaggtgcttttgcggggagcagggcaggggcgtggctggcaccccccacctctgccccgccaggagccctgtgggccccgccccagcaggcaccccgtacaggcttctggaaacagccatcaccctgagttgcccttggggaacctgaggcccagagaaaggagttgccccctggggacccctcagcaaactgctgctcatgcttcgccgccccccagcaccactgccccatcgctgacgggcgggaaagattttaattcaccaagtcttcacatctaacaagtcctcaaaagctgaggaacagccccaagtcacccacacataaacttgtatgccacaaaagtgagttttacctaaattcaaaataaagttgtgacagtcccatttaagattagaattcattctgggaaacccattcagaacacgttggctatgcgacccccaccccaccccacagagacggacagcagccgggcggggtggagagtgcctccccgtggcatagaaccagcaagccacaaggcaaagcctccttccgcagaaaaccccaggaagatgccgggcattttaaaggcctggctaagctagcagacaggacatcattcgaaaccagacacgaccagaaagacgagtccggaaaggcctgccagcctggagctgggtctgccctgggggcaactgcccctctctggcagcccctgatgagtgggggaggtctggggccttcagagtggggtccgactggagacccctggaaggtgacacccccaaggatgaattagaaacagccacccgccagaggaaacagttgaggtacttcccagtccctgccttccctttgggtgaagcaggaaaaaaaaaaaaatctcctgggaattcctaatcacaagccaccctgacagggctgcaggcctcacccgacaccgaattcactcttgtgtggttccagaactccaagccaaaaactcagcttcagggggtcctgtgaggcagtgtccacaagcgccagcacaaaccctccttggaggagaaaactttgaacccaggtgtccaagaattaccatagataaaattccacagagcatgcactggcaatcaaaaatcacacaacacaaagcaaagcagcctcaccacaaggaggcagcacgcagccacgggcacagccagacctgtgcaggccgcaggcatggggcccttcaggtaaagaagacaaaaccccagccagtcacggtggctcacgcctgtaatcccagtgctttgggaggctgaggcggacggatcacgaggtcaggagttcaagaccagcctggccaagatggtgaaaccccgtctctactaaaaaaaaaaaatacaaaaattagccaagtgcggtggcacacgcctgtaatcccagctactcgagaggctgaggcagagaactgcttcaatccgggaggtggaggttgcagtgagccgagatcacaccactgcactccggcctgggtgacaaagtgaggctccatctcaaaaaaaaaaaaaaaaaagaagaagacaaaacgccacactggaaagcagacggggcctcacacataagaagacaaggaaatgtggagaagcgacagctgctgcttagacagaaaggatgacgttggaatgctgtcactggctcctaaaactctggaatttcagtaataaacaggtatttacctactcaatactttaaacaccttcaagtactccccacaacgtattaattgcaaaaggaaaaatagtaacattgcagtgaagggtccaggaggaagggggtcgccttggcaagtgacgggtccacgtcggcaccctgagaaaatgagcatcatggggagtcggcgtctctgaggaggacacaataccatctatgcttttcctgccaaaaatgcgtaactggctgggcgtgttggtgcacacctgtcgtcccaacacttttaggaggctgacgtgagtggattgcttgagtccaggagtttgagaccagcctgggcaatagagcaaaaccccatctgtacaaaattagccaggactacatagtggtccttgcctgtaatcccagcactttgagaggctgaggtgggaagatcacctgagccctggagtttggggctgcagtgagctgtgattgtgccactgcactccagcctgggtgacagagcaagaccctgtctcaaaagaagtaacaaattaaattaaaataaaaatgcacaactacatctggccacaagcaacatcagactagtccccactgaggcgcttttaaaagtctgtcctttgaaactatgtcaaggtcaatgaaggacaaggaagacaggaacagttggaagaaaggagaaaaggttggctcagtgctctgtgttacgtgaactggatcacggattggaggagaaatcgctatgatgggaatcactgggacactgaagcaatttgattatggcctgaggattattagatactaggattgtatcagtgttgaatttcctgattttgataattacactgtggttatgtaagagaatgtccctgttcttaagaaacacagccttaataaattaggggtaaaagagtacaatgtcttcaacccaacttttaaatagtccggaaaaaaatataatatgattatacacaaataaatggggcaaaatgcaagcacttggaaaatatgggtgggaggcaggagtggagggccacctgtatcttctctgtaagaaattatacaaaatgtaaagtcacaaaaaattttgttaacagccaagaatacaacagacaaggccacaaacgcaccaatgattgaggctgggttttggaaaaccactgtgaatccagaggaaaggagtggaagagaaagtaaagacggaggcagagaagacatcaaagctgctgcagcatcacggggtcctacagctagagaactaaataactgggtcagcgatctaatagaagaaaatatgcccgagactaaacaaggacggaatccacaagtcacgagagctaaatcagtaaaaacacaaacagacaaaacgtccccaaaaaatccagttaagtggattgtgcttattgcgaaaaacacacctaaaacaaagtgaccttgagtgaaaggacagaccaaggcggacagcggctctgcagtgacctcgagtgaaaggacagaccaaggcggacagcggctctgcagacgctgccacaccccagcaggacctgaggccccggtggaacccagactccagaagccttgaggcccaggtgtccacaagacaaaaggaatcactttctgaaggagccgctccgtggatggggatctaagtcccatagctaaaggcacacacatccatgagctgccagttccaggggtgcaggacgccccgatggaggtggtgagaggaggcacaggcccctccacgggagcatggccggcccaggaggcaagaccaagcagaaagggtggggtgtcctctccgtggaatttgcacagctgagcatatcataggtcacaaaaaaacctcaataaggtgtccaaaataaaaagtgaaatctcatcttctgaacacaagtcaataaaatgaagggggaggagggggagggaagctgcgccccagggctgtgagctccgccaccgcctccccaccctccctgcacgcccctgtccgacccttcctcggcagcccggcccaccagcctgatccgctgctcctcctccaggatgaagaggttctccttctcgcagtagaaggcggccgcatccagcagagccttcaggggcaccaggcccaccagctgtgagcccaccactgggaggctcagctcctgccaaggcacaggcagcgtcaccccctgggggctggctggagaatggccctggctggaggatgtggggcccccgccctgcccacgggacagatcggctcgcccctcacagcagcagcggctgctcccgggctcacctgtgcttctcggcaggtctcctcgtagaccgtgtgcagtgccgtgacctcaaagtccagaagattggtggacacctgagccaggttcttctcatccaggtaccagccaatgccctgaactttcttcagacgtcctggctgcaaaggaagagcgttccccagcctggactaggaagctcatcctgcctggccctgccagtctctcctggcacttgcattccccagctggacggggaggagcctgtgcctgggtgggtgctgtggttctcctccgtccctcactgagctggccggggagggccagagaaacttcgcttgccacagggaaacggaggccccaagggtcagacaccggaggcccaccccggcaggcccccgcccagcctaggccctgccttccagccacgctgtgtcctagatgttgggggaatgctgaggggtggggccccaggcacccccatgccgttctcccatcccatctgctccgctcccgacaagtcccctcagccccgcacttgtcggggtgactgagtccacgtggggggactctgacctctgcccttggccggggcctaaagcaggacttagaggtccctgtgcttttgtgctgagtctgcaggtcgggaagccgggtcccaggaccttggctgtttgtgggaccggggtctctgagtggggaacagatgggcaggtggtcccccccgctttctccgggtatctatacccggagtgacgctcagaccgggtgaccactgctgtgcagacgtggagggaaaggcctgggggcacctgaaggtttgtaggggtgtcggggctcccaaggcatctggagggatatggggggcccctgagggcacctgggactccggaagtcgctgtttcccagcagtatggaaatgctgccacatgttaacaaagggaagtcctgcctcgttccctggaaaatccccaggaggccagagctccccagcttcactccgcccctgacctgccgacctgcgcggtccccgcacggtgtggacgcggaggctgggccggtctgcaggtgggaggccgaaccctgtccggccggtgccccatccccaccgacctccccgcctgaggctctcagcctctaaccctttcccgaggggctgggtggggctccatggggtcagtgaacggggtcacctggtccttcccgcggccctgctcccgcaggttgagcgcgatgcggtgggcttgctcctttgtgccgagcaggttgatgttaaaagcaatgaggaacttcctcgcccccgtggccgtggccccccaactggggacaaaggagctgggaccaaagtcgggcgcccagtcggcctgctggagctgtgagcaagttcgctctggggtgagacatcccccacgggagggaacagccccccggggtcccgggaaggaggggcccggcccagccaccccagccaggacaaaggggcaggtccacctccttcccaggcccgaccgcccggggtgggggcaccttcttagggagggcctcgtactccccggcccggatggccggcagggtccggcgactgtccatcctggctgcctcgccgtacaggtaaactgcaggagagcccggcggtcaggcctggaccggcagggggtccaggactcagttcctggaggacgcaggtggaggggctccctccagcctaacccaggaatgggcctctactgcaccctctcctggggagtgcccgttctccgccttggatggatgcgggtggtcccagtggaccctcagtgtgggccagcacccctgcccaccccctcctcagagggccctgaaaaggcgaattgcagggttaggatggaacatgtgggacatgctaacggcaggacgttcatgcttctgttttctttgtatgataaacagaaccgcaagcaaccacataaatataacggcagagaagaggaaaaactcgtgaacccgcacaccagtgtgactgtgacgtgggccctgcgtcgggatttccttcggggggactggcatgaccgtgacgggggttacgtgtgccctgcatgccggcgtgaccgtgacgggggttacgtgtgccctgcacgctggcgtgactgtgacctacgtccctgcctcgggatttctttccaggagcgctgggttggtgcagcctaggggtgggtatgcactttgtcccgtttgtctctgtttgtttcatatcattttcttgatttagttaatttcccaaagtgaaattattctgctctagaaggcgtggactttaaggctcttggtttgcctgtgcagctgctctgcggtgtagtctgaggaggccccgggcctgcacggccgcaggcgaggctgcgtttatttcggtattgagggagctgcgcttctgcatgttggctttttggaacactctgcccttgcaagagcagtcaagggcagggaactgggggatacagaaggagccaataacccacaccaatgagacgggagcagagtgaggggggcgggggggcacgctcacctggcacgtccagctcctctgccagcctctggccaaaggcctgggcgcagagcacacactcatccacgctgacgcccctcacggggatgaaggggcagacgtctagggcccccatgcgggggtgctctcctgcagagagacggcgaggccgggcaggaggccaggtgtgggagcgggtgggagctccacggggttctcggaccctctgtcctctccggcctgggcagcccccagtccacacacccagcaagctgctcacactgacccacagggaggaggccggccctgggcgctcccagccctgccccagcggcagcaccagccctcccgggacaacggaagttcccgcaccgtcctcccagccagtgtgggggaggtccttcagcccaggagcagcagcacctgagcgggtggtctggcatctctgggataaacctgtccctctcctaacactcacaaaaataactttgaaaggggtgcaaagctcagctctcaggcagccccggccaggccaagagggggcgctcgaggctgggttccggccaccccaaccccctcccctgaagccgagaatccactctgcgtttccagagcattcttctcactagctgagtccctcgctgtggctacaccaagccgtgggtcggcgcccaccccaggggacgccagcctcccccgcctttgccgccaccgcccagggctggccacttagagataagcttctcatccatccacccctcaggatcactgtggatccctggcctctcatgagcggcccacagcccagcccctggccagcgcccgtgtgtccacacacctttggccctgcctgcccaccgaggtgtttggcttgtgggctgttgacaggtcagcttccaggcagcccttcccccaccagtgcctgctccaagactggctctcagcccccttgacgagtgggcaggtggacggggcccacaaaccttccccggcgtggccccctccccccacccagccgtgaaggtggcccggtgctgtgggagcgtggcgacctgggggtcccccagagcacagccctgcaggcaggatgggggccatgacccccacactccagggtcctcctaggagagccagagccagccccactggaccccacgttccaagcctgggccccgggcctaccccctctcccaggacaccaggacagggctcggccctgacattctgagacacggcagccacaggagagcccagagacctcaccttggtgcctgctcatgtcgataagtcgggaagctacccgggcagcgttgagggccccctccaccacgcactccggcggccccacgaaggtgtacacggtgcggttggtggaagggcctgcgtccacatccagcagcacgcagcccggggtctgtgtgatggctccagagatggcgtcgatcacctgggacacaggcccggcccccacacctcagtctccccgtttgaaagaaggaaaaggagcttggaggtggctgcaccccgagacacaaatgggggctgaggaggcgggccaagcctttgggggctctccgacaagctgagctcccaccgaaagtgcccgcacacagcggccgcccgggaaccctcacagcagccacagtcactccagcccaagcacagtccccacaaggggctgcaggtggtgcctccaggagagactcacgggctctgctccgacagacagatgccagagacgtggccggggatccaagaaggtgaccacaggcgcaggtcacagaggggccgggacccccacccccgagcaggggagggacagatcaccagcatgggggaggggcctgaagggcctagaaccttccgggtggcaggactgctgggagcaggggctcagccccaaatcttgccctgtcccagggccttggtgctggctggaatcccggcatgacgaggcctccctgcacccctgcgggtgacccctgtggcctggtgctgcgctctgggaggccttccaggtggcccttagggcctgcgtttgttcccggaggagcctggacctcagggctgtggaaggcgagaggccggacctgggggcctgctgccccctctgtgcctacttcgttttgggtccagtgaggatggtggctgcagggtgggggctcagcaagctaactccagtggagatggagaggcggcagtggggaccatgctgggccacctcgtgtggcctcacacagccctttcagtcagtggcaggagccccattttcaggggggagcaccaaggccctttgaggcccagagatctgcccaaccccccaccgaaagcacccgaaaggcccctgaagccacagccaagcctcagcccccacaagcaccagtcgtgttccacccacccctgggtcaggcactccccagggccctgagccacgggatgtccttggggcccacgggcagcggctctgcccatcctgggaagacgacccgggacaccaagcccaccacctcctccatggcctgggccttagccactcaagctgccccatcagccctagatgcttgaccagctcctcgggcctcacctcctggttcttcccctccgaaaagttggggacgcattccaccagctgggacatggccagcaccttgatccagatgctcctctctgggcagatggaaggacagggccagtgctccgcagccgccgccagggcctttatacgctcaccggcagcacctccccaccggcttctcattaaccagcaaggcacaaggagcagtggggccaaggtccctgtgcagccgcggagtggggtgctgcagagccaccccgggtgctgttgacccagaggggatggctccactcagccagagtgtgggttcccggaaaagaagcacatgccagggtgaaggggcatgtgccgaggacccccaggagcatcaggccagcctggctggaatcctgtcgtgacgaggcctccctgtgccactgcgggtgaccctcgtgaccctgtgctgccttctgggaggccttccaggcagcccgtggggcctgcgtttgttcctggaggagcctggacccctggggctgtggagggcgagaggccagcatgaggccctggctcgcagcacccaactgaggtcagctcagctcagacaggagagtgcaggggagcacgcgtgtgagagtgagtgaggatacacgtgagggcagggcaggggaacacgtgagagtgcagatacacgtgagcacaaggcaggggagcacatgtgtgagagcgtggatacatgtgagcacaggacaggggaacacgtgtgagagtgagcgaggatacatgtgagtgtggggtaggggagcacacgtgtgagagtgcaggtacacgtgagcatggggcaggggaagcaagcatgtgagagtgagtgcagatacatgtgagcgcagggcaggggaacacgcgtgtgagagtgcagatacacacgagacgggcatgtgcgatatgggggaaggcagctgagaccccagctctccccagctgctgctcccctgactacaggctccccacgaagtcagcggcaccagggccgtgctcagaagggagaactcctgtctccacgttcagccgctgcccacttgcagtgcttttatcattttctcttttttttttttttgagacaaagtctcactctgtcagccaggctggagtgcagcggcacaatcatggcttcctgcagccttggtccccaggctcaagaggtcctttcaccttagcctcctgagcatctgggccacaggcacacaccactacactggctaacttttccatttttggtagacatggtgatatggtttggctgtgtccccacctaaatctcatcttgaattgtagagcccatagttcccacgtcatgggagggacccggtgggaggtcactgaatcacgggggcggctttttccggtgctgtttttgtgatagtgaatggtctcacgagatccgatggttttataaagggcagttcccctgcacacaccctcttgtaagacgtgactttgctcctctttcaccttccaccatgattgtggaactgttgagtccattaaactgctttttctttaaaaattacccagtcttgcgtatgtctttatcagacaaatacacatgaggtctcaccacgttgcccaggctggtctcaaactcctgggctcaagcgatcctcctgcctcggcctcccaaagtgctggaattacaagtgtgagccactgagcccagccccacttgaagttcttttttttttttttttttttttttgagacagggtctcgctctgtcgcccaggctggagtgcagtggtgcgatcttggctcactgcaagctctgcctcccgggttcacgccattctcctgcctcagcctccagagtagctgggactacaggcacccgctaccacacccagctaattttttgtatttttagtagagatggggtttcaccatgttggccaggatggtctcgatctcttgacctcatgatccacccacctcggtctcccaaagtgctgggattacaggcgtgagccacccacttgaagttcttaatggaaccccaaccatgtgggccttagggaccccacctccgtggctactcagggggactgggatgagacaggagccaggtaagcccagaaaccttcagaggctgggagcacacagagttccccagccagggctccacgtctggaggctgggagtgggggatggggtcagggatctgtgtctggagggagaccaggaggggaggatggggtcagagctctgtggagcctcaaggggaggatggagtcagggatccatgtctggaggccaggaggggaggatggggtctgttgagggccgcactgcattccctcgagaaaccatctgctgaaggcctgacctccagcatggcagactggattacccccagcaccgccgactggattggatgtggagatggacagggcggtgagaagagggagagacaccagggatgcactcagagaaaaggccaggaggacaaagcagggaggcggccgcctgcaagccaagcagagagacctcagacaaacagaatctgcagacactttgatcttgtactctgggccttcaggactgtgatagaataaatttctgtggtttaagctgctgggtctgcggtactttgtgacggcagccgcacacatccagggtcccgaggtgcggggcactggaacattctggctgtgagggttgcccacactgggctggcaccttcatcctcgcaccacagcagagtgaccagaaccatacactcgtgacccaggacggtgccaaggccaagacctggccctgtcctccagcccagcaaatcgcctgtcaggagagagggttggggcgggaggccccggcaggagctgcatgcatttcctacccagctactgctggaccagggcttggctacagctgagaacacgagggggaatggggctggttgtgacgccggcgctggttctcaggggcagcactgagacattagaaatgctggcaggtgctgtaaatagctcctgaatcggggaccctaagggaccccacttacaggagaaagaatctcagctatgcccacaccagggtttccaccatctctccccagtgacaggcccagggctactgattccagggccaggcaggccatacacttttctaacccagagtatgagacaaacatagtgggcccataagtaaatgactgaatacggaagctgtgtgcaggagaatccgagttcacttgggccggtgcccacctccgtcccaggaggtggaaatcatcccctagaagctcactgccctcccgtctacagatggaagagctggtgcccagggcccgggtgctgccccaggagacatggccacgccagccacttcagggccaccctcctcaccctgttcccatttctcctcattttaatagtacagtaagaaaaagtgcaggaatgggcttcaccctctctgcacgggagccctccagaaagttccacgtgcacctgcagcttaggggcctagggggtggcactgccagggtgggggtctagcttctgaccacagggcccccccaggctagcccagcacagtggacaacttgggccccactatatggacagagggtgagccatgggcaccgccccagccaaagcccccaggggccactccaagccaagcccaagagcctggaagacactaaggctgtttgggggacccatggccagaggctgagaaccccattcttctagagacccagagcacaggggctgaatgccacctgcccaccagactgttcctgtataactcatatggtttttgttttctggtttacaatgctttgacctctcgggggccttactggctaggtggagactgccctcccaggactggctaattcctagagacagcaaaaggtgcctgcaaacagagctcccctttaaggcacaagccaacccacctggagcctgtaaacccaaccaccccttatctgactcactcaccaaacccatgttcctctgccctcaatcaccctggggcaggacggtggtcaactagacaccaccccatagcccggagcccagggaaattaacctgtccaatcctaaacttgctccttcgtgcctaccctccctggcctctcttcccagggaaacccccacagagcctctggccatgctctcccctctcgccttctgcgtcctgttgccacggcgccccgccccgggcggccctgtgtggcacggtacgtgccctcctgtggtttaagtagctgggtctgcagtactttgtgacacactctcctttaaagtcaggagtcctgtgtctgtatcccaccacacccaactgaaataaatcctggtgcgtttcatcacagcccttcctatcccaggcttgctgaaagtatccactcgctggcaccgaggggaagggggcatggaccacctggccgagactgtgtggctgcagccctaggcctggggcccaaagctcctggcccagccacagagccagcccagtgccggcgtggccacaggcgaccctcaaaggtaaggccagaaatcagcacccagccacagagccagcccactgccggtgtggccacaggccaccctcaaaggtaaggccagaaatcagcacccagccagagcttctcaggccagtgggcccctcgtctgccgggcatgaggttgggcccgcaccccaggatccagcccatctgcacctgggagctgaatgttgtagctaccagccagagtggggtccccagcagtctccatcgagctctgaactgttaatgtgtgacagccctgccatcctcgccactattgctgagacagtgtgaggaccaggctgagcgtgctggcttgtgcagcatgagccaagactcccctgagacacggtaaatgcccctcgttccagggcactttggaactgggtatctcctcagccccaaggtcccgccaattcactgagggcccgtcttctcgctgttccggcctccggcagggagatgacccagggggaggggaattgatgggtcagctccccagctccccgctccgggatggtgcaaggtgcacctgacatggtctccggggctcccctgtgctcgtccacccccagcacccccatggtctccggggctccccggcgctcgcccacccccggcacccccacggtctcggggctcccctgtcctcgcccacccccaacactcccacggtctctggggctccccggcgctcgcccacccccggcacccccatggtctccggggctcccctgtgctcgcccacccccagcacccccacggtctcggggctccccggcgctctcccgcctgcgttgccactgctcagccctaaggtccgggttcactgtaacgcggctgttgccctttcgaattcttcgcttttgaacaaggggctgcgtttccattttgccggcaggggtgcgcaaccatccgccagaaccaagtccttgccccagctcggcattcggggaaacccaaactgggacaggactcgccgtcccgggcgggaaagcgggtgggcgtggaggcccgggggaggggaaggggggagggggaagagggggcccctgccggctgcggctccttcctggcttccctccttgagcaccgagcggcgcttcctgcaggcggagcagcggccgaggcgccctccacgccctcaaagagccagaggtaaaggcagacatgcaaacggatgattttaatgaggggtgagaagcactccgcaggtgcgggcagcggcgggctgcggtcggggcccagcaccggtgggagcggggccttctctggcctcgcgcgcgggggacgcggccctttcccctccggggggacgcgcaggaggcaccgcggccccgggttggaacaaacgcgtttactgcaggcaaggcggcgggcgcggggcggctcaccaggcgaagaggggcttgccgtcctccttggagagctcgcacaggcagttgagcagcagcagcgagtcgcccaggaacttggggggcaccacgtcgatgaccagcttgcgcagcgcggccgggctgctgtgcagggggttggcgcgcaggtcgggccgctgcttcaggattccgtaggtgttgatgaggaactcgctgaacgccgggtgcacgtcgcggctgtagcccagcttctccaggcgcgcgctcagggccaggtagcgctgcgtcagctcgcgcagcttcctctcgtccacggagccgtccagagacttggtggaggtctgcgggcgcagcgcatggatgggggtggggggctcggggccctcggacggggacttccaggcccagggccgatccctgccccgcccgcctgggtccccggggtcccctcctgcggacagtgcccggccaggagccaagatctgggggccgcacagggacggaccgagcgccccgcaccctcctggccgcgccctccccacggggcgcacctgctcgatcttctcggggatgttggccaccgtgaagccgtagagccgcgtcacgcccgggaacacgtaggccaggatgcggcggtccagctggaaggcgatctcgcccaccacgcgcgcgtccttctcggcgcccgcgaagctctggatctctgggggagggaaggccggggacaaggtcaggggagcgcgaggatccactgccctcgagggtgccctcggccacgtggggggcggctcctccacccccctcctcccacctgccgccaccccccactgtctggcaaatagaatctgaaagaaaaggagcttcttaaagtgccaaagggcaagccagccttcccttccccctgtcctcggctcccttctgtccctttgcgatgaggtaaaccttttaatctcgggggtggggactggtcccctgtcacgcgggagtctgccccagcgtcggcccctgcgaggacagaggaacccggccctggaggtctgagttgggacgggtcccctccagtgaggacgcccgtggaacagggccggtcggcttggctgggaggaagggggagagttcttctgtcttggcaacctctgggcatcaaaggctgctttaatgtttattcaataaaactgcttcattctttcctacctctgagaaaaggaccgctgggttggcaggacttttttttttttcttagacagagtctcactctgtcatccaggctggagtgcagtggcgccatctccactcaccgcaacctccgcctccccggctcaagcgattctcctgcctcagcctccagagtagtgggactacagccgcgtgccaccacacccagccaagtttttgtatttttagtagagctggggtttcaccctgttggccaggctggtctcgaactgctgacctcaggtgatccgcccacctcagcctcccatagtgctgggattacaggcgtgagccaccgcacctggcccaggacattctactttaattacttcctcaacattacttaggagactgcaatgctcccacaaaacctgcttccgaacccccctccccaggacagcctctgatggcatccgagtccgtaacagcacatgaccttgtccatctttttcctggaggacgggaaacagtatctcatttgcatttcactaacgactagtgattcgagcatcttttcacgtgcttattggccatttatatactgtatcttctttggagaaatatctattcaggtcctgtagtgatttttcattggattgtttgtcttcttactgttgaattgtcagagttcttaaatattctgcatactagtcccatttcaaacgcacaatttacaaatgttttctcccattctccgggttggcttttcatttttttgatactgtcctttgaagcacaaaagtttgtttttttgttttgttttacttttgatgaagtccaatttgtctgtttctctcttttgctcatgcttttgatgtgatctctaagaatccattgccaaatccaaggtcacgaagatttacccctatgtcttttctacaagttttctggcctcagctctttgagacctcttaggtctttgatccattttgagttaatttgtgtatgtggtgtggagtaaggcccagcctcattccttggcatgtggatacctctttgttccagcaccacgcgttagacagtattcagtccctcctgaattgtcttggcactcttgttgaaaaccatctatgtacagttttatttctgaccttcccattccattgcattgatctgtatgtccatcgttatggcagtaccacagtcttgttaactgtaagttttatagtcaattttgaaactgggaagtatgagtccctcaatgttctcctttttcaagatcgttttacttattctggttccttacacttctatatgaatttcagtttctgcttgtcaatttctgtaaagaagccactaggattctgattgggattgcatgaatctgcagatccaatgtaatccatatcaaaattattgatttttgaacaatataaagtcttctaatctgtgaacacaaggtgtttttctgtttatttatttattgtttgtttgtttgtttttttgaagaaagggtctcgctctgtcacccaagctggagtgcagtggcacgatctcagctcactgcaacctctaccttctgggcttgagtgatcctcccacctcagcctcctgaatagctggaactacaggcatgcaccaccacgaccagctaacttgggtggtggggggttggtagagatggggtttcgccctgttgctgaggctggtcttgaactcctgggctcaagagatctgcccatctcagccttccaaaatgttgggattacaggtgtgagccactgtgcctggtcatttatgtcttctttcattcctttcagtgatgtttgtagttttcagtgtatttctttcccaatcacttttcaagactgcagaagaggtatgtcaacacactgcacagaagtgtgttagggccaatgaggggtgtggaagagcaggtgtaatctcctccttctgtatcaatgtatttctctcatcaagaatcaagctcttggccaggtgcggtggctcatgcctgtaatcccagcactttgggaagccgaggtgggtggatcacaaggtcaggagttcgagaccagcttggcaaacatggtgaaaccccatctctactaaaaatacaaaaattagccaggcatggtggcgggtgcctgtaatcccagctactgaggaggctgaggcaggagaatggcttgaacccgggaggtggatgttgcagtgagccgagatcgcaccactgcactccagcctgggcgacagagcgagactccatctcaagaaaaaaaaaaaaaaaaagaatcaagctctttctcccatccccccaccaaggcaaaaatgaggtagaagaaacatcctatagaagagaaatgattctagtataggttctagaaatgatttctagtccaacctgggctctgtaagatccagccaaaaacctgttcttcaaaggaaaaaggccatacattgataaacctctagccagacttaggggaaaaaagaaagaagacaaaaattaccactagcagaaattagagatgccactaccacagattctacagacataaaaaggataataaggaagtattaggaatgactttatgccaataaatttgacaacctagatgaaattgaccaattccttaaaagacacaaactaccaaagttcactcaagaagaaatagatactctgaatagccttatatctgataaccttacaggtcacatttgacagtttaaaagtaaacagacttccaaactggcctgcttgggaaggtcttatgattaatggtccctgagtaaagaatcttatcatgatttcctcagattgctgatgtgctgattaatggactgaaaagatgctgatttattcctgaatcataaaggtttactgactgtcttgcacagagatgtgttgacctgtatgttgtcatctgtagccaatgcttgtaacctctgtgttgtaccctccaaagaaaaggacaacatgagtatgaggagtcctttctctcctcctagcctctcctgtagaagccttctgacttagatatgagtatgagtcctttccctcctcttagcctctcctatagaaaccttctgactagaaaaggacaacatgagtatgaggagtcctttccctcctcctagcctctcctatagaagccttctgacttagacatgagtatgaggagtcctttccctcctcctagcctctcctatagaaaccttctgacttagattccagaacactctcaactttgttggtgtgttcctctgggttgatcctcacatttggcttccaataaacctttatcgaattatttgtctcaacagccttaatttcagttgacattatcaataaaatggaatttgtagggggaaaatgttcccacagagaccattcaaggctcgggtagtttcagcggtgaattctaccacttaaggaataaataacaccaattcaacacaaactcttctagataaagaggagggaagaccacaaaacaatgagaaaacaaataacaaaatggcaggagtaaatctttatcaataataactttgaatgtaaataggcaggtgcagtagctcatgcctgtaatcccagtactttgggaggctgaggtgggcggatcacttgaggtcaggagtttgagaccagcctggtcaatgtggcaaaaccccatctctactaaaaatacaaagattagctgggcgtggtggcacgcacctataatcccagctactcgggtggctgaggcatgagaatcacttgaacccaggaggcggaggttgcagtgagccaagattgcaccactgcactccagcctgggcatcaaagtgagaccctgtctccaaaaaaaaaaattacagcacagtcaaatcgatgaatgatagtatgtgagtttggtcaaaaacaaccaagaaactttgaatgtaaatagactaaactctccaatcaaaagacggagtggctgaatggataaaaaaaaaacaagacccaaccatctgctgcctacaagaaacacacgtcgcctataaagactcacacagactgaaaataaagggatagaaaaggatattccatgcaaatgagaaccaaaaaagagcagtagcagccatagttatatcaaagtggatttcaagacaaaaactataacaagagacaaagaaggtcattatataatgataaaggggtcaattcagcaagaggatataacagttataaatatatatgcacccaacactggagcacccagatatgtaaagcaaatattactagagctaaatcgagagacagaccccagtacaatagtaactggagacttcaatacgcattttcacccttggacagatctttaagacagaaaatcaaagaaatatcagacttaatctatactatagaccaaatgaacatgatagatatttacagaacatttcatccaacaggtgcagaatacacctgcttctcattagcacatggatcattctcaaggatagaccatatgctaggctgcaaaacaagtctttaaaaatcaaaaaaattgaaattatatcaagtatcttctccgaccataatggaataaaatgaaatcaataacaaaaggaattttggaaattataccaacacatagaaattaaacaatacgctcctggatggccagtgcatcagtgaagaaattaagaaggaaattttaaaaatgtcttgaaacaaatgataatggaaacacaacacaccaaaacctactatgtactagattcagcaaaagccatactaagagctatagctgtaagtgctaagagtttatagttatgagtgcctatatcaaaaaagtagaaaaacttcaaataagctaatgattcatcttacagagctagaaatgcaagagcaaaccaaatccaaaattagaagaaaaataattaagatcagagaagaaataaatgaaatttaaatgaagaaaacaatacaacagatcaatgtaacaaaaaatcggttatttgaaaagataaataaaattgacaggccaggcatggtggctcatgcctgtaatcccagcattttgggaggccgaggcaggcgaattgcttcagcccgggaggtcaagaccagcctgggcatcgtagcaaaatcccatctctacaataacaaaaacacaaaaaccaaaaaattagccaggcctggtggcatacacctgtagtcccagatacctgggaggctgaggtgggaggctggcctgagcctcaggtggatatctacatgcaaacctcacaccatatatgaaaattaacttggaattgatcagagacctacatgtaaaacctaaactataaaacttctagaacaacacacaggagagaatctgtgtgaccttgggcttggcaaagatttcttaaactgaacataaaaagcataaaatacaaaagaaaaatcaataaattggacatcatcaaattaaacagttttgctcatcaaaaaacattattatgaaaatgaaaaaccatggagtgggagaccgtatctgcaaaacatacacccaaaaaaggactcatatccagacacataaagaactctcacaacttcccaagaagaagataagcaacccattttatctttaaagatggacaaaagactaggacagacacagccttggaccccagcctcccagcctggctctcctccctccactctgtgtgactggatggagaaacggccctgcctgaccacccagtcatgccctccccacagctgccagcctgcactgggggcccccccaggtgcccccgcacccggccataccattgaggtagtagctcctcctggtcctgtccccggtgggcaggctgctctccgagaaacacaccttcttaggccggaccatctccctgggctccagcagggtcttgtccaccagtgagtcttgcaaggggctcaggagcggggacagcttcctgtcggtgcctcggtggctatgtggctctgggggactgaggaaggccttgaagggtgcctgggagggggctgcacagcccggggaggtgtcgtcctcgctggacaggggggcatgtgagcacagcaggtcctccagggaggatgtctgcagttgggagggcgtgtcggcaacactcgtgaaccttccgaaatctggaactgaggcggggaggaaagggatgagaaatcaggctgatgctcctaaaacattcctgggaagtataaagaacatgttaacaacccctatgcaccccaccccaagcttcaacacctgccggggtttccctggcttcagagcatcctccttcccctcaggcctcaagtgtaaaaggaggagctggatgtggtgaagtggccacaggtgcccatcctgcccgtgggagcactgcgtctatgggcacagcaagcgggcaggcctccgtgtgcctcctgcctgcctgtgtgcccacacacactggagaatgacttttatatgcttaagttgtacataaatggtagcaccctacacattttattctgcaactgaactttttgctgctgcattatctctttgagatttatccaccctgagccatctggtagctacctggttcatttaactgtttcctggcaactctgtacacatgagcacacatacagacacacacactgaatttttaacccttgccctattgatggacagggcctgtttccatgtttccgtgcaaacacacagctgtaattggcctcccgggaggagccttctgctctgtgagcatcctctgtggatgaggaggagccccctgctctgtgaacatcctctgtggatggggaggagcctcctgctctgtgagcatcctctgtggatggggaggagccccctgctctgtgagcatcctctgtggatggggaggagcccctgctctgtgagcatcctctgtggatggggaggagcccctgctctgtgagcatcctctgtggatggggaggagcctcctgctctgtgagcatcctctgtggatggggaggagccccctgctctgtgagcatcctctgtggatggggaggagcctcctgctctgtgtacatcctctgtggatggggaggagccccctgctctgtgagcatcctctgtggatggggaggagcccctgctctgtgagcatcctctgtggatggggaggagccccctgctctgtgagcatcctctgtggatggggaggagcccctgctctgtgagcatcctctgtggatggggaggagccccctgctctgtgaacatcctctgtggatggggaggagccccctgctctgtgagcatcctctgtggatggggaggagcccctgctctgtgagcatcctctgtggatggggaggagccccctgctctgtgagcatcctctgtggatggggaggagcccctgctctgtgagcatcctctgtggatggggaggagccccctgctctgtgaacatcctctgtggatggggaggagccccctgctctgtgagcatcctctgtggatggggaggagcccctgctctgtgagcatcctctgtggatggggaggagcctctgctctgtgagcatcctctgtggatggggaggagcctcctgctttgtgagcatcctctgtggatggggaggagcccctgctctgtgagcatcctctgtggatggggaggagcctcctgctctgtgagcatcctctgtggatggggaggagccccctgctctgtgaacatcctctgtggatggggaggagccccctgctctgtgagcatcctctgtggatggggaggagcctcctgctctgtgagcatcctctgtggatggggaggagcctccctgctctgtgagcatcctctgtggatggggaggagcctcctgctctgtgagcatcctctgtggtccaggaggagcctcctgctctgtgaacatcctctgtggatggggaggagcctccctgctctgtgagcatcctctgtggatggggaggagcctcctgctctgtgagcatcctctgtggtccaggaggagcctcctgctctgtgaacatcctctgtggatgtggaggagcctcctgctctgtgagcatcctctgtggtccaggaggagcctcctgctctgtgaacatcctctgtggatggggaggagcttccctgctctgtgaacatcctctgtggatggggaggagcctccctgctctgtgaacatcctctgtggatggggaggagcctcctgctctgtgagcatcctctgtggtccaggaggagcctcctgctctgtgaacatcctctgtggatggggaggagccctctgctctctgaacatcctctgtggatggggaggagcctccctgctctgtgagcatcctctgtggatggggaggagcctccctgctctgtgaacatcctctgtggatggggaggagcctcctgctctgtgaacatcctctgtggatggggaggagcttccctgctctgtaaacatcctctgtggatggggaggagcctcctgctctgtgaacatcctttgtggatggggaggagcctcctgctctgtgaacatcctctgtggtctgacgctgggctcaggtgtgttcactttctttgctttccacaccaagggggagggtccatgcccaccaacacctcctggccccacaccctcatgaggactgaatattccccaaccaggctgatgaggtcatgtggcatttccccaatccctggccaaatttagcttatctatgcctttatggcttatgaaattctattctacctccatgtcatgtgtattctcctagcaataaagcaaatacatattagagaaagtgttcggagccatatcaaaaaattataccttaaaatgtgcctactggagcttgcagtgagccaagatcgtgccactgcaatccagcctgggcgacagagcaagaatccatctcaaaaaaaaaaaaaaaaatgtgcctacaaaggaaccaactaatcttccctctgaaatgttttccaaggaaaaaaagttcgaaagaagcaaagtcatcagcgtgtgcccggcctcctgccacgtgggaggcctggagtcctcaggcttcacagaccccccaccccagacacttttcaaattataaaagaatattatgtacaattatgtattaattaaaatttcaataaaaggagatagcctggaaaattactttcaagtgactcaataagaagtagaaaacctaaatgaaccaatacacaaagaaggaaaatctaaaagttatgaaatgattattccccagagggctgcaggcctggatggtctgtgggtgagtgtgccaagttcccaaacaagtcataatcccgacatcatacaaatgaggctggaaccgtagaacaggttaaaagatgctcaattaggtttcaaaatttgtcacaactctgatgtcaaattcctacaaagataacccccagaaaaaaaaaaaaaaaaaaaaaaaccatggccaggccaaaaataattgcacaaagtctcatccaaacatgatcaagaacacacagcacgaggcaggagtgtgcacagagcatgaggcaggagtgcagagcatgaggcgggggatgcacagagcatgaggcaggagtgcagagcatgaggcgggggatgcacagagtgtgaggtgggggatgcaaagagcgtgaggcgggggatgcacagagcgtgaggcggaggatgcacagagcgtgaggcgggggttgtgcagagcacaaagcggggaggtgtgcagagcacaagatgggggtggagagcatgaggcaggggtgtgtgcagagcacgaggcggtggggtggagagcaagaggcagggtgtgcagaacccagtggctgtgcagcgtagcaagataccagatacggtccctggcaagaagctgagatacctccactggtacagagataggctcacaaacaccgaacaagatgagccatttctcaaattttctgttttccaaaaataagaacaggaaggactcttccacagcatccagcctgtgcaaacctccctcctctgggcagatgggaccgttggtccttcccacagctggtcaggaggaccaggatgcggccaaaaccctctctcaccttccctggaggaggccccatgaaagtcaaggccaaggcccgagttctgagtaataaggacaaagacagaaataagaagttcatgtggattggaagggcgggatggccggccagatgcagccagatgatacagctcccacggagggcctgagatgactggtgagcttctaacacatcttcagagggaaggtgctgagggcagatggagggagcacacagaagctgggctgaaggggagaaagctgggaacctgcctgggactactgagcactggtgctcatttttggacccacaacagctctggggaaatgggggagttaaacgggcaaggagcaacccactgttgccatgggcctctggaaccccagctgggggagaccccttgcccaccatggacactctagttggcagggagagctgcttagagaagtgatgggggcagcagccagctgaagcagaacccagagggtctggtgcaggaacacagccagggacggccgtcccccaggcttgatttgctcccacaggagactttggacctaggggaactgtcagacctgttctctgcagggtggtcttacccatcagatgggaccagtccaacctgagcaccccttcgtctgctggcctctcctggggccccagcctggccatgcctgcttgcagggcagtcttgggtgccctgggggtcttcaccatagcttctgtgccagcagactgtgcctggccagtggagagctccagtgagacagccccgacggccacacaccagcctgcctgctccctcctcatattgtagcttcccctgggcccaggcaactccccacatcactctgctgatgtctgcacaggtgggttttgatttccttcccccaccagcatgcaggagtccagtgggcctcccctttccctacagacttccattgcaggtgaagccttggcagacacagagccagcaagccccatacccgccagaaccctgcctttgacctaacactgagcagagaacagtggatcctcccccaccctgagcgatcactcctgcttgcagggcacagaaaaggcacctagacctgtgccaaccagcaccccacccatgcctatagtacctccagagtaactgcacacagtctccaacaggagccccccatccccaccccagctgctttgcctccaccactgtggtgaacccccacaggaaggcaggcactctgcatctgccagccactctgctgtagctgcagtacctcagccccccagtgcagtggattccaaacctcaaggagccagagaacaaagtcagggcccaaaacaagtcccccagagctagagcatgcagagtccaggagttggcagctgggcactggccccttaaatattccataaatgaagccagttggctgaatccaccttataccacaatcaaaacctcaaggtcatcaaacagaccaggcatggtggctcatgtctgtaatcccagcactttgagaggctgaagcaggtgaatcacttgaggccaggagttcaagaccagcctggccaacatgatgaaaacccatctctactaaaaaatagaaaaattagccaggcatggtgttgggtgcctataattccagctacttgggaggctgaggcaggagaatcacttgaacctaggaggcagaggttgcagtgagccgagattgtgctactgcactccagcctgcctgggagacagagcaagactctgtctcaaaaaacaaaacaaaaaaaaaaaaaaaacagaatggcaagctagataaagaaccaagacccattggtatgctgtcttcaagagacccatctcacatgcaataacacaaataggctcaaaataaaggcatggagaaaaatctaccaagcaaatggaaaactatgattgcagggttgcaatcatagtttctgacaaaacagattttaaaccaatgaagatcaaaaaagacaaagaagagcattacacaatggtgaagggctcaatttaacaagcagacctaactacactaaatatatatgcacccaacacaagagcaccaagatttataaagcaagttctcagagaccttcaaagaggcttagactcccacataataatagtgagagacttcaacaccatactgacagtattacagataattgagacagaaaattaaaaaagatattcaggacatgaactcagcaccggatcaaatgtacctgacagatatctacagaactctccaccccaaaacaatagaatatacattcttctcattgccacatggcacacactctaaattcaatcacataattggaagtaaaatactcctcagcaaatgcaaaacaactggaattataacaaacaatctctcagacgacaacggacccagttagaaatcaagcctaaaaaattcactcagaaccacacaattacatggaaattgaataacccgcccctgaatgacttttgggtaaacagtgaaattaaggcagaaatcaagaaattccttgaagctgatgagaacaaaaatacaacataccagaatctctgggacacagctagggcagtgttaagagggaaatttatagcattaaatgttcacatcaaaaagttggaaagatctcagtcaaacaacctaacatcacagctaaaagaactagagaattaagagcaaacaaatcccaaagctagcagaaaacaagaaataaccaaaatcaaagctgaactgaaggagattgagacacaaaatactattcaaaacatcaatgaatccaggagctggttttttgaaaaaattaataaaatagatataccactagctagactaataaagaagaaaagagaaaagattcaaataaacacaatcagaaataagggatatattactactgaccccgcaaaaatacaaccaaccatcagaaaatattatgaaaacctctatacacataaactagaaaatctagaaaaaatggataagttcctggacacatacaccctcccaagactgaactaggaataaatggaatccctgaacacaccaataacaagctctaaaattgagtcagtaataaatagcctaccaaccaaaaaaagccaggaccagatggattcacagctgaattgtaccagatgtacaaagaagagctggtaccattcctggtgaaactattccaaaaagttgaggaggagagtctcctccctaactcattctatgaggccagcatcatcctgataacaaaacccggcagagatgcaacaaaaaaagataacttcaggccaatatatttgatgaacattgacgcaaaaatcctcaacaaaattctggcaaaccaaatccagcagcacatcaaaaagcttatccaccacaatcaaataggttttatccctgggatgcaaggtaggttcaacataaatcaataaatgcgattcattacataaacaggactaaagcaaaaaccatatgattatcttaatagatgcaaaaaaagctttcaacaaaattcaacaccccttcatgttaaaaacgctcaataaactaggtattgaaggaacatacctcaaaatagtaagagctatgtatgacaaactcacaaccaacatcaaaactcaacccctcaaaacttggcacaagacaagaatgccctctctcaccactcctattcaacatagtattggaagtcttgatcagagcaatcaggccaaagaaagaaataaagcccatccaaatagaaagagaggaaatcaaactatccctgtttgcagatgacatgatcttatatctagaaaatcccatagtctcaacctagattcttaagctgataaacaacttcagcaaagtctcaggatacaaaatgaatgtgcaaaaaacactaacattcctatataccaacaacaatcaagacaagagccaaatcaaatggaatgaactcccatttacaactgccacaaaaagaataaaatgcctaggaatacagctaactagggaggtggaggatgtctacaaggagaactacaaaacactgctcaaagaaatcagagattacacaaatgggaaaacattccatgttcatgcataggaagaatcaatatcataaaaatggtcatactgaccaaagtaattttatagagtcaatgctgttcttattaaaataccattgagattaatcacagaactagaaaaaaactgtttaaaaattcatatggaaccaaaaaagagcccgaatagccaaggcaatcctaagcaaaaataacaaagctggaggcatcacactacccaacttcaaactatactacagagctacaataaccaaaacagcacggtacatagatcaatagaacggaacagagaacccagaaataagtttgcacacctataaccacctgatcttcaacaaatctgacaaaaacaagcaatgaggaaaggactccctattaaataaatggtgctgggataactggctagccatatgcagaagactgaaattggaccctttccttacaccatatacaaaaatcaactcaatatggattatagacttagatgtaaaactcaaaactataaaaaccctggaagacaacctaggcaataccattcagaacatagggatgggcaaagatttcacaacaaagatgctaaaagcaattgcaacaaaagcaaaaattgactaatggcatctaatcaaagagcttctgcacagcaaaataaactatcaacagagtaaacagcaaacctacagaatgggagaaaatttttacaaactaatgcatctgacaaaggtctaatattcagcatctataaggaacttaaagaaatctacaagaaaaaaacaaacaaccccattaaaaagtgggcaaaggacatgaacacttttctaaagacatacatacagccaacgagcatatgaaaaaaggctcaacatcactgcttattaaagaaatgtaaataaaaaccacaatgagacaccatctcacaccagtcagaatggctataattaacaagtcaaaaaacaacagatgctggcaacgttgcagagaaaaagaacgcctatacactgttagtgggagcataaattagttcagccattgtggaagacagtgtggcgattcctcgaagacctaaaaacagaaataccattcaacccagcaattccattactggttgggttccattaatggtacccaaaggaatataaatcattttattatagagacacatgcacgcatatgttcactgcagactattcacaatagcaaagacacggaatcaacttaaatgcccatcagtggtagattggataaagaaaatgttgtacatagacaccatggaatattatgcagccataaaaaagaaagagatcagccgggagcagtggctcatgcctgtaatcccagtactttgggaggccaaggcaggtggattacctgaggtcaggagttcgagaccagcctgaccaacatggtgaaaaccatctctactaaaaatacaaaattagctgggcatggtggtgcatgcctgtaatcccagctacttgggaggctgaggcaggagaattgcttgaaatcgggaagcggaggttgcagcgagccgagatcgtgccattgcactccagcctgggcaacaagagtgaaactccatctcaaaaaaaaaaaaaaaaaaaaaaaaccagaatgagatcatatcctttgcatgaacatggatggagctggaggctattgtcctcagcaaactaatgcaggaacagaaaaccaaatgccacatgctcttacttataagtgggagctaaacaacgagaacacgtggacacatagaggggaacaacagacactgagacctaccagatggtgaagggtgagagaagggagaggatcaggaataataacgaatgtactaggcttaatacttgagtgacaaaataatctgtacaacaaactcccatgacacaagttcacctatgtaataagcctgcacttgtacccctgaacttaaaagttttttaaaaaagaaatacatggccaggtgcagtggttcatgcctgtaatcccagcactttgggaggccgaggtgggtggatcacctgagatcaggagtccaagatcagcctagccaacatggcaaaaccccatctctactaaaaatacaaaaagtagccaggcatggtggtgtgtgcctttaattccagctactggggagggcaaggcaggagaatcgcttgaacccaggaggcagaggttgcagtgaaccaagatgacaccactgcactccagcctgggcaacagagccagactgtgtctcaaaaacaaacaaacaaaaaaccatttactcctgccttctgaatcaatgattctattttttaaaaataaatccagctggacagtggctcaagcctgtaatcccaatggtttgggaggccaaggtgggagaattgcttgagcccaggagtttgggactggcctgggcaacatagggagaccctgtctctacaaaaaaaaaaaaaaaatttttaactagccgctcatggtggcaagcactgtagtccaagctactcaggaggctgaggtaggaggattgcttgagccccagaggtcgaggctgcagtgagtcatgatcattgccactgcactccagcctggggaacatagaccctgtctgaaaaagaaaaaaacataatgggccaggcacggtggctcacacctgtaatcccagcattttaggaggtcgagacagaaggatcccttaagcccaggagttcaagaccagcaacatagaagatcccatctccataaaagtaaaaaaaatcacacacacaccaaaaaaagaaatccaatggaaataaccttaaatataaaaattcttaaaaccttttttgtggtgctatttacctcaaggggaagaaaaactttaatttcaaactgagggagaattcattacattgtggttcatccgaatcggcaatattgcagggccattttaaagtacacctaacaacacagggacaatcttctgtcatgtcagacggaaggagtgaccaggagttgcacatagagaattctcaccactgttggaaatcatctgacaatccaccaccaacaactagggagcgagtgggcaatctgggggggcctggctgtcctccaggggacacctctccagtggagacacggcgagtggcatcgtggccgtgctggagggaccaggacaatcccgagggagacgagatggggcagctgggaggggaggcagaggactgctgctcccactggcccttcgcgtcactcacttgtaaacctgggtgagaagacctggagacctcgctccccagctgacggggacagatgagccctcctgtgacgtgggaacgatgccggcgcagtgccctcctcctccatcagtggggtgtagggaccgttcagagagcgtttgacagtgtctgtttcaacatttcaaatgcacacagcctttgacccgaggacccaggtgtgggatcccctacacaaagccacagggcgcctgcgcaggccacccacggcggcggcgtccacggtcgcagagaactgggaacagtgctgcctgcctggggcccccacagaaggagcccagtgttcaagtgtgccggggagatctgcagataaggactggtggggaatgccgcgaaatggatcgttaagggggaaaagtcaagttgcggaacagcacaatcccgtgtaggtggaccaaaaagatacacagacagacacacagatctccactaaagttccagagaaaacccaagagaacgttgattgtggctgcctttgcggagggggccggaggcgtggcctgaggcttaaacgttgcaccctccatggcgtttataagtttaccatgagcacgtgttgttgaatccgtaagaaaagcaggtttttactcatcctgttttgaacacagatgctaatgaagtcttggcaacatgcagacattgctggtggtggttcctttgtttataaacttctccttttttgcagaagctcagtgctggtcttcccaaccccagttctgctgagggctggtcctgaatgcagcgtcccacagccccaggtacattcccaagcacatgctgaggcccagagcattaagggtgcaccacacgctgccactcaagtggcagagtttagagggtggtcttgtccaggcccctccccgctgccagcccgggccacactgagcctgccccacaccctgtggcgggggctccaaggccctctgtggaaggcctgctggcctcaggttgaggctcctcccaagacccgtgtccagcaagacctgggtttgccaagatgacccaagggcaggggcagcagccgtggtcatggagaccccgcccggactcagcccctgacaagggtccctctggggactgcacagcctgggcaagggttgagggtctgcccctctcctgccaggggaggcaccagcactctgtccagccctgaggtccggcccagggtgattccttcttgaggaggaggacagcaacgcagcccggggcacgcagcctgcggcggtccacacacgccaaacagattaagggcccttttgcagccacagtgcccgggcctcacaagtgctgtgaacgggaccctgcacgtggcccagcaccgtaagcgcaggtctgcccagcaaacgccctgtggtgagcgtggggctcagtggccgctgatggagacgcagaacctggggcctcgcacagcatggcccccaggcgccaggttccccagccacactgtccccgcacatcctggcgaggtgctctcctcccagctccctgcgaggagcccctgcctgtcaccagagaccaaaggtgtggggacgatgccatggattcccctctttgcttccagacacgctcgctctcaggcttgtccatggagctccgagcagggcctggggcctggctgcggagagtgcctcctgcacactgcgcctgctcagagtgcacatctgagggtggtggccagcgtttgagaaggactcaggaagcaacctcccccacccccagcacaggtgctggagcggccccttggtgagtggcagagctggcctcccgggcatggctcgtgctcgcagacagcagtgttcacgggcactggcgaggctgcctgctccatcgtccaggaccaggcaggctgaccacgtcctttccgggcccggcccggtgggaagctgaggttggccgtgggaatcccaggcagtgctgggtcagggactctgtcctctgcccaccatcccaacaaaaagtcaagggtacatctgtcagccccaccccaaatcacatgcaggaacgggtaatgtttttcccaaaccttttagaataaagcctactactttgcagaaagtgaccaaaccctatatatatacttttttcagtaaaaagccacagaaggtcggagtcaatgctatgtggtgagtggatcatggctccacactcccagccccgcagggacaggcgcccacttgtccctacctgctcccctggccggtggctctgaggcctccccagggtgggaccttcccaccatggggctggcctggctctggccggggacatgagtggatgggacacagcactcatgggactcgtgtggctggtctgacacccccctcgcccctgacccaggagaagagacacatgcagcagagcaaactgccagccaggaccagcctggaagagctgcctggggccctggaggcccacaagcctgcgcgccacctgctctacccctatggggacacttccatgactgcagctgaccagtccacctgccagcggttgaccactcccacttcgccagcgaccgaaggggaggggaggggcctcacctgagggcaacagcagaacccaccacctggtcttgctttactcagacctgagggtgtgaaaggtgcccgtgacctcccgcatcagggagctggccgccaccctcgactcccggggagcaggcgtcccgcgaccccctcatctaccaggccatctgagctgggcggcgcctcacctccgctcccgggggagccggcctcagggtaggcatgcgccctgggtgggagcaggtcgtggccgccgccctcctggcagctctggctgagcagccgccgcagcatctgattctccttcaggaggcgcacctgcttcttcaggtccgcgttctcgctcaggagccggctcatcagctcgccgccttcagccatggcgggtgcgtccctccttgtccctcacggctcctgcagccccatggaggtgggagcccagagcccgcaggcaccacagaaacagcccaggcacggagttccgtagccaccaccgccttccacgccttgtgatgtcactgccctagtgatgaggtgcccagcaccctgcctgcccccgcgatggctcatggccccgttgaggcagtgaagctggaggcccgtggcgtgcacaggcagccactcccacattatgaccagggcccgagaatgccaaggacattaggcagctacgggatgtagcgactgtactccaagaggggcgtccaagccactccccattgagcggcccagccagggtcgggtgtccaccctgtgtggtgtcctcaagctgggtggggacgctgccttcacccgagtaacatgtgggctgcacttcccataggacctgcccaggacacagggttcccagtgcagcttcctgtggaccctggcacccagggcagcaactgatgtgcaggtgttcatcagggtccgtccttggcacccacacttgaggagggagggactggcaagggcagtgggaggagaccagcatgtgggggagaccagcctggtggggagaccagcttgtgggggagaccagtctgcgggggagaccagcctggggaggagaccagcctgcaggggagaccagcttgcgggggagaccagcctgcgggggagaccagcctgggcggggagatcagcctgggggaggagaccagcctggtgaggagaccagcctgggggaggagaccagccttgtgggggagaccagcctgcgggggagaccagcctgggcggggagatcagcctgggggaggagaccagcctggtgaggagaccagcctgggggaggagaccagcttgcgggggagaccagcctgcgggggagaccagcctgggcggggagatcagcctgggggaggagaccagcctggtgaggagaccagcctgggggaggagaccagcttgcgggggagaccagcctgcgggggagaccagcctgggcggggagatcagcctgggggaggagaccagcctggtgaggagaccagcctgggggaggagaccagccttgtgggggagaccagcctgggggaggagaccagtcttgcgggggagaccagcctagggtggggagaccagcctgaggcagccccacgatggcccccacatgctttggagcactgggtggccctgagggctgggctggaggccacctactgacctcactccctgatgagaagggtccagcagtgcatgtccacccctcagaccacgagcgcccgtgtctaagacaccaattgttcctgactgcactgctcctgcctgcacgtaactgaggacgcccccaacccatggccacggcccctcgggccgtcacacagggctgcggctcatggggccctgctagagcaggcgtctgtcctcagtcagtgcgaccgacttgaaacccaccctgactccctgcttcaattacttgggaaagtaaatcacctcagtgttgtttcttggctccgagggtcttgttttatcagcagccgggatgcaacagatgggtcatctcatcctcatgggaagggacgtacggcagaaagcacaacccagtgggccggccacacctccagccctgtgacgggcacccaccaccaccaacccagtgggccggccacacctccagccctgtgacgggcacccaccaccaccaacccagtgggccggccacacctccagccctgtgacgggcacccaccaccaccaacccagtgggccggccacacctccagccctgtgacgggcacccaccaccaccaacccagtgggccggccacacctccagccctgtgatgggcacccaccaccaccaccatcccagtgggccggccacacctccagccctgtgacgggcactcaggaccaccaagggcactcaggtgcagatgcccctgggagaacaccaccttcattcagcccgggcggccagattaggggaaggttgcttctaggagagaaagtcttgagtcaggctttgtggagaaaggaggtttctacaccccaagcgttcctgacacaacccaaccagcctggtgttgcaccacagggctcacacctcagatcaagacaacgggggcccagccacagcccactgacgagggcatgcagggcgtccaggatgcagggcagagagagaagcgagggatgagtcacggatgcgccccccgctctgagcccgacggggccctgaatggcttttcctgccctggctcctcccatcatattttaaatgccgtcttcctcccgctccaaggaaaccttctcttgacgtcaggtactctccagccacggacctatcaacattctgacagttttctggtcttgacacattatccttttaatatagcgctggattcaatttattaatattttaagtatttttatgctcacaggggaagtcgatctgaatctccttttcttgtgatgtctcggtctggctttggaacactggccttttaaaatgagccgcagagattctgcgccattttctgggtgttccttcttaaacgtcggatagaattcatctgtgaagctatctagaactagatttcttctggaaaagttttaaatttctaaatcaatttcttaaatagatacaacgctacttatattttatatttttccctcatgtgcgttttgctgacaattgtggctgtcaggtagtttgttgataataggggaggctgtgcatttgttggggcagcgagtggggaaatctctctatcttcctctcaattttgctaagaacctaaaactcctcttaaaaaagtcttgaaaaagacaaaagcacgaaggaaaccagagaatatttcaagttgaatgagaataaaaacatgacattagaatttgtggggtgtagttaaagcttgatgcccgtgctccacaaccacaggaaatggacaaaccctaccaaagttatcaaaagagaaggacaccccatctgtagaaaacagtcagaagattaggcagatgtggtggtgcgtgtctgttgtcccagctactcggaacactgaggtgggaggattgcttgagcctgggaggtcgaggctacagtgaactgtggttgcgcggctgtgctctaacttgcgtgacaaagtgagaccctgtctcaataaaatactttaattaatgaaactgaaactttctgctctgcaaagaatgtcaagaaaatgaaaagacaagtcagagactgggagaatatttttgaaacgtcctgcagcaaagtggtacttttttgagacaaggtcttgctctattgcccaggctgaagggcaagtggcatgatcacggctcactgcagcctcaaatgcctgggctcaagagatcctcctgcctcagcctcccaagcagctgggattacaggcgcgcacacccacactcagtcccagagtggtccatttgttacagctgatgaatctacatggacacatcgtcaccacccaaagcccacagtttacaatggggctcactcttgatgctgcacattctctggctttggacaaatgtataatgacctgtatccaccatcacagtgtcaggccagagcagtttcgctacgcctatagtcccagctactcaggaggctgaggcaggagaatggcgtgaacccgggaggcagagcttgcagtgagccaagatcgcgccactgcactccggcctgggcgaaagagcgagactccgtatcaaaaaaaaaagaaaaggctgaagaccttaacagacaccgcaccaaagaagatacacagttgttaaataagcatatgaaaagatgttccacatcatatgtcatcaggggaatgcagattaaaactaccaatataccttttagagtggccaaaatccagaacactgccaccaccaaatgctgctgaggacgtggagtaacaggaactcattgttggtgggaatgcaaattggcacagccacttttgtttgtttgatttcttttttgtcttttttgagacgaagtctctctctgtcacccaggctggagtgcagtggcacaatctcggctcactgcaagctctgcctcccgggttcacgccattctcctgcctcagcctcccgagtagctgggactacaggcgcctgccaccgtgcccggctaattttttttatttttagtagagacggggtttcaccgtgttagccaggatggtctttatctcctgaccttgtgatccgcccacctcggcctcccaaagtgctgggattacaggcgtgagccaccgcacccggccccttcagcccattttttaaccaggttgttttattgttgggtttgaagagctcttttggatactgatcctttgtctttttcaaatatattctcccagtctctgacttgtcttttcattttcttgacattctttgcagagcagaaagtttcagtttcattaattattttattgagacagggtctcactttgtcacgcaagttaagagcacagccgcgcaaccacagttcactgtagcctcggcctcccaggctcaagcaatcctcccacctcagtgttccgagtagctgggacaacgggcacgcaccaccacacctgcctaatcttctgactgttttgtacagatggggtttcactgttatccaggctggtctccaactcctgagcccaagtgaccctcccaccttggcccctcaaagtgctgggactacaggcatgagccagaaatgtattattttaatgaagcccaacctattaatgttttctttcgaggatcatgcctttggtgtcatatctaaagagttactgccaaacccaaggtcacctagatttcctcctatgtgatgttctaggggttttatagttttgttttacatttaggtctctgattgatcttgagtatgtctagatgtgaagggtatgtcaaggttcattttttttttacaaatggagtttgtttcagcatttgttgaaggctgtcctttctccattgaactgcctttgctcctttgccactgattttcaattcagtttaactccactgtggtgggggaggatgctgtgtgtgacttccgtccttgctaacatactgagactcacctggtgagccagctgtggtctaccttagcacatgggccacgagctcttgcaaagccgtgtgcttcagcagtgttaggtgaagcatcctctaaagaccgctcgcttgtgttggctgatgttcaaatctctgtccttacagatctcatgtctgtcagttacaaagtacggaaagcacccgttaaaattctgtttttatctcattctcttcaattctgccattttgcttcatgtattttgaagctgttatttagtgcatatacatttggggttgttatgtcttgataaatcgatcttatcattattgtctctttactcatttctggtaccgttccttgtcctaccgtctatgttgatattaaaaatatcaagagtctgaaactttacatcatagtgaacaaagaaaacctaatatgatgccagggaaaagatttcaggatgttcaaaatctgttcctgataaaaataatctgaattcaaaaatctttcatgactgatttttaatcacactgaggcaaatatccccctcagacagaggctgcaccggtacagctgccatctcctcttggtggtgtcctttgtcaagagcatgtcagggtgatgagtcatctgggacaggtcaccctcccagcaccgagaagccgacgggggaggaacagactcctctgcattgtgatccaattgtgaacaaaaagtcctcttcgtggaacaggaaaaatacactccctctaaacaatggattgaacacagatgtgatttctaaagaagactgaaggcagggatactgacactgaagtcctgcctgtgtaataacaccgaagagggcagggaatcgctgcgtcctgtgacttgaaggccactgtgaaggaaaacaatgcagtgaaagaaagttcctcctatgtggacattgtatcacgtttatttatcttcctggatatgcttatggcctttaaaacatattaaaataggctatgctattatctcttaaaatatctgttttccctcaggtaactggagacgcaccctgctactcctcacgtcactcttgttccctaaaccaggctgggcctcccactcgccccacaggcaggtgacgtatgacagccagaaaccccaaatctgcagttctccccaggatgaaacgaaacacagtgtgacaggcttctgataagggaatcaatgtctgtttattaaggcagatgctcataaaagtgactttcagtaacattttcagtataaaaatggatttacatttcatttctggaaaaccgttttgtacagtctgaccatggctaggagtcccagggacagcagcctctgctcagggcagactctgtgattcactgtctgtcctgctgctaccccacgtgggggagaacacgtgggctgagaaaaaaaaacagcatgtgcaaacctgacagatgtcaagggtcccaacacagttccttcagcgaaaataaagcccagttttaagatgtgcagggaagtgttgacactgaacaggcagctgaccaagccctgcagggctctgagcaggcaggcgagtcccaaggagagtcagtgacagcacatggggcaagggagctggacagaagaccccagagggtgcggcacctgggtgagagccctggactgcacaccaaggcagaggggtgcccctgaaggactctgggcaggcaatgacaggatctgagggtgtccagacgcagatctccactgcctgagggagagtgatcagccagggggagaggccagggactgctacctgcccagaaggcggcagggaggggaagagcagataaggaggtatagggtgtgccctgggcaaggcagcaggggtaacgaagctctcagtgactcctcccagtagccaggggagagcagtgacagtctcaggtggccctgagcatgtgagctgctcatccacatcaggcaaaggcaaagccaggacctgaacttcccaccccaagccctacatccatgcaagccagaccagactgggtcagaggctagaagggagctcacaggattgcctggggaagcctcggcccaaaacctggccctcgctccagcccagagcacccacctgggcatgagactggcggcagccgtaggggtgccctgggtatatgccgggctcccagggtgccatacctgccagccagcccagggagtggtgatgggctgggtgctggctgtccctgcacatagcagtgccccgcggcagtaactacaactgctgcctgcccctcacccctggttatgctcggcctcccctgtgcatttctgtgtccgtaagtgtcccctgtgcatttctgtgtccacaagactactataaaccctgtagacacctcacaaacagcattccacgcaggtgggttcatgtcccaggggcatggggctccctgctgcacagacttgggatgttccatgacagaccctgcatatgcaggcgagctcacaacccaggggtatgcggctccatgacaccaccccatactcaggcgagctcacgacccaggggcatgaggctccatgacaccaccccatacgcaggcaagctcacgacccaggggcatggggctccctgctgcacggcctcaggatgctccatgagcaacccccgcactgggctattcacggatgcacactacctgccattgtcacagggttgccctcgtgtccctcagcccagcagacaaaaggtgcaggagaagcctgcccagggccgaccccagcccagagcccactcgacactaaggaatcacacaggcacagctgctcctctcccaagaactcagctattggtcagaaaaaacctcctagcctcactaccttgaggccgtgcccagaggtggcagaaggcgctgtgcctcctcaggggtcacggctcctgtgcccccttcctcacccaagcccgacaagctactttcagaaatgaacctacagtaaaaatcaagagtctaagccacccaccctgtccccatccctgcctccagcctggcccccagattcacatctatgagatagaggttgaggggttggagcccaagacagggttatgggagggctccccaacccggccaggaccccttggcctcactggaacgcacagacggcacccagcaggtaggcatgttctcaggggtggccagcaagggctctctcagggtacagctgggagaagcggccgagggcccagatggggaagatgttcctgtagctcgtgtaggagatggcacaggacttgttgaagaccccagcaatgttttcctaaaagaacacagagaaataaacacaaaggcttcaccagtcagctgagggctagtccctgaactggagccctggctgttggcttggctggcttgtgggtgagtcagcctggaaagggctaattaagcaagagcataggaaagcaagtagtccatcccgcatcagtcatggcaccatcagcccagctcagactccccgccctgcagcaaaccctaagccagggtcaccagcccctcacaaccacatcagcttccaccaactcagcctcatcccaggggagggcggttggcctcacatgacctcatgacacccacaccacagggacttctggctcagtgaggggccactaggtcatctggagtgggagggtctgtcctgcagcaaaaaggcttcccgcccactggcttctcccatccagctcctcccccacccagagcatcacttgaaacaacagcaagatctggactttaggacccgaccacctgccacagacctgccaccaactgtggcattcactggcagaggtgacgcctcccaagtgtccaaagtaccccaaaaaggacacagagcagggggacgtggaaacagccatgcacgctggaggtcagtgctgggccttgtgcgctcaggtccctggcggcatacctgcggccagtcgccattggggagctgtttctcaagtagacaccggactcctctctcctgggcctcgatgtcaggatgcctggtggaagagaaggctgaaacacacccagcatgcatgcccccacagcatcatcctcaccctcacacagccgagcataagggcaaaccctggaatgctgcagtgagaatggatgggtctaaactgacgcccacaggccccgccaggtgcagccagcgcctcgggctcttgccacaccttcttcctaggctccctgagaagcggagccacagcaatgacaggctggggacacaggcctcctcaggcctgccctggtgttcccccctgaagaggacgccaagccttgttcccaactggcccactggtcctcatgggcctctggagacccacaggagctcacacttgcttgctggccaggataagacaccaagaaggatccagggctcagcgggcccagctcaactgtgggtccctgactgtcctgccctcaggggtcccccagaccctgctgctcctgctcaagcagacctgccctagcttttagggttttaggaagattccccaaatggccacaaacctaatagggcagcacagacgggatgttgcgggtgcatctgtatgtatgtgtgcacaggtgcctgtgcatgtgtacatgtgtgcatagacctgtatgtacatctgtctccatgtacgtatgtctgtgtggcacagatgcgatactgcgggtgcatctgcatatgtgtgcacaggtgcctgtgcatgtgtacatgtgtgcatagacctgtgtgtgcatctgtctccatgtacgtatgtctgtgtgtggcacagatgggatactgcgggtgcatctgcatgtgtgtacacaggtgcctgtgcatgtgtacatgtgtgcatagacctgtgtgtacatctgtctccatgtacgtatgtctgtgtgtggcacagatgggatactgcgggtgcatctgcatatgtgtgcacaggtgcctgtgcatgtgtacatgtgtgcatagacctgtatgtgcatctgtctccatgtacgtatgtctgtgtatggcacagatgggatactgcgggtgcatctgcatgtgtgtacacaggtgcctgtgcatgtgtacatgtgtgcatagacctgtatgtgcatctgtctccatgtacgtatgtctgtgtgtggcacagatgggatactgtgggtgcatctgcatgtgtgtacacaggtgcctgtgcatgcatacgtgtgtgcatagacctgtgtgtgcatctgtcttcatgtacctatgtctgtgtgtggcacagatgggatgctgtgggtgtatctgcatgtgtgtacataggtgcctgtgcatgcgtatgtgtgtgcacagacctgtgtgtgcatgtgtctccatgtacctacgtctgtgtgtgtcacagatggcatgctgtgggtgtatctgcatgtgtgtacacacgtgcctgtgcatgcgtatgtatgtgtgtgcacagacatgtgtgtgcatctgtctccatgtacctacgtctgtgtgtgtcacagatggtatgctgtgggtgtatctgcgtgtgtgtacacaggtgcctgtgcatgcgtatgtatgtgtgtgcacagacctgtgtgtgcatctgtctccatgtacctacgtctgtgtgtggcacagatgggatcctgtgggtgcatctgtacgtgtgtgtacacaggtgcctgtgcatgcgtatgtgtgtgcatagacctgtgtgtgcatctgtctccatgtacctatgtctgtgtgtggcacagatgggatgctgtgggtgtatctgcatgtgtgtacacaggtgcctgtgcatgcgtatgtatgtgtgtgcacagacctgtgtgtgcatctgtctccatgtacctacgtctgtgtgtggcacagatgggatcctgtgggtgcatctgtacgtgtgtgtacacaggtgcctgtgcatgcatacgtgtgtgcacagacctgtgtgtgcatctgtctccatgtacctatgtcagtgtgtggcacagatgggatgctgtgggtgcatctgtatgtgtgtggacacaggtgcctgtgtgggcatgcgtacgtgtgtgcataggcctgtgtgtgcatctgtctccatgtacatctgtgtgtgcacatcagtgtgtacactgatgcctgcctgcatgcgtctgcgtgtgtgtgcacctggcacatatgtggctcagcaccagctgtgaacacagtagggccacagagagcagctgctgtgaccgtcatcactaccacaccaggaagcagcatcctcatcgcagcccacctcgctgtttccatgggtccctgatgtgcttgctcttccactgacatggctaatggtgggtggttcacttctaagaggcgagcctctctgcagggccccacttggtcagagcagcccacgttcttgccccaggaaccaggcatgtggctcttgtaggtgtctgttcccagagtggcagctgacctggcccacaggcctcccctcctctctacattcactcagcccaggccaccggctcacagctgagtgtccctcctctacccaaacccaaggctcagggacggtcccgtcgtccccaccgaacggccatcagccccatcatggcccagcatgtgttatggatctgggactgggcactctgcaaataacgccgctcctcgcaggactcaaagtcctccccccagcctccgtctgccatctgccgggacagcaggaagtcacaggcccgggagacctctgcacaggcagtcctgcaaagaccagagacaggagacaccatcacaccaaggaaggtcccagacccctggcttctcaccccagcaggctgccttggggtacggggaggagcctgcacgatggggccaccctacctaagggccatgggccactactgaaacccgagcttgacttttgcagatgtgaactgggaacagatactcctgcctcccagagtcgctgggaagacaaagggacatgcgagtaccgaggatggcctcacggacgcgtcaggctgagtgaggtctgcagtgcttgggagcagcgtctcacaagctgcactcagccaagcacggtgctccccacctctaaacatccacacggcagactctgggagacagtggggcagctggagacagggctgggagagagtccggcggctggagacacggctgggaccggagatctcctgccttctaacccgctccagcgaggccgtggaccctaatcttcctactcagggttgggaggcatctgtatgcctggaggggccggagaccagaagcgtccctccagcatacatgtcaggaagctccagagagctgtgggaccagggaaacatcttcatttcaaccggggatcttatctcactgtttaaaaatattaaaaacaggccaggcacattggctcatgcctgtaaccccagcactttggaaggccgaggtaggaagactgcttgagcccaaaccagtgtgagcaacacagcaagactccatctctacataaaagttttaaaagattagcccggggtggtggcgtgcacctgtgatcccagctactcgggaggatcgcttgagcccacgagtttgagactgcagtgagctaggatcatgccactgcatgtcagcccggttgacagagcgagactccgtctcaaaaacaaacaaacaaacaaacaaaccctaaaaccaaatgtcaaagcaaaaaacactcatgacagagcattgggttgagaacccccacccaccagaggacaggcactcactcacccatctcggtaggtctgccccatacaggcgaaggcctccaggccaaaccaggtgccgtaggtgaagcaaactccccaggagctggagggaaacagggagagcctcagcccttccaccctgttcacagccggtgtgtgaaacaacacgcattctgcaacaatcacacgtgccccagccagcccaccaactccagtgcctcaggcattaaggccgtggaagacagcagctctgtctgctggaccctaagagcaagcagaaagggtggagggaatagccacgctcaggctacagcgcgctcccagcagcccggctgcgcccagcaacgtactgagcaatttccaccggggcaaaggccacgcatgccacaaaggaacgaggtcccccagaagtcacgggctggcagctcacttccagaaacttctggtgtagcaacaacatacaagccaacatttatgaacgcagtgtgtgagagcagaaacctgtggatcccgtgcatctctgcactcacgagtggaggctcactcacccttcccaggagccatcggccctctgctgccgccgacagaactctaagccctgcgtgagggtctccctggaacacgagattggtccagtgaacattctggtaaaacagcagtttacctatcccaattccatcctttccagggtctcaaaagaatgagaatggtctcccttaaaaaccacataaaaataaacagtttacacagaccgatgagggttttaaaaagaagcaaccacaggacaccagagcgggaagcggattggcagagtctgagaaagggacgtgaggggaaagcaaggccttgggaagcccctgcagacacagctgcaaacaggagcagcatccctgagatccagtgacccaggcttgagcaaacccaacaaagtgaactaaataaaaacaggaaaaaatcaattagagagaaaacaatagatttagaagacaagacccatcctacatctaactgatatttccaaaaaataaccagttctctgaaaaggccagagcgaagtgtctactccagtgtcaccctgtgggacgtgggacttgtctttaaccagcagatcacggcagggttgatgggtgcgggtcctgggaccgaggtctgtgtgaccgcgactcccatggtgctagcagactccctctaccaactctcccttctcgcttttgtgaagatgccatctagagaggccccgcagcagacggtagtcggcagcttccagctgaggaatgggatcgtgccgaggaccctgtgtgctcagaggcagatccttcctcactggaagctcaggcgagaccccggtcctggctaacaccctgactgaagcccggagagaccctgaggcagaggacgacctgcgaggccgcgcctggacttctgacacacagaaacggtgaagtaatcaatgtgtgttgttctaagccactaggtttgtactaatattgttactcggcaacaggtaacaaatacaaatagtcaaagtacaaattagtaatattagcaataaaaagatagaactacagatatggtgagaaatgacaagaaagttttatgtattacatttgcaaacttagagaaaatatctacaaattagaaagattaacttatcaaaactggctcaatcaagaaatagagaacctaaacagtcctaaaactactaaaaaaatgagtcaaaatgtaaacttttcccagaaaaaaaactctaggcctaggaattttataaatgaatgcaactaaattatcagacacactcattctaatctcacacaaactcttccagagaacagaaaggaggaacactctctagctcattctaggaacccagagaaataagatatggaaaagtgaaaatttcaggctcactcatgaacacagatgcaaaactccaaattaaaactgagaaactgctgccgggcgcagtggctcacgccttgtaatcccagcactttgggagatcgaggtgggcagatcacgaggtcaggagattgagaccaccctggctaacatggtgaaaccccgtctctactaaaaatacaaaaaattagctgggcatgatgacaggcgcctgtagtcccagctactcgggaggctgaggcaggagaatggcgtgaatccgggaggcagagcttgcggtgagctgagattgtgccactggactccagcctgggagacagagactctgtctcaaaaaaaaaaaacaaaaaacaaaaaacaactgagaaactgaatactgtcttaaatatagaccaatactaaggtcgatctcagaaatacaaaggtgtcttaacattagaaaaatccataataatcctctaaattaacaaaggacacaaatatataatcatctcaaagcagacgggagtttgagaccagcctgggcaacagagcaagatcccatctctacaaaaaaattgaaaaattagctgaacgtagtggcacatgcctgtggtcctagctgctcaggaggctgagacaggaggattccttaagcccaggagtttgaggctgcagtgagctatgatggcaccactgcactctgcctgggcaacagagtaagactgcgtcccttaaaaaaaaaaaaaaagggtcagttgttttcctaccagcaatgaacaattagattttgacatttaaaacacaacgccatttacattagcaccaaaaaaatgaaatccttaggtataaacaacaaaatatgtacaagatctatatatgatgaaaactacaaaattctgatgaaagaaataaaagatctttccaacttgagctacagattcaatgtaatcccaatcaaagtctcagcaagttattttgtaaactattgacaaactgactctaaaatgtatatggagagggaaaaaacctagaatagtcaaaacactattgaagagaacactgaagtgagaacaggggcggtaactgactgcaaggcctactacagagctacaggaaccaagacagtgtgggattgctgagaagaacaaacagatcaatgcaatggaacagagagctcagaaatagacccatgcaaatgcagtcaactgattttttacaaagaaacaaaggcaacaaaatgacccaaaaagagtcttcttgacagatggtaccaaaacaactggacatccacatgcaaaaaaaaaaaaaaaaaaaaaaatctagacacaaaccataaacccttcacaaaagttaactcaaaatgaatcatggacctagatgtaaaatgcaaaactttaaaaatcctagaatataacacaggaaaaaatctaggtacccttgggcttggcagtaactttttagatacaacaccaaaaacatgatacatgaaagagaacattgataagctggacttccttgaaatgaaaactggctctgcaaaagatactgttaatagaatgaaaagacaagacacaggcagaaaatatttgcgaaagacatatctgataaaggactggcagccaaaatatatgaagaactaaaactcaacaataagaaaatttaatttaaaaatgagccaaagactttaaaggacacatcactgaaaaagatacacagatggcaaataactatatgacaagattttaacataatgtcattagggaattgcaaattgaaacaaggagataccactacacacctcttagaaaggctaaaacccaaaacacaacagcaaatgctggtgaggatgtggagcaacaaaacgctcatcattgctggtggaaacgcaaatggtgcagccacttaagatacagtttggcagcttcttacagaactaaacacactcttaccataggatcccgcaatcatgcttcttggcatttacccaaatgagctgaaaacttatgtgcacgctaacattgatagcaactttattcatagttgccaaaacttggaagcaagcaagacattcaccttagtaggtgaatgaataaactgtggtacatccagacaatggaatattattcagcactaaaaagaaatgtgctattgagccatagaaagagactcaggaatcttaaatgcttcttactaagtgaaataggtcagtctgaaaaggcaaaactatggagacagtaaaaatatcagtgtttgctactaaggggttctggaggcggggacagcgcagaggactccggggcagtgagatcctgtgtgacactgcagtggtgggcacgtgcatcacacatctgtgaaaccacagaatgaacaacatgaagaggaagctgaatgtaaacaatggactctggacgataataatttatgaatgttgcaaacgcaccacttgaatgcaagatgttagtactggggaaacttgagggaaggtgcgaggagttagcggctttatgggaacactgcatcttccactcaaattttctgtaaatttaaagctgctataaaagataaagtacataaatttttttaaaagtttagcaaaattgtctagctatgagatcagtatcaaaatcaattgcgtaagaatctatgcgtccacagtgataaataagtaaataaacagaggcaaaggaaaagcttttggaagaacaccaactaatacatatggaaggaatgataattttgtaagcattatgcaaataattgattcaggcaagaatcatcatcaaatgctaacactaacaggtataagtatgatgagaaataggacgtttacatagtctaaaactgtctccccacaaagaaaaaaaaagcaacttcatagcggagaaactaagtacagcggtcatcaccttaatcaagggatcaaagttggtgtgtgcttcctggtaaggtgcaggagaaggccccatttcttctgcaatcttcctgacaaaaatgtagtttcataacctgaatctaatcacgagacaccagaaaaaaaaaaacactgaggatattctacaaaataacttgtggaacaattcaaaaatgacaaagtcatcaaacacaaggaaagattaaggaattattccaggttaaaagggtgtcaatgtgataactaaatgcaacccatgtgcacagtgagaagggtaaggaaaacagaaaaagaaaagaaaaataattaaaaataaacaaatgcaacccatgatattggattaaagcttgagggaagattttgccataaaggacattattggaacaattaggcctgcagattagtatttcatcaacattaacattctgacttacacttgcacaaaagaatacacctgctaagaaatactcaggcagttaggggtacacatcctatctgcaaattcctttccaatggttcaagaaagaatgggcctggatcatgtgggaagacaggtaatgaagccctgagggtagagcctggatcatgtgggaggacaggtcatgaagccctgagggtagagcctggatcacgtgggaggacaggtcatgaagtcctcagggtagagcctggatcatgtgggaggaagggtcatgaagccctgagggtagagcctggatcacgtgggaggacaggtcatgaagccctgagggtagagcctggatcacgtgggaggacaggtcatgaagccctgagggtagagcctggatcacgtgggaggacaggtcatgaagccctgagggtagagcctggatcatgtgggaggacaggtcatgaagccctgagggtagagcctggatcacgtgggaggacaggtcatgaagccctgagggtagagcctggatcacgtgggaggacaggtcatgaagccctgagggtagagcctggatcacgtgggaggacaggtcatgaagccctgagggtagagcctggatcacgtgggaggacaggtcatgaagccctgagggtagagcctggatcatgtgggaggacaggtcatgaagccctgagggtagagcctggatcatgtgggaggacaggtcatgaagccctcagggtagggtgccacccactaaagaattctagtcagagtaaacaggagcacttttcagtatttttgtaacttttctataaatttgtgaatttaagggagaatttaagtctgtctagtaaaatagaatattccatataaatagtgttaaagtaacttgcaactccaaactgtatctcaaaaactctccaggtaagtttaaaatcttttttttttttttgagacggtgtcttgcactctcgcctaggctggagtgcagtggcaccatctcggctcactgcaagctccacctcccgggttcacgccattctcctgcctcagcctcccgagtagctgggactacaagcgcccgccaccacgcccggctaatttttgtatttttagtagacaaggtttcaccgtgttagccaggatggtctcgatctcctgaccttgtgatccacccgcctcggcctcccaaagtgctgggattacaggcgtcagccactgcgcccggcaagtttaaaatcttaatataggccgggcgcggtggctcacgcctgtaatcccagcactttgggaggccgaggcgggcggatcacgaggtcaggagatcgagaccatcctggctaaaacggtgaaaccccgtctctactaaaaatacaaaaaattagccgggcgtagtggcgggcgcctgtagtcccagctacttgggaggctgaggcaggagaatggcgtgaacccgggaggcggagcttgcagtgagccgagatcccgccactgcactccagcctgggcgacagagcgagactccgtctcaaaaaaaaaaaaaataaataaaataaaatcttaatataaaaatcacactaatatatttaaccatttaaaagttaaaaacttatgttcatactccctaaagagataaaaagaacaaagaaattgaggggaaaatatctgtaacataatacacaaatacttactgtgcttaaaaatgaaagaaaaaacttcctggtgaaaattttaaaaatggctgggtgtggtggctcactctgtaatcccagcatttggggaggccgaggtgggaggattgcttgagcccagcagttcaagaccagcctgagcaacatttaaaaaatacaaaacatttaaaaaattagccacaggtgatggtatgcacctgtagtcccagctactcaggaggctgaggtgggaggattgcttgagcccggaagtttgagactgtggtgagccatgattttgctactgcactccagcctaggtaacagagtgagaccctgcttcaaacaaataaacaaaaaaagaatgttctagcttggaagtcaccaaagaaatgcagaggaagcccgcgattaagtcaccattgctcccctgcgggccacatccgggactcattgttctacacagtgacaacaactgacatgtgcttccctgtggcatctcacacaatcccaccactctgtgaggctgtactgttgcccactcaggcagggagagagatgagcagagaagagaagtcaccaggccaggtcagacagccagaaggggcagggatgggggctgacccaggcaggtggaccccaagccatgtggctctagggaataataatggtcatgaataaatatttaacaagaaaataccagttaaggttaaaatggggaaaagctaaaaaacaacaaggaaaactgaaaaataacccagaggctactgagtaaaatgacacaacacctgtgccattactgctcgtgctggaggagcgcgctcaatggtggggcttttagaaacctcaccaggcacaaagtgggccaggcgtgaaaggggcagcaagccgccatggaaatgtggagaccaaacagcaacagcagattctccttcaggggcgaggaggggcgacttagcttcttctttgcgcttctctgtattttgcaagtcttgtttgcaaagaacctgctttacttttattacagtgatttttaaaagatgatctattttttaaaaggccaattctctaaatgtggctgaggacaactcacgcccacctcatgccgcagagcagcacatggccgagggccacgccaggccgacagaagaccctggacacagtgccctcctagctgcacctgtgaagcacaagaaaacccctgctccatccacggcttccaaaaaaaccacaccagaacattctcagattgtaaatgaagcagcatactcccacataactcatgggccagagaagaacagtagaaacagaaaacacttttagtatctgtgctaccacagcaagcaccagaacacacatttaactgaatgatatctcaaaactcatttatagcctcaaattcatatttcaataaaagcctgaaaatcaaatatctaagtattcaagttagaaaaataaaggagaaagaaaatagcaaaggccagtgtggtggctcacacctgtaatcccagcactctgggaggccaaggaaggtggatcacctgaggtcaggagttcaagaccagcttggacaacatggtaaaaccctgtctctaataaaaataccaaaaaattggccagtcatggtggtcagcacctgtagtcccagctactcgggaggctgaggcaggagaatcgcttgaaccccggaaacggaggttgcagtgaactgagatcacgccactgctccccaacctcagcaacagagcaagactccatctcaaaaaaattaagaaagaaagaaaataacaaacaatagaaattgatgaaaccaaaaataaagtctctttaaaaacagaatcaaagactaagattttttttttttcaaaagatcagtataagattctcagaaggaagaggaggatgtcagcgttgggctcagagccatctaagaggacactgaacaactttgcatgaatcagtgtaaagctgagtggaaatgggaagactccccagactgatacaaaaatggaaaatctgctcagtcctataaactattaaagaaattacaccgcactccagcctgagtgagagagctagaacccatctcaaaaaaaaaagaaagaaagaaagaaagaaagaaattgaacttctaatttaaaaactttcctcaaagaaatctccaggcccaactggcatttccggtaatttttcccaaacatttaaggcagaaatattatgaatattacataaattcttccaaagagtattttaaaagcattttccaactgcttttctaagtccagcatcatcttaacaggaaaacctgacaaaaacattataaagaaaaaaaaattatagaccagcgtctcttgtaaccagagttgctaaaatcctaacaaaatattcttcaaattgaatctagcaatatataaaaaggacagtgcattgtgaccaaggtgagtctacaccaggttgaacaaaagtaaaaaaatgtaatcgtgataggataaagaagaacctacaaaaatcacataccctataacgtaccctctaacacagcaatgccactcctaggtacgtgaccatgagaaatgggtacccaggtgcccccaaaagataagtacaagagtgttcacagtagatgcttcataataacccagactgaaatcctcccaggtgctgagaacaggcagctggatagcgcggcatctgtgttcaaccgaaggcccgagggagagaacgctgctgttacccgagccacctgactaaccgcgagcaggagagcaggagagcaggagaaggcaacacgaattccacacctcaggagtccacctagacaagatccaaagcgagcaacagacacccacgacctggcaggcatgtgggcggccccgtcatggggcgggccgagggctctggtggtgtcaccatgtctaatgctggcactgttcgcttcctgtttgcttcaagaagaccaacctgtacacttttctgaatacttgctacccttcaacaggaaaggttacttaaaaaccgtttctgggacaccggtggagtcaggtatgtgatgtcttcttaacattattaaaagagagagaaaatccatttttgtatcataactgtgctattctgagcccctaacagatattttgtatgctttagggcatatgactggattccacaacatccgaagcctcttgcatgtttccatgagtttcgcttctgagatgggccaccagggccgtgtcacagaatgatgcgtctgggtcttggcccccgacttggcagcgcccacactgaatggctgagaccctccttaccggatctccgctgccctgtgctccgggaaacgcttgtggaaatacttaagcgcctgcatcacggctgaggtgcactccacataggtgtagtcaatcatgatgtcccctgggaaagggagggaagaaccaagtgttgggtttcaccctggctgcccaggctctgcagctcaggcaaagccacaacaagcaagagtgttgcagtgagcccgggcccggacgctgcctccctgaccaacctccagagcaaacgccggctggtccaggacacacacctgtgctacctgagagcgaagatgaggggaacacagcagaaagctgcgaccccaccccaaaaagccatgtgtgatgtggaggggaccaggaaggcgggtatgtgaggtgcccagaggtggaccagggctgagatcctcccccaagaccagtacggtggcaaccatgcacacacagcagcctactgcccatggcatgggtccccacagtccccacagtccccaaagacacctccctgcaggcgctctggatacacagcagcctccacagaacacaagccctgtggactgagcaggaaccagcccaggctgtggatctcactggaaccctccactgtcccctaggtctgacctgatgccctcctatccacaacacaaggatcctgccaccccgggggatggaggagcgcagaacagcctgggctgagggagggctccagacagatctgccggtgaacctgggcccttgcagcctcgggcaagggggaaaagctggcccccaggtttgtgtaccacagtgctagccagccccgggtttgcgcgccgcagtgctggccgaccactcaccgaagacctccgaggggttcagcagctccagcaagtgccccccacgcttggtctcataggtggcgaaccctccatctggatttctcatgttcagcagctgaaatcacagagagcaccctagaactcgcccatgtgctgagcacacacaggcgcccagggcacagcggaactctctagaggcaacactagggctgacaaccgatggggcaggaacagggggcggagagctgatttccacgttaaccaagccctcgggtgccccaagcagcagctgcaacctcatctgtcagggcctccatgcacagccaccagggaacatgcccccacacgtgcccatgacttagaaaccaagtctgtgctgccagaaaagggcagggtctccactgggaaacacacacaaaagccagatgtgctgaaaggatgtggcaccaaaaccaacaccaacaaattccctcttcagacacccagtggaaaccaccagagagaaaccttgggggccacgccggctcccccaagtatcggtggctgggctggacaccagctccgcagtgcagggccctgtgcacacagcccagcaaggcccctaggggtccagccagagctcacagttctccacatatagacaccatccaaggacaagctcctacggcctggccggactgtgtgctgggctggagcccacaggagtggaagtgagcacgcagctcatctgcaggacacgaggtatggacggggctgctgggaccacagccttaccacagccacagcatcgcagagccgttctctggggatgtgctcggtgacatggggacacttctcctgcaggagcagcacagccttcaaggcctcagccgtgcagtcagaaacgatccagccgcagtccagcgtactgaaggagaagccaccctgcagagcacaagccatgactccaggctgggggtgtccacaccccagttctcagaacctccccacagccgcacgcatccctccccaccacagagcacccggtcagggcaggggcccagccaccaaaggtgtgggtgcagccagggccccaagctgggtacatccagacagacctccagcttccagcacagggaccctcaggggtgcagctcacaccctcaacacctgcagatctcacgacggacaggatggggcccaggtgccccccacccccattgtaaacaggcagcagcagctgggtccatgcctaatttcacagtctgcacctgtggtcacagcccacaccggctctgaggtctacttctttcctctgccttccccggacacactggctacacttcggctgtccttctgaagcctgtgtgtgccgtgaccactggaactgctctgaggcacggctgtgtgtgcaagccaactgtgcctccatgtgccaggcagctcagcaacatgaagcatgagcccctaggccaggcatccaccacagcaggacacccaaaaacgccaagggaggagtcccccagggaggagcccccccttcagagggaaggacccaccctgctgagggcggcctcccctgggggacgggacagggatggggctggctcccgcataccttgcgcatctggcggtagtacttctggtagtcgggagggttatctgggacctgggcagcatcgagggcaaatgtggaagcagagaacacgtcaccacgggacgtccccatctgggacatcgctgagacagactgggcaggactggagaggcagaacgtgcctgggagcttactctgccggccacagccaccactggtgctgcgaggcgcgcgagggcctgcacctgtttagctcaccacccacagctgctgggaaacgtgactggccagcgagggctcaaaccagcccagacgggactgggagtcagcacctgactcccctgtgatctccccaccggccagaaggcagggagggggcccaggtctctgcgggtgtgctctgtgccaggcgcccccaatgcctcctgaacaacctcagcttctggctgcctctctcacctcagtgagaagggaagaggcctggagtgccgtagggttcagtcagcctccccaagtccccatcacccagagcaagtcctgggcaggaggcaggagcaggagcaggccaccattgggccaggcacagcaggacaatgcccctcctctgcttgagcccaagatgggtgccagccttggccacacagaggccaggaagacccagaagccctgcagaacaatgtcctagtgagagctgaagggagggagacggggctggggggcagcggttccaggcagagggacactggctgaggccgtggccgggacagggtgtgggagacacgggaggttggggcgcatgtatgggatgactgtggctgcagactggggtgcaggcacgtgtgagagacactgaggtcaaactatgggctcgggcagggtctgtgggcagctgatctggcaggagggaccggggcttttgctgcaaacagtctcaggagggcaagtccacaggctggcgtcacctccatgggcagaaggtgcttcagagacatggaggtgccgtgtaggctgtgcagctcagggtacacagcccctgcccgtgcctggcccttgcacacagtggctccaacatgagcaggacgcagaaactgccagcacccccagcaccctgcaggcctcagagagctgccccaggtgaggccagcccgaggaggaccggtggatggagcaggggctagggaggggatgggagggtgggggtgacctgaaacaccagtgcaggaaatagggcagggtggaggtgaggtgggcacttctgcctgcaggagctcccagccctgatccccctcttcagccccctcagagccccaggcaccggcctcacctgtgagagcctcaggaactcatgagccttctgcaggcaggacgaaaactcgggcctgtggtgcccgcccgcctggaagagacagcaggacagagaggctcagctgcccttgcacggccagcatggctgcgctggtttcccgatggtcctggccacatcctgccccaaccggggaccagaatcaaaccagcagacatctccagagagtgccagggtctcctgctgcacttacctttaaagacaaaacagcaaaagtccatgagatatgactgaagatggaagggcgcaggagaccatttatggatgccagcacccccctgcctggccagcatccatgcccagagggtctccagcaccctgtgtaggcaggccctttgcgtggcccagccctcagggctctccagaaacaccttcagaatcccacctacctcattcccaccggcataaaaatccactctcgtttttctccagtactggctcgagaatgcccataacaaacagttccagttctttttttttttttttttttttgagacggagcctctctctgtcacccaggctggagtgcagtggcacaatctcggctcgctgcaccctccacttcccgggttcaagcaattctctgcctcagcctcccaagtagctgggattacaggtgcccgccaccacgcttggctaatttttgtgtacttttagtagagacggggtttcaccatcttggccaggctggtcttgaactcctgacctcgtgatccaccctcctcggcctcccaaagtgctgggattacaggtgtgagccaccgtgcctggcccaagcagttccagttctaagaagagcctggagtcccactcctgcctgcactctcagaaacagccttcaccagactccccttctcacacagcctccagcccctgccctcccaaggcccccgacccagcccaacacccaaggctgctggccaaggccgccccctccacagcacgaccctctgaagccagaggccagagcccaggtcactggaagtatcgaggagtggcaagtgtgtggccagcagtgctgccctcaggtggatgcgtgggctcacgtgcacaggaaggtcagctgaggctgagaaaagagaaggagccacgaacctcaagcagagcctggatggcgaatgcggtgtcccagatctgtgagccgttggtgccctacacacaaaggatggtgttacagcagcagatgcagcccctcccactcccagccactgcctccaggatccaatgggcgcctgagggccaggtgtgggggctcccacccagccaacgctcagcctcaggctctgagccctgggcacccctcatggctgacaagggcctcagagaaggctgagccctgcaggcagacacacgtcggggagactcagggagccctccctttcttcatgggccaccaggcaggacagtgtccctctgaggacacttctaggactggacgatcccttagaggctccagcacctacacatagagcatccagctgctctcacccaatgacagtggcgcacctcagtcatggtgatgcctggaaatgaccccatttcttttttttttgagatgaagtctcgctctgttgcccaggctggagtgcagtggcgtgatctcagctcgctgcaagctccgcctcctgggttcacgccattctcctgcctcagcctccggagtagctgggattacaggctcctgccagcacacccagctaattttttttgtattttttagtagcatcggggtttcaccatgttagccaggatggtctctatctcctgaccttgtgatccgcccaccttggcctcccaaagtgtagggattacaggcgtgagccaccgcacctggccaatgatccccatttctgagtacacctggaggtgatgggaattctgcacagggctgggaaggctccacctcaaatctcaccccgagctgggctcacaggtacacagcctggtctcagttcaaagggccggtgaccaaaccctagtgagacagagctgggcactgaccagacagacatggggactgggcagggggtggtgtgtggcagaggcatccagacatcgtgcactggagggacaaggcagggaccaccagaaaagcattctcgccaaagaaacacaatgggatcgagcctcagggcctggccagtttacaaaaactcagggaacataagaagcaaccagtcagatctgcaatgtgaagcccttcaggaacaaaccttccaggaggagaaaagagaccacgagagacggctggactaacaggagctcaaagaccaacaactgaaggcctgtgcaggcctggcctgaatcctgattcacaaacaccagccacaacgtgaggactacactcaggaaccgtcataagtttgttgggtgtgacaacctcagagcaattttgtcaaaacacagacgccctcatcagcttgaggtgcactgatgagtcggtgctgagggagcgctgggcagggaggggcagggaggggacagggaggggcagggaggccagggcctgctctagggcttgctactcacctccactttacatgtgttttgaaaaccttttcacaaaacacggacagtgtccggggagcctctggggagctcaaggccagctgggtaaaagctcgtggctgggggcacctggcaccaagggtagccctggggcgggcagtgctgggcccacgtgtatccatcccaaatgtgacacccaggacacctctggagactccacatttccacactgaatcaggtgggggacagaagacaggcaccgcagggcgtaaccctccttagaccacaagacacagggcaacactgtctgggcttctgacacgcacagaggggcgcaggctcagcccagtcggacaggactgcggtctacagggcccccagagccaggacaggaccagggtcagccaggatccaccggcctcccctctccttgtgcttggtgcccctcatgactgggttccagcccactcaggccaagtccacggggagctcccaggcccggccacacgccaccacggtcctccaggctcctgtcctgtccacccaggacctttaagaagaagccccttaaattaagagtgcatggaggagaagcccccactaaccagagccacctcctgccacagtaacaagatgagagcttctgcagctctgggtctgtcgttacacagctgagcccactcagatcatcagggcaaaaagcaaacaggacagctgcagacagacatcgagaacggtgggcacccacacagagaccaacagcacccacagggacacggccagaggcctcaactgactcagcctctagtcgcacgctgccgggacctggtccaggaggagttatttctgaaccccaaaggaaaaataataaaggggagacatgattgcaaaggaagcatgcagccgcagtcccgcagcccttacctgcattttcatgccgtcaaggcccatcctgtgaggagaaaaaagcccaagtcaggtgcaaggagaaagctggaagcccagctgctacccagaccctgcactcaggagggtcccagagaggccgtctgtcccctcccgaggcctggcactggcctggatgccaccccagctgggctgctgggctcctgggggtgagggccacactctatggaaaacaggacacactcacccagaagggccacacccaaggcaaggggcagcgggaggctccccgaccccaggctgtgccagccctgccgccctcgtgcagtgctgaggcaccagaggaagaggcctgtacagcggaagcttcccaccatgggacggctctctgccctccatgacaggggccccacctccagggcacagtccatggctgacaagctccccttgtccacaggcctcctgatgccaacctgaacctgccctgctacctaccacccccttcctcactctaccttctgggaacaccccacacttccactgggtggcaaatcttccaattcaaagacaaccctcagtggcttccacaagccctgacactgctggttcctggaggtattccctggcagtattcccagatggcaccgtgggggccccctcactgggatgcagctggggctcagatccagtcttcgtgagaggccccgccagcatatcccagccacactcaccagagatagtccgggattctggagacatgctcctggaaggcagtggaggcgggcccgtccacataccagcgcacaagcatgttgatggttttcgagatctgcaggagagacagccctgtcaaggctccgctccagacccacagcagcctccagggacaaggtctcgtccagatccacagcagcccccaggcataaagtgccgtgcagatcactcagggccaggacaggggccttctgctctaacaggcatttcctgagcgaggatgggcaacaactgtgtccccaggacccaactcagacagaggcagtgtcggccaaggccacagcctgccttaggctgtgagaaggagcagcactccaccagggagaagcgaggggttccaggagaaaccagaggggcatgggctaccaggtgccttagagacaacacaggggacagaggacagggcctgaggggcccaggaagagatgcgaagacaggactgtagcagtagggaccacttgccccccttcttcctcagaacagaatgttccagaggcccccaactttttacttatgcatctcacaagtcaagatccaattgcaagcatgtttctaatgcgtttagtacagatgtgctctatatgggattaaaccaaaacccacaaagaaccacatcactgctgagcaaaaaacaagggacccgctgcagggtcagtcaggatttgtgatccactgaggtggcatgaggcccagaaaatccgagatgcagtgtcagggtgggactcagtggcccagtgccacctgggtatgtccagagaatgcctaagccaacccactacaccgcagcagctacgcgcacagctatggcagcagctgcagcacagcccagggcctgctgactctgtcaggaggcggccacgcaccagcacagcccgggaattgcaccctctaaggtcactgaactggccacacctggacccctgcaggccccacagaggtgagagctccaagtccctagctaggcaggaggaatcaggagtggcacctgctactcccacccaccctgggcatgtctaaaccccacgggagaatggcgaatgatgaactgtttggggagagggaaccaagtgaggaaaaagcacccctcccagctagccagctagccagcaagatctcagggaggggcctctaggagagtgtccaggcacactgaggacaagagccggtgggggacggaagcggggggtcgagtgtggtggggcaacttcactgagctgggcgtgcaggggtccaggacagaagccctcagacacttgtgcgatcagagggccacctcccaaatggaggtacaccaggctccaggaaaccccactcccagctcacagcccggcctctaggacttcactttcggacctcaacccccaggggctgcagtcagaggccgggcaggggcactgaccgggccgatgctgatgctcttggtgaatcggtcgtcggccacaatgtgttcatacagcttctgcacggcccgctgccgcaggtgggcactgtggtggtgctcatacaggttgaggagcgctacaggggacaggggtcagtggatgccagacaccatgacactggcctcagcctggagctccatgcactgcaacgcctggacttgcccttcccagggtttccccctcccacccacccccaggcctggtctctgagctcctccttccctgcccaggaggggctgccccacacctcctaccacacacccttgcacagggtggactcctgagagtagaagaccagctggttctcagggtggaggggcagggcgatgagatcccgccccctggggcctggcacagaggaggtggcccagtgccgctggcaggggatgagtgcgtgaatgagtgggcgacaccctgaccctgaccctgggctgccctgccggcccctcaggaggcgctcaccatataccacgcggagcagccagctgtgcggcgtgtacagctcgtcgggggccacgttgttcctctgcgccagccagtcaatgctggcgaagtcctccacatagagctcctggtgggggcagtgtctgagccttggggcctgggagcacctggtaggcctggctcaaaccaggaggggtggcctcccaccatccgccctcagggccctgggccagtcccttcctgggtgggggtccctccagcaactgaccccgaggccacatgaaggccccctatgggaggaccgctctgaggagctccccagctccatgagtcccaggtctgcccagaagctcatttcctccctctgcccctccttcttccccatggcaggcctgataaacatcctgcacctcaaacctcgcctcaggcctgcttccagaggacacagtgcacatctgcctcctgcatcccttgagtcctggaagtcccccccaggaaccctgggctacagctactgactgtcccatagcacaagtcccctctgggcagagcttgctcactgtttattataggatggaggaaggtggaggctctgctccacagggctctccgctccacagggccaccaggtgagtggacaggtgtggttagattccagaagccccaggccctgtgggtcccagccccagaggccttcactttgttccctgatgaggtcctacctggcggaggctctggaccagcgggtcttccgcggcactcagccgaacggcgtagcagtagctcatgggcaggtacacctgccggcagtggcaccagagtgtggaggggtgtgccggtgcccagtcaggaaacagcctggggcaacagcaggagtcagtgggagaccccaagactcaagcctgccccctccgccagcatccataccttgggccctttcaagcacgaacactggtggatggctattccccaccacgtcagtgcatctgcgggcatttcccaaccgtgctcctgaggggcacagttgaaccataggtgcaccctctgaggagctgcacctcctagttcggtcagcattttgcatcctaaaaccaggtgatggagctcctaaatgcttaggattgtccgtgggtttcttagctacaacaaacgtaccttggtaacataaaacatcaacaatggggatatggtgtgagggccccagggaacactcttggctatctttgcaacttttccagaaattggaaactactccaaaatttaaagtttacttttaaaagtgtatttaagaaactttaggaggggcacggtggctcacgcctgtaaccctagcactttgggaggccgaggctggtggatcacttgaggtcaggagtttgagaccagcctgaccaacatggcgaaaccccatctctactaaaaatacaaaaataagccaggcatggtggtgtgtgcctctagtcccagctactcgggaggctgaggcaggagaatcgcttgaacctgggaggaggttgcagtgagccgagattgtgccactgcacacagcctggtgacagagcgagagactctgtctcaaaaaaaaaaaaaagaaaagaaaaagaaagaaaaaagaaactgtaggtctgtggaatctccccaaggcctgggtctttgatcactggtctgctgacgttagcacagctccaccagcttcccagggtctgtgtgtgcctcatgtgttttctctccctttccctgctagcccccatccttatgtgatgccttatgtgatgctagccccatccttaagtgagggtgagcaatgctgagccttccctgctccctgactgtggcatcaggccttggcccactttcacacccacttacttaaaagggtgtttttttttctcacattttgggttacacttccagcatttcgcagctggagtggttcaggtctgtggtcctcctttcacctcccaacccaccctccaagcaactccagcaaagacaagcagcaccctggcgtgcccatgcggcagcactgaccgacggcccccccaagtggggcagatgagacgccctcaccagcaccagcgtgtggaacccacacccctcctgccctggcagctgtgctgactgccgtctcagtccttcctctgccgctcattacacacgggcgaggcgcagagtccagcgggcatttgaatggccccaggacacctcccaacctatgtgctctacggcccgcctcaggtagcggcaccctaaccctgccccctactctggtatctctgtctaccctcccggggtgatctcaccatccctgtgcctccccgtcaccacccaaactggcttccggggttaagcccccggcctttgcatcaggacactgctgctgtcctttcttgagcggccccttcacttcctgcctcccctaacttgaccccccaccccccacccccgcaccaaagtcatctaacacaagggacccccccagccctgctgatagctctctaggggacacccccaccagggttcccacaacactcaaggaagccagcaggggctctgtgtggttccagggtctcacttcccaaaatgcataacggggtaaactcatatgcacgagtgttttctggggagatgtccactgctttcaatagatagccataaaatgttacaagacaccacataaggccgggagcagtggctcatggctcccagcactttgggaggccaaggcaggcggatcacctgaggtcaggagtttgagaccatcctggccaacatagtgaaaccctgtctctactaaaaatacaacaattagctgggcgtgatggcctgagactgtaatcccagctactcgggaggcagaggcaggagaattgcttgaatccaggaggcggaggttgcagtgaccccaaatcacgccactgcactccagcctgagtgacaaagctagactccgtctcaaaacaaaacaaaaaaaacacacaccagataataagaaattaatgttgattttgctgggtatttaaacagtatgtggttctgtttaaaaaaacaaacactgatctttttttttttttttttgagacagagtctcactccgtcgccaggctggaatatggtggcacgatctcggctcacggtaacctctgcctcccagggtcaagtgattctcctgcctcagcctcccgagtagctggaaactagaggcacgcgccgccacgcccagctaatttttgtatttttagtagagacgggatttcactatgttggccaggatggtctcgatcccttgacctcgtgatctgcccgcctcggcctcccgaagtgctgggattacaggcatgagccaccccacctggccacagacactgatcttttaaaggcacacacgctgagtccacaggtgaggtgtcacgtcgggacacacttcacattcaccagcaaaggagacaaacgcagcagcagcaacacaggacgcccctgtgcaggctgggggaggggcacccccccacttctacagatgctgagtcttccacagcaagagggaagccacccagccctgcctgcagcctgactcggggtacctccatccatggcacagccttcttcctgctcaattgggaacctccccctttctgtacccctacaggactcaagcttgatcagggcctctgccaggagcctaactccacccacccacagaatgcccacccctctctgctgtcacagcctgcacctgacccacggtccctgtcactctactccccgggacagcagcagcgacccaacaacccaatcaacagcagacataccacatctctgggaacagggtattgaggccttcccagctgtaaacattcaggacagccagccagaacttcccccaggaggggatggccacagcaccacctgagcggggagagaataggcccacgtcatctgcttcctgtcagcaaagtctgcactgcctctagctgggaagcttcaccctctgggagtcacgtgtgcccctctccatgaggcaagggcagcctcatgtggatcttgcgacccccatgtgcgaagcaggttccagagtgctgagaacttgcctggatacacggccccctaggtggaaccagtggctttcctgggagtgtgtgtgtccagccccaggagaggtgtttgcaacccctggccccaggaaggagcacatgaagacagctacctgggaaggtccagggacacctcagtgctcaggtgagcgaggggcccaggtgcacatgcgcctggagaaggcaaggtggggaagtgacagcgcacactcagcctcgccctctgagccaagcctgagctgccccagtctgtgtcatctccacttggcagactggtcctgtatgggaacaaagacgaccctagactccagagtagctccggcacgctggccccatgccagagccacttcagcagcagcagtcctggcacagccacaccatctaaacatgcttctgaggagtccctgctccaaaccccaaaaggtatgcaaaagtcaataaagacccacaaagctactaggcaaagtgcagcctaaacacgttccttcaccaggcaggcgccaggagtgtggtgggaaccggacagcagccttggggacgcagcatcaacgacaccaaaggctgacagtgaactgaggacaatagtgacaagctcaccaagaaagaaggcaggatctcatgagaatgcgtaacaggacactccacctggcacggtaggtcaggaagaggtcctcaaagaaggaacacgtaaagtgtgagccagcggggcaggagtggaaggtaagaggctccaggcgaaggaggcagtgcatggcgagccctgggataataagggtctctgaggagctgacaggaggcccctgcgcatgcagcagagagcagggcaggtgggactggctacggaaggtctgtgaaacacagaggacaagaccaggccaggctctgcagagccacaacataaactaggttttcttggagcagcaggagccatggattcccttgggctggaattgcccctcagggcctataggcaagaggagaggtagccaggccgggcatggagaggtagccaggggcttggagaggtagccaggccggggcttggagaggtagacagttggggcttggagaggtggacagcctggggcttggagaggtagccaggccagggcttggagagaaagatagttggcgcttggagaggtggacagcccagggcttggggaggtagccaggccagggcttggagaggtagacagttggggcttggagaggtggacagcctggggcttggagaggtagccaggccggggcttggataggtggacagccagggcttggagaggtagccagaccagggcttggagaagtagacagttggggcttggagaggtaagacaacccggggcttggagaggtggacagcccggggcttggagaggtggacagccccgggcttggagaggtggacagccccgggcttggagaggtggacagccccgggcttggagaggtagacgatcagcttggaaggtgcaagctccagggctgctcttgcctgcagccaggctgcccccagaaggtggacatattaacacggttcgtttaagtttttgccaattcaggaaacaaacagaattacctggttgtcttagtttgcttggctttattttattagagacagggtcgcactctgtcacccaggctagagtgcggtagtacaaccagctcattgcaacccagaactcctgggctcaagtgttcctcctgccttactagcctccaagtagctgagactacaggtgcatatcatcacacctggctaatattttattgtttttgtagagaccaggtctcactatgttgcccaggctggcctcgaactcttaggttgaagtggtccttctacctcagtctcccaaagtgctggaattgcaggcgtgagccactcactgtgcctggctcttaatttgcttttttaaaaaatgatgcctaggttaaacagtgtctgcctacttctgctttgacaaattccctgctcatgtgcttttgcccactgtttcagctgcaagtgcatctttctgtatcgcgtttgtgagagctcattatcgagttgacacgaacccctggcccagcacatgctgcacatgccgtacctttcttgtgaagaatgttccgggctcgtaccaggtcaggatcgtcaggcccaacacccagaattctgagagacacatagttgagcgcagtcccaaacacggtggacttatcctcaatgtgcctacaggagcagaggacaggtgagaaaccggtatctgtccttacttctaagaaataaagcaaaactttctgtggagtttcctcagaaaactaagaatgctaaaatgccttaacctgacataacatgccaacacaggagacccctgagcagccactctgcagtacgaattcatgcacctcccatgacaactgagccccccactccttcctcaccgtgacccgcctgctctacaccttcccacgcctgagtcaacacttctagctcaagggcggtccactttgggctatggctctgctcccaaagtgtgtgccacatggcaggaaagctgtcaggccttgtctccacctgctgccagcccagagtcaagggcaattttcttctgccttaagtgataacagactgacagttttcacatgtgggtctcaagagtgtcctaacagccacaaaatccatttaacaaaagatgtgaagccgaggccccacctgcatggccttcagcccactccccgcctgctagtctctccctcacccaccccacacccacagctgcaatcactcctaacccctggcagctgcctggaaacccaagcatctcctacatcatgagaacacacacatgcacatgtgcagtgacacaggggcaggcacactcacaggccccagccaccgtcagggagctgcactgaccgcaggtaccgcacaatctcttctctgtatccggctggcagagggatgcgtgccacgtggcaagtgatcaggaggcctgtgtggcaggagagatgttcctcactggggacaggtggtcatgactgctaagaccaggcccctttcctcctgagcacctcactccaacagggagctacctccttctcataaaaacaccccctggaaaggccattcctcccaggcccccatggggaactttgggaacagggccagaaggaacgtcagccacagcacaggcgatgctccctgcctagggcctgtagagcccactcagccacgcctggctcccatgaccaccagggtctgagaaacaccagacactgcacagcacctcaggaaggtctcccccaagtgccctgaaggtccaaaaggaaccagcattttagatcagtgggccttccatgaggggagactgttggtcttgctttaacatctgctgggaagaaaaatacaaaattggtcacccttgcatgtggtaatacctacttatttatttatatttttctgtttcaaaatttttttacaagcatatgccgctttgcaaatgtcaggggggaggcagagacaataaatattatccactaagaaccttccgtccccagcctggtcctctcaggcatggtgctcacaggccaccctccaccttcactccccatgcttggttccatcagccatgtgcccccagagcctggcacgggacaggtctcagggcagaccccagccacatgtgccatggaatgaatacctgactctggcttagagcatcagaagccctagtgttcaaaccatccagacatgccctgtgtgggcggcaagccacccaggcgccaaggcaagagaccgaggacacgagctgttccagtataataaaatataaaacaagaatagttataccagatatagatcttagagatatatgaatatcattaatcattagtttgtagtaattactctttatcccaatattataataatcctcgctctacaatcataacctaggaaaaaccaggccatacagagataggagctgaggggacatagtgaggtgtgaccagaagacaggagtgcgagccttctgttatgcccggacggggccagcaaaagggctccttggtctagtggtaacgccagcgtctgggaagacgcccgttgccgagcggacggtggtctagcggtagcgaaaagtgtcaaggaacaacacccgctacttagcagaccgggaaagggaggctccctttccccgggggaatttagagaagactctgctcctccacctcttgtggagggcctcacattagtcagacctgcccgcagttatccggaggcctgtctccctgtgatgctgtgcttcagtggtcacgctcctagtccgccttcatgttccatcctgtacacctggctctgccttctagatagcagtagtcaattagtgaaagtactaaaagtctctgatatgcagaaataatggcataagttgtctttctctgtgtctcctctctctgcctcggctgccaggcagggaagggccccctgtccagtggacacgtgacccacgtgaccttacctatcactggagatgactcacactctttaccctgccccttttgctttgtatccaataaataacagcacagccagacattcggggccactactggtctccgtgcattggtggcagtggtcccccgggcccagctgtcttttatctctttgtcttgcgtctttatttctacactctctcatcgccgcacacagggagagacccaccgaccctgtggggctggtccctacaccctggaagaagggcagatgaactcagagacagcgcacagggtcacataaaatgagccatcccaaaacaagcccgtctctttcctaacagttataatgttgttaggacggggaaatgtgcagagaggagcagagccagcatcttcctgattttacaggcaaggaaactgaggctcagccagtaaatggtggggctaggaggtcagacccgattcagtgttcaccagagtgctgcccaatgccgcacaggccacagtcaatgggagctgtctacatagcatcatggaccaagagcattttccaaagtccaaaaagagggaagaaaagctccaactcagccaggtgcagtggctcacgcctgtaatcccagcactttgggaggctgggggtggggggtgggggatcacgaggtcaggagttcgagaccagcctgaccaacaaggtgaaaacctgtctctaccaaaaatacaaaaattagccaggcatggtggcacatggctgtaatcccagctactcgagaggctgtgggtggcaagccaccttggtgccaaggcaagagaccgagggcacgagctgttccagtataataaaatatataaaacaacaagagttatactagatctagatcatacatatgattatatatgaatatcattaatcattagtttgtagcaattactctttattccaatattataataatcctcgctctacaatcataacctaggaaaaaccaggccatacagagataggagctgaagagacatagtgagaagtgaccagaagacaagagtgagagccttctgttaagcccggacaaggccactagagggctccttggtctagcggtaacgccagcatctgggaagaggcccgttgccaagcggacccaaccgtggtctagcggtagcgtcagtgtcaaggaaaaacacccgctacttagcataccgggaaagggaatctccctttccccgggggagtttagagaagactctactcctccacctcttgtggacggcctgacatcagtcaggcccacccgcagttatccggaggcctaaccatctccctgtgatgctgtgcttcagtggtcacgctcctagtccactttcatgttccaccctgtacacctggctctgccttttagataacagtagcaaaattagtgaaagtactaaaagtctctgatatgcagaaataatggcataagctgtctctctctctctctctcccactctctgcctcggctgccaggcagggaagagcccactgtccagtggacacgtgacccatgtgaccttacctatcattggagatggctcacactccttaccctgcccctttgtcttgtatccaataaatatcagcgcagcctggcattcagggccactaccggtttccacgtcttggtggtagtggtcccccgggcccagctgtcttttctttcatctctctgtcttgtgtctttatttctacaatctctcatctccgcacacagggagaaaaacctaccgaccctgtggggctggaccctacaggaggctgaggcaggagaatcacttggacccaggaggcagaggctgcaacgagccaaaattgtgccattgcactccagcctggggaacaagagcgaacgctgtctcaaaaaaaaaaaaaaaatacaaaaaaactccaactcacagccagcccacaggaagggtcccagccagctaagcccagagccaaagcagcaagaacaaacaacacagtaatccccactgaccaagcaccactgcatgcctgacactgtgcacatgaccaaacctgattccaatcctgtcacaggtcaggctacagaggcaaagtggggctgacccatctcctgaccaactctatgtcattgccttaccacgagccctgagaacagtctaaacaggccctgatggggccaagggaagaagagcaccttgacttcccctaaggacaggccctcaaatcccaggacagaaaaactcaatgctgtacagtccaggtggcagcagggctagaagtcaaagcagagatggggatcccagtgctcctcctgctagtctggttacctggaataaatgtgcctcagctttctaatgtatctcattaggcttattctaaggactaaaagaagaacaggccttgagcagggcttggcctacagtaaacaccatggaactgtttttaacgttaaaggccaactcttcccaaactaacatataagcctattgcaacttcatttcaagtctgggacaaaatcaggataaaggcaatttggatgagtaaatgaatagacacaggtaagagatgttttaaaaagaaaggcaacaaaggtatataaggactttctatctattacaaagtcagcgtagtaaaagaaaatgatgtatcagtaagagttatcacagaaacaaaacctatttatgtaggaattcacgtcattgaaacaatgtgattacaagtcactagggaaaaaagtcctattgcataaattcataggagggaatttcccattttacaaggctgaggatttctgtagagaaacactcccaggatgcaaaatagtcttgtgtagccaaatcagttcaatacccaggcagtccaactgctatgctcctcctactcaccagcctgaacctgaagctctcctgcaatagccccgaggaagttcacagcagatatcagctccccacccaccactctgcccacctacagccccttggcataggctgggccttccacctggaatgtccatcccatcctgtactgagacttcaaagcccaccttcctcctccctcaaggcaacacagagccctagagaaccacttgcttctcttatcagagagcctgtcaccctacactggcaaggctagctgatcccctagaccaatagcaggacgactctgacatagggcagagtttgccagcccttttcttgtgagcccctggattttcacctgcttcatcaaaaccctagaccaggctgggccaggatcccaagggtgatccagggtggccataccatcaggctggggcagcatactcctacctggcaggaggaaaagtgggccaccataatcacccgtccagtgcccatcctcagcctgcagccccacgtaaaatgtcatcccgttcagagccccctcaaaggcggtgtgggctttgggcaagtccttaaagtaattcttctgcaaagagatcgaaaaaaaaaaaaagagatagctgacgggactgttgcccggccagaggaaccctcttcacatacagcccaagtcaaaacagtgaatgtaaattactttaaaagtttcagctgtttccatcaaaagtctgaaactctttgatgagagcatcacacctcagcaaagtaaaagaacagctgcacattttcgttgctttatttgccagtcatgtattcttcacaacttctccaagatgtctggaataaaccaggcacccagactgtagggtggggcacgggtgccgacctgggcctgggactcgggcctctcaaagagggcccaaggggcggcacagcctttccctcggtggccggggctcggcaggagaccctgtttacactgcagactctgacgaccaaaatctcttacaatgcacacaactaagacagtggatccaaacactttttgtgaataaaaacaaagttacaactatctttgcaactctcctataagtcaaaaattatctcaaaataaggtgctaaaaaataaaacattaggagtctcctatgcgtggtttagagatgaaggggctgaagcggaggggcccgcgaacgcagttcccgtgggcgctcgccttggggatgggcgtcgctggccgggtcctcccacccgcctttctgagagaaaacgtgctcctcacggctcacccctcagggtcccgagctcgctgacgctccgcggaagcaacttacggtgtccagccccagggcgtaggcttccaggccggtctgctcgcggccggcgcgctcgtcctgcaggtaggtccacgtctgccggcccctctcgcagttgagtcgccagcggccgaggtcggtggcgggctcggtcttgtaggggccccctcggcgccgcagacacctgaggaccaccggccatcagcgacccaggccccgccccaacgccggccgccggcccactgccccagtcgcgctctcctcagcacctaggaccaccccgcattcgtcaggagcccggggcgaggggactcacgtgccctccgtcattgctgctgcagtgctctacgccgcccactgccagctgccagatgtccgcacccgggacctgccgcccagccccgcccctcccgcccctcccgcccctcccgcccctcccgcgcgcactacgcaggcgcaggcctcggcaggcgctcaggcttaggtgggccgacgcccacgcaaccaatcagagcgccgcgagcgtgaccccggggtgtgccaggcgaccacagtggtggagcgcttggtgccccatgcggcgtggggcggggcctgagggagcggggatggtgggtgaaggcgacgggacgggggaggcgggtggggccttattggcggggcatgaggggcggggctggtgggtggggaggtgggggcggggctggtgggtggggaggtgggggcggggcctggtgggtgcgggtgggggcggggctggtgggtggggccgaagggcgggggcggggcctctcgcgcgccctctagaggcttgcgtcccgggagcccggcctcgtgcgccgcgctttgaggtgagcctctctgagaaatttgtgaggagggtccagccgcgggtcggaaggaaggacgtggggagcgaggctcgagcgagcgacagcgagtgcgaaggtcgggtggcagggaattgctctcgcgctgcaggatttgcccggacgccggggccgggggtgggggcgggaggccgccctgaggtgaggtgggcgcgggccgtcggctccagtgcgagaccagggggagggcggggcggagcggaggagccgagggcgccgccggcgtccctgggaagctgagcgccgcgtagcttcgccggggggagtggggtaggcgcggtgaggccgtgggcccccacacctggcggaccacaggggccagaagccctggagccccgccagggaagggctgcgtcgctggccaggaccgagcgcggtagagcctcagctgctcacggggtcgctggagttgggggtggccccaggagaaattaaaggtgaaaagccttagcagcagagggaagaggaagatggaggcagagcgagtgaccgaacttggaagggacagccgggcgcaacagggcagggggcgtctgactgttggaaacatggctgacgtctggaggctgcagccagtggtccgtaagtcaggtcaaggacccacagaagaccccagcatgtcttcacctggcccacagaagccctgacatccagttacaactgccccagcctagtgagcatttcggcacccactcctcaattcctacccccagcctaacttcgaaggggcggtgagccacagcaagccggaggagaaagttggaagagagagtggacaaaagaatacccacaggcaccttccccacagtggaatagcggggttttagacaatcaaggataatcacctcttcctatcccagttcagaaacggatgaaaaagacacagcaataagatgggtgggtatcaaaatatcagctttgccacaaattaaaaacctagcttgaaggacaaggcttaaatctgcaagcaagagggcaagctactaaatcacccgttaagtcagacaaacatatcccccagcctctaggccatgaaactgcctcaccaagcactatgcaattgagtgcccaccagaagacacccctccagtcaacccacagaccccagaaagagtacccagaggagcctgagcacactccaccctatctgttctctgaaattcaatcaaatgagtcactctacttctctggaagcagaaagaggctggaagtttttctccaggtaagttcctccatgtagaaacatgaagaatagggataaggggcttcagcctggatggaatctcacactgaacctggcaaagctaggtgagggaagaggtttcaactggataagagtttgagttttgatatcttaatggactggactttttatgagtaaaataatccgctctttttaatgtctgaaagaaaagaaaaagctgtaaactacgtctgagaattgacacagttaagcttctaggggcagtcatgagaaaaaacactgttcctatctgcttacatactactgcatccagcttattcattaagccagatacagaaggctctgaggattttggcctcaacaactgggtatatggtggtggtcatttactaaaatagaggtgtcttttatttatttagtgacaggatctcagtctgtcacccaggtgggaatgcagtggcacaatcattagctcactgcagcctcaaattccagggctaagtgatcttccgggctcagcctcctgaatagctgggactacaggcgtgtgccaccacacctggctgatttttttaaagtttggtagagacacggggtctcgctatgttgcccaggatggtctcaaactcctggccacaaggaatcctcccacttcagcctcccaaagtgttgggattataggcatgagccaccacacctggcctaaaatagggaaagtttgattggaaaattcagattaaagtggggacaagttatactagagatgcttattagacattcaagtgaaatattgagtaggctggcattcaggagagaacataatgctagagataggaatttgggagtcatttgctttcaggtagtatttgaaatcatgagattggacaagatgaattaggaaatgcacataaaaaagagaagttctagaatgagccctggggcaccgaccttttccagtatagaggaatggccagagagaggaggaaaaccagaggaatatgaagtcataatataagtgaagacatggtgatctttgctgaggctttgaagggattgcaaaatgaagacagaatttattattggatgcaacaaaacaatgtattggtgactgacaagagctatctaaagagacatggggggaaaagcctaatggcagaattttgaaagaaattttcagttaaacatggcagactgagcataaacattaacctccatttcctgcccaaaccctactcacataaagtaataaaagaccaaaaaaaccccacaaagaatgggagaggagacactagtaagcaagagaagtcaacaaaattatagagactgggaatggatggagaagtgataactgagttagctagagaaagttgagacttacgtttgtgggtgaagccaacaagagaccattcctgccagcaaataccaggaaggtgcagaaattggaataactggtggaaaatttttgtgaggaacagtatgaccatagatcccctctcctacttgggtggaggaagtctccagtagttgaatcagagtaggtgttacctcaggcatgaggcatagctgaggaccactgaaagcagacagattgagttaaagtctacacatgtgggtccaggctcacttctcccacttagccagatagcatgagatagtgggaggatccctctggagcagctggcccacaagagtcctgcaaacactggcaactatgacctagtagaaaaacaaacctattagctggcagactgtacccattgacagtttccaacaagcaccatcatcagcatgagccagacatttggggaaaacagtgcaacattacctccagccatgcaagtgatccatcttggaccactgacccagtcaagccttcagatgactataacctcagccaatacctgactgcagctgcatgagagatcccaacagaaagctgcccagctgaatcctcctcaaatttaagctactatatttggggtaatttgttcaatagcaacaaaaaaactagaaaaaaggactacaaagtgcccagcacaataaattgggcaggggttggggagggaatggggaggcaacatatgaagtaatgtcattgagaaatttgagaacaccaggaatagagatgatctcaaaaatttccagcaacaaaaaaagcaaaaacacaaaggaacgatttccaatctaaaattctattctcattcaaatgatgaatcaaacgtaaggatagataagtccaaaaaacaaaaaaaaaccatttctttactctcacaacatccttttggcaccagatgtagagaatttctccccaccgacaagcaagcattcagctgtacagcagacaccagctgggtatccgcttcaatcctgcaccgtctacctggagatagcagcagatcacacaagttgaggactctgtgccgcaagactgagccccatgtccagtgtcaatcacaagccccaggttgttttacctgtccttctgggttcccaagaccccttccttggctttaatttacaagagcagttcacagaactcagggaaacacatgtttattacaaggctattttaaaggctacaaatagccagatgaaaagatacacaggatgaagcctagaagagtcccaagagcaggagcttctgtctgcaaggagttgcgaagtgccattctctcagcatgtggacgtgttcttgtccaccttcctggaagcccccacacatttggctatccacaagctctctgaaccctgtccttttgggtttttaggagccctcattacataggcatgattgattaaatcattggccactggcgatcaacgtcactttcagtccctctcccccaacctctgggagtttggggggtgggctgaaagtttcaacccctctaatcatgccctggtctttcagatgtccagtccctatcctgaagctacataggagctgtccgccatcagtcatcttactagcatacaaaaagacatcactttagagatctcaaggattttaggagttgtatatcagaaggcagagacaaagaccagatatatatttgataatattacagtagaaataaagacattttagatattcaagctcaggaggctactaaaggacaggctccatcaagaagagaaaaccaagcaagaggaaaatatgattcagaatccaggaaatgtccaagttatggcaagaagacagggggttctcaggaacatctcgaagagaaagtggagcatattacctgatgcacatgactttgttgggaagagctttacatttagggcagcgacttttgggtaaagtagtgacaagagcatagaaaaccaagcaaatgagaaaaacaatgtaattaactccaggaaaaatcaaaagttgtacctaaaggaaatgtaatcataaaccaataaagggctcaacaggaaatggtaaacatacagttatactaaactgtgaatgcaggtttcagccaatatcaaactgcttagggagactaataggagaggaaatgtgggtgtcgagggtgggggtgataatatgttgtgggaaagacagtgtaagagaagctaactcctcttccattgtaggaagtcaacaatgtcaagtcaagattaagaaatagcattatttaagtctttacatgaagctaatcactaaagatccctgagttgagtagtgtgtgtttggagaagcagggattgatttggtggaggaagaggttctcttcttagtgctgttgttttctcagtgaaataaggaggacatgatctaagaatgttggaggtttgaagagaatgagaagacatgaaatagagtctggggatgtaggattacagtcaggagatgctgagtgccagtttaagattggtggtcatacgcaacatcaccaagtctattaatacctctttctgtatatggctcaaattttatcccctctcttcacaccaattgctaacaaactcacgcttattccctttgaatttcacctggatggctgcagcacccacctctcaagattcctgccctacatgccattcttaaaagaaaatgtgaccagatcacttctctgcctaatcttcaacaacgggttctcacagctctcagaagaaggtgacaagaatctctgacctcaccctgctggcctgttcccctcacctggccacacaaccaagctggtacctccacgctttcatcatgtcctctcaagtacactgtctccagctacacccctgcactcctctccgggaattctgtttctcctctacccaaccagaccctgttccatcctctgttttttccttgctaccaattcaggcccacgcctcatgcacattctctgagaattatgtacataagtacctgactctcctggatgtaagctgggtgggcttagcaggcagaggccctgtgtcttactttatctctgcatcactgatgtctggcacatcaaggactgcaagtttgctgagagaatgaatcgccttttatacatggaaatgtaagctctaaactgcctcagagcatatgctggtgggtgacaatctgaggaggtcatgaatataggagaatattgaagaggtcacacaggggaaacaacttttcattatgaaaaactgggagactgacatttaaatggtttatctgcatgattaaattaatcacatttccaacagtgcatcaagcatctgagaataacattattttgagtaaaaacagaaactcttcgggagagaccccctccccacaggtcaggctgctcaaatgtccaccatgtctagcagcgcagagagatggagctcagaggcaacttcctcttcccttgaactccggatcagcctttccaggtgctttagtcgttcgcctagacacgttcctgtcgcctctgacagctgcagttgctccctcatcatgtcactctatttgaataaaaaagaaactgaacagttttgggatgtcaataaaccacgacctatctctgggaaggtactagatctggatcatgttagaaacctcatctgagtagtcatttatttttacagagggaaaaaaattatcctttgtatatccttccagcctcatttagctcgtacattcagctggtatctgtatatagactgtttgcctttgtattctatcatgaacaatttccagtgtcagtcatttttcacccaggctggaacgcagtggtatgatcggagcttactgcagcctcaaactcctgggctcaagtgatcctaccagctcagcctcctgagtagctgggacaacaggcatgtagcaccatgcctggctaattatgtactgtagagatgagatctctttatgttgcccaggctggactcaagctcctggacttaagcgatcctccctcatcagcctcccaaagtgctgggattacaggcatgagccaccacgcccagccagtcatttttagaaaatatcatcgtcaagggctgtgaattattctatcacatgaatgtgttataattgtttaatcagactcccatcttcggatatttattctgtttcgactttcatacaataatgctacagtaaacatttttatacattaatttttggggaatatctggtaggtcagaattctttaggttagaattggtaattcaaagggtatgaatatttttaaagtatttgccaaactgatgaatggaaacagtacatcattttaatttgcttttctcctctattgaaggacttcctaaagccagtccaggagcacagtttttacctgttcagtggcacatatctgtgattgaaactctgtttttgcatctttaaccactgaaggaagaatggtaaggtaaaaagaccttaggctttggagccagttggatctggctttgaaaagcaacctgaccactcactacttgaacactcttgggtgaggctcttgacttctgggagcttaccttcctcattcattagttttcctcaggaaaaattaatcccagaagagaggtctgggtaatgccaaagctcagacaatatgtgctccaacagaagctgctgtcatcaccttaatgcccttaattacacatcagcacacagttacaggtcttattcagttcttaagaatatttcaattctattcttcatttatttcgtaggcagaaactcaaaatcagttgggtctctttaacaatgatatggataaagtttaagaaaaggtctaatttgagctaataatttgtcggtcatcaaaacatcataggataaatcgtgatattacttttttccccagccattctctcaatctttaattcttatgtaaatgccaaatgtatacgttcttctcacctgtgggctagtagttacagatgttttcatcacaggttcaatagtgtgagaaagagacactagagtctgaggaagatagaggggaagggaagttaaatccgtaaatgctcctgagtcttcagacaaccattgctgaagctgatcttcaaacctgaaacaatatgtaataaattcaaaaatatttgagcattaggaagttaactattgttcattaatcttctatatatacttaaaaactttttaagcctttgcttttttaaaattttatataatttttttttttttttttttgagacagagtctcactctgttgcccaggctggagtgcagtggcataatctcgggtcagtgcaacctctgcctcccaggttcaagtgattctcctgcgtcagcctcctgagtagctgggattataggcaagtgccactgtgcccagctaattttttgtacttttagtagagatggggtttcaccatattgcccaagctggtcttgaactcctgacctcaggtgatccacccacctcggcctcccaaagtgctgggattacaggagtgagccactgtgcttggccaattttattattatttttttttgacaaggtctcgctctgttggccaggccggagtgcagtgttacaatcttggctcactgcaaccttgacctcccaagctcaaatgatctcacctcagcctcccaaatacctgggactagaggcgcatgccacccagctaatttttgtatttttttgtagaaacgggattttgctgtattgtcaggctagtctacaactcctgaactcaagtgatgtgcacacctcagcctcccaaagtgctgggattataggcatgagtcaccacacccagccttaagcctttgctttttactaagaatataactaagttatgacatcaactgagaagcagaaatgtacttattaaaaatttaacaacttcctatgataaagcttaatttaaaaaaaaaaactaggctgggctcggtggctcatgcctgtaatcccaacactttgggaggccgaggcgggcagatcacctgaggtcaggagttcaagatcagcctgatcaacatggtgaaaccccgtctctactaaaaatacaaaaattagccaggcatggtgacacgtgcctgtaatcccagctacttgggaggctgaggcaggagaactgcctgaacccgggaggcggaggttgcagtgagccagatcacgccattgcactccagccagggcaacaagagcaaaactccatctcaaaaaaaaaaaaaaaaaaattagagaaaccacttccctttaatttataaatccaattccaatttatatttaatgaaaaaggtggtattaatccaaaaacaactgcttcgatgtgttacttaacattacttgtaattgtcttgtttggcttatcttatttaatttactttggttttatgcatctataattaattcttctgacattttccaaatgagtggattgctgcttatagcttaaaattaactcaaaataatatcccactgccacctaacatactctagagctgtctacttccatataccggtcttttcaagaaaaacaatcttggccaggtgcagtggctcatgcctgtaatcccagcactttgggaggccaaggcaggtggatcacctgaggtcaggagttcaagaccagcctggccaacatggtgaaactgcgtctctactaaaaatacaaaaatcagccaggcatggtgatgggtacctgtagtcccagctacttgggaggctggggcaggagaactgcttgaacctgggaggtggaggttgcagtgagtcgagattgtgccactgcactctagcctgggcaacagagcgagactctatctaataaaaaggaaaaaaaaatctcatcccaaaccacttaaattatagagactgattttagtaatcggacacattcattcacccttccaaaacatattcattaagcctcctccagatgctaggcatcattctaggtacaaggaatattgcactgaaacaaaacagaggccctgccctaagcaatttatactttagtgaggagagacagacaaggaacacataacaagagaaacatggtttgaagatgagaaagacaaagcagagccatggaaacaagaaggtcggagatgggcaagcagggcctaacagaagcagacatttgagtagagatctgaagtgagtacaagatcagccatggggatgctggggagaatggaggggctggacagtcctaggcaaaaggaacagcaaactcagaggcccaactgtgaactgcctaccatgctcaaggaaggagcggaggtcagagaggaaatggggggcagatcactcagggccctggccacccctgcaaagtttgcctttgattgcaggtgaaagagggaaaccactgagaggctgtaagcaagcaagtgacacgacctccatcttaactcacttgaaaggcacccaccaggtctaccaagactaaactgcagcctactgtaataatccagaaggaagatgatagtggcttgagccacgtggtggccatggaagtcataacaagtggtccaattctgaatgtattttcaatagagccaataggatatgtgaatgggctgatgtgaggggatgattccaaggcacctgatctaggcagctggaaggatggagccgccatcaacagagatgaccaccaaaggaaggggttggttggaagaaagccgggaactggatttgggatatgttaactttgcagtggctaccagacatccaataggtgtctaatgaagatttcaaggaagcagtagcatgttcaagtgtggagttcagaggtttgagatacaaatttggagctgtcagaatagtgatgttacttaaaaatccatgaaactggatgaaatttctgaggagtaggtacagacgatgcagaggagaggttgagagaatgaatccagggggcagctgggggatgaggaggaaccagcagggcaggagggggaccacggacatcctaggagcaaggaggggaggatcaagtatgggatgctaccaaggactgggattcacggtcatgttcaaccctgggccttcatccccatgggaaagaaggctgaagaagtgagtatcacaagcgtttttgaggagttttaccattaagagggcagaaacatgaagtggtggctaaagagggaagtgggaccaagacagggaggcatgtttcatgtctgtgtgctgctgatgggcaccacctaatatggggaggggtggtagcacgagagagatactcattgaatgaatgtccttgggtaggtgggagatgagatcccagcccagggaagggctgactgactacgagctgcatggttcgtttccagcaacaagaggcgtcaggaaggggatatagggaggatgctggatgtggctgggagggcagggaaggcagaggacaacctgtggaaggtcccttattcctgattctactcagtaaaatggtaaacatggccatcaaatgaaagcaaaggaaaggtatgcatgggagggagggaagtgggcaatgtagaggaggggcagccccagctcctgtccattcacagcatgggatgatccaccaatgcctcaggctcccaagggcagggtgcctgtggccagccatagtgttcagcactcaccatcttctgagcagacttaaccacatgaatttcccagaaaaacttaacactgactttcaataataaataataaatgaaattcacttcaatataaacagttagaaacatactatctagggcactgcttctgtcttcaaagagcttttaaatagttacatcactaaaactgttgctaataatccacctgcccttctccatcctggctgtcttatattaatcaagcaataaccagtctcccctcacagcataaagcagactaaacacacatgaattagaaggaagtgggcttcacctcttgttctcttctttctccagcagcagactgctcgacaaacactgcgccaagagctcctcagcagaagctcctcgcatcagatcctctgtgctgggaatcctcccctcttgagcacactctgtgctcctcttccagttacggtgcatgtgaagcaatggtatgggaaaattgtttgcagaaggatgaaaaggctttattgccaaactgtaagtacatgatttgaaatgtttatggtcaagagaaaatatttctacagcatcatgtaaagcatgtagatacatttgcacatgtgcattaacatgtaagaacatgtgcctcagacacatgtgccctcctggaacagctcatgctggccccatgcctgcttccaagcttccatcaagtcagggagtggagcaaagagggaaggcagcccctgcactgtagggacccttatgcacagaggcattgagactgcctgttcctcttggaagcttctgctctcaagaggcagctaggtttttggagcttctctgcttcatgtcttgcttcccaccctagggttccagattctgttcttccctagtattggcaaggttttttatagatagctcttggatacatttggaagtaatgtttacaaatggtgagagagaaggcatctgacatttttttctaaacacatgccaatgtttgtcttttccccactaatttcaataatttggcctaacacttttgtcacatattctgactctttattctgatccatttatctactctggcatccccacatggttttaagtactggagctttactgtatgtcttggtatcaggccaagcaaaccatgttagtcttatttaaaactttctcagcaattgatgcatatttgtttatcctgatgaattttagaacttaccagtactgacatcttcacagcattgtatcctgtcaacaacctagtctgaacctcaatggttcaggtttcctttgcacatacaggccctgagaactcatatgttaatgagaaagacattccgggaaaccaggaggtgaggagaccaaggattaggctccactcctattatgaagatgaacagtttttagagtatcatggagttggagaaggtacttcaaggatctctatggggaacaagaaggaacagcaaagttccaccatcctgtgccctttctgttcaggtttattgttgtgaatgagaatttttttttttttaacatgttgtggatctatctatctgatcaccttattgaactgagaatggttctatggacttgacttttcttggactgacaactgtactgtctggaaatgacagtttctccttcctttcagtatttgtgcctgtctatcccacatccctgtactggtcaggatttccaggacaatagtgaataatagtcgggacaacaggctggttctgattccactgttcctaacattctaccaagaagcatgttttttttctattttggtagttttatgttaggtagccttatcaagttaggactttttttttttttaacccaagctaaagaaagtacccaaaataaagaaattttatcaggaacaggtataaattttaagaaacgtatttcaacgcctgctaaaattaccacttatttttctattatggcaacaaattacattaatagattttcactgttattgtttatcctgggagaaagcatacttgtgaacttttttaggtactgtgctttggaaccaaatttggaagtgagatgaaatgtcagctgtactctcctggttaggtatgatttcagggtcaggtatgcctgataaatgaagtgagatgctttaactttgttctagaatagtttctactgcatgggaatgatctgttccttgaggatttgtcacagtctgcccacagtggactggatttggcatgtaggatgttaatttctatttactttgcaagaaaaatacagtttagcaagcaacagaaacatactgaacatgaacctcaccgtccctctctcagctgtagctccttctgcgtctgcaacctggcttgttcccacgacaaaggaacatcatattttttcaaatcgtttttaaaaaaatacacacatatctgaccatcttcactcagcgcctctgagaaaacaatacaaaaacagataaagaggccagcctggccaaccctgtctcaaaaaaaaaaaaaacacacacaaaaaaacaaaaacaggtacaaataatatttaaacagcgacaggtggcatgtgcttaaattcactgatttaagtgcaagacctttgattaaagtcacacaattatgtgacttccacacttgggttaaataggctcccagggtccatgcatcactcaaagtccagacaagcttacatcgagactggcagggccagtaatgactactcaaaagccacaaaatcctctctaagagccatcctagggggcctgtttcagggaggtgagttcaggctctaccagaaacttcctagcctgtctcaatgtttttaagtcactcacttgaagagggaagtcctaaggaaaggaaggatagagacccaaaagaaaagcagcaacatcaactaaacatcttcctttgcagaaactggaccaggaaagtctcgtgaggagctgatcccattgcatcaagctctaattacctgatgtaacaggaagccgggggggcgtccagtctctcagcttgtggttgatacacaaggcgataagatcatcccatgggatctccatgaccgaggggcctgccccatggactggggagggactcttgctcttccacctacagtaggttctgtggagcaggttctccacctgggactggaggacaggctgtgtctggcgtgagctggggatctgggaggcgtactggacaaccatggagcacacggggagccagggggctggggagaaagtgcctcattagttacaggtttggccaaaatacaggtgaaaatgtacatgaaaacattttctcaggagaaggcaactgtgaagttgagaagtctgctttctaaacacagcagaaccacagttgttgagggggaagagcagcttgctcccagggtctaggtgagggatgcagacagtcccccttaacagtgttgctagccaagttctacccagaagttctgactgtacaggcctgtggttgtgcctaggaaatctgtattttaacaagcacccagatgagtctggtataagcagtcttagcttattttggggaaccccaacctaaccagagcaccgagggcttgtgctgagtggtttgcttccctttgggttccttcaataatgagcatgagttagacctactacagaccacacaccacaatttagaagggcgcctgaggcccaaaggggagtgtctgtgctaatgccacaacttctgccagataagcagctcattcccttctgagtgcataggaaggagcagccccatgccatactgggcttgagccagccagatggcctgtcggatctgtgtcaaaacagcccaaagacctcagccaggaacaggggcacagccagagccatagaagaaggcctctttgacaaagaaagaatgttaaatcagcactgagtgccatggctgcggcttggggacagggctacatggtccccatgctctttgccccttgtctgttctgaaaacagggaccctgtgggcaggcaggacaggatcagggttggtgttcctcccagtaccacttgtcacttttctcctgaagctgagtgaactcccatggactgccttgctggtcaggaaaggctaacagcccccactccacaaaacccagcttgttctggctcatgaacccaaaggaccaaaggaaggtgcaggcgagcacagcatggagacacacggaggtggacgtgcagccctcacactggtgcccaacacctgccagacggttactacagtgagaaggaagcctgagacttggctgcagccacccaccagacctccccaggtcaagcacgtaccccccaggggtggaaggtccatctgcggaagctggaacccgagcacagcctgcttcagccaggccaggtgctctggggcattccagtgcaggtgaggaagcagccggctgccccctgcctcagcaaactcagtgacaggccaggacaggtcacacagctgttcagaggacaccacagaagccaggaactgcagcacactgttaaacagctcaatgatggcgccaggctcctgagaagcaagaccgcccagacgcctctctcttctgtcatggaaaaagcggccactaaactcatggccaatcccgtcttcgacgtactgaatgagagtctggcagcagaggtcaagggaatgggggcagtgggaaaccagccactgcactgcttgcaaaacctgagaagaaagaagagacttggttgaacaattcacactgtttttcaaaaacagctttctgaaagggcttgatcccccaaggttgcccacagcaggtaataccagagtactgggctctcaactgtggtaggaaggggaacagaagtgtcctatgcagttgagtttagccttctagggctctggagacatgtccagtaggggcactaaagagagcccccagatcccacctggcctgaggaggagtgtgacctgcatggttgccccatggaaaggcccaggccctcaggaaaccagccctgaacatccccttcaccatgcacagaaatggagtcttctcctttttggaaggactaacagcttcactatgtgccaaggtgccttcacaccctatggttatcttacttcctatagttattttaattcctggcacctctttctctaaattgttagcaaagactccccctgccctattttttttgtttttgagaagggggtcttgctatgttggccaggctggtctcaaactcctgagctcaagcagtcctcctgcttcagcctccgagtagcagagactacaggtgcgaggagccaccacgcccagcttcagacttcctttttaaaggaaacatcaaataacattatttcttcatatattcagaggacaattaccctagaaaaataacttctgtatctgaccttcagatataagacatgttcatattttaaattcatagaaacaaaaacactaaaaaattttacatgaacaatttaatttgcagatagcaggactgtgggcaaattttatcttttattttgatttctgcttatgtttttagaaagttatctgtataaaacatacaactgctgccaggcgcagtggcacaccacagtagtcccatatacttgggagactgaagtgggaagattgcatgagccctgtagtttgaggttgcagggagctatcatcatgccactatactgggtgacaataaaaccctgtctcttaagaaaaagacaatgcaaacgctaatatacactcaattcaagatacagcaaaaggggaaaaaacaaaatatcttgacagaccattaaaaatgatgaaaccttaccttagttgaaccttgtagatcattaatggtatcagggatctcggtaacagtgtaatctgaaatcagcttagctgaaaccaagtcctgtagcatcagacctttaagacagacatagatgaaggtcacttgcattctgctgtcagcacacctgctaacatatctcactgtgctgaccccacccagtcctgcagtggacagtcaccacaggggttgctgtctcagtgattcctgaccccaacactactggaccatcctcagacccagggcctccacccatttattaaacaatgctgcttcataaacgagacttccttcacaaaccatcttctacttccttctcaacggcgtcccctcctgggctaggcacaagaaccaccagaggaagcgcaggctggaagggcttagcctgcaggagctgcttgagctgcagcaaggccgacagccagtacacgtcctcctctgccatgtcctcactcttcattttggggggaagcagcagcatgagcccactggctcccaggaggtccttctgtgtctccacagcatcaatggcaccatcactgagggcgccatgggccacctgcaacagcatcaagatcatcaggagagatgcaccatgggacgcatcagcagtgactgatctgccccagagcaagtgcagccaaagctctccgtgcactaaatactgactgtactccagacaggcctccaagggcacagctgggcataccctgtagttatcttacttcctgtagttattttaattcctggcccctctttccctaaatccaattgttagcaaagactcccctcaacctttttttttttttgagaagggggtcttattatgttgcccaggctggtcttgaattgctgggctcgagcagtcctcctggttcagcctcctgagtagctgagattacaggttcgaggagccaccatgcctagcttcagacttcctttttaaagaaaacgtcaaataacattgtttcttcatatattcagaggacaatcaccctagaaaaataatttctatatctgcccttcagatataaggcatgttcatattttattttatttttatttatttattttttgagatggagtctcactctgtcgcccaggctggattgcagtggcacgatctcagctccctgcaatttctgcctcctggatagtagctgggattacaggtgcccaccaccacacccagctaatttttgtatttttaatggagacagggtttcaccatgttggccaggctggtctcgaactcctgacctcaagtgatcagcctgcctcggcctcccaaagtgctgggattacaggtgtgagccaccgcgcccacccatgttcatattttaaatttatagaaacaaaaatgagaataaatgcaacagaattagtgcaagaaacagccaggtcaacaggtaatttagcctccagctagaattgtgtttgaccatattactataactttaattaaccttaaacaggtataaaaaagttaaagctaggcacagtggctcatgactgtaatcccagcacttggggaggccaaggcaggagaactgtttgaggccaggagccaggaattcaagaccagcctgggcaacatagcaagaccccatctctacaaaaataaacaaaaatataagcccataataatagaaagagggaaggcaagccagcagcagatgagggattctgatacatttctagaaagcagcaaataggtgtgaccaatccctgggttagggaagcagaggatgccatacctaaaggctgcagatgtgggtgtgtaaggagtcaggttgactgagcctgcaaaagccctgtatacccaggcgctgcagacaccaggagccaaaggtgaagttcagagcctgaccctattggcggcacccaccactgcaggcaacctctatgcaaaaccagtccccctgggcccctgaacaggagtcctgagaggatccagatgcagggccatggtcaggcacagtggaagggactcagcgccaaaccactcccaaccctaccctgagaataccagcagctccccagaaagcagatggcacaagtcctttccagaaaaactgaacagtctagggaacagccatccagatccagacatttgggagtccctccaaaaagcctggcttgccatttagctaccatccaccccaccccaaacacagaacttcttggctagccttttagggcctcactcagatatagacagatagccttgggtaaggcatctgaggagggcctccaacataaaagagataaactggagtaacagagaggaaaaaaaaaaaaaagaggaaccagataatacgtgaaccaaagaaaacttagaccccaaaaaccctaatttccttggaaagataagatgatgcatccaaaaaataagatgctatgaaaaagtcatgataaaaagaaagaggaaataagtaatatatatggaataaaaaattcagtaggacaattggaaaataaagtcaaggaactctttcagaacacagtaggaagagatgagattgaaaataggatagaaaataggataagaaactcagaggatcaattgatgaggcctaacatctatctaatagaagttcaagagagaacagaaaaaagacagagtgtcataaagacatgaaaatgtcccagaagtgaaataggagtctctagcctgaaaggacctgctaagccctgcacagtgagtgaagctagtccagtgccagtgtaacaaagtgaatttttaggacgccatgaacagagagaaaaggcttccacagagaaaaccaggccacacagaaaggaacaggaatggtacagcaacaatggatgctaggtgacagtggagcaaaactggaaggcaaataattttctttcttttgagacggggtcttcctctgtcaacaccggagtgcagtggtgcgatcacggctcactgcagcctcgaactcccaggttcaagcaatcttcccacctcagcttcccaagctactagaactacaggcacacaccaccatgcccagctaatttttgtattttttatagagacagggtttcaccgcgttgcccaggctggtctcgaactcctgcactcaaaacaatccgctcacttcggcctcccaaagtgctgggattacaggcataagccactatgcgcggccaggaaaataattttctacctataattttacaaacgtagctaaactatgaagcaaatgtcagaatgaaataaatgcattttctttttctttcccccagcttaaggtattttgttaataaaatcattttcataatggaaaagactcagaaaattcccctcgcatgacatataacatccaacaaggggctgaaccaagaaaaaatactgcagctgctgctaatggcaacactgagcaagcacctggcctgtgccaggcactgtcctgtgcagtctgtgtttgcactcattttatcctcaagagccagatgagcatctccaccagacagcacctgcagaggcttgggcagtttattttaccgtctctgagtaaaatagggataataagtaacagtacccatacacaggtggcagagacgctagggaacttgcccaaggtcacagagcttccaagtggaggagcagggacacatatgctcacaatgatggcactaaggcacatgttgcctggatggagaccagcccacagatgagagttccaggacagagggaacatggatggatcaagtgaagtgacagaacatttggaaaactctaccgagatatatacggccccccagtaaaattaaagagataaagagaactacattaagtgagacaataaggcaactctatttcttgcaggaaaaaaataattgtggttatagaacactactggttctgaggtgaatagcagtcacagagccatcaaaatatgaccccactcactgaagtaatacaaagtgctagtgtagctatcccgggaagacgtggaaggccgagcaaggaccatggcacaagaggccacgctgtacctagtatggtatgcagtggccaagaggacccccctgattccacctagtgttcatgcccacgtgtgatctcctgccccgtgagctgggcctagccactcacttctgacagacagaagccaacaaaagcaacaggatgtcacttctaagtttaggttataaacacactcagacttccatctaggctcacctcttgctcactctgatgaaagccagctgccatgctgtcagctggggagaggcccatgtggcaggaactgaggaagtctttggccacagcctgcaaggaagtgaatcctgacacaagctcactagagtgagctgggaagtagatacccttcagtcaagctttcagatgaggccacaatcctagccaacattttcatttccacccatgagaaaccttgagccagaagacccaagctaagctacacctggattcctgacccacagataccatgataacagacattattttaagctgctatgttaggagtaattagttatttaggaataaggtaactaatacatttatattaatgggaagtcagcagagaacatttaaatggataaactgagaaatggctgtgtaagtgtgtgatctggaaacaggagaaaaatgcagccctgaagaaaggagttaagagaggaaggaggagctactatgtctcattttaaatcacgtgggtggcattatttgacttctttttaagtacacggaagtgttactttcttaaatgaaaatgaaggtaacagcagcagtaaactaatttccagtagatgaaatgtgactttgtaatcccaggaaaagggaagaatttgcaccaagaagttactgttacctcagaatggcaagagcatggatggctcttatcatcatctttatacttcttttacatttcctcattttttaaaagttttgtgtacatattacatttaggaaatccaatatatagtattaaaacagaaaaagtaaagaagcaggctgggcttggtgcccactactcaatttgactggcttaaaaaaattttttaaacgacatgtacggacagacataatacttgcttctgagcctcccagtctttcaaaaccacattagggaataagcagtatttgcatggttccagtgatatctgggagtaagtgaaagtaatgaaaacacagaagtaaacacaaagtaattatagttcacctttatacacacgttaacagaaatcatctgatcccctttgctgctaagtgagttgaaaagcgaaagcgtctgaatcccaccagcatcgctggatgtgtcatccactgagccttcatctcccatgaacttgacttttaaccaatttgctagaattctacagatttaaaaaaaacaaaaaacaaaaaaaacacttgaagaatctaattctatatttgaattataaagactttcaggaaaagaagaaagaaaaatatcacacagacctaggtccacaaataccacatcttactatgaagctgatctgcacaaaacaggctgttgttttaaaatggagcaacgatctgtactcgttcttttttttttttttttttttttgagccagggtctcgctctgtcgcccaagctagagtgcaatggcacaaacttggctcaccgcagcaagcaaacctgcctcagtagctgagactacaggcacgggccaccatgcccagctaatctttccattttttttgtagagtgtcactcaaagggtctcactatgttgctcatgctggcctcaaactcctgggctcaagcaatcctccctccacagcctccccagttgctgggattacaggcatgagccactgctcccggcttctacttgttcttaattgggcaggaggagggggcactccattccattagaatggaactggctcattctaatgtgacttaaaattctgaagcattaagattttcagcaatagaaaacatccctagagtttgaaatacatgttttttacagatcaaatttctcatacctgagaccttaagaattcttaagtgacatacgaacttagcaaatgagaagacagctattttaagaaatgactcaccagctgggcgtagtggctcacgcctgtaatcccagcaccttgggaggccaaggcaggtggatcgcttgagcccagtttgagaccagcctgggcaacatcacaaaaccctgtctctacaaaatatatacaaaactaagctgggcgtggtggtgtgcgcctgtaatcccagctacttgggaggctgaggcaggaaaattgcttgaacctgagaggtggaggttgcagtgaacaaagtgtaccacacgccagcctgggcgacagagtgagactccatctaaaaaaaaaaaaaagaatacaggctttctaagtgaaaaggtgttctggaattattaacagtgatggttgcaaaaccctgtgaatatatctaaaaatcactgaaatgtacactttaaatgggtgaagtttatggtatgtgaataacatttcaataaagctattttaaaaataaactgtaagccgggtgtggtggctcacgcctgtaatcccaaaactttggtagactgaagcatgcagattgcttgagcccaggagttcaagaccagcttgggcaacatagtgaaaccccatctttaaaaaaaaaacattaaccaggcatggtggcacacgcctgtagttccagctactcaggaggctgaggtgagaagatcagttgagcccaggaggtcaaggctgcggtgagctgttatcacaccactgccctctagcctgggtgacaacaaagcaagaccctgtctcaaaaaaacacagagactgtagttgctttaaaaatatgacttctgtatgctatgtggttacagaaaataagatcatgtcaattttttcttttttaaaatgccaaaagtttctttaaggggaaaaaaatggaactatagtaaacagactataaactatcttactgaagagtctaaaatgaagcaggtctatcaatgtaccttaacacagcttgaaataacaatcaactcttaaatgcttttggtctaagactgttgccaagtaatatggtttggatttgtgtccctacccaaatctcatgttgaactgtaatccccaatgttggaggaggggcctggtgggaagtgattgtatcatgggggtggaatccccctggctgttctcatgatagtgagctctcacgagatctggttaagtgtgtgacaactccccctcactgttctcatgatagtgagctctcacgagatctggttaagtgtgtgacaactccccttcgctgttgtcatgatagtgagctctcacgagatgtggttgtgtgacaactccccctcactgttctcatgatagtgagctctcaacaagatctggttaagtgtgtggcaactcaccctcgctgttctcatgatagtgagctctcaggagatctggttaagtgtgtggaaactcccccttgctgttctcatgaaagtgagcctcgcgagacctggttaagtgtgcagcacctcccccttgctgttctcattacagtgagctgtcacgagatctggttgtttagaagtgtgtggcacctcccactttgctgttctcatgatagtgagctctcacgagatctggttaagcatgtggcatctcccccttctctctctcttcctcctgctttggccatgtaagacatgcctccctccccttagccttccaccatgattgtgggtttcctgaggcctccccagccatgcttcctgtacagccgagccaattaaacctctttataaagtacccagtctcagatatttctttaaagcagtgtgagaacggactaatacaccaagtttatggaataaaaattgaaataatcaaatctaaagtttcaacttaaaatcatgagcaaaacagactgtaaatccaagcattaaaacataaacctacacttccgagttcccatcacacataagaggaatacccggccctggcccacaaccctgccctgcccactccacctcttggaaaccccacaggggaaaacccttcctgacctgccacaactctctggggactgctcctctacatccggcaacaccagcaccagcttccaaaacacatgctcctgcctcccagggaggtgctcagccacgagggatggcaggtccagagacgcccatgccacatcactgggaggaacagaccaccgtggattagccagtgtgtgagacccttgcaggagcagcacacacatcctatgagcaggaaggggcaggttggaggaaaatcaggttcagagattgaactgcaaactagaaaccaagtctggagctcatcgaagagacctcagttggagatgcatgaagggggctgccagtgtgacagattggggaacggggatcaccagggggtgcgcagaagggtgcagcatgacagacctcagcagctgctggtagaagtgctgaaccttcatctggtgagctgtcttgtttctgagccgccttaacctgcaaaggaaagcagaatgacagtgtccccgcaggagcttagtgagaagtactggctagtgtcccctggggaatactcaggagactgaaaaacacattttctgccaatgaaacgggttagaggattccttcattccacaaatatcatgttaagtatccactgtgtgctggctatgggagattcagcaataaacagacaaaatcctgccctttgagaacataggctctaatggggagagaacagcatctctaagtggctggcctggcatgtgtgaggtgtcggcactgtgggcaaatgctgccaggtggggctggagccaggcagggtgcgtgttgcagtctcactcagggtggtcaggtgatatgtgagcaaagacctgaaggaaacagggggagccagcgtgacaacttctggaaacagcagagggcatggctatgccaggccatagctggacctggtgtgtttggggagagcagtgagggcagcgagggaggggttgggtccacaatgcagagactcggggagcgctagggacgccgccgagaggcaacgccacctggctgagctgttggaggatccctctgttgtggtgctgaggacacgattggggcccagggtggaagctggcagacaggtgctgcagcaacattccagtgaggtggagagaactgccatgccctcggtgctgggtctgagagagatgcaagcccaggtttgtgccctaagcgcaggaggacaggacggcatcctatgagcaggaaggggcagggtggggaaaaatcaggtttagaggttgaactgccaactggaaaccaagtctggaactcagggaagaggcctcagttggagatgcatgatgggggctgtcagtgacagacaggggtgacagggctatcaccagggggtgcgcagaagggcagagggcagaggtctgggctgagggggcagggtggagggctcagacaaggagactgaggctgacaagggcagctacggaggggggacacaagaagccatgactccaggagaaggccaggtcactatgtgaaggcagccatgggtcagaggagccaggcccagccctggcctcacagcatgcctccaacaggctgggactgccaccccactgccggcgcagaacctgatggggctaaatgaaacccacaagacagttttcagagggaacatccagtgatgaccaggaggaggacaagacatgacatgaggccccagcggtgtgcctgctaggccctccaggctgcctccccagtccccacccactgggaggccagggagccctgaggccaggcaagaggtggcacctacatgggttctaaataaaggccaagcccagcatggccaggaatgcaggctgaggggggtcctggcatggccctgaggagccggttctgctcggggtaaccaggaggagtggcagggaggaccagggccacaccaaggggcctcaagagggaaataatggagggtggaggtggagtctggaagatgctgccacagaaagggggcagtgtgtgaaggagacggcgggaggaacagagggatggggcggggatgggatcggaagacacaggccagcgtggacctccggctcctccaacaaggatggaagtggcaggtacttaaactgggacgagcaggaaaagaacacgtgatgcagagtcagactcaggcaccaggacgctgagtctttcaaggtgaactcagagctctgctttgccagtggaacaagtcacatgtccacaactgtgggagacaaccttcaaaatgcaaccctgtgcctgtcctcgcctccaggcttcacctatcttcgcctccaggcttcacctatcttcaccctccaaacacacacattaattccgctcctggtaaaaccaagtgggggcaggggagccctgacgaggcaggcgacagctgatgctgacctggtgcaggagatgcccaatctccctgcatggcccaggtccaggaggcccctggccaggttctcttcagcaatggggcactctgcgctgggcgccagcgccctcagccggtcgctcacgtccacgcagcagggcgcagcagggaaagcccgcatttggcgcctcagtttcttgcgggctgtgacagcttccctccacctggggacatgaaaatgtatcatcacagagtgttttcagggtcttcaaactgagaaacacattgcagtcagaactcaggcatggggaaggaaggacatcaaatgagtgtggtgagcaatgaaactaccgaacgttaacagttaatactgaatgagctttggaggctgacttggcaatatggatacagatttaagatacatatacccagctgggtgcagtggctcacgcctgtaatcccagcactttgggaggccaaggcgggcggactgcctgagctcaagagttcaagaccagcctgcgcaacacagtgaaacccaatctctactaaaatacaaaaaattagccgggcatggtggtgggcgactgtggtcccagctacttgggaggctgaggcaggagaatcccttgaacccaggaggtggaggttgcagtgagccgagatcacaccactgcactccaggctgtgtgtaccagcaaggctccgtctcaaaaaaaaaaaaaaaaaaaaaaaaagatacatatatcccttgacccacagccaccactgataggaatttatctccacacacgtgcctgtgtgcaaacgggtgagatgtctgtctgtacaacaacagtcactgcaacagtctttaccagagctaaaaagagctacgtccaggctcggtggctcacgcctgtaatcccagcactttgggaggccgaggcgggcggatcacgaggtcaggagttcgagagcagcctggccaatatggtgaaaccccatctctactaaaaataaaaaaaacaaaattagccgagcatggtggcgcacgcctgtagtcccagctactcaggaggctgaggcagaagaatcacttgaacctgggaggtggaggttgcagtgagctgtgattgcgccactgcactccagcctgggcgacagagtgagactccatctcaaaaaaaaaaaaaaaaagagccacatgaaagtccatcaacagaagaccaggaaggtcatttatggtacattatcgcactgacctcaagaccactggcaacggggacagctcagcatgctgctacagccaagcctccacctcatatcagatggagcaaaggaaggctcagagcaaagcagggatcatgagcccatctgtgccaagagccacaagaaaggacagaaagtctctggatggtttcgcaagcagctgctgctcgcacaatggacaggggtctgttgtagaaggaagactcacttctccccatactcccttttatactgttccaactaccaaggacactattactgattttaaattttattatgaaatgaatcatacaacatacgtaacacatatatgcccagttataagattaataaatcatcaagcacctgtgcacttacacccagttgagaagttgtggccatgagaggcaccacctcccattcccaaaagtaaccactatgctgagattatgatcattattttccttcttttctttagggttataccactatatataaatctgaaacaacctatttagtttgaatatacactatttgtatattccctattaattgctttttctccactacttatattttgagaattcacccttattggtgcatgcagccataatctggcttgttcatagctgtctcccagcacctagtgcagtgggcaaatggcaggcaccctataaatatcagttgacatacagagtagccaccacgtcccaatctaactcctgacttttccccttatattgtatgtgtgtgtgtgtgtgtgtgtaatcaagtatttctgaaatgcagtataatccaattagtctattttaggtattcattgctataacattttccctcatccttttaccactgaatacagaaactaatagctcatatattttgaatttgttaaaagactcttccccgtgtgtgtggattttgcctgtaggaacacaggactcaccgctgtagatacttgcagaagcactgaagctcctggagggtctcctttgcagtctggaagatttcctccacgagaaacaagtccactaagtgggcacagacatcctcacagcaacgggccacacggaccctctggtctgtctctactgcattcctagaaacagggcaatcagcatggaagacactgcacttggggcccacagacactgagggcttgcttgaaaagtgcaagagtcagtcaggcgcggtggctcacgcctgtaatcccagcactttggaaggccgaagcgggtggatcatgaggtcaagagatccagaccatcctggctaacatggtgaaaccctgtctctactaaaaatacaaaaaaattagcctggtgtggtggcgggcgcctgtagtcccagctactcgggaggctgaagcaggagaatgacgtgaagccgggaggcagagcttgcagtgagcagagatcgcgccactgcactccagcctggacgacagagcgagactccgtctcaaaaaaaaaaaaaaaagaaaagtgcaagagtcggccaggcacagtggcttacacctgtaatcctagctctttgcgaggccaaagcaggcaaatcacttcaggtcaggagttcgaaaccagcttggccatcatggtagaaccccgtctctactaaaaatacaaaaaattagctggcggccaggcacggtggctcatgcctgtaatcccagcactttgggaggccagggcaggcggatcacgaggtcaggagatcgagactatcctggctaacacggtgaaaccccgtctctactaaaaatatgaaaaattagccaggcatattggcaggctcctgtagtcccagctactcaggaggctgagaatggcgtgaacccgggaggcggagcttgcagtgagccgagatggcaccactgcactccagcttgggtaacagagtaaaactccatttcaaaaaaaaaaaaaaaaaaaaaattagctgggcatggcggtgcatgcctgtaattccagctacttgggaggctgagctaggagaatcgcttgaacccaggaggcagaggttgcagtgaacccagatcacgccactgcactccagtgtgggcgacagagcaagactccgtctttaaaaaaaaaaagtgcaagagtctgcatcctcagtattaaaatgtaattctatcttcattgtaaaagaagctttaatacttaaactacagacacctagaaagacagggtaaaaagaattaagtggaacagggtgccaaattataggtccataggggccctcgtaacagttaagaaataaacctttatcttaataaaatagtcagaatttttaattattttagagacagggtctcactatgttgcccaggctggagtacagtggccaccacaggtgcagtcatagcacactacctggaacttctgagcttaagtgatctttgcacctcagtctcttgagttgctgggactacaggtgcctggcgtagaatttgtaaattaccatgcagacaaccacaaaatcttctcatcagcaacatctgacttgtgcaatcaattggaagtgtctcaaatatatgataaatgccagtggctaataaggatggctgactatgatcatgtggtggcagccctcatataaaagagaattttttataataaaattctattagccaagggagcacagaggactgcatcaaatacatttggtcacaaaatcaaagtagcttagacaggcaagatccatttccaatagcccatcctcagtggtgcaagacacagcctagggcagagccaaagctcactctcctggcacagcaagacaccagcgtttcacttacttcaactcctgggagcaggtttccctcacaaactccatcatcacgcgttccatcagctccacggccaggccctggctcagctcacttaacaccagctctctctcttgtttcaacctacagggaagagaaaaaatacacaagggtaatgtttaagaataaaaataagtgctgtttgttttactccctggccacgcagacagggattgaggtgtgctgcctgagtcggtaggccacccctactccagctcccctgacaccacctcccttcccctgcctttcctggctgggaagggccactgctcacgggtaggtgtggcctgaggagctccatccaccccctgggctgaagcataggagggcatgagtgggtcagcaggggtggaatggtagcacagtggacaatagcaggagcatcgtggctagggtcagttcttgcctgtgtccacactgagctccttattcggctgcatggacaagacacacttacctttcctcttcagcccgctgcctctcctgctcccttcgctctctttccttagacacttcttcagctgcaatgtgcctcaaaatgcccgtggttgcagctgttaacaaatcctccatagcagcattagaaacactaaacggagcaaaggggatagcattcaaaatcagagtcaaggccgggtgcggtggctcacgcctgtaatcccagcactttgggaggctgaggtgggcggatcacaaggtcagaagatcaagaccattctggccaacacagtgaaaccccatctctactaaaaatacaaaaattagccaggcgcggcagcacacgcctgtagccccagctactcaggaggctgaggcagaagaattgctcggacctgggagcgggagactgcagtgagccaagattgcgtcactgtactccagcctgggcgacacagcgagactctgtctcaaaaaaaaaaaaaaaaagaaagaaaaatatcagaaaaaagccaagtcattgacaagggaaaaaaaacacacaggttgagtgtccctaatccaaaaatctgaaatccaaaatgctccaaaatctcaaactttttgagcacaacatgtcatgcttttcaaaggaaatgctcattggagcattttagaattcagattttcagatttttaggtaagagatactcaactggtacatataatacaaatattccaaaatccaaaaatatctgtcatctaaaacccttgtggttccaagcgttttgaagaagggatatgcaacctgtacttgtttggctgccagcagaaaaattaagcccactgttagaaacacaccatctaccaaaactgactcatgaagaaacagaaaaatgtgagtagacctataactagtaaggagacttccaaacaaagaaaggtatgagaccagaaggtttcactggtaaattctattaaacactaacgaaaaactaaccaccaatctttttcaaatcctttcaaaaaactgaagaggagggaatatttactaactcattttatgaggctagcattgctctaataccaaagacagaccaaagacactataggaaaactacagactgagcaggcacagtggctcatgcctgtcatcccagcatttcaggaggctgaggtgggagcactgcttgagcccaggagttcaagactaacctgggcaacatagagagaccccatctctacaaaaaattaaaaaattagccgggtatggtagcatgcgcctgtggtcctagctacttgggaggctgaggtgagaggatggcttgagcctagaagatcaaggctgtggttagctgtgattgtgcttctgcactcgggtctaggtgacaaagtaagaccctgtctcaaaaaagaaaaaaaaaaggaataaagaaataaaaaggaggccgggcgcggtggctcacgcctgtaatcccagcactttgggaggccgaggcgggtggatcaggaggtcaggagattgagaccatcctggctaacacagtgaaaccctgtctctactaaaaatacaaaaaattagccgggcgaggtagcgggcacctgtagtcccagctactcgggaggctgaggcaggagaatggcgtgaaccccggggggcggagcctgcagtgagccgagatcacgccactgcactccagcctgggcgacagggagactccgtctcaaaaaaaaaaaaaaaaaaaaaaagaaatggaaaactacagaccaatatccctcatgaatatggatataaaaatcctcaacaaggccaggtgcggtggctcacacctgtaatcccagcagtttaggaggccaaggcgggcggatcacgaggtcaggagatcgagaccatcctggctaataatggtgaaaccctgtctctactaaaaatacaaaaaattagccaggcttggtgacaggtgcctgtaatcccagctactcgggaggctgaggcaggggaatcgcttgaatccgggaggtgggggttgcagtgagccaagattgtgccactgcactccagcctgggcgacagagcgagactccgtctcaaaaacaaaacaaaacaaacaaacaaaaaaacaatttaacctaggaggcaaaaactttatacgttgaaaactacaaagcattgtcgaaagaaattaagaatgacctaaataaatggaaagacatcccacattctcagattagaagatttaatattgttaagatgacaatactggccaggtgcagtggctcatgcctgtaatcccagtactttaggaggctgaggcaggtggatcacttgaggccaggagttcgagaccatccctggacaacatggcgaaaagcatctccacaaaaaataaaaaaattagccaggctggtgcccacctgtaatctcagctactcgggaagctgaggcagaagaattgcttgaacccaggaggtggaggttacagtgaggctgagatggagccactgcactccagcctgagcaacagagcaagactccatctcaaaaaaaaaaaaaaaaaaaaaaaaaaaaaaagatgacagtaccacccagaacaatctacagattcaacgcaatccctatcaaaatcccaacagcactttctgcagaaacagaaaaactcatcctaaaattcgcatggtatctcaggagaccccaaatagcaaaaccatcttgaaaaagaagaatgtaggggaaaatcttcctgacactgtatctggcaataacttattggattatgactccaaaaacgcaggcaactttatgagaggaaacttctggaggactgggtgcagctccccgcagcacgtagcaggaggggagcacgagatgccactcaccccagggcggcagctgcgtaggcagcacccgcagagccaacttcctcacagtccctctgcagggcctcctggatgagctcgtccaccacctgcgccaggtcctgtggagagaccagcatggggtgtaatggaacgtcccacccagggcagaaatgctgggtaacatgttgtcaccggacagtctgcaggcgtctcgtgacagaagcacaacccctgacacggggtcggctaggctgttgcaggaaaggtgtcccctagcgaatggaaaggtgccatctggagaggaaggcgccctgcggatggccacacagcgccctggcctagccatctccagtctacgtcaagcagcctctgtttctgtgaccactctatgctccccctaagcactccctgatccccagatgggctggtgcccagtgcctgccccgaagcagccagagtggcacaatccagtctcacaaccatggagtcgacaggctctactcaatatcaaggcacctgtcgggaccatgcccaccctgaggccacaaccatcaaggggcacatccacccccaggccaggctggtcaaggggctcacccacccccaggccatgcccatcagggtgcacagccagagaccacacacaccagaggggacacgaccaccccgaggccacgcctatcagggggcacagccaccccagccatgcccatcagggggcacacccgccaggggacacgcccatcccaggtcacacccatcagtggggacacccaaccccaggacatgcccttcaggggacacacccacactcagtccatgcatattggggtcccatcagggggacatgcccactccaggccacacccaaggggacacacccacccaggccacacccaccaggcggacacgccaccccaggtcacacccatcagggggcgcacaatgctgccaatgatcccgtcaggaatagacgggtgttgagttcagacacacgggctcaggccggtgctgtgacaggaagctcctgagatgaagacggactccagaatgagcctgaataggtgggccctacctgaggctgagtgactctaggcaggacccctctctggactctcctgagagaccaggcgccacagccccacctcatggggtgatgactaaggacgtttgcgcacaatgggcttcccagagtccagacctagaaaaaaagagtccctacctcgtcagagtacatgggcacgggctctggaggcggtggttcaggctgcacagacagctggaagaggctgggcgccacagacggggtcagtgccaggacaggaggcagaggcactggtgagggcgcaggggctggtagagactgtgggagactggacaggggtgcatccggctctacaccacactcctctcctctccctccgcctggaaggaaacatacaggacaaaacatagctgcagacacagggtgcctggcaccacggggaccgaggtctgtgcagggacagccccaggccacccacagtgaccctgaggactggcctgccctccaggagaccagctacgtgggacaacatacgctttgcatgaaaaacaagccccaggatgtcagggagccaggaggagggcttcaaagccctcagtccactcccagtgagaaccatctgagcatgaggaagagccacacccctgggccccaagacaagacaggtgctcaggctcctgggaggcgtcctggcgagaaaatgcagatgcccaggctcctgggaggcgttctggtgggaaaatgcagctagtcccctcactacgactgcagcttcactcacccactgtgtcggagccgggtctctgggtgctgacgggcagctccgcggccaggctctccccgatgtacttgttctgggagttgaagctgcacacaggggtatgacgagggacggggggcaatggccctccgttcacaatttccccgactgacaccgtcagcttcctagtaataaacaccgacttcctggtcttggataatccctctggttccaggaatgcagaccggttcagctccacacagctacccagaccacaaaagacccccgaggggtgtcaccaggggagaagacagcttcgccctcagtgccctgccgagtactgcaagccccttgggtgtcaccacagccatgtgtaaataacagaaagcacaggcgccaggtcccactgccgcccaccctggagcctctgtaggtccctagaaccactaagcccagcgtgttaacagacgcacgctgactcactcctgcctccttgctggctcacccaaaaccgtctaattttctgaggacagaactggaaggaggagacagaactagaaggagacagaactggaaggaggagacaggcaggaggcaggtgaggagttagaggagacagggtggggaactaggcaccgggtgttgagtgtaagctgccagtttctgagagagcgtctgtgagtctcaccactctgactggtaagtaccggagaagactccggctggcctgcgggtgcctccatcccagccgtcagaggttgtccgtcattggctggcaaaggcagtcaagggaaagaataaagaaggccctaacttttatctttaggtttgtcagcaagtcatgaaaaggactgattttggagtcacaaagaacttggtctgagccctcaatgtgctgacagccaggatgtgaccttgggaacacccccagccattctgagtctcgtgtgttcacctgcatggcagagggaatgcaccttcttcaagtcaggcaagcagccagcccttcacagcccttcatcagaattaacaagaaaaaaggagacaggggccccacagttccattctcagctcttacccgtcggaaacggtgaggccgtggcaggtgaggaagtcggtggcctcttcacagtctctgaacagcagcatgcgcaccacaccatccaggggaaagatggtagatcgctgtgtgctcaccgtgtacgcaaagttgagcgcccggagagcatccttgcggatctgagaggaggagcgaaatcactgcagtctcagacgaaggcccagtcagacacatgcagtcagcccatgaccacagccatggccagcgtggggcacatgggctcctcctgggctgagtccaccagaaggcgctttggcaacacggaacccaagcttagagatcataggcggtctgctcaggggcagtgctcaggaatgcgtgccaagcaaacactctcatagagaaggatggcttgtgaaggttttattcataagagaaatcatgaaacaaactgtccatcaacaagaccaggtgaagtcagctgtgcagcatccacatgacaaaaggccaggaaggtgctgcagaggaccccggagaccatggaatgccagcaggaaaccaatcccgtggaatgacatataatagttggagacaactgttcacggcattctaacaagagccttaaaaaaaaaaaaagaagacagagaccaggtgcagtagctcatacctgtaatcccagcactttgggaggccaaggtgggaggatcacttgagcccaggaattcaagaccagcctgggcaacatagctacatcctattctctataaaaaaaaatttgttttaattagtggggcttggtggcatgcacctgtggtcccagcaacatgggaggctaaagtgggaggactgcttgagcccaagaggttgaggctgcagtaagccttgatcacaccactgcactccagcctaggtgacagagtgagaaccagtgtcttaaaaaaaagacaatggggctgggtgtggtggctcacgcctgtaatcccagcactttgggaggccaaggcaggcgggtcacttgaagccaggagtttgagaccagcctggccaacatggtgaaaccccatctctactaaaaatacaaaaattagctgggtgtggtggcacgcacctgtaataccagctactagggaggctgaggcaggagaatcacttcaacccgggaggtggaggtttcagtgagccgagatcatgccactgcactccagcctgggtgacaaagtgagactccatctcaaaaaaataaataaataaaaataaaagtaaaaatagacaaaggaaaaacatgaaaatccgaacaaaaattctgcttgagtgctgggactttggtacctaagctgttagtcctcttccgatgttctttaattcaaccaacactgatcaagcatttgctctgtgcctggcaccgtttttaatgctgagagtacaacagtgaacaaaaacacaatccctgtccccacatagctgacatgccaggggagagaccaatgccacagaaaacaaacacatcaaacacacagaatggtgatttagtgcggcagatgggcagggagagcagggagcgctggtgggggccctgctgagggcggcagccaagcctcgcctggcctcagggaggtggagacagcgccgtgcggctctgcgagtgtggaacagcagtggaaacagcaagcacaaagcctctgagcaggagtgcacagggctgcggggacaggaggctgcctctgtgcgccactgccggtgaagagcttttctaaagaaaaatacccgaatatctcttttgtttaaagttattaaaaacggccaggcaaggtggttcatgcctgtaatcccagcactttgggaggccgaggtgggtggatcacctgaggctaggagttcgagatcagcctggccagcatggcgaaatcccatctctactaagttagctgggcgtggtggcgggctcctgtagtcccagctactggggagggaggctcaggcaggagaatcacttgaacccaggaggcagaagttgcggtgagcagagatcatgccactgcactccagcctgggcaacagagcgagactccatctctaaataaataaataaataaagttattaaaaatggtcaacattctactaacgctcaatcatcgtgtatacaacattaactatgttttatttttgtttattttttttgagagggcctctgttgcccaggctggagagtgcagatcttggctcactgcagcctcaacttcctgggctcaagcgatcctcccacctcagcctcctgagtagctgggactacaggagcatcccaccacacctgcctggctttttttttatttttagtagagacagggcctccctatgttgcccaggctggccttgaactcctgagctcaagcaattttcccacctcccaagtttgccaaggtgccaggataacaggtgtgagccaaagcacccagccaatattaactacaagtggcaagttgtggaaaaccttttcatttactccagaatatcagttctgtttggcaacctgcagatctgacaaggagcaaacctgcaaaagaccttctgactgtgacatgactgtgggtttagtcactgtttacaggaggccctgatgtgtgaccaaagaaatgacctggagccacagatcaaccaaggcaggtcccaggatctcccaggcagcatcctccccacgctgtggccactacgggcttgtggcaaggaatcctggcagcctccttggagccgctgccagaatgggcagcagagtgtgtgcgaggtgaggtggcgctctgtgcggtgggccgcggtcctggtcacattgcactgaacggaatcatgcagggcctagaacagcaggtgctacaggggctgctctgtcctcatccccaagttccgtggaagtggaacaaaataaccgactggaaaccccaagacacagtttactctgcgcaaaccccaggggagggactggccttcccattgcctctgcaaccctagcacacggcaaagcacagacactgaggcacccactgaaaggaacttagcgccatcagcctcactccagaaacttcgatttaaaacatgaagcatttcaaagtcagagattttgtgcatatgatatgagatttttgctttttagttagctttcatggatgatgatagtgctgaattcaacctatgttttcccaaagagatttttcttatttgaaccatggaacagtattttccattgcacagcctttccggatggtgaccaacagtgataacccctataaaacagggcaacaccggtaaccccttcgtggggctgctgcaagggtgacacagcatcagcctgagacctcctttgaaaagcttggaataagaaagcacccaaacagcacaagaaccacctgctttcttccaactctgcaagcacagctcatttactcacctgactgaagtaacagtgtaaaagacaagcgttcaggtaagaagctgactggaccagtttgaaaaatctcacaaaattattactgttcaatgcagcaaaagcctgaacagcaaatttcacctcagatgagtttctaacagcaggatggaactgttgtacttctctgttaattaaaggagagaaaaggggttggaatgttattttaaataagacaaaattttcatgaagatagatctgataaataatagatttcactggccagatgcagtggctcacacctgtaatcccaaaacgtggggaggccaaggtgggaggatcgtttgagcccaggaggttgaggctgcagtgagctgtgatcgcatcactgtactccagcctgggtgacagagcaagaccctgtctcaagtaataatgatactggatttcaaccatactgagaaggagggtcttactggtgaaatgtgccgttaaattcatagtttactaactaccacgcttggattggtttgacaaaggtttccttcaaaacaataatgaatagaataaacaaattcaaaaagcaatttaggaatcagttatcaaaaagttactttaaagtaatgccaatggactgtcagctgtgctggatggtaaagtctaaaaaacagaaaacttaactctttttgtttagaaatgaattgattttgactgaattattcgtgatggagaacaaatgcttgtcacgtagaaaaagacaatacagcaatctttcataaccagtttaattttttttttttttgagacagagtacttgctctatcacccaggctggagtgcactggcacaatcacagttcattgcagcttcaacctcctggcctcaagcaaccctctcatctcggcctcccaaagtgctgtgataacaggccatgggccaccacacctgggttttttttttttttttttaagagatagggtcttgctttgtcacccagactggaggacagtggcatgatcacagcttactgcagccttgacctcctgggctcaagggatcctcccacctcagcctccccagtcgctggaactacaggcacacatcaccacacctggttaattttatttatttattcatttttgtggaagggtctcaccatgttgcccaggctatacaaggcttaattttaaaatttaaaatcagccgggcatggagactctaactgtaatcccagcactttgggaggccgaggcaggtggatcacctgaggtcaggagttccggacaagcctggccaacatggtgaaaccctgtctctactaaaaatacaaaaaaatgaggcgggcatggtggtatgtgcctgtaatcccagctactcaggagactgaggcaagagaatcgcttgaacccaggaggtggaggttgcagtgagccaagatcgcactactgtactccggcctgggcaacagagcaggactcggtctcaaaaataaaatgaaataaaaaattaaaatcaaccacacatctagatattctgtcacacagttcttgaggaaaatacaaagaaaaaaaaaagaggttcaccattgataggggattcttagaactaaaggggacactgtccaccataagtccagcttaaccacaagcagagggtccaccacaagcagagggccagagagctcgccagacttcgcatgtaagtgactaattatggatcagaccagggttttacattcattcattctcactaccccattcttcgcatttttgttttacataattttttcctctcttattctgagatctttgacaaaactatctgggaacagggaactgctaacaaccttgcagggcacctggaactccctctcctggttcactcacctgtctcatgaggaggattccttcctcattttctcactggtgaggagaaactattttcagaaatgaacatgtggggcctacgtcagatgtgctggtcccagggcacacccccatcgctcttcccccagctcagctcagccgactgcaaagccagaccaaggtcctctactatcatcccaacatctgctaccagacagaatgctgcactattggctactgccactcctgaaagctcttctcctgtttaaagcctgccttttcagccaccttaggacaacttttggatgtgaaaattcaccttaggatgtctcccttgttgagactgagcagaacattgtagccctggaactccgcttcgctggcacagaagacacccttgtttctcaggtcctggtacatctccttcaggctctgcaggcacttggtcatgttctcattattgatcttggcatcaaaggaggacatgggctcctcacacatgaagtgggcacagtggatgtgaaaccgggtgcacttctcaatcagggacaccgtcagggggtcacagaggtgctgctgcgtgatatcctggccacaggcgagggggaggatcacacacacattcccatgcaaagaggcaaccgtgagaaggatcatgctacgacctcaatttctcacttttcaatttgaaacaaagcccatgatgcacattttaataggactttgtagtgacttaaataaaagtcctggggtttgtttttttttttgagacagaagccaggctggagtgcagtggtgtcatcttggctcaccacaacctccgcctcccaggttcaagcaattctgcttcagccgctcgagtagctgggactacaggcgtgtgccaccacgccaagctaatttttgtattttcagtagagatggggtttaaccatgttggccaggctggtctcaaactcctgacctcaggtgatccacccacctcggcctcccagagtgctgggattacaggcctgagccactgcacctggcccacaaaagtacatttttgttacagataaaatatataacagagtaataaaaatatcagtttgactttggaatttgcgtggattttttagcatccaggttggaggcagccaataccttccgtatgccacgcgtgcggttccacacgaagtcataccaatcccgcaggctgccctccttctggtccatgatctgggtcaccaggtagtccatggtcctgctgagcactggcaagggccgcagctcgtggggcaggggctcctcctgatccgccgaggaccgactgtactctttcacagctgctgcgtggtccacctagagacatgaagccgagacaggatgcccatgtggcataccttgggccaggcatagttatgcctgaaaatgagggggaaaatcacatacacacccacacaagatcagtatttgagaatatattttttcaacataaaatttctgttaaaaggtgacaatcaaaattcaaagacaaatagagaaatttgattttggcaaatatgacaaggagttaagatatgagtgcgtcatgacaaacaggaggaatgttaagtgaaggcacatctgctagcctccaaagcagagagacgggacagggaagggcctcaagcacttaaaaggtctcaggcccgctcacacaccagattaagtctacacagagcagaagtgaaacagagacaggcggtgaggactgctgaggacacagcatcaggggctggctgcccacctggggcctggaattgcatctcccacctcaaaaggaggctgaagacgtggccaagggaagaggcagagatgtacacaggacaaggccctgggcatgtgcctctcctggggcaggggccctacagtgacacgagttgctgggctggggaccccgcaccaggcgaagggtgtataaagccaccagccaggaagaggagaagcccataagcaaaattcacaaagtccaaaaggatctatattggtgcagctttctggggcaacaatttgggaagatacatggataatgttcaggaaaggtcataccctctgatgcagtaatttaattcttaggatctgaagaaaataatctaaataccagagaagcattacatacaagatgccaaacaatattactaatagaactaaaaatttagaagcagcctatctactaatggtaaaaatgcagagttttgacagagctactaataaaataatatgctgtcatttttaaatgctcatagtttaccctaacaaaggaaaatgttcatgacataattttaagtggaaaagatacacataaaattgtatctagagcataatctcgaatgtgtaaaacataagcatagaaacagacaggaataagatcgtaaaaagaaaaaagttagctggatgtggtggctcacgcctgtaatcccagcactttgggaggcggaggtgggcagatgacttgagcttaggagttcgggaccagcctgggcaacacggcaagaccccatcgctgcaaaaaataaaacagtaactaggcgtggtggagcatgcctgtaatcccagctactctgtaagctgagtgagaggagaggatcacctgagcctgggaagttgaggctgtagtgagccatgattggaccactgcacttcagcctaggtgacagagtgagaccctgtctcaaaaaaaaaaaaaaaaaaaaagaatttgaaaaacaactttatttaaaataacttgcatctataccttatcatgtataggtaccaattacagagtgaacatctcacaatgcaaaacagcttaatatgattgttaatagcacaaatacccaacactgtctaaaacaaacacccaaatcaagtatgtacagaaatgacaaaagcagccccgtcccctgcccacactccacggggagatgcagggctctacctggtcagtccctgggaccacttcgaacacgctcagctggctacgggtctcccgcatgtacctctccttctcaggacacatatccaggcaggtgccaacaaaagtcctcgctttgtccagatcggttctcttcacccgagctaaatgacgtcaagtaaaaggtaagaatgtaccacatggttagcacgaacctacagaagtgtattctcataatgataaaaagaaattaaaacttaaaacacacacacacattacaaaagaaaagaaaaacatttgtaaaactcagagcctcagacaaagaggacttatggtctattatgccaggcagtgggacatcaaagctcccaaagacccgagtccacctctctctaacagtcacagaccctcactgcagactaagagaaagacccccgagtcacctctccaacagtcacagaccctcactgcagataaaagcaggggagtgtcctcactttcagccggagttttctaactcctgtaatgacctcaatgacaaaaaatcatggtgcaggatgtttactaaaaggattgacttgtaacaactgcaaatattcaaaatatatcactattctaaaactgtctcagtattcaccatgactttaatataagaatcatataatggacgttaactgggttcttacctgaatgagtaaactgctattacacttaagttacaatgtagcttgcaaggaaaaggaaatgcaacaacttcacactcaaaatatatacttattgttttcatgttgaaaaattctaatacctgggcccggcctggtggctcacgcctgtaatcccagcactttgggaggccaagactggcagatcacctgaggtcgggagttcgagaccagcctgaccaacatggagaaaccccatctctactaagaatacaaaaattagccgggcgtggtggcgcatggctgtagtcccagctactcaggaggctgaggcaagacaatcacttgaacccgggaggcggacgttgcagtgagctgacgttgcgctcactctgtcatggtactccaccatgggtaacagagcaagactccatctcgaggaaaaaaaaaaaaagaaaaattctaatacctaataataatttttagaatataaaaatcactgtatcaatgatatgatgtttgatggcagcttttattactatatgttattatattaaggaaacatggtgattattcaaattatccacagcttttaaaaagaggaaactcctatagctgattttttttttctttttgagatggagtttcgctcttgctgcccaggctggagtacaatggcacaatctcggctcaccgcaacctcagcctcccgggttcaagccattctcctgcctcagcctcccaagtagctgggattacaggcatgtgccaccacgcccggctaattttgtctttttagtagagatggggtttttccatgttggtcaggctggtctcgaactcctgacctcaggtgatccaccagcctcgacctcctaaagtgctgggattacaggcgtgagccaccacgcccagcatttttttttttttttgagacagaatctcaccctgttgtccaggctggagtgcagtggcacaatctcggctcactgtaacctccacctcgccagttcaagtgattctcctgcctcagcctcccaggtagctgggactacagatgcacaccaccgcacccagcctgcttatttattatttatttatttattgtagagatgggggttttgccatgttggccaggctagtctttaactcctgacctcaggtggtccctcatgcctcagcctcccaaagtgctgggattacaggtgtgagccaccatgcccagcccggctgaaatttaagagaaaaaaattggctaagagaagtacctgtgttttttccttttatttttggtccctgcatatatttttagtgttaatggaatacttactttttagtaggtaatacattcacacagttcaacattgtaacagtgtaagaatgccctgtccaagacggagcactccaccataacctctgcccctcggaatcccgctccctctacagacaggagcccattcttttgcatcctcccactactattttatacatacattagcaaacatatttgcacatttatgtacacatacacgcaacactcactccaagaagacaggcagactatgaagatcagacacagcatatcacaggctctgagactcaacagcaatagagcccaatggaaaggagttgctcctgccctgatggcacccaagatgacgacctcaccaggcccctagaacctctgccaccaagtgccataccttgccgcatgatcctgtctctctggtcaagcaggcggtacttctccttggatgtctcagccacagtgcctatcagggtactgagggagagcacacatggcccgaggccctcggagccctcggaggctgagtcaaaagagtctccctcgaattggtgggcctttagaagacttggcttcttcactggagagctataaagtaaacaccacactgagggccctcgtcccaggaaggccttcagagcattttcatttctgaacacgtcccctcatctttcaagattttctggtcctctaaagctgagaaactacaagcactgaaatgagatgagttttgataaggatggtaatgagcacaaaagcgttattcacattactcactgactttaatataattttgaaatatttcatacttttgaaaaacaaaatagcctgggcaacatagggagaccccatctctacaaaaaatttaaaaattagccgggcatggtggcatgtgcctctagtcccagctactcgagaggctggggtgagaggattgcttgagcctggcaggcagaggttgcagtgagctgagattattacactgctgctctccagcctgggtgacagagtgagactctaacttaccaccccccgaaaaaaaaaaaaagataggctcatttaaacagctaaaatgaacacttactgatttctatttcaaagaaataaactcagcatgaaaaaagtctttaatatcataaggaaatattaagcctacatgttttaaaacagaaattattttggtagaaggacatactaaaaggaatcaggcattctctctcagcttccccattttctagctttcatcattttctgaacttgaatgtcaaagattatgtcaaaccagcaactaaactgctcgtcacaaaacggaaagtgaggaaaatacattggccaaaagatgaaaagatggattcagccggagatctgtcaaagtaggcctggtgtgaaaagcaaaagcctttgagaacagagttccccagacagacaaggtagccagggcacttcacatcacatgccggttaacacaactaacatggccgaccgtgtctgcttcactgtgataagctgcacctgcaaaaagtcatgctgcccttcctttaggagacagcctttttttttttgagatggggtctcgctctgttgcccagtctggagtgcagtggcgcaatctcggctcactgcaagctccgcctcccgggttcacgcagttctcctgcctcagcctcacaagtagctgggactacaggcacctgccaccatgcccggctaattttttgtatttttagtagagatggggtttcaccatatcagccaggatggtctcaatctcctgaccttgtgatccgcccgccttggcctcccaaagtgctgggattacaggcgtgagcactgcgcccggccaggagacagctcttcaggaaaaaaaaaaaaaaaaaagtaatgctggaaactgctgaaagtgattattagaaatgcatggtttggccgggcatgcatctctagtcaggagttcgagaccagcctggccaacatggtgaaaccccatctctactaaaaatacaaaaatattagctgggcgtggtggagcgcacctgtaatctcagctactagggaggctaaggcaggagaatttcttgaacccaggaggcagaggttgcagtgagccaagatcgtgccactgaactccaacctgggcaacagccagactgtgtctcaaaaaaaaaaggaatgcatggtttattacagccagttaaatgtcttgaggtaaaaagttattgcttatacatttatatgtcaagtggaactgcacttaactgcagtgggattcaggacgagttagatgagcaaggagatttcctactacaatcctgtgaggcaggcagcgacccgccacagggcgccagcctgcgtgtgtcccacagagcaggcactctgtgcaaggacagaagttctgctgtcctaagtgagcagcctcccctggatctcctgtagctgcagctgaaaggtctgtaccagctataacaactgtgtgatgagattctcccatagaaaatgccaagatggaaacaagaaaaaaaggccagccccaaaggaaggctttctcagcaaccttggccctagggtatatgagaacaagacaggacagaatcactgctctccaccatctctgcagctggcagttaccagtgtcagaaaattctctcttctggctgggaccaccagccccacacagacccacctcctaacggcccatgctggcaggaggggcagagcccctgcccctccacccccaaccatccctagcaactggcttttgtctcctcaccactccccacagtcttgcaccctgactcaggtgtcgctatagggcgctatttcctggtccttccggaataaggtcattaggagggaccgatcccaccttttattcaggaggctgctagcaccagtcctccctgcggccttgccaagaggagagtgctgaaagggtgcatcctctgtgctcgggctgacttcaccgtcacctggtttcttctccttcagggaaaagggtttcttattggggcctgtggacataggaggcagaaaagagtttatgcaatcacagatcacctggaactggattttttcactctgtttctaagaaagtaatattattttcattgtcacaggaggttagagaagagcccaaggaaataactgtgagatgcaaatccactgagagccagcctcctccactggctggggaaagggctcacgctcaaagggtttggaccaagagcatgagaaactgaaaagagggccatgcacaatggctcatgcctgtaatcccaagatcagactgggcaacatagcgagatctcatctctataaaataaataaaaataatttttttaaaaagtgaaaagaataattgaaaactcacttattttcttcctgtgccaaaagatagccatgtctttatgcaaacttttccccttctttctagccagggctgcagatgcctggaaaacagtccacaaccgccatgtgtgagtatatcaggaaaccaaaggaaatgggattgaaaactcaaatgcagtaagcacaacagaccattcaaaggcaccaggagctcctgtcctttgcacgacagtgatttctccacccacacgtctgctaactgcatggtctctggctgcggcagcagcagtattcatctcccttacctgtctcacaagcatgtatttgctctttccccctttttttttttgagacagagtctcgctctgtcagccaggctggagtgcggtggtgagatctcagcttactgcaatctccaccttcagggttcatgcattctcctgcctcagcctcctgagcagctgggactacaggcgcccgccaccacatccggctaattttttgtatttgtagtagagacggggtttcaccgtgttagccaggatggtcttgatctcctgacctcaggtgatccgcccaccttggcctcccaaagtgctgggattacaggcgtgagccaccgcgcccggccccttttttttaattaacaactttgcttcatagaactcacaaacttggccttgttggcatttggtgagatgattctcaccagctgatcacacatacagagacagaaagtttgcgaagtcacaattaagcacaaaagggagctgcagaataacacacatgggatgccacttaccacagaaaacacacacaaaaccaaccacgttagtctccgtgtagatacactcataaaaatgtctaaaaaaatacacatcacactagttaactggactgctcctgagtaacaggagagatgaggatattcagttttgtctgtatcaatgaattgtttataaaggcagtctatttacatattagttatgtcataaaatatttaaggttcagctgggaaaataagcacattgcaacaggcaaaaaataactgtaaaaacaaaagggggttgggcatggtggctcatgcccgttatcctagcactttgggaggtggaggtgggaggatcacttgtgcccaggaatttaggaccagcctgggccacatagtgaaacttcatctcaaaaaaataaataaataataaaataacaataaaataaatagtagtaataaataataaaaacaaggccaggcatggtggctcacgcctgtaatcccagcactttgggaggccaaggtgcgtggaacactgaggtcaggagttcgagaccagcctggccaacgtggtgaaaccccctctccactaaaactacaaaaattagccaggcatggtggtgcacacacaatcccagctacttgggaggctgagggaggagaatcgcttgaactggaaaggtaaaggttgaagtgagccaagattgcgccactacaatacaggctgggagacagagcaaggccccgtctcaaaaacaacaacaacaaaaatgagagccggtacaatgactcaggtctgtaatcccaacattttgggaggctaaggcaggaggacagcttgaggaccggagttcgagacctgcctgagcaacacagtaagaccccatctatacaaatgtaaaaatacaaactttttttaattaaaaaaattaaaactaaaaacaaattaggattaccatatgacccagcaattccaatcctaagaatataccccaaaaaactgaaagcagggactcaaataagtcatatgccaatgaacattattcacaatagccaaaaagtagaaacaacccgcgtctgccaacagacgaatcaacaaaacgtagtccatccactcaatgtagtatcattcactttataaatttatactttataaattcctatagaacgtaattttgtctatgagaatactcagaaaaaatagtgacgatataaagctatataacataagcagtccacgttcactgcaccctagaaagtattatgcatacatttaggctgggcgcagtggctcacgcctgtaatcccagcactttgggaggccgaggcaggcagatcgtgaggtcaggagatcgagaccatcctggctgacacagtgaaagcccgtatctactaaaaatacaaaaaaattagccgggtgtggtggcgggcgcctgtagttccagctactccggaggctgaggcaggagaatggcgtgaacccgggaagtggagcttgcagtgagccgagatcatgccacggcactccagcctgggtgacagagcaagactccatctcaaaaaaataaataaataaataaaaagaaagtattatgcatacatttaaagtcaggatacaaacccagtgcttcaaagcagttatctctagaggacagactgacaaggggaatttcactttttttctttttcttttttttgagacggagtctggctctgtctcccagactggagtgcagtggcacgaactcggctcactgcaaccgccgcctcccggattcaagcaattctcctgcctcagcctcccgagtagctgagatgacaggcgcgagccaccacacccagctaattttttgtatttttagtagagatggggtttcaccgtgttagccaggatggtctggatctcctgacctcatgatccgcccaccttggcctccccaggtgctgggactacaagcgtaagccaccacgcccggccaatttcactttttctgtattgtttgaacgtttacagcgatcatcttctatgaccaaataaaacaaaaacaaaaccaaaaaactcaacttccaaaagtactatgtggttagagcctttcagaagaatttctgaatttctaaagcctttcagaagaatttcacttcatgagaacaactctcccagcatttctagagtactatattctgtagggacctagaatatgccaagttatgaaataaatagtgctatcccagcctatgctaataagatatttgagtactttctctatattatagtaagcaaacaactgagggaccaaaaaaaaaaaacaggttttaaagtgacaaggttcaaatctagggtaacaaatggcaagatgggagtactcacatgatcaaagaaatgtaccactgcaagctttttgctgcgcctggtaaagatgcgctgcactttagcaattttgccaaaatggttctccagaatggtcctgtcgttgaggtagtcagggatgttcttgcactggatggctgtgacttcagagggagacaagcccccaagactgtctgtgctctcgcttctgttactctgacgcgccggagttcctcttagagaatctaggggttcagagaatggacacttaaaccatcagatgtttccaacaacaggaggcaccaactgtgtcgaagcagaggaaattttcagatgtaagacctgctccgatgacatgttagaatccctaatgtttatgggagatttatctgaaaaatcaagctaacacccagagaaacgtattgaaaacctgcctgcaggatttactctatgtgctacattttcagagctcaccttctttcttctctctactttcagtttcttcctctttattcacacctggaatccgggaaggtgccaggacagactgattccctcctgggatagccatgtggtcactttctgcagactcaacaaagccagtttcctttttggcctccttgttgcccagacgacctacttccttattgcttttgaaaacatcctgtatcgtccgaccaaataaagtacctccccggggtcgattcaggcggacaggtcgtttgtctggaggatgatcgccccgggacagaggatccgaatcttctgctggctcgtggccatgtctccttggggagcgatcctggtcctccttccttttcagtcctttcattaggctgggaagtggttccacctgggaaacagcttcttcacacccctgcctgacacctgctttgctagcctggaaaggttcgcccaaaaccgcagatgatacagggaagctactgaagctattattagaacttccaaatattgacttaggtcctctcttctcttcctctacattttggtttgacaaagcaggggtaaaggcagataatgaattattactactaacaggttttgaaaaggtaaaatttgaagtggtagctgaactacttgttacttgaggaaaagagaaaggggccaggcctccaggtgcactactaattgggtgggaaaatgtaaaaaacccagaagcaatttggctctgggttttctctggctcagattcagcccccagtattggtttgaacactgcattttccagaggtttaaagctgaattctgttttcccaaaaccagagttcactatttctccagcttcttgtccaaaagcagaagtgcttgggaaagccccaacactggtgggtgatttaaaactaaatcctgtgtttcccagcacagatgaacttgaaggcccagaggtagccacaaaggtggaagtgtgctcaagtccagaaaagggtccaacacttgaggtttgggtgaaccctaatgtttgcactgaagaggaatgacttactccagaagacgctggaaagctggatacctgtgaaaatcccgagctcttcccagataaggtactgttttgtccaaaaagagaaggttgaccaaatcgaaatggcggcttagatggaagtgttcctacattactagaagacgccgaaaaagcactaggctgctgcccactgaaaggattagttgggttcatcttctgctccaattattagaaggtaattaagtattatgtgtacaaaattaattggcttcctgaaacagcctgtagcactagggagttccccttcgtctttagaacaagctgaaagagaaaaattcagatcatcatagctatgttctgctacaagtctaagaaaagaatttttgaacactgtcatactaaaaggataactatttcaaaggcaggcaaagggttattattttctgagagccgataggttattttgttggagggtggggtagagagtggtacaaataattactttgttacagaggtttaaagcgtgatcctttaagattaaaaaaaaaaaagccgaatctttttactgagttagtaaattcatgaaaaacctccattggcagtaagaaaatgaatgctgttccaccttacaacttagagacgaatttctcccgacttcctccaatctctacagccggagaattcactgtaacgctgtcaaaaccttagcgtttcgggatctcctcccacctggcttccctcggagcggctggagcgctaagcactttctcacattccttcatcgcgccctggcggccaccctcgagcgggctggaaggacgagggcgctgccacgaagctgaggcctctcggcggggacggcgtgcccggggagcctaatcttccacccagcacagcccgaaacggcggaggccacgcgctgggcccaggccggcctggccactgtcccgccccgggctcgccaggggtcgccggcgccgcaacgctccgttagcgacgatgtggaggcccgggcgcgcggagctgcgtgggggaaggaaacggcgcccctggcgccggcccagcccccacgctcaccgtctcgccccaggaccccgaggcccgcgctgcccactggcccctcggaaagacttgaggcgcaagcacaggctgctgccgcgacactcagcgctgcgcaccgcgggcagaaaacgccgcggaccgacttccggttcgctcagcactaccggattccgccccgcccgctgcgatccggttccgctccccacaacccgctctgtggcggggcttccggtcgggagggtccgcccgctctcgcgtcctttgctgggtccagacaccggtacgtccgggcgggtttttagtctcccaagcgagagcgtcgcattcacccgcgtgggtctgcgggcgccccagaccccagaggacccggcccccaacgcttacctgtcccctctcctgtccctcccccattccagccccttctctccccagccgttgcccctccccgcaccccgccgcgtccgcgcgcctctctccgcgcgcacccccaacccgcccccttttctctgggaaccgctccttccgctccgcccgcctggagtccttctggccggattccgcggcatccttccatagaccctcgttgttgcttcctccttgtggtaaatgtaaattcccttaagattttcaatcagttccaccaaataaagtgatctgattgcgcgtgcatctgtatttttacagaccgtattatcacttgtactgattggtcttctcttacactttaaccccaggttccgttgcaaacatttttaaagggctggttattcttcctgaaatgagtttggtgattagaaatctgcagcgagtcatccccatcaggagagcgccacttcgcagtaagatcgagattgtaaggaggattttaggagtgcagaaatttgacctggggatcatctgtgttgacaacaagaatattcagcacattaatagaatctacagagatagaaatgtcccaaccgatgtgctttcttttccatttcatgaggtaaaaaaaaaatgttcctcttcttgtctagcccatcttcccagagtaaatttcctgtcgttttgttttgttttgttttgttttttaattgagacggagtcttgctctgtcacccaggctggagtgcagtggtgcgatctcggctcactgcaacctcccttcctggttcaagtgattcttttgcctcagcctccccagtaggtgggaccacagatgctggccaccacgcctggctaatttttttttgtcagtatttttagtagagacgggggttttaccatgttggccaggctgctcctgaactgatctcaggtgatctgcctgcctcgggcttcccagagtgttgggattacaggcgtgagccagagcacccggcctaaatttcatgtattaattatattataggctaggctccatggtgcctataagtatatatgttacagacatgatttttaattttaattttgaaaattttcaaatatacacaaaagtagagagagcagtatattcagcctccactgatcgaggcccatcacccagagtctacaattacactggtaacccagcaggaaaaagaaaggtgacagccgagcgcgatggctcatacccataatcccagcactttgggagcccgaggcgggtggttcacctgaggtcaggagttcgagatcagcctggccaacatggtgaaaccctgcctctactaaaaacacaaagaattagctgggtgtggttgtgccgggcgggaggtggaggggggcacctataatcctagctacctgggaggctgaggcaggagaatcgcttgaaccccagagatggaggttgcagtgagctgagatcacaccattgcactccagcctgggcaagaagagcgaaactctgtctcaggaaaaaaaaaagaaaagaaaaaggtgactagcgtccaccccccttcccctcctaatgctctcagtgaattagaagagagaagcaaactgcttctgcaatatttttgcagttttaagtgggattcgttaatgaatatgtgcacattggaaaaattaaaacaacactgaaaataaacagactggggtaaatatttccaacaaactcaatgtaatagcagtcaggttattatctacattctgtagatgacttcattcaaggcttcccacattgtagcagcaggaattggagcaatcctttgggaaagcaacttggcatttcaaacacatgtatcctttagtcctgtggtgacacacccaagacaataaaccaaaaggcagaagaggccgggtgcagtggctcacgcctgtaatcccagcactttgggaggccgaggtgggtggatcacgatgtcaggaattcaagaccatcctggccaacatggtgaaaccccgtctctactaaaaatacaaaaaaagttagctgggtgtggtggcatttgcctgtaatcccagctactcgggaggctgaggcaggaaaatctcttgaaccaggaagtcggaggttgcagtgagctgagattgcaccactgcactccagcctggcgacagagcgagactccgtctcaaaaagaaaaaaaaaaaaagaagaaaagaaaatgctgaatcacgtaaaaatgtattgaaatgttaatttattggctgggcctataatcccagcactttgggaagctaaggtgggaggatcacttgagcccaggagttcaagaccagtctgggcaacatggtcaaaccttgtttctacaaaaaataaaaacaacaattagccgggcatggtggtgtgcagagctgtcgtcccagctactcaggaggctaaggtgagaggatcgcctgagctcaagaaactgaggctgcagtgagccaagactgcacctctgcactccaccctgggccacagagtaacaccctttttcaaaaaaaaagttaccattttctgtaataggaaaataagaggagcatcctaaatatccagccataggtgactggcttagtgtgaacagtccttaactaagtggactggtctttatagtctttatgtggaaaatgtgaaagactctttaggacaaaataccaagtggaaagaacaggaatatacagtcgtgtccatgtgatgatttaactctgtagaagttgtggatctgcgtgattctgcattgggagggatgaaagaaatgaaaagccatttgacaaggtgatagcaacctaaacaaacaggcttttaaagaaaaggatgtttatttgggatagagcattgcagtgaaaatacatgccacatgccatagtagactgtgtggatattcgcatattcagggaggtaaaggaaggcaagggttttgtttttttttttttttttgagacggaggcttgctctgtcacccaggctggagtgcaatggcacaatctcggctcactgcaacctccacctctcaggtccaagcgattctcctgcttcagcctcccgagtagctgggattacaggcgcccaccaccacatctggctaatttttttttttttgtatttttagtaaagttggggtttcaccatgttggccaagctggtctagaactcctgacctcaggtgatctacccgcctctgccttccaaagtgctgggattacaggcgtgagccactgagccccgcctggcaaaggtttttaaaggaaaaaaacataattgttttgagataatgatccttggttgcaaagatcaataacaagattaatgtccgtccaaggttagacaggcagttgctgggcagattatccttgcagaagtttctgtgtgcgtgtaaggttgtcatagcctttgtgcaaggttgcagttttgtgtgtgtgtaaggttgtcatagcctttgtgcaaggttgcagtttcgtgtgtgtgtgtaaggttgtcatagcctttgtgcaaggttgcagttttgtatgtgtgtaaggttgtcatagcctttgttgcagtttttgccatctttagtgacagtttttgttatcaggcatggaagtatgagaatcctctcttcatagctttccccagctctatttgtcaggttttttggtttgtttgtataaccctaatggctccatttttattctgacaaattcctttttttttttgagacggagtcttgctctgtcagccaggctgaagtgcaatggcgcagtctaggggctcactgcaacctccgcctcccaggttcaagcgattctcctgcctcagcctcccgagtagctggggttacaggcatgtgccatcacacctggctaatttttgtatttttagtagagatggggtttcaccatgttggtcaggctggtgtcaaacccctgacctcttgatctgcccgcctcggcctcccaaagtgctgggattacagctgtgagccaccacgcctggctattctgacaattttcacaatggaaacaatttagggcacttgtgtacggttggctgggcaacccacccgccacaggcccagctgccactctggcctgagacatgcatcttaagagtgatttgggtggctggcacagtggctcacgcctgtaatcccagcactctgggaggctgaggcaggcagatcacctgaggtcaggagttcgagaccagcctgacccatatgatgaaaccccatctctactaaaaaatacaaaaattaggccagacgcggtggctcacgcctgtaatcccagcactttcggaggccaaggcgggtggatcacctgaggttgggagtttgagaccagcctgaccaacacggagaaacccagtctctactaaaaatacaaaattagccgggcgtggtggcgcatgcctgtagtcccagctactcgggaggctgaggcaggagaattgcttgaacccaggaggcggacactccagcctgggcaacaagagggaaactctgtctcaggaaaaaaaaaaaaaaaagaaatacaaaaattagctgggcacggtggcatgcacctgtaatcccagctactcaggaggctgagacaggagaatcacttgaacccgggaggcagaggttgcagtgagccgagatcgcgccattccactgcagcctgggcaacaagagtgaaactccgtctcaaaaaaaaaaaaaaaaaaagtgatttggctcagagataagtgcttatttgccttgggattaaccaggatgaaacctgtcaacctgtggttgggttacgtttcctgttctctaagtctacatttcctcattttttagcatctgaaagcaggtgaatttccccagcctgattttccagatgactacaatttgggagacattttcctaggagtggagtatatcttccatcagtgtaaagaaaatgaagattacaatgacgtcctgactgtaagcggggatgctgaaatcatataacctggctcatggaacatgggccttgcaaaggggtcaagatcacaaccctgcatccatgtgtgtccgtgggtaccgtaagggctactgggggaagaacctgtaagcagggtgtgaggagcacccaggctgggtagggactgcatgccccatgccacagttgaaggagggagagaacacgctgtgaaaacacagaagctcccagagaagccttctcagcttttatctctggagtagagcagactatgttgagctaacacagacctgctgaatcagcttctttctgagctgccagaagtacagaagttggagcctccaccaccttccagatctgtttctcctcagtgtaatccacctatgggttcttcctgcccactgcacagacaaaaccaattcactgcaattgtggtattgcagtagagaaagagtttaacacagagctagccaagcagaaaggctggagttattattcaactcaatctcccagagaactcagaggctacagtttctacaggcaatttggcaggcaggggctagggaatgcctgctgctgatcggctgcagacggaccatggggtgtcaacgatttttgtcccctgagtccgcctctgcgtggagccacgggatcagctgagtcatgagtctcaggtccaggtggagtctgtaggttgccagaactcaaaagtctgaaaaacatcccaaaagaccattcttaggttgtactattgacgttatcttattggggagcaattggggcggtcacaaatctcgtgacctctggctgcgtgagtcctgagcagtagggaattacagcagggcaagctggggaagcaaggcctgcgggctggttctcctcaggacacctacatctgagcagaattcaggcccctcccatcatcctaatcttgtggcccttcacaagcttcacagaggtggcttcggtcttgagcaaggaggggattcgttttagggagggatgattactattcttgatttaaagttaaactctagattaaattcctcccgtggttagcttggcctgtgcccgggactgagtggggacagccacgcaagttaaactctagattaaattcctcccgcggttagcctgacccgtgcccgggactcagtggggacagccacgcaagttaaactctagattaaattcctcccgcggttagcctgacccgtgcccgggactcagtggggacagccacgcaagttagactctagattaaattcctcccgcggttagcctgacccgtgcccgggactcagtggagtcagccacacaagttaaactctagattaaattcctcccgcggttagcctgacccgtgcccgggactcagtggagtcagccacgcaagttaaactctagattaaattcctcccgcggttagcctgacccgtgcccgggactcagtggggacagccacacaagttagactctagattaaattcctcccgcggttagcctgacccgtgcccgggactcagtggggacagccacacaagttaaactctagattaaattcctcccgcggttagcctgacctgtgcccgggactcagtggggacagccacgcaagttaaactctagattaaattcctcccgcggttagcctgacccgtgcccgggactcagtggagtcagccacacaagttaaactctagattaaattcctcccgcggttagcctgacccgtgcccgggactcagtggggacagccacgcaagttaaactctagattaaattcctcccgcggttagcctgacccgtgcccgggactcagtggggacagccacacaagttaaactctagattaaattcctcccgcggttagcctgacccgtgcccgggactcagtggagtcagccacgcaagttagactctagattaaattcctcccgcggttagcctgacccgtgcccgggactcagtggagtcagccacacaagttagactctagattaaattcctcccgcggttagcctgacccgtgcccgggactcagtggggacagccacacaagttagactctagattaaattcctcccgcggttagcctgacccgtgcccgggactcagtggagtcagccacgcaagttagactctagattaaattcctcccgcggttagcctgacccgtgcccgggactcagtggggacagccacgcaagttagactctagattaaattcctcccgcggttagcctgacccgtgcccgggactcagtggagtcagccacgcaagttagactctagattaaattcctcccgcggttagcctgacccatgcccgggactcagtggggacagccacgcaagttagactctagattaaattcctcccgcggttagcctgacccgtgcccgggactcagtggggacagccacacaagttagactctagattaaattcctcccgcggttagcctgacccgtgcccgggactcagtggagtcagccacgcaagttagactctagattaaattcctcccgcggttagcctgacccgtgcccgggactcagtggagtcagccacacaagttagactctagattaaattcctcccgcggttagcctgacccgtgcccgggactcagtggagtcagccacacaagttaaactctagattaaattcctcccgcggttagcctgacctgtgcccgggactcagtggagtcagccacacaagttaaactctagattaaattcctcccgcggttagcctgacccgtgcccgggactcagtggagtcagccacgcaagttagactctagattaaattcctcccgcggttagcctgacccgtgcccgggactcagtggagtcagccacgcaagttaaactctagattaaattcctcccgcggttagcctgacccgtgcccgggactcagtggggacagccacacaagttaaactctagattaaattcctcccgcggttagcctgacccgtgcccgggactcagtggggacagccacgcaagttagactctagattaaattcctcccgcggttagcctgacccgtgcccgggactcagtggagtcagccacacaagttaaactctagattaaattcctcccgcggttagcctgacccgtgcccgggactcagtggggacagccacgcaagttagactctagattaaattcctcccgcggttagcctgacccgtgcccgggactcagtggagtcagccaccccagacctctctcactgttatcatttttgcacaggtggtttcagcagcttgatgccaaaaaaaaaaaaaaaaaaggaaaagcattctgaaaagccatgtatgagtgaatcatacttaacttggcctcctttggctgcacagccatgccctgaatcgcccttgtggatccaagtgcatctgtgtggcttgaggcagagcttcccagccagacccagtgtgaaaggatgggacggccacacaggaacctgggccccaactgctccctccagacctgggtgggacttgcccgccatgcacaccctgctggggaagagggagtttctgagagtgacaggaagtggcccagccggagattcagccctgggatctctgtggccagcaactgtgggcgggggggtatgtggacatctgcttccattttccccaaacctaagattctgttccctggtcttcccctggcatttcttcctcgggcccagagccctctccttggggctccctattaccctgaggggagggccagcccaccagcccaggaccccatcctcatagccacaggccaggccagctctgctcagggctggctctcagctgcactctccatctaccctgccttgtcctccatgtctccaggcacctcccgccagccccaaggatacccacctcccagacctccctcttccctccacccaaaccccaggggagtgctacccctatggcccatgtggctccataaacccccttggtgctgtgcctgctcagggtccacaggccctccctcctcttcctcctcctcctcctcttcccccagctctgggctccatccgggtgcccctcccctgtgggctttaatccagccctctctccagggggacatggcgactgtgggtcttcctgactcaccagcagctgcacctccctccgcctccgccttcatacctctcccgcactccctgtgctgcctgtgccccaaagctctacccagagtgttcagtaaaatcaggggccaccggaggccccatcctgactgggggttggacctggggtgtgggctgtgcgcttgcctcgtccctcttagggcagggaggccacccctggccggtgccccactgccccaccaccccgtggcacccacccctccccacttcttcatattccatccccccttgcccattgctcctgcggctgggcagttccatcctgggggcccctccccagcacagtgctggcccagacagcaatccacgttgactaaagactctcaaaggggcttgcttgctttccattttagatggaagggaactgaagctgagtgcctgtaattcctgcccaggggtctcacagcaaccctggggtcctgcagccacataccaagagcagcctgtggccctggggtggccctgaaggggcaggttcctgtggggtcatcctctgagccggtttaaaattattctgacaggtgacggccacccacggactctgtcacttgctgggattcacacacggcacggaggcagagtggcagcaggtaaggagcccatccatcccactaccgagggggtgcgtgggggaaggaggctcccccaggcccctgccagcccccaccctccatcttgaccgcccccgcaggaactggacctcagacctgcccttgtaaaaatgacacagatgtttgctttcaacaccgggctccccaaatacttccagctgaatgtgttcactaaggaaagcggtctgagtgcagaggccgagagccacagctgacactagcacgtggcgcttggtcaaaaaggtccaatcagctagagactaggccagacccagggcggaggcgggagctctgcgtggagtgagttccgggttggtttcctccagacccatgcgctccgcctacggaggcccacgtgggctccggtccacatggttaacacgcacgcaagcccgtgttgggagcaaactgcttctctgaaagtcatgaaaaacctttttcattaaaaaaagaaaaagtttggccgggcgcagtggctcacgcctgtaatcccagcactttgggaggccgaggcaggcggatcaactgaggttgggagttcgcgaccagcctggccaacatggagaaaccctgtctctactaaaaatacaaaattagctgggcctggtggtgcatgcctgtaatcccagctactcaggaggctgaggcaggagaatcgcttgaacccaggaggcggaggttgtggttagccgagagatcgcgtcattgcactccagcctgggcaacaagagtgaaagtccgtctcaaaaagaaaaagaaaaagttggccaggcgcagtggctcacgcctgtaatcccagcactttgggaggccgaggagggtggatcacttgaggtcaggagttcaagaccagtctggccaacatggtgaaacccggtctctactaaaaacgcaaagattagccgggcgtggtggtgggcgcctgtaatcccagctacaggggaggctgaggcaggagaatcgcttgaacccgggaggtggaggttgcagtgagccctcctcccctcctcccccttcccttcccacctcccatgcccccctttcttcctcccactcccctcccgaggccccgcttattctcccggcctgtggcggttcgtgcactcgctgagctcaggttctggtgaaggtgcccggagccgggtcccgccttcggcctgagctagagccgcgcgggcggccggcttcccccaaaccctgtgggaggggcatcccgaggaggcgaccccagagagtggggcgcggacaccttccctggggagggccagcgcgcttccttccttccagatgttccagaaggagaaggcggtgctggacgagctgggccgacgcacggggacccggctgcagcccctgacccggggcctcttcggagggagctgagggccgcgttccttctgaaagcgggacgcgggaggggtggaggctgcggggagccggggtcgcacacgaataaataacgaatgaacgtacgaggggaacctcctcttatttccttcacgttgcatcgggtatttttcgttattgtaaataaaacggttccgagccgtggcatcgagagggcgtctggagttcagggaacgcgtggcccccgcccgggagcaccgcgcagcgctcgcctctcgcccttcaagggggtccctgcccggagcctgcgcccccggagaggaaggggctcgaggggcttgggtgccgcagcgcgtccttccgtagaaaaggcttgcgtcagtatttcctgcttttacctcctgagtattggaatattcgagtaaaccctggagtttcagcgccagcgcacgcctcttcatcagggcagcgcgtcgcgagcgcgctggttccccggggcctcccggccacggacaccgctctagccagggccacggcgaggccgccgagcagcacctcagagacctgcgtgagttctaaagcctggggctactacaattctgctcatctgtttgtcctgtgaaatgattcagggacatgaaaatgccttcccactgacttgcgtcctgtcttagcctggacttgtccccttgggaacacgggccaggcccctctgttcctgaagtcgctgcaccaccgcgcccttcggtgaagagcgttctgtttactgtgagacatagcttcatgtcgaaaaagtactcgtgaaaacagaaaatggagtcagctttaatccaagcttttttttttttgagacggagtctcgctctgtcgcccaggctggagtgcagtggtgcgatctcggctcactacaggctccgcccgccggggttcacgccattctcctgcttcatcctcccgagtagctgggactacaggcgcccgccacctcgcccggctaattttttgtatttttagtagagacggggtttcactgtgttagccaggatggtctccatctcctgacctcgtgatccgcccacctcggcctcccaaagtgctgggattacaggcgtgagccaccacgcccggcctgttttgttattttgaggtagggtctggctctgttgcccaggctggagtgcagtggtgcagtctcggctcactgtaacctctgcctcctgggctcaagccattctcctgcctcagcctcccgagcagctgggactacaagtgcgcaccactacgcccagctaatttttgtttctgtagagacagggtttcgctgtgttgaccaggctgggcttgaactcctgacctcaagtaatctgcccgcctcagcctcccaaagtgctgggatcacaggtgtgagccacacaccgtgtccggcccaatcctgtatttctttctttctttttttttttttttttggagtgattctcctgcctgagcctcccaggtagcttgtactacatgtgtgtgccaccacacctggctaatttttgtatttcttagtagagacagggtttcaccatgttggccgggcaggtctcaaattcctgacctcaagtgattgatccgcctaggcctcccaaagtgctgacattataggtgtgagccgctgtgcctggccccaaccctttgtttctttagggaatgtgagcaaatgcccttctgacctgaatctgaggaagagccgcccgtggcccaggcagcagcagcatcacctgttgcagggtagtttcctgctctaggaacctggtagttaggagtgggggctcacaggtcaccactgcccagcctgtccccagccatactgccctgattctggaccctcttgcaagccagagtgtcgtcagagcaggtccgtcctcatccttctgctcccagagtcacccggcccttcacgttctgtgtggttccagattcagctcctcacatgccaggaagaatgtggtatcttgactggagttgcattgaatctgcagatctgccaaccctgtggaggctctgacccatgcatatgtgctgccttggtccctgggtcatcttcaacctctctcagtgagtgtcacccaacttatcaggtgtacaggtgtgcacaatgtgccctgagccccccccaccacaggcaaggaggtgtggccatgagaagcccccactcctaactaccaggtaccaggcacccagaccccaaaacccctgccaagtagcccaagcccattttcagggcctgctctgagctcttcagcctacccaggtggaccaagggggaccaagggggactgtgtatgggggtgagctcatcccctgccccaccctcaggtgtgaccccacccctcctgcaggccagtcaaggctaagccagtgcagctgtgccctcaccagacactctggatgccagagcctttcatccctgtgaacccagcaagaccaggccatccaaagaccaccacttcctgtgacatttcttccctctgttgtatgaaaaattctgttgagaaatatttaataggctgggcgcggtggctcaacgcctgtaatcccagcactttgggaggccgaggcaggtggatcacgaggtcaggaaatcaagaccatcctggctaacacagtgaaaccccgtctctactaaaaatacaaaaaattagctgggtgtggtggcgggcacctgtagtcccagctacacgggaggctgaggcaggagaatggcatgaacctgggaggcggagcttgcagtgagccgagatcgctccattgcactccagcctgggcgacaagagcaaaactctgtctcaaaaaaaaacatttttaatagaaagaaagaaatgccatgctggaaagtcaccttgaaaagaggaaatggagtctgagctttggtttgagcttttaacgagagcacagagtctctggaatcaccttcaagaggcacgaaaagatggttctgagagaagtgagtgttactgccagtagctgcgctgggcccttcggtgttcacacctgcccgtccatgtcagcaccaggtggctgtccctggggagctctgcagctcagtggcaactctctggtcatcctgtctcctacctgcaaactttcaaagatggaagcactgggacagggttcctccttgtgcggaacttcaggaatgaaagaatctgtcctaatagggggtgaatgaaagtttatgtatactacttaaaaatatgtaaacaacattaaaagagcaaagaaacataattgcacccaaaaaaaaaagtaacaaaaagtaaagaaaagaaatagtcaaggtagcctgtccacatggtaagaaaccccacagcacagaaggaaactgaactgaggggagtgagccgcccttccactgcccagcactcacctttgctttacaggaacaagagctgtgcaaaccagcatgtagagatttctgcatttatagcattagcactctcccttttttttttttattaactcaaaagggatcacgtcatacacagcttgcttctttcacttttttattttatttttgagacaggggcctgctctgtggtccaggctatagtgcagtggttccatcagagctcactgcagcttctaactcctgggctcaagcaatcctcccacctcagcccccagagctgctgagataacaggcgcatatcaccacacctggctagttttttaaatttattttttgtagagacggggtcttgctatgtgacccaggctggtctcgaattcctgagctcaagtgatcctcctgcctcagcctcttaaagtgctgggattacaggcatgagccatgcacccctacttctttagtgggagtctgtgccacagctgtggacacaggtgtccctagttattaaattagactttgtggtattttccccatcaggatgttcacacttccatgtggctaaagctattgatcttttctgttctggctcctgagctgagattttcttaaactctttctggatgaaatctttatttcatcaggctggtggcgtccacggcctcaactttacctccgtgatggaagagggggatctgaggctcccaggtgggccggcgccgccctacaggaaaggaggggtccctgggaggggctgttgccctggtggggttcacaggcccctcactgcaggggacccggagcaagggatgccccctggaatggccccgtgaccagaaagcgagcctgcccagcttccccaggaggagcctgcagtccacactcgcgtagccactccgggtggtggcagggtctctccctgctcccttccatagtcccgccacagcccacagccctgaggaagcctgggggtggagggtgccccggccagggtctctgtgactcacactcagggtgggccaggcgtccacaggctgggggcgggctggaggacagtggcagccccaggtggccacacagcatggtggtggtggtggtggtggtgcacggcaggcagccttggcctggcagctcgtgggaccctcgggggcacatgtggcgggtcctgccacagacgcacctgctgcttaggacgcagcccaggctgctccccacctccactcccgccctgttcctaactggggctggatcccatgtgataggcaggatggcagggtctaagcatcctcccagaggaggctcctcccccgccccaaattgtgcaacccattcctcatctgggctgggactcgatggggatgggggcttcacagccagactgtagacctgagccaggaatgccctttcagagctacacagatgcagaaatttccagaagaaaaaccacccaggccctgtttccttggcctagggttctgctgggggctaagcctacctgcagggctgggggcagggccttgagcatccagttctgcaggaccaactggtgcacctgtgcgttctgcagcagcagcagctccaccatgtctgcagggaagaagcagggggaccctgaataaagtttccgtttttcctatttgttaaagtgatagagcattataggaccagagaacaggtgtgtctgtacactgtgcaggtccccggggcaggctctgagtccgtctgcacacggtgcgggtccccggggcgcgccctgagcccgtctgcacacggtgcgggtccccggggcgcgccctgagcccgtctgcacacggtgcgggtccccggggcgcgccctgagcccgtctgcacacggtgcgggtccccggggcgcgccctgagcccgtctgcacacggtgcgggtccccggggcgcgccctgagcccgtctgcacacggtgcgggtccccggggcgcgccctgagcccgtctgtacacggtgcgggtccccggggcgcgccctgagtctctactaaaaatacaaaaattagccaggcgtggtggttcaagcctgtaatcccagctccttgggaggctgaggcatgagaatcgcttgaactcaagaggcagagcttgcggtgagccaagatcgtgccactgtactccagcctgggcaaccagggcgaaactccgtctcaagaaaaaaaaaaaattaaaacatctaagccagttgtagtggtgcatgcctgtagtcccagctactcaggaggctgaggcaggaggatcacttgagcccaggagttcgaggctgtagtgagccatgatcatgcccctgcactctagcctgggtaacagagcaagatactatctccccagaaaataaataataaaatatctgttcatctacagacaccatgaagagagtgaaaaggcaaccacaagaaggatggaacactcaaaatgcacatatcaaaaaagggctcattacagaaattataaagaatccctagaaaccaataagggaggcaggcaacctgaaagaaaaatgggcaaattacttaaatggacactttacaaaaaaggatattcaagtagccaataaggccaggcacggtggctcatgcctgtgatgctcgcactttgggagaccgagacaggagaagtccttgagaccaggagctgacaccagtcatagcaagacctcatctctacacacacacacacacacacacacacacaaaatatatatatatatatatatatatatatatatatatatttttttttttttttttttttttggagacagagtcttgctctgtcgccgaggctggagtgcagtggtgcgatctcgactcactgcaagctccgcctcctgggttcacgccattctcctgcctcagcctcctgagtagctgggactacaggtgcccgccactgcgcccggctaattttttgtattttttgtagagatggggtttcaccgtgttagccaggatggtctcgatctcctgacctcatgatccacctgccttggcttcccaaagtgctggttttttttttttttttttttttttgagacggagtctcactgtgtcacccaggctggagtgcagtggtgcaatcttggctcactgcaagctctgcctcccaggttcatgccattctcccaccttagcctcctgagtagctgggactacaagcacccgccaccacgcccggctaattttgtttttgtatttttagtagagatggggtttcactgtgttagccaggatggtctggaactcctgacctcatgatctgcccgcctcggcctcccaaagtgatgggattacaggcgtgagccactgcgcctgccctacacaaaatttttcaaattagttgactgtgcctgtagtcccagctacttgggaggctgaggtgggaggagtgcttgagcccagaagttgaggctgcagcgaggtatgattgcaccactgcactccagcctgggcaatggagtgagaccctgtctcttagaaaaaaaaaaacctcaaaaaacaaaaacaaatggccaataaatatatgaaaaagtgaaatgcaaattaaaccagaatgaacttccataagatgcccaccacgctggcaaaaatgaaaagtgtgaaaatgccaagtgttggtgaagtgctctggcgactgaaattctcattcatgtatgtggagtgtaaatgggcacaaaccttttgagagactgtgtggctgtatttcctgacacagccatttctgtcctaggcatgcgttccattagagggcaaaaaggactgtgcagatgtaagcctggaatcttgagcggggacggaagcaacccaagtgtacatcagtagatagataaatggaggcagaaatgtggtctatccatacaatggactgttactcatctgtgacctgctgcaatgtgggtgatccttgaggacatcacactaagcgaaataagccagtcacacaaagacaaatactgtgtggctccactcacaggacacagcgaacacagtcagactcatagaaacagaacacaggacggtggttgccaggcactggcaggtggggatgatgtagtcacacaaagacagatactgtacggctccattcatctgacacatcgaacacagtcaaactcgtagaaacagaacagaggaaggtggttgccaggcactgacgggagggggtgacgtagtccgacgggtggagtctgagatttgcaagataaaaatgttctgcggcacagcagtgactacagttaacgctactgaactttgcacttaagtggtcacaatggtaaagttacatggttttttttttttttaatcacaaattaatcttttttttttttttttttttgagacagggtctcactctgttgcccaagctgggacgccttggtgtgaacacagctcactgcagcatggacctcctgggctcaagggatccccccatctcatcctcccaagtagctgggaccacaggcacatgccaccatacccaactaattttgatatgttttgtagagaagaggtctcaatatgttgcccaggctggtcttgaactcctaggctcaagtgatcctcccatatcagtctcccaaagtgctgggattacagatatgagccactgtgccatgctgtaaattaacttttaaaaaaagaatcttggccgggcgcggtggctcacgcctgtaatcccagaactttgggaggctgaggtgggcggatcatgaggttagaagatcgagaccatcctggctaacacggtgaaaccccgtctctactaaaaatacaaaaaaaaattagccgggcctggtggcgggcacatgtagacccagctactcggaaggctgaggcaggagaatggcgtgaacctggggggcagagcttgcagtgagctgagattgcgccactgcactccagcctggcagacagcgagactccgtctcaaaaaaaaaaagaaaagaatcttgagtgctgggtgctataatcccagctacttgggaggctgaggtgggaggatcgcttgaggccaggagttttggacctgccttaggtgatatagcaacactgtgactcaaaaaaaaaaaaaaaagactcatgagatgggaatataatcctggattatctgggcaagcccagtgcaatcacagggtccttagaaagtggtgagataaaatgactgtcaatctagatttgaatatgcagcaaaacttgcatttaaaaataaaggtagggccgggcatggtggctcacgcctgtaatcccagcactttgggaggctgaggagggtggatcatgaggttcaagaccatctggccaacatggtgaaaccccgtctcaactaaaaatacaaaaattagctgggcatggtggcacacgcctgtagtcccagctacttgggaggctgaggtaggagaatcgcttcaacctaggaggcggaggttgcattgagctgagatcatgccactgcactccagcctggcaacagagcgacactcccatctcgaaaaaaaaaatcttttatgaattcctttagaacagttatacaaactccctcagtatctactttcctgcaaatgttttttatttccatttatttatgtatttatttagagacagggtttcactctcttgcccagactgcagtacagtggcacagtcacagctcactgcagcctccacctcctgggttcaagtgatccttccacctcagcctcccaagtagctaggaccacaggcatgcacctaacacttggcaaatttttgtatttttttgtagagatggagtttccccatgttgcccaggctggtctggaactcctgagctcaagcaatcctcccacctcggcctcccaaaatgctgggattacaggtgtgagccgctgtgcccggcctccccttatttttatttattttttttaagacagagtcttggtctgtcacccaggctggagtgcagtggcgtgatctcagctcactgcagcctccgcctcccaggctcaagcaattctcctgcctcaacctcccaagtaactgggattacaggcgcccaccaccacacctggctgatttttgtatttttagtagacacgggatttcaccatgttggccaggctggtctcgaactcctgacctcaggtgatccagcctctttagcctcccaaagtgctgggattacaggtgtgagccgctgcgcccagccaagattgcatcttgctatgttgcccaggctggtctcaagctcctaggctcaagcgatcttcctgcttcagcctcccaaagtgctgggatgacaggcatgagccactgtgctggccgttaaccactgattttaaatgctgcattttctctcatatggcatacaagcataggcacacactcacccattcacacacacccctacctcggtatgctttttagaacctatggcatacaagcataggcacacacacacccacacacacacccctacctcagtgtgctttttagcacctgacagactatcactaaacttcatctggaaaaatcgacaggtaataaggaaagacaggactacccttctttatgatggcacaagctatgctctctgccactccaggggctcctcatatggatcacaataggaaaggtatcccctggatgtgggttacatggccgtcctgggccagatctggcttggattgcaatatatgatagagctacagtaattaaccaagtcagcacaggggttgggataggcaggtcactgggacagatttgaggacagctgtcaggtgattcagccattctacacacgtctgcccctagactaccaattccattagtcattagggcaatgcaaatcaaagccacaatcaaccaccactgcatcctgttaaaatggataaaatgagaaagactgaccataccacatgttgccaaggttgtaaataactagaactcacaaacattactagtgagaatattaaatgctgcagacactagataacagtttggcagtttcttttttttcttttttgagacagagtctcgctctgtcacccaggctggagtacaaaggcacgatttctgctcactgcagcctccacctcctgggttcaagtgattctcctacctcagcctcccgagcagctgggactacaggcatgtgccaccgcacctgctgatttaacttttaagaaactgctgcccaggcgcggtggctcacgcccataatcccagcactttgggaggccgaagggggcagatcacgaggtcaggagttcgagaccagcctggccaacatggagaaaccccgtctctactaaaaatacaaaaatcagccgggcgtggtggcacatgcctgtaatcccagctgctcgggaggctgaggcaggagaattgtttgaacccgggaggcagaggccgcggtgagccgggatcacgacactgcactccagcctgggcaaaagagtgagactccatctcaaaaaaaaagagttaaatctcatatgattcagacatttcacttctaggtatttacccaagagaaatgaaagcatacatccacagaaagactgaggcaggaatgtccacgacagctttgttggccataagcgaaaacaagaagcaacccaaatgttcattactgtggttggaacttaatcctcaatgtggcagtattgagaggtggggcctctcattgctatggttggaacttaatcctcaatgtggcagtattgagaggtggggcctgtaaggggtacttggatcatgagggctctgcctttatgaatggattaatgcatacatgagataatggattaatgatttcatgggttaatgtgttatcatgggaggagaaatggtggctttataataagaggaagagtgacctgagctagccatcagcacactcagcccccttgccacgtgatgcctccagactctgcagagtccccaacagcaagaaggctctcaccagatgtgcccccgaaccttgcactccccagtctctataactgtaagaaatgaatttcttttctctataaattacccagatttggccaggcgcagtggctcacgcctgtaatcctagtactttgggaggctgaggtgggtggatcacctgaggtcaggagttcgagaccagtctggccaacatggcgaaatcccgtctctactaaaaatgcaaaaattaaccgaaggccaggcctggtggctcacgcctgtaatcccaatactttaggaggccgaggcaggcagatcatctgaggtcaggaatttgataccagcctggtcaacatggtgaaaccccgtctctactaaaaaccacaaaaattagccaggcatggtggcaggcgcctgtaatcccagctacttgggaggctgaggcaggagaatcgcttgaacccggtgggcagaggttgaagtgagccgagattgcgccacttcactcaagcctgggcaaaagagcaagactccgtctcaaaaaaaaaaaaaaaaattactcagtttcagatattctgagcaacagaaaatggactaagacatccaccaacaggtgaatgcataacaaactgatatattcacacaatgcaatactactcagcaattagaaggaaccatttattgatacacccaacgacagtgatgaatcttaaaacagtcatgctgagagaagccatacaaaaaaagagtacatactgtgtagaccatttctacaaaaatctagaaaatgcaggccaggcatggtggcccacgcctataatcccagcactttgggaggctgaggtgggtggatcatgaggtcaggagttcaagaccagcctggccaagatggtgaaaccccgtctctattaaaaatacaaaaaattagcagggcgtggtggcgggtacctgtaatccccagctactccagaggctgaggcagagaattgcttaaacctggaggggcagaggttgcagtgagccgagatcacgccactgcactccagcctaggcgacaggcaagactctgtctcaaaaataaaataaaataaaataaaataatctagaaaattcaaactactacatagtgacggaaagctgctcagcagttgcatgggggtgtaggaggagggattaaaaagaaacacgaggaaactttggaggtgatggatatgctcagtcttgattgtagtgatataagtatatgttatatgtatatgttaaaacttgtcaagccaggtgtggtggctcacacctgtaatcccagcactttgggaggccaaggcgggtggattgcctgaggtcaggagttcgagaccagcctggccaacatagtgaaacccctgtctctaccaaaaatacaacaaaatagctgggcatggtggtgggcaccagtaatcccagctactcgagaggctgaggcaggagaattgcttgaacccaggaggtggaggttgcagtgagccaagatggcgccattgcactcctatctgtgcaacaagagcgagactgtctcagaacaaaaaaaataaaaataaaaaaaaaaaacaaaacttgtcaaattgggccgggcacagtggcaaacgcctataatcccagcactttgagaggctgaggtgggcggatcacctgaggttgggagttcaagaccagcctggccaaaatggcgaaaacccacctctactgaaaatacaaaaattagcaaagcatggtggtgcaggcctacagttccagccacttgggaggctgaggcaggagaagtcgcttgaacccaggaggcagaggttgcaatgagctgagatcatgccattgtattccagcctgggcaacaaagtaagacactctctctctctctctctaaataaataaataaataaattttaaaaatcaagtatttaaaagctattattattattattatttttgagacagagtctcactctgtcgcccaggatggagtaaagttgtgcattcttggctcacactgcaacctccgcctcccaggttcaagcaatttctcctgcctcagcctcccaagtagctgggattacaggcatccatcaccatggtgagctggtttttgtatttttagtagagatggggtttcaccctgtgggccaggctggtctcgaactcttgacctcaggtaatccacccgcctcagcctcccagtgttgggattacaagcgtgagccaccgagccgggccctaaaaattattttaaaagaagcatcttaataatggtttttgaatggatgatgattggatgagttggaattggagcccaattattttacctcctagttatctttcttatacctcttgtttccttccctgtgagatatcatttatataaggatttcttaaagttaaaattattttcatgttgaacagccaaaagctggccctaagtgactgtcctgcttccaggaacattttccctttcagtagataatttcctcaacccacaacaatatgaatatggaacacttaccttccttaatacttcctgaccgttgagtagggaaggcctggggaggaggaatctgtgctatgagtggctgctgagggagctgctgaatgatggtggcaggaggctgggggacctaggaacagccaggtgattagctatctgcatatgtccttgaagaaagtgtctccagtatctaccacccatccatccacccacccatccaaccaaccaaccaaccaaccatccacccatccatccaaccaaccaaccaaccaaccaaccatccacccatccatccaaccaaccatccacccactcatccatccacccatccatccacccacccatccatccaaccagccaaccaaccattcatccacccacccatccacccatccaaccaaccacccacccatctatccacctacccatccatccaaccagccaaccatccaaccagccaaccaaccattcatccacccacccatccatccaaccaaccaaccatccacccacccatccatccacccacccacccacccatccatccacccatccacccatccacccacccatccatccacccatccacccatccacctacccaaccaaccaaccaaccaaccacccacccatccatccacccacccatccatccaaccagccaaccatctacctacacatccattcatccatccaaggagaactttaaatgattaaccccagacactgaataaatggttgaatggaaaggtacttcagtctagatatcacttaggatgtagtatttttaatgtttcccacatttcctgtctttagcggggtgggctgaggcctggttccaccaattctgctttaataggagcaaccaacacttggtatggtgtttttgtttttttttgagacaaagtcttgctcttgtcgcccaggctggagtgcaatggtacaacctcagctcactgcaacctccgcctcccaggttctagcgattctcatgcctcagcctcccgagtagctgggattacaggcgcctgccaccacgcccggctaatttttgtgtttttagtatagacggggtttcaccacgttggccaggctggtctcgaactcctgacctcaggagagccacccatccaaccaaccaacagtgtccaggcaggggaaatgcagtagcggttggccaccttggcctcccaaagtgctgggattacaggcatgagccaccatgcccggcctggtcagtctttttaattgtagccactttaatagagatgcagtggtggctcacagtggctttaatttgcatttccctaatgacggatggtgttgagcatctggggcagacccgtgggtaggatggccgcatcccaacaggcgttctcaattctgtcccagtgacctctctatcccagcccccataacaacttggttaattactgtcctccatcatatactgtagtacatatatagaacacgtcatgaaaatgaactttggtttctcctctgagtgaaaataaattatagccaaatattcgagcatgaaaggccttctgttttatcctcttctagctgtgtgaggctgcctggccttgtcccttcttcctcagttcacagaaaggacggcagagaccaagagttggcaaacttttgccaagagctacatcgtaaacagcttccaaagcaggacacaccgtcagctcttgagttggccattgcagcatgaaagcagctacggacaatgtggaaacaaatgggcctggcccaataaaactttatttatgaacactaaaattagcatttcatataattttcatatgttgcaaaatattattattgtattggcttttccccaaacatgtaaaaatgtaaaaccattcttggcttgcaggttgtgtgagaataggaggcaggccagctccggtctgaagctgtggtttgcccacccctggcacagacccatgaggctttcttagagctgccgtgcccgtcctggctgatgggacctcctacctcaggggctctgagtccagctgccaggaagctcatcttagtgacccacagcccctgctcacccacctggtgtcactggggctgagagtgaaacctgcaggcataactggccctgatggatacacagtaagcatagatgtgtttgggatgaggaagatggggggtccacagcaatgaccccccgtactcccttctgtcctgggaggaggtttctggtgctggaagacaggaaggcacaggctgggaatatccagaacctggtgaaggccacccatctgcagaggagggtctggggcaggtccttcggaggctccccttccctctgtaccctccaccatgtgctgctgccagggtcccctcccaaagggcaaaagccttccaggtcatagactctgctgccctgtctagaaattcccacctcagcctcttctcttccaccttccctgcaccccagtcacacgaatcccaccaaagccttgacctccgggcccccagcttccatcccacctctgggtgcctggtttccctctgatccattttttgcttcagaaagtcagagttgttttctgctgcctgccacccagaaggctgaacagctgtaggaagctctcagaagtggagcactatttacctttaacattctgcccttgacattggggccttaagcatctcctgggcatgataaagttttttttttgagatggagtcttgtaatctcctctttctgggctcaagcgattctcctgcctcagcctcctgagtagctgggactacaggcatgcaccaccacgcccagctaatttttgtatttttagtagagacaggatttcaccaagttgcccaggctggtctcaaactcctgacctcaggtgatccgcccgcctcggcctcccaaagtgctgggagtagagatgtgagccaccgcacccggccagtgataaagttctgaggagttgacacacttccccaaattcagggccgcccgctgagctctcctgatacttctgcccctaatgcaacatttaaggccagggctggggtttgggagacagagctgggccccagccttcctctgtgatgaggggtaagcagtccggggaggcccaggcagtgcccaggcaggcagctggcccccttcaagggtgggccttgggaggatgggggtgacgaggcaacctcgctgcaggcacagcgcctcctgccttctgtaaaatcttaattccgcacccgcctcccactctcagatgtgctcctcgacttcgccctcttaccgtaggcaggatgatccttggcgggtctggggccagcggggatggggaggcagtgggtaggatgcccgtggggggcagctctgggggcagggctgacccgagggctcctctgcttggcccgctccaggcctgggcccgagagagctcgtccaggaggtgttgttcctgcaaggccgatgcagagctgctgcacacggggacggggagccccaacgccacagaggcacccccagcatcaggctcaggccagcctgggccaggtacaggcgcctctccgggcaggatggccatgactggaagacccttccagggttatgtgcatgagggtggcctcctgaaattgacccaagcgtgtcagctagtttccagttgttttctttttccagccccagggtctgttctctctttcaagccagttccaggcctacttttttctaggtctccccctagaaaagcggccccacctcccctgcatctctgccactcggatgcatctttggtgagtgccgtgggagcaaacctccaggcatcccagaatttcaggtcctcctggaattgggcccttactcaacatttccagtcctgatggaaacctgcacccaggcaggtctctaagctaacagtgtccttgctggggcctggccctgagagtctggaaaggtcttccctaatactccccgacctggtgccttaaggctgagcagctatctctgctacagtgagctcagccaggttcgctcagagggtgcagggcctacccggagtctctgcagaaggtccctccttctcttcagagcagtctgcagggcatcgtccggccggtcctcatttcctggagggaagaacctgcttgcttaccaaggaacgcgtagaggctgtcgctgcaagcactcggactggatggtactgcacccatgtcggaaggccctgcctcacccacactcccaggatgggggaggcctgggaggatcctggtcttaggttatcccagataaagagggaccagtgttgggtaaggagggcaaggggcagcatcaggggaggggtaatccagggaactcagtgctggaggatggtcatctcattcctggaagggaggctgaaatgacgcgaccaggttcctcctgagtgcatttcatacagagtgccctgggctccaggaggtcaagggctctacagggctggctgcagcctgaccttggccacctggagccaccctctggccccaagtggtctagagtctggtctgatccccaagtatctgcacatccctcaagtctgccccctagtccgggcgtggtggctcatgcctgtcatctcaacagtgggaggttgcactgggaggattgcttgatcccaggaggtcgggggtgcagtgaattgtgatcaggccactgcactccatcctgggcaacagagcgagaccaaccctgtctcaggaataaaaaaaaaaaatctggccaggtgcagtgagtcacacctataatctcagcactttaggaggccgaggtgggtggattacttcaggccgggagtttgagacgagcctggcgaacatggcaaaaccccttctctactaaaaatacaaaagttggccaggcatggtggagcgcacctgtaatctcagctactcgggaggctgaggcacaagaattgtttgaacctcagaggcggaggttgcagtgatctgagattgcaccactgcactccagcctgggcaatagagtgagactccatctcaaaaaaaagaaaaagtctacattccttgggggagggtctacactcaagagaaggctccggaaggtggggggcagggttctggcctcctttcccttaggcacaggggtcctgcccctcacccagcatcacactggagaggggccgttgggaaccctagccagcccttgggggggtccccaaaccctctgccccaggcactggtagccattctattccctcgcactggctctgcagtcaggggacctggtttgggattttctctctgtatttgagactgggctctgcccttggcagctgagcccccacagctcacagcttgccccacgttccaaagaacaagaaatgctcctctggcctcctcagcttctccctggacgtccccgggtaacagtgaggacagcagctcctccccaaccaatggacaagctcagggtctggaaccagagcaactgggtctgatctgggtgcgaccactgccagggtgagcaacctctctgcctccattttctcatctgcaaaatgggaacaatgaaggtgcccctttttggggtttgcagactaaaggtgataaggaatgggggtgtcttcaactctgaatgtaaaggaaaagcgttgaggacaatctcgccggtaccaggagtgggggtgattcccagagttgctgtccccacctccccctggaggtggctccccctggagtggctacacttgcgtctgtctgtgctggttccaagcagcccaggggctctcacctggctcgaggtggaggccctcaggtcccccttccacgttctgccgttcttgctccagcttctgtgaggaagagagaccgtgacagagacggtggctccacgcaaaggccctgtgtgctccaggaatgactaagaggctttctgagtgaaaagaatggtacgtcaggagtaacccagcctctccagggccaacaggcgggagtcaagcccctccgaggatctccctgagctgcctctgtaagcctgacctctagcaaattcatgtgttccatccacaagtctaggggcggatgctctgagtggtcccttcaggcagatttctgaagagcaaccctgggagacacctcactggtgaggcctccaggcttcccagccagtgcatgcctagatcaccccccacctgaaccctgagctgagcagctacctgctgggtgtgtccaggggtgagtccctctcatggcggcctgtgggccaggatgcagggctggcgaaaggtgggcagcaggtccctcaggcagcaggagagggaacaatgcaggcagggggtgcagaggtgcccccaggcaccgaggctccccagaccctgtgctcagtggcctgcgaggacaggcaggtcggtcatgggccacccagaccctcagagaatgtgaagactaagtctgaggatgggtccgctgggctgccagccccaggcctagcccttggggccctgcattctgcacctgcagggctgtctcgaagagtccctccaacgccacagcctgcgagttgttaaaaacaggagcatcccgggctctgcctcacctgtcccaagagcttcagcgtcagtcgggtcacttgctctgctgctgatgagtccagcatggtgggagctgcaggagacgactgtaggggcaggggaggccacagcccacctccctccctggttctgttactcgcaggaaagaactgctcagcaggagcccaagcaccggtgttgcctgcagggcgggccttacctcctggagaccagcctgagggaagagaagagccctgtgggaagatagccacaccctccctggactgcagtgccccagaagccagcgctgggcgccgcgtgacagttgccaggctgccagacacagggaggccccaggttgccaggtttccactgtgcgtcctcaggctaccggtaaacactcatccccaggtgtggccagctgggcttcatgggaaggcaaaaaagtgggcagcagctgaggcagaggggcagaaccctcagacctgggggaagggcagtcgtgaccccctatgcaccaccagcctcaggacccagtccagaagaacctgtgtgtcaggggagggcgccccacctgtgtactgcctccagggtgttaatacctccctcctagggaccctcagagcaagcagggaagacagggtggggagacactgggaggacagggtgaggagactgcctaccaaggagttcaggaaattgcaggcagcagaaggggtaggacagaggaggggttgtgacctgcagaggggctgggctttagcaggaccagagggggtgcccaggggatatgtcccaccttggggctgggggcactgggcagggagtcaagtttgcaggaagcttcgcagagggtgacgcaaaacaggagcgtggtctgcacttggttgggcattaaactccacgttgatgagttagtcaatcccactagcaggcagactgacatgtgggggatgtcagcagcaggggcccagacctgtggacccgaggggcagaggtcagcaccctcctcggtgcagctaacccaggaacttgcctcagtggccaaaattgctctcttgccctcagttctgtaaatggcccatgtccatcagtatctatggttgtgtgcctgtcctgtcttccaacccacatccatgtagggaccctgaagctggaccagtgagtgattgggtgaaggctggctagcccgtaggaggtcaggctcacagaggcagctcatggagatccttggaggggcgcaccttactcctgctggccctggaggggctggattactcctgacgtagagttcaactcaccttaccctggaggccatccaaccagaaatgaagtcagcatgaaaccaggccttaccctccctccagatctgtggagggtgtgggctagggtcacatgacctgcctggtgccacacattcccagatggcagtcaggggtcctcgctggtgctgctggacatgagcagactctggccccatgtttaagatcccagtgccattgggcgttggctcacgcctgtaatctcagtgctttgggaggccaaggcagaaggatcacttgagtccacgagttggagaccagccggcacaacacaacaagaccccatctctataaaaaataataaaaaagggccaggtgcggtggctcatgcctgtaatcccagcacttagggaggctgaggcaggcagatcacgaggtcaggaggtcgagacaacctggccaacatggtgaaaccccgtctctactaaaaatacaaaaaattagccaggcgtcgtggtaggcgcctgtaatcccagctactcgggaggctgaggcaggagaattgcttgaaatcggaaggcagagtttgcagtgacccaagattgcgccacagcactccagcctgggcaacaagagcaaaacctccgtctggaaaaaaaataaaaaaaataaaaaaataaataaacaagataataaaagaacctggctcttgtccacagtcattaacagtgacagtcttgggagacatttaaacagctctgagtgtgcacagaacaaaaaccaggttaatttagttaagcaactgtatagagcacccttgatataagtgacctcatctgagaaaaggactccatcttatgtatttttttttgagatggagttttgctcgttgcccaggctggagtgcagaggtggagccatctcagctcactgcaacctccgcctcccgggttcaagtgattctcctgcctcagcctcccgagtagctgggagtacaggtgcacgccaccacgcccagttaatctttgtatttttggtagagatggggtttcaccatgttggccagactggtctcgaactcctgacctcaagtgatctgccgtcttggcctcccaaagtgctaggattagaggtgtgagccatagcacctggcccctgatgccttttaaattataagatagggccaggcaggcggaagttgcagtgagccaaggtggcaccactactgcactccatcctgggcaacaagagtgtaactccacctcaaaaaaaaaaaaaaaaaaaaaaaaagggtatcaggccaacagggaccagatgtttcctcatcagtagatactgcacccacccagataaagacataaacaagacactcttactatcagtccttaccagagtactctatggccatgaaaagagcagaacaccaccaggtcaaagtggccgttttacagacagtcttgctgtcacttgtgagaagccctccacatctgctgctgcaggctctgcccacatcagagatgcttccttgccagattctccttttcgttgaactggttaactttttttcctctcctctttctcttgatgtggaatgtttataacatttatgcagtggtcaagtatactattatgtatggtttgtaatactgactgacttaaggagagacttgagcctgtgtgcccacagctgtgactgccaagtgaatgggaagcactaagaattgcctcctcgggatctctagtagtatacataacatgctccagagggcatggatttgtcagactttttttttaaatagggtttttaagaacagttttagatttagagtaattgagaagatagtacatggagatcccacataccacatgtgtggcttcccctcttattaacatcttaccttagtgtgctacatatgttatatatatatatattttttttgagacagagtctcgctgcgacgcccaggctagagtgcaatggtgcaatcttggctcactgcaacctctgcttcccagtttcaagcgattcttctgcctcagcctctcgagtagctgggactacaggtacgtgccatcatgcccagctaatttttgagtgaaagccagtgcacctggcccatttgttatgattaatgaaccaatattgagacacaagtaactgaagtccacactttgacagtttccttaggtttgcctcatgtccctaatgtggtatccatcagaacaccccattacattgagttatgtgtctttaggctccttctcagactttcctcgtttttgatgaccttgacagtttcgaagagtactgggcagatattttgaagaatgtccctcaattaaaatgtgtctattatctcctggttagactgggactgcaggttacagaaaggaagcatctaggggtgaagtgccactgtcaccccatcacatcagggacacacactgtcacctcgactataactgtgaggctgacctgcgtcacttggctgaggtggagtctgccagttttctccacaataaagtggctctttccctccttttctttattgcactctttgggaggaagtggctatgtgtggtctacacttaaggagaggggagttacgtttccctccttgagggtgagtatctacaaaatttatctgggcagcttttttttttttttttttttgagttagggtctcagtctgtcacccaggttggagtgcagtggttgcctggccttgacagctttttaatagtttaaaatgaattgaggctgggcgaggttgctcatgcctgtaactccagcactttgagaggccaaggcaggtggatcacttgagcccaggagttcaagaccagcctgggcaacacagtgagaccctgtgtctactaaaaatacaaaaattagctgggcatggtggtgtgcctgtaattccagctgctcaggaggctgacatggagaatcacctgagcccggggaagttgaggctgcaatgagcggtggtctcaccactgcactctagcctgtgtgacagactgagaccctgcctataaaaaagaaaagaaaaaagaactgaaataagacccaagtccaacattagcagaacctctctaggatgtccacagaaacgactctggggttctgaggaacacagtctaggcaaacctgggcacatcccctcagtcccacagttgtaaatgtattgtaacacgtaacagttgtgagattcaggcgcggtctgggtctctgttcctggaaagtgtgatcctgtgggtgcagcccctgctcgcttggctgtgttgcctgcctggcccctgctctaatgagcccactgcccagagtttgctcaaaccacccaattccgagtctgggaaccaggagaccgctggacaccccgctcaccacacagaagactgtggcctgagtcaggagaaggaagtttctggcggtcgagcttccacggcttcctgagggaggttgcagggagccgagatcgcgccattgcgctatagcctgggcgtcgcagcgagactgtctcaaaaaaagaaaaaaaattctgagcgagattccagggcttcctgagggcgcgtttaagttgcagttgctgaggaggctgcaaggtgagcttgcgtcagcgaggagccactccagcacgctcgggaagggcatcgttactgctgcaaacaagcacacggccctccacgacgaaccttttgcaagtgaaggcgcacgaacaggcccggaggactacaaagaaacccagaaaccagacttggacacatgaaataaaggggttagctgaaggaatactccacagttaaggacggcctgcgcgaggtcaccggccctgtcttggttttttgccacttcgctccagttagtttcccaagttccacctacgcgcgcgccagctgagaaaacgcccaccccggcggtcccgccacaggtcacaggcggtgcggaccccgggactgtgtccgggcttcggtgtccagagagctccaagacacccaaaccttccgtggtttccacctctgcaagcttatgttccgctgagctcaagctgagggacgacgacctcatgcgacgtcagtttccccctgggaccacgaacccacggccccatttctcttctgtctactaaaaaccttttcttttcttttttttttgagacctaagacatcagtgagacacacgagcagacacgggctcggtcgggaaaggcgggagctccaagcggcggggcctgcaggtccaggcggttcgcgggctttctgaccgcattcggccgagttcttctctgaagacccaggacccccggccgagggggcgcattcggcgggctggtggcgtaggattttgtttcgggttcccagggtcccggcaagggtgagggagcccttgcggatcccctgagatccacctcagcagcctcctccgtggtaggcctcaacttcccgcggcggcccacagccaacgactaatgcctgagcgggagaaaacggcctggccctgtccgggtggttgctgagcaccgttcggcgccgcccgcgcctgcagggagcccggcccgctgtcctggtggacacaaagcccaggggccgcccgcgcgggaccagcagcgcgaactttttgccgctcggccagcctggcaggggattttaaaatcggccaatcacagcgggcgccaggcctccgctttccgcttactggtcctgccgtaggaggcgggtacgtgagcgcaccaatctgtggccggcgagcgtaaagggcggggctccgcccaggctgcaccgcccagagcgcgcgtgcgcgagaccggaaacgcagccccctgattggcggcgcgtgtcgggggcggggccgcggctgcgtgacagttgtcgcggggggagggcgagcccaagcgcgggggagggagtgtaaatagagcgaaggctgctctgtgtcagccccgtcaccgccgggcggcccgcgcggagtctgagggagatggaagttgagcaagagcagcggcgcagaaaggtggaggccgggaggacgaaggtaaacattaggggcttcttctctagctgctctggcgtgaagtcctaagggcggctccggtgcccgccaccgccccctgccaggagaggacgcggtccggcggaagccgccgcggaggtctcgctttttcccgccggctccgctggaagccgcctcctggccgccgccatcttgaatccgccgctctccgccaggtcccgcccccgccgcggccacagccaatcagcggccgggacgcgcggcgcctctcgggcgggccggggcggggctgcgcctgcgtcggggggggtggggcgcgggctgggcgcggtgcacgccggggcggggtgtggctgcagggcggggctacaggggcgtggcgtggctgcacggagggggtggggcgcggcaggcgctggaccccaggctggatcttccagtggctcccgcgtcctccgggaccgggtggcctggggcgggcggccggtattcgggtggctgcttggtctagggccagtttcctgcgcggccggggccgggggcgtggcgcgggtggcctgcagcgcctccccagggtgcgccttcgcctcgtccgtcggagatgctttccccgcgcgtttctcgcggcgttgcagtccttactgtgtgaaaggcccccgcggcgctcccggccgccgtcttcttcccgcgcccttgggctcgcgtcctgcccgtccgggcctggcgtacgctgccgggaacccacgcggcgctggcgccgggcgccttcaagggacgcgctcccgtctttctcccgccccgggtttctccgtgaaaaagcgctcggtttgatggccactgtcctaggtttcgtgggaataaagcgcgcagagcccatgactcgggggcaggagaaagggagtcccgaaagcgcgaggcggaaccgcgggagcaggccggcctctgcgaggtgcgcgccgctcccccccaggatgttctggctggggtgctggggaagagcggggctcccgggcacggcggacaggggacgcggggctaggccggggaagggctgaggcgggcaggaggggaaggggagcccggagcctgcagggagctgcgaacaggagcagagctcccaggagggtggaggggggagggagggacaagacgccgcctgtagggcgacgcaggccgcagaccaggtctgtgctatatcccgacatggataggtgtggtggaggaggacatgaaaataaacgacatgaggttgactttgaaggaaatatttccttgagagaccattttcttgtgtaaatggccttgtgtaatttttctgggtccatgagcttgtgtacttgtgttatcatttacacaaatgtgtgttccatgcgtttgtttttgtggccacagttgtcttttgagggaacagatgtctccccgtgaaaggctgatgtgggatcgatcgcatacctcttgagtaagacgttagcgggagatgaggctcgcacatagtctcaaactctcggatttgaggactgagcagagctaggctgtgccttctgatgggcgatgctctgtggatgtccctggtgctttggtgagctgtgtcatgaaaaatagaacatctgattccataaaggaagatgtgagattgacctggcttaattaattttttgctatttctgtatcttgtctcagaatctatggctaggaagttttggctgggctatatatttcttcagttgggggaaaattggggcaagaagggagagatttagcttttatatcattttaaaacttaaatatgccttgattaagctatcaatcttttatacaaattttttttaaagttttatttttctgtaaactgccaagggctaggaaagctattctgccaatcagccgtatggttttctttaccaggcataattagcagtcctcattgttagaccccttggatatagatattgatgaaggcagtgtttgtggagagccatctgttggccaggtgtggcagagtagactgggtcagccctcgggcctcatggtccccaccagtctgttgactttgtggttctgttatttttttctcacttacctttgcctttactacttatctacatttttgcgcagcttgctcacttccgacagagaaaaacaaaaggtgacagttcgcattcggagaaaaagacggcgaagaggaagggctcggctgtcgatgcgtctgtccaggaggagagtccggtaaccaaggaggacagcgcactctgtggaggaggggacatttgcaaaagcacatcatgtgacgacacccctgatggggcaggaggggcctttgcagctcaggtagatttgctcaatgttgtatttgaacatttcgcttatcttctagtgatttctagtgtgatttactaaagatggtctttggtctgtttttgcctttcaaaagtgaggaaagagggtgttattttagtttataaaaagtgagggccgggtgcagtggcttacgcctgtaatccccgcactttgggaggccgaggcaggcggatcacctgaggtcaggagttccagaccagcctggccaacatggagaaaccctgtctatactaaaaatacaaaaattagccggacatctggcgcacacctgtaatcccagctactcgggaggttgagggaggagaatagcttcaacttgtgaggcagaggttgcattgagccgagatcacgccaatgcactccagactgggtgacagagcgagactctctctcaaaaaaaaaaaaacagtgagtaaatttttatggttttattctttttattttattttttatttttttgagatggattctcgctctgtctcccaggctggagtgcagtggcgcgatctcggctcactgcaagctccgcctcccgggttcatgccattctcctgcctcagcctcccaagtagctgggactacaggcgcccgccaccacgcccggctagtttttgtatttttaatagaggtggggtttcactgtgttagccaggatggtctcaatctcctgacctcgtgatctgcccgcctcggcctcccaaagtgctgggattataggcatgagccaccgtgcccggcctatggttttattcttaataaatttgggttttctttttctttttttttcttttgtttgttccagacagtgttttgctgtgttgcccagcctggagtgcagtggtgtgatcacaggtcactgcagcctcaaacccctgggctcaagtgatcctccctcctcagcctcttaaagtgttgggattataggcatgagccactgcgcctggccctgttttatctttattatgtaattttgagaagttttggattaactacttgaagacaagtgtcagttgtttgctttgtaatggaagactgggagttcttcgtgtgtggtcgtgtcagcccctttgatgggtgtttcttgggacatttaaaacataatattccttcacatagttgtaaatgcacctgcttgtcacatttgtcttttacctttttactaaacgtgagatgaagagggaaggggtgaaggtgttgcagacatggtgtgttgctggaggagactgggtctgctgcttgaggccttgtgagctgcaggggcacccccatgggcaggtgtggcaggtgagtgcacactgagtcctgaaggggctggccttccgggctccttgggggcctacaaacctgcctggaggcgggctgtccttgggccttttgtatgaattatgaacgagggccttaggtgttgagtgtccctgctgctgcagcagaatgggtgcaggctttgatgtttgctaggatttgctggaaaactggtggccaaaggcagaatctggctcaaggtcataatgtatgtatcctgctttacttaaaaaattgagttgttggcaacagttaaaatttgtgttattctacctacaaatcctgaattttgctttttatctcttgagtgtttttggttgttgggttggtgtgttttttttttttttcccgttttctttttaagatacagtctctctgttgcccaggctggagcgcagtgacgcgaactctgctcagtgcaacctctgcctcccaggctgaagcgatcttcctgcctcaggctcccaaagtgccaggattacaggatttctgccaccttgctgggcagaaagttacttttgatatattctggttgcatatgttttttggttttttttgaaatggagtctcactcttttgcccaggctggagtgcagtggtgcagtcctggctcactgtaacctctgcctcctgggttcaagcgattttcctgcgtcagcctcccgtgtagctgggattgcaggcgcctgccaccaaacccagctaatttttgtatttttagtagagacagggtttcaccatgttggtcaggctggtcttcaactcctgacctcaagcaatccacccaccttggcctcccaaagtgctgggattacaggcgtgagccactgcacccggccctctggttgcacatactttttttttttctttaaggcgaagtctcactctgtcatccaggctggagtgcagcggcacgccctctgcttcctgcaacctctgcctcccgatttcaagcgtttctcctgcatcagcctcccgagtagctgggattacaagtgggcaccaccatggccggctaatttttgtatttgtttggttgagatggggtttcaccacattggccaggctggtctcgaactcctgacctcgtgatccacctgcctcggcctcccaaagtgtggggattacaggcgtgagccactgtgcctggcctgcatagacgttttaaaagtagtaagctgataaatatatgtgggaatctcaggatcctatcagaaaaccattccaaacttagcacattttgtggtaaattgtatttggagactgatgggtcgttaacattagaaggcatggtatagactcctgattaaacactcatactttgctgtttcatcaggtagagactctcttagtttctaactctgctatttgatgcatgccttcattcaggaagatgatctgatgaaaagcattttgatttttgttttcaaaaccagaagggcatataccagaaaattaacagtggtggtcagaaaggaatagagttgttggttttttcgttgttatggtttttggtatttcctacaataaacacattaggttacttatataacattttttttcattttagaattaactataccactaataaaacatgtattttggacatcttaaagcaatctataaataacaggcccattactggtccccttgacttagagatgcacacgcacactcactgcacttgctgcattttgtgtcacctcctcgtgaccacagtggacaggacacttcaccctcaagcgtggggtggtgtggcagatgtgaggagaggtctgctttcacaaaacttggtgaaacaatggcaagatggccaaggtaaagcattctgttacttataactgttgctgtgagtagtaacttaactgtttaaagcagtattttaaaaaccaaaagctggtaaaatgtaaggatactttctctaggaaaagtatgtgctcctgcagccaggattcttcatggaatgaaggcatggcagggcctgactgattttcatctcacatcgtcatcctgaactcctctgcacagttacagcttgacatcagcagagacatacctcctcttcctgtccattggctctaaaatggtgggcaaaggtcaggtaccagtcagctttttccacagaattcctgacattttaataagctaaacatgcagtcatcaggtattaacccctattggatcttggacatcagctttttcccccttttttttgagatagggtcttgttttcttgaccaggctggagtgcagtggcgcaatcatggctcattccagccttgacctcctggcctcaagtgaccctcctgcctcagcctccctagtacctgggactacaggcatgtgccaccatacctggctaacttaaaaaaaaatttgtagagacagtgttacactgtgttgtcagggctggtctcaaactcctgtgctcaagtaattctcccacctcggcctcccaaagtgctggaattataggtgtgagccatcccacctggctaaaatttattttctttatacatgtataggtaaactaagtagtatgtgtagaatagagccattgtctttctgctgtacactaagttaggaatcaaatttcttaagccattttgtcaattatgtatataaaaaccattggtgctttagaagcagatatttcattaacttttttctgattatatcattgtacatcatcagttcagtctaaaaaggagtttttttcatatgtattataaaatatttcatgatatttgagtttagtatgcctttaatccagttgtagatgttaaaataggagtaattttgtgttcaaaataatgatcttctgaaaagtgaaattctaggaaagagtccactgtttaaagctagcagctggtggccgtgtggccgaataatgtcccaggccagggcactcccctctcagatggttggtcatgctgcgtcggagatcaggaatcctcaaggaacctttatgttatagttgtaccagtgctttaaacataatgaaaggtgcatttgttttattttacccatctataaattgtgagaggtttggctatggagagtctagtgagcttattgaacagcataagaagataagtgtgtgtgtttgtgtgtgtgtgagagtgtgtgtatgtgtgtgtgagggggagggagaagttattgtgctttccaacatataataaattgcttactttgatcactaactgttaggtaaatactgatgatttctagcataagtcttttttcttttttttggagacaggtcctccctctggcgcccaggctggagtgcagtggcccaatcagcttacttcagccttgacctccctgactcaggtgatcctcccacctcggcctcccaaagtgctgggattacaggcataagccgctgtgcccagctgatataagacatatttttaaccaactttaagatcttagttttttttcaggatggttataagcgaaggtagaattgcagaaagactttgtggtaaatattcaggattcggctctgttgccttacaatttgttaagtgcatgatggaaaaatagttgaaacaatgcaacagctgtctcagttctgaaagttaactcagaaatggcagaaagcaaggtcaggcatggtggctccgagcactttgggaggccaacgtgggaggatggttgaaactctgtctctatgaaaaatataaaaattagctgggcatgacagtgcacacgtgtagtcccagttactcaggaggctgagttgggaggatcacctgcgcccaggagtttgaggctacagtgagctatggtggcaccactgcacgccagcctgggcggcagagcaaggccttgtctcaaaaaaaaaaaaatcataaaaataaagcaatggtagaaagcagaatttgacctttcagttacagatgaggaacaaagtgaggagaggccattttttggtaaaagaaccatctggcgggacgcattggctcatgcctgtaatcccagcactttgggaggccaaggcaggaagatcacctgaggtcaggagttcgagaccagcctggccaacgtggtgaaaccccatctctactaaaaatacaaaaattagccgggtctcatggcaggcgcctgtaatcccaggtactcgggaggctgaggcaggagaatcacttgaacccgggaggcagaggttgcactgagccgagatcgcgccattgcactccagcctggaggacaagagcgagactttatctccaaaaaaaagagaaccatccaaaaattgctcagaggtcaagaatttcagaagaaaatacaaaaactttggctgaagaagatttaactagtgctatagaaggcttaagaagtgtggttctagcacttttccaactcatatttgtatcaaataccaggaaaaatagttatcaccatttatcatctagatttctgggccgttttactgttttgtcattttaagttgttttacacgtaatttacagaagtaagaataaagcaataatttaaaacaactttataagaaatttgatccaacctctttgtatcaagtaagttttgacacacaaacattagaagtgtcctcttaaggaagtggatggtccaggttcctttgaagtgtgatcattcatgtgagcgggcagctgattgagactactgtgtccccttttcgtccctcacttcctcttgattctgagaagattgatctagggtattgtcaaatgaagacttgtctgagattttattttcacgtcagttttgccatcatcattggccatgggtgctctctctctgcattcatcttgtgactcatctaatgatcccgaaaagtcgacactgtcatgtttctttgctattttgggaagaaattgaaatgttcttagtgaatcatcttgttaaagcaagctaatctgggcactgtggctcatgcctgtattgccagcattttgggatgctgaggtgggaggattgcttgagcccaggattttgaggccagctttggaacataatgaacagagaccctgtctctacaaaaaaataaaaaataagctgggcacagtggcgcatgccagtagttccagctactcaggtggctgaggcaggaggatcacttgagcccaggaggttaaggttgcagtgagctgggattgcaccactgcacgccagcctgggtgacagagcaagaccttgtctcaaaaaattaattaaatttcttttttaaagtagaattcatggccgggcgcagtgactcacacctgtaatcccagcactttgggaggccgagttgggcagatcacaaggtcaagagattgagaccatcctggtcaacatggtgaaaccccgattctactaaaaatacaaaaattagctgggcatggtggcacgcgcctgtagtcccagctactcaggaggctgaggcaggagaatggcgtgaacccgggaggcagagcttacagtgagctgagattgtgccactgcactccagcctgggtgacagagtgagacttcgtctcaaaaaagacaaaaaagaaaaaaaaaattagccgggcgtggtggcatgcgcctgtagtcccagctactcgggaggctgaggcaggagaattgtttgaacccggaggcggaggttgcagtgagccgaggtcatgccaccagcctgggcgacggagtgaaactttgtctcaaaaaaaaaaaaaaattacaggctgggcacggttactcacacctgtaatcccagcacttggggaggccgaggcgggtggatcacctgaggtcaggagttcaagaccagtctggccaacatggtgaaacccccgggaggttgagacaggagaatcacttgaacccaggaggtggaggtttcagtgagccgagttcgtgcaactgcattgcagcctggcaacagagcaagactccgtctcaaaaaaaaaaaaaaaagtagaattcattaagaagaggggcaggaacatcattagggaaattacttgcattataaaaatgtttagagctggccaggtgtggtggctcatgcctgtaatcccagcactttgggaggccaaggcgggcggatcacgaggtcaggagatcaagaccatcttggctaacatggtgaaaccctgtctctactaaaaatacaaaaattagctgggcgtggtggcgggcacccatagtcccagctactagggaggctgaggcaggggaatggcgtgaacccaggaggcggagattgcagtgagctgagattgtgccactgcactccagcctgggcgacagagcaagactccgtctcaaaaaaaaaaaaaaaaatgtttagagcttgggaattgttaatgcggaaggtgcacgttctgaacaggtggaagtgagctctacttgttaaatgaagtcagcacaggcctgcagatagaggagctgggaagggcctgaggctgcagccctagaccttgctttaaatgcttctttctggtcctccccttcttagccggaggactgtgatggagagaagagagaggacttggaacagctgcagcagaagcaagtcaatgaccatcctccagagcagtgtgggatgttcacagtcagtgaccacccaccagaacagcatgggatgttcacagtcggtgaccacccaccagaacagcgtgggatgttcacagtcagtgaccacccaccagaacagcatgggatgttcacagtcagtgaccacccaccagaacagcgtgggatgttcacaatcagtgaccaccaaccggaacagcgtgggatgttcacagtcagtgaccacacaccagaacagcgtgggatcttcacaatcagtgaccacccagcagaacagcgtgggatgttcacaaaggtattctttaagttctctgttaaggtgtattctttgtcaaaagatttctttatgttgtagaaatccaaaccagtgagaggaccttccatctctgcagggcctctctttagaagtggaaactggaagcatagagagctggaggcagaggctcaccctgtaggccccacgtgctgccgcctgcacgttcttagtgttgcctgtgaatgggaagcctctcttcatacccttctccctgagctcaaatctgcctcccttgtgatcttccttttttgtttttcccatgggacattgaagagaagccacccttcataagtttgaggaatgtcatgaattccctttattctagttgcccttgtcgattgactcacctgtctgttcagcctgtttcttaggcctggtacctcgtttctcacatcatcagtttgtgactggaagtcctgtgccagttgagagcctggcagggcagggaggctgtggtcagtctgcatgtccctggtttctgccacgttcctggtgggatgaattccatacgtgttgagttgattacctttattttattgacatgttttttgttagcatgtggaggaaaacattaagtttggaattgactacttttgaagtgttatgttaaaagcatatattttaggctgggcacggtggctcacgcctgtaatcccagcactttgggaggccgaggtgggcggatcacgaggtcaggaattttagaccagcctggccaatatggtgaaacccctctctactaaaaatacaaaattagctgggtgccactgcacttcagcctgggagacagaccgagattccatctcacaaaaaaaaaagcctctattttagccatttgattctagctagactcagttcacactgctttaggcaagtttggttgttttttggtttttggggttttttttttttttttaaatagagacggagtcttgctctattgcccaggctggtggtgcgatcttggcttactgtaacctccgcctcctgggttcaagcgattctcctgcctcagcctcccaagtagctgtgattataagcacccaccaccatgcctggctaattattgtatttttagtagagacagggtttcctcatgttggtcaggctggtgctgacctcaagtgatctgctcgtctcagcctcctgaagtgttgggattacaggcgtaagccactgcacttggccggcaaattgtttgttttttgagatggagttttgctcttgcccaggctggagtgcagtggcgcgatctcggctcactgcaacctccgcctcccaggttcaagtggttcttctgcctcagcctcccaagtagctgggattacaggagcatgccaccacgcctggctaatttttatatttttagtagagaaggggtttcatcatattggtcagactggtctcgaactcctgacctcaggtgatcctcctgccttggcctccccaagtgctgggattacaggcgtgagccactatgcaggccaagtttagtttttaatctgcattattgcaggaaagatctaactcctaggtgaggcctggaagcacagtctctggtgggttctataaaacccactcttcatttatttattgacttcttgggaccgggtctcattctgtcccctgggctggagtatggtggtgccatcacagcttagtgtagcctcaacattttgattcttaagttgttgcagctctgtccgtggggagccccttcaggtggctcctgtgtcatgtgtttgaagcacatcctggcttgtgacactgcaagttggtgccgcaggctcatcgtgtaggccctgtctccgttctgagtccgctgtttctccaaggagtcttggtgccttttactagattatggtgttgagaccaagacctgggctctaggtgtgctcactcctgctgggatgttgctgctgcttctgggctctctccgtggacagagtgaggaagggtgtgcctgggagctagtctgtgtgtacactcatagctgtatttatgttcatttgtatttatagacatatatgttaaataggaatacatactgatacctcagagcctaatccagcaccacagagttcattctgccctcccccccaggtttatttgcagtttccttctcggatagtgagaagcctggctctcacttctgccatttatttactttaaaaaaaaaaattagaaggttgttttttttgtttgtttgtttgtttgtttgtttttttgagacagtctcgctctgttgcccaggctggagtgcagtggcaggatctcggcttgctgcagcctctgcctcctgggctcaagtgattctcctgcctcagcctctctagtagctgcgattacaagtgctgccaccatgcctggctaattggggtttcaccatgttggtcaggctggtctccaactcctgacctcagatgatccacccgcctcaaccccccaaagtgctgggattacaggtgtgggccaccacgcccggccccatttatttacttatttgttcaactctcctgtaagtgtataatagtttcagaattagcaacccacatcatataagaaacaaatttaccaagtggatttaagtgtttgtttacagctcctttgtctccattttcagtttccagtcacaactgttttccaaggttactcaggtcactcctctcttccccagcccttcactaaggttgtgtcttcactggtgagtatgtagtcaggttcattggtcactggctacttcctatcctgggatcccacaacatcctggtcaattttttaaagttgcatactgttttgttttgttttttgagatggagtttcgctcttgttgcccaggctggagtgcagtggcgcgatctcggctctccgcaatctccgcttcccggattcaagcgattctcctacctcagcctcccgagttgctgggattacaggcatgcgccaccacgcctggctagttttgtatttttagtagagatggggtttcaccatgttggtcaggctgatcttgaactcccaacctcaggtgatccgcccccacctcggcctcccaaagtgctaggattacaggcatgagccaccgcgcagactgttttttttgagacagtgtcttgctctgttgtccaggctgtagtgcagcggtacaatcttggctcactacagccttgaactcctaggcttaggcagtcctcccacctcagcctcccaagtagctgggattacaggcacgttccaccacacctggctaagttttgtttttatttttttgtagagacagggtctcactgtgttgacaggactggtcttgaactcttgggctcaagtgatcctcctgcctcggcctccaaaatgctgggattacaggtgtgagccacctcgcccaccctaaaatttgcatgcttctaagttcattctttgtgatgcacaattgtgtagagtcatattcaccacccagttaccctcgagaacaaccccagcccccaagagggcccgtgtcctctttctaaccagccgctctctccttccccagcctctggcaaccagtggtctgttttttgttctatggttttgccttttccagaatgttctacagatggaattctataatatgtaggcttttgggtccaggtttttaaatcacttagcaaaatgagttgaagattcatccaagctttagattgatcagtagctcattcctttttgatgctggttagtacttcattgtgtgcatggtacacagtttgtttatccactcacctggtgagggacatctttcttctagcttttttgtgaatatgaataatgaatgtgtctttttttttttttttttgagacggagttttgctcttgcactcttgtcgcccaggctggagcggtgatctcggctcactataacctctgcctcctgggctcaagcgattctcctgcttcagcctcccgagtagctgggattacaggtgtgcaccaccatgcctggctaatttttgtatttatttatttatttattttgagacagggtctctcactcgcccagcctagagtgcagtggcccattctcagctcactgcaacctctgcctcccaggctcaaggggttctcccgcctcagcctcccgagtacctgggattacaggtgcatgccactatcacttggctaatttttgtatttctagtagagacggggtttcaccatgttggccaggctggtctcgaactcctgacctcaaatgatccacccgcctcggcctcccaaagtgctgggattacaggcgtgagccaccgcacccggcctaatttttgtatttttagtagggatagttttaccatgttggccaggctgatctcgaactcatgatctcaggtgatctgctcacctcggcctcccaaagtgctgggattactggtgtgaacaactgtgcctggcctgtttttatttcccttcttgaaagcctggctggcgtagacatatagttggcagttggtgtcttgcttgccggtggtttcgctctgcccctctctagcttgtgttcactgccgtggccaccctgaaggcttttgtctttggtgttctgcagttttgattttatgtgttctttagagggacagaactaaaaggatagatagacatataaaggggagtttattaaggagcatcgagtcacataatcacaaggtgaggtcccacagtaagccatctgcaggctgaggagcaaggaagccagtctgagtccgaaagctgaagaacttggagtctgatgtttgagggcaggaagcatccagcatgggagaaagatggaggccagagggctaaccagtctagtctagtccttccacgctcttctgcctggttttattttggccacactggcagctgattagatggtggcaacccagattgagggtggatctgcctttcccagtccattgactcaaattttaatctcctttggcaacaccctcacagacacattcagggacaatactttgtatccttcaatccaatcaagttgacaatgttaactatcacaccaggtatggctttttatgatgtctttgattctgcttgggatctagggttttcttcaatgtgtggatgatgcttttctcatctgttgcctcaaatcctaaccagtatctccatcataccttctacctgttctttctctccattaagttttagagttctcttgcataccgtatttgtccattctcatgctgctaataaaggcatacccaagactgggtaattaaggaagagaggtttaatggactcacagttccacgtggctggggaggcctcacagtcatggtggaaggcaaggaggaccaagtcacatcttaggtggatggtggaaggcaaagagagagaacttgtgcagaggaactcctctttataaaaccatcggatctagtgagacttattcactctcaggagacaagcacgggaaagacccgcccccatgattcagttacctcccactgggcccctcccatgacacgtgggaattgtgggagctacaagtcaagatgagatttgggtggggacacagcccaatcatatcacatacgtatagctcagcccacttttgtgcttgccttctttttgctcttggccgtaggctggatcgttttatctgtgttatctcccatttttctaaacctctgttcatctgtatataatctgctgttaaatacgtccagagttgttaattttgttcttgctgtttttagttctatttggattctttaaaattggttgttattctgcataattttttgtttcctagagatattttcaaacttattttaactgtacatctttttttgtgagtgaattggtctccactttggcctggtatttggaggtgcagtgagcctatccactttgttttttattgagatggagtctttctctgttgcccagactggagtgtaatggtgtgatctcggctcactgcaaccttcacctcccaggttcaagtgattctcctacctcagcctcccaagtagctgggattacaggtgcccgccaccatgctgggctaatttttgtatttttttttagtagagacggggttttgccatgttggccaggctggtctcgaactcttgagacgaagtctcactctgtagcccaggctggagtgcagtggtgccatctcagctcactgcaacctctgcctcccaggttcaagagattctcatgcctcagcctcctgagtagctggaattacagacgtgtgccaccatatccggctgatttttgtatttttagtagagatgggtttccccatgttggccaggctggtcttgagctcctgacctcaagtgatctgcccaccttggcctcccaaagtgagggggttacaggcatgagtcaccgcgcctggccagcccatccactttgaatggaatgtgttgctcgggttgatttggatcactattattttgggtctgccgtgggtgccacttctcaggatctttttttggttccttgaatgttttctgttttccatatgtccgttattccgcttggagtagcacattgtctggtcttttttagtgaggtgtttgtgttacttttgtgagaagtctgtgttatggctcgtgggagtcccttcaagttcagtgccacattttcatctgatcagtcttccaaaaatatccctttccctagacacgttttaatataatttttattttttattttattttttctcacgtctagtaaggcagggaatatttttaaatttttttgtagagatgggatctcactatattgaccagggtaggctctaactgctggtctcaagccattctcctgcctcggcctcccaaagtgctgggattataggtatgagcctccacacctggcctcctggacgtgttttgttttgttttttaattttgagacggggtcttaccctgttgcccatgctgcagtaagtggcacaatcgtagcttactgcactctccacccctgggctcaagcagtctttctactcagcctcctgagtagctgggaacacaggcatgcaccaccatgcctggcaaatttttaaatattttgtagagatggagtcttgttacattcactaggctggtctcaaacttctggcctcaagtgatgctcctgctttacatgctttttacttatttttttttttttgagatggagtcccgctctgttgcccagcctcgagtgtggtgatgcaaattcggctcattgcaacctctgcctcccaggttcaagtgattctcatgcctcagcctcctgaggagctgggattataggcatgcaccgccatgcctgactaattttttatttttagtagagatggggttttgccatgttggccaggctggagtgcaatggtgcaatcttggctcactgcaacctctgcctcctaggcttaagtgattctcctgcctcagcctcctaagtagctgggattacaggcgtgcacaactgcggccagctaatttttgtatttttagtagagacagggtttcaccatgtcgcccaggctggtcttgaactcctgacctcaggtgatctgcccccctcgccctcccaaagtgctgtgattacaggcgtgagccactgtgcctggtctccatactgtatttttatagtgattgtactagtttacgttcccaccagcagtgcaaaggttttctgttttcactgcatccataccaacctggatgtgttttttatctgtttgtgtcatcaattctttcttttttttttttcttttttttttgagacggagttttgctcttgttgcccaggctggaatgcaatggcatgatctcggctcactgcaacctccgcctcccgggttcaagtgattcttctacctcagcttccagagtagttgggaatacaggcatgtgccaccacgcccagctaatttttgtatttttagtagagacggagtttcagcagatggtctcaatctcttgacctcgtgatccgcctgcctcggcctcccaaagtgctgggattgcaggtgtgagccaccgtgcgcagccagcgatttctttcagcagtgttttgtggtttcccttgtagagatttttcgcctccttggttaggaatattcctaagtattttattttattttttgcagccatcgtaaaaggtgttgagttcttcatttggttctcagcttggtcacttttggggtatagcagtgctactgatttgtgtatgttgatttcgtgtcctgaaactttactgaattcatcgatcagatgtaggagctttctggatgagtctccagggttttgtaggtaaacgatcctgtcatcagcagacagggactgtttttcctctttactgatttggatgccctctatttcttctcttgtctgattgctctggctaggactccagagcagtggtgaaagtgagcatccttgtctttttccagttctaaaatgccttcaacttctcccttttcagtataatgttggctgtgggtttgtcatgaatggcttttattgtcccttctatgccgattttgctgagggttttaatcgtaaagggatcctggattttgtcaaatgcttcttctgcatctattgagatgatcatatgatttttctttttaatgctgtttatggggtatatcacatttgttaacttgtgtgtgttgaaccttcatccctggtatgaaacccaagtgtattatcttttttatgtgctgttggattccgttagctagtattttgttgaagatttttgcatctatgttcatcagggatattggtctgtagttttctttttttgttatgtcctttcctggttttggtattagggtgatactgacttcatagaatgatttaggaaggattctttctttctctatcttttggaatagtttcagtaggattagtaccaattcttctttgaatgtctgatagaattcagctgtgaatccctctggtcctggacaatttttgttggcaatttttaaattactgtttcagtcttgctgcttgttactggtctgttcagaatttctgtttcttcctggtctaatctcgaagggatgtatatttccaggaatttatccatcgcctccaggttttctagtttgtgcacataaaggtgttcatagtggccttgagtgatctttggtatttctgtggtattggttgtaatgtctcccatttagtttccaattgagcttatttggatcttctctcttcctttcctggttaatctcactaatgatctatcagttttgtttatcttttcttttcttttctttttttttttttgagatggagtatcgctctgtcacccaggctggagtgcagtggcgcgatctctgttcactgcaagctctgccgggtctgcctcccgggttcatgccattctcctgcctcagcctcccgagtagctgggactacaggcgcctgccaccacgcccagctaatttttttgtatttttggtagagagagggtttcaccatgttggccaggatgttctcaatctcctgacctcatgatccacctgcctcagcctcccaaagtgctgggattccaggtgtgaaccaccgcgcccggcccgagctcctgacattgaagggagatgttgctgcactcatgtggccgcccaccctggggacgagtccccgcacaggcagcccttgtggagcccaccatgccgcccttccctgtccagttcctccgggggcctttctagcttttgcaactgtatcaagcctgtatctctccatccctagccagttccccagttggggcagaaaaatttagtttgggtcattttttaatcggaagtactctgtgagcaagtgggtcacctggagcccagaaaggtgcctggctgatgcaggggaagccagagaatggtcgcttccacaggcaggggatacgtcccaggcgccagtcgaggggcaggagcctgcagggagggccacagtgacggtgggctcaggatccgtgccgacgggccccctgcagcttttcttttccctttgggttattgctgctgaaaaggtttccagaggtgggaatgttgagacagggaaaggctttctgtggctcgacctgtgttgccaaaatggctgctgagaaaaaagttgaagcaactgattctgatgttggtagcatttgggtgcatttgtttcttgtgactgtggtggcactgaggattcgtaatattcttcccaacttttgctgatttagtggccatacaaggatctttaaagtttgtgtctctagattggtttacctttcatcggtacccactttttccaggcattttatgcacattttctctctgtaggcgtcatttccgcctttttcctgagagcaggttgtttgttcctcccgtggcagcactgctgtggcgtggggagagtccacagcttctgtttctgggactttattttgtttatttatttttttgaggtggagtctcgctctgttgcccaggatggagtgcagtggtgtgatctcagctcactgcaacctctgccttccaggttcaagtgatcctcctgcctcagcctcccaagtagctgggactacaggtgcccgccaccacgcctggctaatttttgtatttttagtagagatggggtttcaccatgttggccaggctggtctcgaactcctgacctcaggtaatctgcctgcctcggcctcccaaattctgggattataggcgtgagccaccatgcctggcctgtttctgggactttgactttacattgtgatttaagcgagtttaatatttttccttcttctttttttaatgagatacaattaacaagcatacgattcaccattttaaagtacagacctcagtggcacttagtacactcacagcatgtgtgagcaccatctccagtggctccagacatcatcatcaccccagaaggaagcccggtgctcgcggcagccaccccgctctcctccctcagctcctcgcagcctccaggctgctccatgtctacggatttgcagatcctgaacacttgatgtaaacggaacctcaccatacgtggccttctgtgtctgctctgtcactcagcctcacgtcttcagggctcctctgtgttgcagcctgagttggggcttcgttccttcttgtggctgaatggcagcccacgtttgttcaaccattcatccctcaggaggcatttgggttgctcccaccttctggccgttgcgagtggtgctgctgtgaacagctgcgaacggggttttgtgaggacgtgcgtcgtcagttcttgagcacatcactgtggcttctcatgtgaattctggacctacattctttgccttttttccccaggagtgtgaacaagaatgtgaacttgccattactgacctggagagcggccgtgaagatgaggctggcctgcatcagagtcaggtgacccggcggggcctgcacaggctcacagcatgggctctgttatccccacagggcacagtgggcatccgggtgggggtggggtgggcgctgccatctcctttctctgagttgtctgtttccacgttctgtgtgtggggccatcagcagggccggtggaggagacacacgtggatgctgggggtcagggggcttggtcaggtgcaggccacatgaatgacacactgacctcaggccggttgctctccctgtcagctgcgaagccccctccaggtacacacagtgccgtcatacagcgagggaattcggggtgctggtgctcagggcagtgatgcgctgtggggtcactggcagaggagctgggtggcatctcagtggcatccgggcctctgtgtcctgcccctgcttccacgggatgtctgctgtttcattttctgtgtcttccttactcattctcattcatgcttctgtgtctccctgatgcgccctggttctgaccatgggcccttatcagaggccttttctccgccgcaggccgtgcatggccttgagctggaggcgctgcgcctgagtctgagcaacatgcacacggcgcagctggagctgacacaggccaacctccagaaggagaaggagacggcattgacggagctgcgggagatgctcaacagccggcgtgcccaggagctggccctgctacagagcaggcagcagcacgagctggagctcctcagggagcagcacgcacgggagaaggaggaggtggtgctcaggtgtggacaggaagcaggtactgcatggctaggcgggcacgggcagcgtgtgggctcggtgtgggcattctagtgcctgttccctcttggggttgggagctggggcgccctagcaccgtctccccatctctgttctcagcaccttgcctggtgtctggcaccatgagaggggtgaacaaagggggcccttgggtttttgtggccaggagattattagagcaggtttccaggtggtctgtgataggtgcgacccagggctgaccttcacctcctctcttagatcgtcctgtgtgtctggaagtcacggtgtcctcagtttgttattaaagccaagcatcatcacagacacatcctgctagcccgtgaatgctggcacgtgtccagtgggtgccagagcctggtcgtttcctgggcagttgggtcactgaaaaggttgagatggagtggcctgagctgctttttgtttttcttgcagctgagctgaaggagaagttacaatcagaaatggagaaaaacgcccagatagtaaaggtacccgggatcgattctaaaatgcacgcctctgtgtatgttgtttttcctttctcgccaggtcccatgagaacgctcctcaccttgattcagacagaagccagtcgaggctttattagaatatgctggttgaaagtgtattgcgttctttgtttatttatatcatttgtatttgtcagaaaacttgttttgttgtttcacattgacttgcataacacaaaggcactgctcggcccctccatgctgtcttctgagtggcccccatggcctgcccctgagctgtgttctgggacacagcctctgccctcgtggatgtggcagttccctgcagtgcatggggtgtgggtgctggggtgccggggagaataccacacagggaggaggttttgggtggggtgggttgcacctgctgtgggtggcctcactggggaccacaggtagcagtgccccgtcattgccaggccctccgctagagggctgagctgtcagccatgctgagtgtggaggcccttcctgagtcaggcatctgggcagctctcaggcccttggcagacgatgggtgttagtccaggcttggggttgtgttccggtcacctgctcctctgacgcaggcagtgagacccatttctcagaacacttgggacagagcccagcccttgggtggaggttggcaaagttgccattggcccctgggacttatagggagatgtattactaacgctttgagggtgactgtgtggattaggccttgcgtgcagaggctcgtctgtttcggggtgggtggtccttgtgcagaggctggtctgtttcagggtaggtggtcctctcgctttgtgcagatgcaggtctgttttggggtggatggtccctgtgcagaggctggtctgtttcagggtgggttgtccctgtgcagaggctggtctgtttcagggtgggtggtcctcgtgtgcagatggcagtctgttttgtggtgggtggtccttgctcacttttcctcaactgcttgcctcctggatgcttctgcttttctgtcctgccagcattcaggggagagactgggtgtaaggcctgtcaggacagtttagttgggggccatgactgcccattcttttttttctttgagacagggtctcattctgcctcccaggctggagtgcagtggcacaatcacagctcactgcagtcttgacctcctgggctcaattgatcctcctgcctcagcctcccgagtagctgggactatagttgcatgccaccacatcccactaatttttgtatttttttttttgtagagatggggtctcactatgttgcccgggctggtctgtaaccctaactcctgggctcaggcgatctgcctgcctcagcctctcaaagtgctgggattagaggcatgagccacgttgcctggcctgctcagaggttttgactgtgtgatttaaatttctttagcacagataatcaactattgagtttaatttttttttcttttaaattagaccctgaaggaagattgggaatctgaaaaagatttatgtttagaaaatctacgcaaagaactgtctgcaaagcatcaatcagaaatggaggatttacaaaaccagtttcagaaagaattggcagaacagagagctgagttggagaagatttttcaagacaaaaaccaggctgaacgtaagtaatgaaaatgagcaagtttggagtgggactgaattttcctaggtagtactggaaggaatgtcgttcatgtcaccatgcgtcattgcgcacgtttcctaccttctaaatgctggatggccccatgcacgtgtgacacgctggtggccgtcatgggtcacaggtctctcagggtccttaaaccttcctgatctttgtttcagagatttttcttggcatgttcagttgctaaattattacaaagcagcagctttgtggttgttcacttttcatactccagggttgtgtgttccagcttgaccctcatggtgggtggcatgggtaggcgatgtcccctggtgctatcaggcatgtgaggctcaaacgaggggcccgggggcgcccaggatggggctctgggtggcagcgctctgggtgcaccattattgtcactgaggtcgctgttgaggagagtgatgtcttgtaaaccaagtgccattgctttacctttctaggggcccttaggaacctggagagtcatcatcaagcagccattgagaagttacgtgaagacctgcagtccgagcacggccggtgtttagaagacttggagttcaagttcaaagagagcgagaaagaaaaacagctggaggtgggcagcagcttcgttatttaattacttggtatattagggaagttttaacagattttggaattgggctatttcgtattgtgttatttgctaaaacttaagttctaaatttaaagagactggctgggaacagtggttcacgcctgtaactctatcactttgggaggccaaggtgggcagatcatgagctcaggagtttgagacaaaaattagccaggcatggtggtgggcatctgtaatcccagctactcgggaggctgaggcacgagaatcgcttgaacctaggaggtggaggttgcagtgagctgagatctcaccactgcactccatcctgggcaacagcgagcctccgtctcaaaagcaaataaataaaataaaatgaaataaaaaaataaatagagtgttagtggtgaataaaagtgtaaggatatagtctctgagactgatttaataattacgttcaatcttgtacttaggaatgcatgttctttgcaggcgtccctgagacagttacacaaatcgcagacactaggtaggagtgtaaggccacatcctctaaccgtgatccagtacacacgagattcctaggaaaagttaacaagcatttctttctgctgtgtgtattcaagatgcttctctaatgaagcactacaatcaaaatgttgatgtggccaggtcctcattggaggcctgacaaacctgagactcaaactgagtatcccaagaatcagttgaagaaattaaagcataaatcagagatagggttaatcgtggtgtgtgaaagatttacaaacatgagaatatggaagtagttggggtctagggtcttagggaggcctgtcctgggccccttgtgtctcccagcgggactctggtgcccacacaccctcctctcctgcagagagtccaggccggggctcactccacacccccagtctctccctggtcccttccaggctctccctccgagatgggaaagagggggctggtagcatcttctggtcctgatgcccatgattgggaaaggtaggaggagccgtttccatgaggaggacaggccagccccaggtgcagcgttgcccaggaggaaatcacgccatgctgcgctgggctgggctcttgctgattgtacagaaaagtttagtgtcacggtgtaagaggtacctgcttccttaatgtagaagtattgaaactgagagacctcctatttgggagtcttgggtactgtgggctagtaagactccctaaattccattcagcagtctgtatgtatgaccctaaaccgaagcagggaggtgcacaagatgaaactgcaccgctgcggccggcatggaacctggccgtgccacctcctcagctgagacagacctggaagttcctgagattctgaaagtgcctggccttgtggggtcagcgctgaccgatccctcttgtcacggacagagctctctcggtctctgctgtggctggctttctccgagctgcaggtttgggatgtgagcttttacccttaggatcgcagtggcagggataaaaccgcacacgtcactgctggggtgggggccttgagctcattagggtttcacctggacactttgctttttccagttagagaatcttcaagcatcatatgaagacctgaaggcacaatcacaagaagagatcaggcgcttgtggtcccagcttgattctgccaggaccagtagacaggaattgagtggtgaggaattgtattggaaaattcagatcctcaaaagctgaagctgtgtgtttttcattgttgtaacaccaagccagaatttaacaattctagcaaacacaaaaaagtggatttacctgtttgacatcctgaaggttgaggtgtctggtttgaaagtggaggtttgctttgtgggagagagccctggttttatgctaagcaagtcagtgcagcagtgacgtgcacctgtgtgtccctcaaggccaagagcaacacttgcagggggtgccttcatgtctaaggaaagcttaccagtggtgctgagcgtttgcctcggaaggacggttgagtgctgtccaagtgcgggctcacctggtgtctggggtcacagggcagtgccccacatcctgctgccaggctcctgtggccccagctctccaggccacttgctgaaggcagctctgctccaggtgtccccttatagctgagcacctctggagaccccgaccccaggccccccattccgtgtcagagaggtctttgtgcagcaggcttggatggtgcctgagggcaggggctggccaagcccaattcaggcaccggcgcccaggtccacaggacaggagggtgagccactgcgtgtctcctggcattcatgtgccgacagagccttttggcccaacttgtccttgtgggtggtgggatttgaagcaaagagcacttaggagaaagaactggagacactgccactgtcaccagggcaccaggcctggctccgcctcccagccctgcgccctgccgggaccaggtgcagctgagagcatgtcgatttatcttcctctgggggtctgtctgtcgctggaggctggagaagagagaagctgagggggccacaggcacagctgctccccgcgggctccggctctggcttggtcctctgcttgtctctgtcctgcctctcgggacccatgcagagaaccccgatttgccctctctggggtgcccgttgctggctgtcagctgctgtagagcagcgggctgtattctgaccatagtagccatggagacaagttcttttagggtccgtgttgcttctctgctgctgtgtaacaaattatcacaaacttggtggcctaaaacaacacagttgtcagcttacagaaagtccaagatggtacagctgggttttctgtccagggtcccccatagcccacatccaggtgtcagctgtcgtgtgccaacctgatgagcctgcttctgggctcgaggttggtctggatccagtttcctggggctgcaggaccatcgtctgtctccttgctggctgtgccccccacatccctgccacttcgagtgctgcttttgctcccagccctgtggctcttgccaccgcttggagagagctctccacattcaggggcgtacgagagtctaagccgtaggggtccctcatccctctccggttctgggatgggcccttttccgagttctgcccccaccacaggtaaccaggctcttgcctctcgcctggcttgttgtgggtgtcccattttaagacgattgcctgactccgttatgttgcagagctacatgagcaactcctggcgcgcacctctcgtgtggaagatttagaacagctgaagcagcgagaaaaaacccagcatgagtccgaactggagcaactgaggatttattttgaaaagaagttaagggatgctgagaaaacttaccaagaagacctaaccctgttacagcagaggctgcagggggcgagggaagatgctcttctggactctgtggaagttgggtaagcaaagcagttccagcctcagtgagtttctgccatacaggggccaggctctgagttcaggggtagttttgttggtgatttcatgctagtaggcaccaatggccttttatacaaacacattttatggtccagatttaaaagatgacacaggcacgggcacccgagagtggcctgcatgtgtgtgtgcgagccattggtggccacactctgtccaggcctgcgtgcacatgttggtggtggacacgctcgtgtaggccagcatgtgtgtgtgtgtgcatgagtcagtgggcacgctcttgtccaggcctgcgtgtgtgtgtgttggtggcaggggcgctctcctccaggcatgtgtgtgtgttggtggcaggggcactctcctccaggtgtgtgtgtgtgtgtgtgtgtgtgtgtgtgtgtgtgagagagacagagagagagtcagtggcgggcacactttcttccagacctgcatgtccctgtgccgtgtctctggctttgtgactgccacggctccccgcacatggacattgcccgtccttgactggaagcacgaggaggcgcctctgctgtgagcagtcggtcctggggagggaatggcgcacacatggaaaaggggtacgtgtgtaaagcttttataaaatgttttcccttcaggttgtcctgtgtgggtttagaagagaaacctgagaaaggaagaaaagatcacgttgatgaactcgagcctgagcgacataaggtaattggccgcgcgctgagaagtgggggagtcctgtgctcttgaccttccagccctgcgtcttccacattatagagcctgtgtttccgtccttcccaccttgtccaggggaggaaggctgcttgcggatgctgccccgacctcactgctgctccgcggtgggcctcaccatgcactgtttgatcaggaaagggggtggccgggggagccggagcccctccctcagccctgggatgccctggctgtgggcaaggcctccaccctgcagtgggctgcattcgtcagacttgacagtggcagttcaaagggtgtgaaattgtgtctttgctttgagtccacacggagcgtctgctggcttttgtgtttcttccttgagttgcttccgtgctgcgacttctgtcacctttaacttctgtggggcaaactgtccaaacggagcttctgggatgtagactgttctgggtctgtgctgccagtgtggtgcccagcagtatgtgtggctgtggagcacttgatgtgcagcatgagcaagcccggtgtcgggctccgggggacacacgggagggcagggaggagacgcaggggcagcaccgcgtggcttgttgcacggtggaaccagtggaggggaactcggggcatctgggctcagcggccaggagccctcactctggagcagggtccctgggcctgctggaggccacagggtgtccaggcagggtggcagcgggctgtgtgccagtttgagttccctgcaaagcggaccccaacacagaatttgctgcacaagaggctatgggggaaatgccagagaagggcaagggcccggctggaacaggcagccaggaccttcccacgagcaggccttgcaccagagagaacccaggaagggctggggtgggtagccccaccaggcattcgtgtatcacctgagagccaacccctgcctctgcgcgtgggtgtgacgaggacccagctgttagtgggcagtggtcacaggaggctggccttgagagcccagccctgagatgtgaggccaccaggggagacgcgaggggcacgtgccctaccgaccttgctgctgagagaattgaggagaggtctgcccggtccagggccctgccgccctgaggagcaccagtccctgtcagtgccaccaattcttgtatgtcttccggaggcctgactgagagacgggtgtgggcgggagagcatgtgagcacgccagtgggctggcggggttcaccagggcgcagcgtgtggtctcatgaacctagtgaggtttgagttttctttgtgcatagcaggaaacacctttgagggttatagctgcgagcgaggtagcttggctcactaacgtgcttgtcccacgtggtttctctgtaggagagcctgccacgcttccaggcggagttagaagaaagccacaggcaccagctggaagcgctggagtctcccctctgcatccagcacgaggggcatgtctcagacagatgctgcgtagagacttcagcattgggacacgagtggcgtctggaaccctctgaagggcacagccaaggtgggcccctcccgcctcgccatggtgtcggcaggtcccgggtctgggggacgttctcggggagcctgggtgcctgggttcgatccaagtcctccgtgaagcagctgagtgctccgacctcttcttctggggctgacacctcaacagagtgtgtcctgatgagggtttggcgttagaggcggggtcactggctgggcaggagtgcgtgtcctgggccagcgccccagcagggcaggtctgacctgggcagccaccctgggggtcatggggattgctggatggacatggtgaccattcacctctggagggagaatgtgtgtccactgggcccaggggaggcttttccaggatcctgctctgctcccagcaggcccaggtaccccagctcgcctagtcagactaaggttgtgggatgtccaggcagggcacggggcacagggctgtggggtcagaaggtgacggagaggaaactgcagtcatcccagagtcgcggtcccatggcgccggacagtggccactgacgggttccaggaggggcaggcggccctggccactggcgtggactgtgctgatggtggggctgccgtccatggtgggggtgaggggctgaggccgcgggtcctgctgggaggtgtgtggtctgactccattctgggctgtggccaagttgagagaagcctgggcctgcctgggcctccttcaagctgggggtggtgcagcggcgcctgcatctggtcctcactcctgcctgccctgcaccacaattgtccccacagccaccccttgatgcccatggtcgttggcaccactggtgcctggccagcacctagtcccttctgcttttttcctcttctgcagaagaagagatgggccagtgggggtagcgtgcctgggcacagaacagcagggggaggtgctgggacaggaaccctggcaggcccctgagctcaggccctgtccttgtggctgcctcatagaccctgggtgacacatgtgtgcccacatctggtcacaggcatgaggctcactcaggaactcatggagggtcacatgtcacacctgacctgaaggagtagcctgggcgggtcgtgtggctgtcgtgtgggcccaggacatccctgtgactcgggacggcactgtgctggggcagcatggaggtgtcccgaaagggaggggagacttgagagagccatgcctgctttcatcactgagtcagcacagagcttgaaaatccacagtgtctgctgtcagaagcatttataggttgccgttctgcctgtgcggactgtgggctccatcgagggccggcaccggcctgactgtcttccctgctccttttccacacagagcttccctgggtgcatctccagggtgtgcaggacggggacttggaggccgacacagagcgggcagccagagtcttgggtctggaaactgagcacaaggtgcaactttcgcttcttcagactgagctcaaagaagaaattgaactcctaaaaatagaaaatagaaatttgtatgggaagttgcagcatgaaactcgtctgaaggacgatttggagaaggtgagtcgtgactccacagcccagcgcctcccgcccgagtccttgctctcttccacctggaaggcttgtgtccttgtgtatggaggggcatcctggggacagcccagtgctgtacatggcacatttgtaagggcgacagtcccgtaaattcttgaaactattcctggcaatgccagtagtgggtggcggttggatagaatcttgtcagggtcagcaccggggcgaaagtgaagttctgagtgaagatttctttttgttttgttttgttttgagacagtctcattctgttgcccaggctggagtgcagtggcatggtctcagctcactgcaacctctgcttcctgatttcaagtggtcccctgatagctgggattacaaacgtatgccaccatgcctggctaatttttgtattttttttgtagagacagggtttcaccttgttggccaggcaggtgtcaaacgcctgacctcaagtgatctgcctgccttggcctcctacagtgctgggattacaggtgtgagccaccacgcccggccctctgagtcaagatttcttagggaaactgtccaggtgtcctaagagggctctgggaggaggcacaagcccgggtgccaagcacgtggctggcctctgatgctcaccccaagtcttaaattgcgtccgcgttccccaggctcttcctgtgctgttttgcacctgtggaagaggcaccctctgactccctcgccctttgcgagtgtgaggacactgccatgctgtcataaatgatgacaaagcaacacgacagcagcctccacatggcccgatgggcttggttacagccagggcagctcagggtccatcccatgctggagcagtggatttcaagtgagccgacagggcagctcagggtccgtcccatgccggagcagtggagttaaagtgaaccaacagggcagctcaggctccgtcccatgcgggagcagtggagttcaagtgaaccgacggggcagctcagggtccatcccgtgccagagcagtggagttaaagtgactgaaattgtcatgtcttgtcatgtgtgttctgactcaacctcatgcttgtgacagtgttttcatttctatttgtgtcctgcttctcccacccctttgctcctccctgtgaatgtctccctgagaatgattttcattctccatcaagagacagcttcataggaagctatgatgacctgcaagtctgatcccatgctgtttgttaaatgcaggtgttggtaaggacttccagcaaaatagaggtaagggtggagccctgtggggagccggacaggcggtaggtgggccgatggtcatgtgccaatggcacctgcagccaccagtgtgtggccttctctggcactgttggctgaagacagacttcccaagtgactttttgttgttgttgttgttttgttgttttgttttttttttttttgagactgagtcttgctctgtcgcccaggctggagcgtagtggcgcgatctcagctcactgcaaccttcacctcctggcttcaagtgattctcttgcctcagcctccctagtagctggaattacaggtgcacaccaccatgcctggctaattttttttatttttttttattttttttgagatggagtctcgctctgtcacccaggctggagcgcggtggcgcaatctcagctcactgcaagctctgcctcctgggttcatgccattctcctgcctcagcctcccgagtagctgggaagacaggtgcccgtcaccatgcctggctaattttttttttttttgtatctttagtagagacgaggtttcaccgtgttagccaggatggtctcgatctcctgacctcgtgatccacccgcctcagcctcccaaagtgttgggattacaggtgtgagccaccgcacccaaccatgcccagctaatttttgtatttttagtagagacagggtttcaccatgttggccaggctggtctcaaactcctgatctcaagtgatctgcccgccttggcctcccaaagtgttgggactacaggcgtgagccaccgaacctggctccaggtgactttttgatgctcatgtctttatgcttttcacaggccaccattttacctccttatatcaattatggggagaggactgtggatttctctcttgttaattttaattcttgttttgagtatgtggaagctctgttgttacacgtgtacacatttgtgattgtaatgtcttcctaaaaattcacccttttctgtcttgtagtattctgtccaaaaatacacctgttttttttttgttttttttttttttttgagacagtgtctcactctatcgccagggtggagtgtagaggcgtgatcttggctcactgtaccctccgcctcctggtttcaagcgattctgctgcctcagcctcccgagtagctgggactacaggcacgtgccaccacacccggctaatttttgtatttttaatagagacggggtttcattatgttggccgggctggtctcgaactcctgacctcatgatctgcctgcctcagcctcccaaatttttgggtttacaggcgtgagccaccgtacccagcctcgtcttttatcaatacagtcattccaaccttcgtgtgcattttgtctggtgtatctttttttattcgttttacctttttttttttctttttttttgagacaggctattgcccaggctggagtgcagtggcacagtcttggctcactgcaacctcttcctcccaggctcaagggatcctcctacctcagcctcccaagtaactgggagtacaggtgcacactaccgtgctgagctaatttttgtattttttgtagagatgaggtttcgccatgttgtccaggctggtctcaagctcttgggctcaagtgatccacccgcctcggcctcccaaagtgctgggattacagatgtgagccactgcacctggcctacttttaatctattcaaagtaaagtgcattttatgtggacagcatatagttggcaattttttttttttttttttttttttttaaagacggaatctcactctgttgcccaggctggagtgcagtggcacgatctcggctcactgcaacctctgcctcccgggttcatgccattctcctggctcagcctctccgagtagctgggactacaggcgcccgccaccacgcctggctagttttttttttacatttttagtagagatgaggtttcaccgtgttaggatgttctcgatctcctgacctcgtgatccgcctgcctcggactcccaaagtgctgggattacaggtgtgagccactgcgccggcttttttttttttttctgagacggaatattgctctgtcgcccaggctggagtgcagtggtgcgatatccgcccactgcaagctccgcctcccaggttcacgccattctcctgcctcagcctcccgagtagctgggactacaggcgtccgccaccacacccagctaattttttatatttttagtagagacggggtttcaccatgttagccaggatggtctcaatctcctgacttcccgatccgcccacctcggcctcccaaagtgctgggattacaggcgtgagccaccacgcctggccatagttggcaatttttaatccattctgataatctctgcctttcagttgcagtgctgagtctataaatgtttaaggtaattactggtgtggttgatttaggtcttccgtttcactgttcattttctgtgagatgcgtctggtggtcatggttctgctttttcttttttcttgtgtttttggattatttgaatattttctagaactgattttaatgtatctgttgactattaagttattcctctttgcattatgtttttaatagttgctccagggattaaaatacacattcttggcccggcacggtggctcaggccagtaatcccagcactttgggaggcgggtggatcacccaaggtcaggagtttgagaccagcctggccaacatggggaaaccctgtctttactaaaaaataaaataaaaaaattaggcgagtatggtggtgcatgcctataatcccagctactcgggggcctgaggcaggagaatcgcttgaaaccaggaagcagaggttgcagtgagccacaatcacgccactgcattccagcctgagcggcagagcgagactccgtctcaaagaaaagagaaaaaaaagaatacacattcttaaccttgtcttttatcagtacagtctactaagagtcaccatgatgctgcgttgtgtaaactgtgacctctaactgcacaggtgcttttgtcacctccccttcgtcttctgtgctgcagttttcatagactagacatcacatccgcctcctgcagtgtcaggagatttgctttggaaaacatgtgtttgaaagaaattaagaggaaaaatggccttatacttgccatttctggtgctcttcatttcttcttgaagatctgagtgtttggcgtcattcccttcagcgtgaaggatctccttcagcatctcttgctgtgctgcacacattttctccgttttttgaagtctttattttaccttgattcttgaggagtatttttgtggcattaaaaagtctaaggtgacaggtttcttgttcaggatttaaagatgtttaaaatccttctctgcagattttatgatctgttttgtcttggtgttggtttccattgattgtgttttctcttcagcaggggtcacgttttcctgcttatttatgggtcagctgggttcaggttgcatcctggacactgtgagtgatagatttggagactttgggttctgtcctgctcctctggagagtgttggttttctgttgcagcaggcagttcactcgggtgacttcagactgcatgctcccctgcgtctgtgctgggctgcggcatggtgttaattcagttcttgtagctttagccggcttgcttgcttttggagtctgcccctcgtatgtacagatcggggtcagcctgagacgtgggcgggttccttcccaggcgttgcagctctctttcctccctcactctccagttcctctggctcagtgagggatttgggatttctgtgtgtggggcatggacagatactactcttagtgaaaagctggaaaaagagaatggctcagtgctgtttcttccttctgaatgtccagccctctgcagggtctgtctgcttgtggatctctccacagccttcaggtttttttgtacgttctgttcagttcatagtggttgtctctggagggctggtctggcgaggtgcacaggcatcaccagaagtagcaccctaaactttaataacttaatttttaaataaggagttgaggtcaatcttacgtgcctttttttgggttttttgtttgtttctttttgatgagttcagtagtttattgacctacttttttctctttgaaagtcaggaagtcaggcatggtggctcacacctgtaacaatcccagcactttgggaggctgaggctggcggattgcttgagctcaggagttcaagatcagcctgggcaacatgcagaaccctgtctctataaaggattgcttgagcccaggagttcgaggctgcagtgagctgtgattgtgcccctgcactccagcctgggcgacagaccctgtctcaaaaaaaaaaaaaagattaggatatttgccctctgcattctccttcatccccctctgcacaggatccctttacagtgtgccttgcagttcatccaccccttgctcaaggtctttcattgtcctggcgttgaccttgtacagatcgggagcatcgcaccattggctgctcttgcctcctgggcatccgatcatgcttgctgcagtggcccagcgctatctgtggggctggcgttcccctaacagaggcctgcggccgatctgagtcctgccactggtcttggtctgaacaaagaagcctccggctgctgcctttgctcggctgatgtgtgctgccttcggttgttggttgctgtcaaggccacgggctccagagataaagaacagtcggttctcggtgccaggacgtaggaggcattttatttagttttagacttgtccactttaggtttcttccattgtcatcaacatgagaatcattcctgttgctgtgtgcagcgtaatgggtgtgtgtgtggtgaaaattccctgtcttcagaggtgggtttgggttgtctcttctaataatctcttccattagcgtctttcctcctaaatgaaattatgttgtctgtaggtaaaacacaatctaattgaagaccaccagaaggaactaaataatgctaagcaaaagactgagctgatgaaacaggaattccaaagaaaagaaacggactggaaagttatgaaggaggagctacagcgggaagctgaggagaagttaacattgatgctacttgaactgagagaaaaggctgaatccgagaaacagaccatcataaacaagtttgagcttcgagaagctgaaatgaggcagcttcaggaccaacaggcagcccagatcctggatctggagaggtccttgacggagcagcagggccgcctgcagcagctggaacaggacctcacttcagacgacgccctgcattgcagccagtgtgggcgggagccgcccacagcccaggacggggagcttgctgcgctccacgtgaaggaagactgcgccctgcagctgatgctggcccggagcaggtgggtttgcagtgacgccatctgcagtccctgtgaggccagacaccttggagggtagaaggtgggcaggctcctgggaggaggcgctgtgggctccactgggcgaaaaggtctggagggagctggaacaaggtgtggcgctctaggttttcagcctaattgcagtgggacagctttgtgctcggacgggcaggctggcagttgccatcctgaagccccctggccgcagtgggacagctttgtgctcggacaggcaggctagcagtcgccgtcccggagccccctggccgcagtgggacagctttgtgctcggacgggcaggctggcagttgctgtcccgaagcccccaggctgcaatggggacagctttgtgcttggatgggcaggctggcagccgccaccccgaagccccccggccacagtgggacagctttgtgtttggacgggcaggctggcagctgccgccccaaagccccccaagtctgcactccctgggtgggtgtcaggggcggggatcagtcattgtctctgttgttcttcgtgtgttttaagatttgaacagcagaagctaaacctcttttataggtgtcataaggacatggagtttatccactaagcgtttttgtgttttttttaacttaaacaggtgatttttaaaaataagcatgtttttctgaaacatacacactcttctttgaagttttcaagaggtttagaaagtgattgggttctttgcctgttggtgctgaccctttttgcgagcctcagtcccagggctgtgccgttctttctcatctgtctgccccacccagcccttccccagcaaccagggccgcacagggccccgctcagggattggagaaactcacgttcaggtcgctggggctgcatgaacacgagcaggacgctcttctcaccaggctacgacatgcagttcgtggtagagctgaaccaaggaggccctcaagagaggcttccaggcgcagaggtgcctgtgcctcttgccatccgtcctgtgtcgccagtgcccattggaggccttggcattttgcaggaccctccagctccaggctctttggcctcctgatgggagcaggtccttctgtgaggactctccctgcctctgtctttggccctgagtgccgcctgcacctccttaattcactgccacggggttctattcacttccatggggttctattcattcactgccatgggggttctattcattcactgccatggggttctcctcactgccgtggggttctattcactgctgtggggttctgttcactgccgtggggttctattcattcactcccatggagttctgttcactcccatagggttctattcactgccatggggttctattcactgccatggggttctattcactgccatggggttctattcactgccgtggggttctgatcactgccgtggggttctgttcactgccgtggggttctgatcactgccgtggggttctattcactgccgtggggttctgttcactgccgtggggttctgttcactgccgtggggttctgatcactgccgtggggttctgatcactgccatggggttctattcactgccgtggggttctgatcactgccgtggggttctgttcactcccatggggttctgatcactgccatggccttctattcactgccgtggggttctgatcactgccatggggttctattcactgccatgggggttctattcattcactgccatggggttctcctcactgctgtggggttctgttcactgctgtggggttctattcactgccgtggggttctattcattcactcccatggagttctgttcactcccatagggttctattcactgccatggggttctattcactgccgtggggttccgttcactgccacagggttctgttcactgccgtggggttctattcactcactgtcgtggggttctgttcactgccatggggttctattcattcactgctgtggggttctattcactgctgtggggttctgttcactgccatggggttctagtcactgccgtggggttctgttcactgccgtggggttctattcattcactgccttggggttctattcactcactgccttggggttctattcactgccatgaggttctattcattcactgccatggggttcaattcactgccatggggttctcaggcctcgccctccccatgggcccccatgggcagtgccccttccctgttgaggagcagagattaccttgggattcttggttggatgctggctcggacgctgtggtgtgagtaggaggttggttgtgcctgccgtgcgtggctctggcggggatgtgtgtgtgccatctcttgctgagggcgctggttcctacctgtggtctgtgacctggcgactcccatggctttggcctttggcctctgggcttctctggcttcatggggcctcttcactctcccacttactatttctggtggtcgagggaaaagtagtaagagcagttaaaatcccgaaacgatgacctgaacagttgaagtggcatttcctgtgggaaactgacttggcttttgcaagggtcattgcttcctgatgcatgtttaactgtcctgtgttcactttgttgccgcaggtttttagaggaacgtaaagagatcaccgagaaattcagtgcggaacaagatgccttcctgcaggaggcccaggagcagcatgcccgtgagctgcagctcctccaggagagacaccagcagcagctcctgtcagtgacggcggagctcgaggccagacaccaggccgcgttgggcgagctgacagcctccttagagagcaagcagggggctctgctggctgcacgtgtggccgaactgcagacaaaacacgctgccgacctcggcgctctggagaccagacatctgtccagccttgattctttggaatcctgttacctctctgaatttcagaccatccgtgaggagcacaggcaggccctagagctcttacgagcagactttgaggaacaactgtggaaaaaggactctcttcaccaaacgattttgactcaagagttggagaaactgaagcggaaacacgaaggggagctacagtctgtgcgggaccacctgcgaaccgaagtgagcacagagctcgccggaaccgtggctcacgagctgcagggagtgcaccaggtaaggcgccagggccctgccccagcccagggcaggcctctcctcgctgcctgtgtgtttccaccgcgtgtcacatgtctgcgtgcgtgctgtgtgtgcctgtgcgggtgtctgtgtgtctcacaggctgccgagatcagtggggacttctggtctctttgtgaactgggcttttttttttttttttgagccggagtctcactctttcgccaggctggagtgcagtggcgcaatcttggctcactgcaacctccgcctcctgggttcaagtgattcttctgcctcagcctcccaagtagctgggattataggcgcctgccaccatgcgcggctaatttttgtatttttagtagagactgggcttcaccatgttggccaggctggtctcgaactcctgacttcaggcgatccacccgccttgactcccaaagtgctgggattacaggtatgagccaccgcacccggcctgagctgggctttaaaacactgagttgaagggttattttgatcgcaggcaccttgttaaaggctttgctctcgtacgtatgtgggagggcctagaccttggtgggggattttgtgggctttggagtattcctcaaggctgaccagcacctctgcagaagacttggtttccaggctgctgtgggaagatctgatggtcatgttgtgtattcagagccttggtcccctccttttattgatgtttcctgaaataaaacccttttgctacatttcaagagcagtgatgggccaggcacaatggctcacgtctgtaatcacagcagtttaggaggctgaggcagttggattacttgagcccaggagtttgaaaccagcctgtgggctacgaaaattaaaaacaattcaccgggcgtgggggcacgcacctgtagtctcagctactttggaggctgaagcaggaggattgcttgagcccaggaagtcgaggctgcagggtgagctaagactgtgccactgcactccagcctgggctgtaacagagtgagaccctgtctcaaaaaaaaaacaaaaatagctcacacctgtaatcccagcactttgggaggccaaggcgggcagatcacaaggtcaggtgatcgagaccatcctggctaacacggtgaaaccccgtctctactaaaaatccaaaaaaaaattagctgggggtggtggcggacgcctgtagtcccagctacttgggaggctgaggcaggagaatgatgtgaacccgggaggcggagcttgcagtgatccgagatcgcaccagtgcactccagcctgggagacagagcaagactctgtctcaaaaaaaaaaaagcggtgatggttcatttgacaggcacttccaagtttttatcatgaagaagaatttctggcgaagtccctcttgccctgggctggcgcctgactgcagaagctgcagtgcctgtgactcaggaaaggacacgtgttgtcgtatcacacacaccttgtgctttctctgccctcagtgaggtctctgaggttttctcaccttgaaatagatgagtctgctctgttgagcatgtggagccactggggctggcctatctccctgcaggaaggggatgcataggcctggctgcacggtggatggggcatgggctagagctgatgaggcagttagaaatggttgttctggcagatcaataccttgtcagacgtttaagaagtacacgttccaaactataaacgagggaattgccagcttggataaggtggatacgttgatttcctgataccagcatgccacgggagggcttcctccttcctgactgtggggaacagttgtgaggctccaaagcgttggcttattgtttgctttccttcagctctgtgtaagaacaggagaaaagtggaaccttctttaatcgctgtgagggtttcatgttatgtttcaggctgtctgttttgtgtggtctgagcatgtgatcttgggggaattcctagaaagcagaatatgttcaggctccctctgctctcctgagtaaggtgcagtcagttgcctgtctcaggcctctgtgtcctgtccttgtcttcaccacatgtcagggagtcctggggatgtgttttgtttgtttcttttttgttttttaaaagacagggtctccctgtgttgcccaggctagtctcgaactcttgggctcaagagatcctcttgccttggcctcccaggtagttggaattacaggcatgagccactgctcccagcttgggaggtgcctcttgagagaagctggagccatgttgtctttctggacaaaattagacaggggtctgatgctgctgggagctgccctccaggccagtcctcagatgccagcttcagtttcctttcgttcccagttttgatcataggcaaacagatgctttggagaatagcacttgttcccaagctgtggatttaaaattaggttttcttggtttgtttggtttaaagaaaatgaagttctgaaagaatattcagaaaggaggaacttgcatatcacacatgaagtgtgtgtttcaaaccacggcctgatttagtcagaggaagcatgtggagcgtgtgcaccttctgtgccctgtgtggggatgtggcacatctggatgtttcctggacggaaggagctggtcgcagccctgtgcaatcagagacgcctgctggaggcagagaggaccaaagccctggacagggtgggtgccaaggtcctgctcctggagcatcagcaccaagcggccctgcaggaactcagagatgtacgctgccaagatgcaggagcatcaagcagggcaggcggagctggaggagccgggggagccggaggttctgggggtgctgggggagctacaggtgctgcgggaggggctgtgcaggtgagcagctccacgtgtgtggttcccacaggggtgcctccccggcttctctgccctgagtcttcatcagagcgttcaggcacttacggatacacttggagccgctggattgtgcgtgcagtggggtctgtgctcaaagagtgcagcttcgtgggggcagatgtgtcagtgcacctggccagcgaggcagctgcaggggtgggcatccgggggggggtgtctttggttggcctcccctcctgttggggcctccggagggcagggttctggtctggtctgcaggcagtgagtggtctgtggcgcgaccagatctgtcctacaggctacttggcagctggacgaaacacaaagtggaggcgattcagagcctgggaggtgcgggggtcggggaggctggggctcatcctgggtgtcgcgctaggcagctggggggatagtgaggggtgcctgccagctgatgatggcatagggaggggcatggagagcctgggggctgacaggggaagccacgcttagctggaggggtcatcccaggttggactggtgcaggggatgtggcttgtgtagacacagaagcacatttagttgctcttataaatctgcacacgggctgggcttggggctcatgcctgtaatcccagggcttcgggaggccacagtgggatgatctcttgagctcaggagttcgagaccagcctggggaacatagcaagagtccacttctaaaaataaaaatcggccgggcgcggtggctcacgcctgtaatcccagcactttgggaggctaaggcgggcagatcatgaggtcaggagatcaagaccgtcctggctaacacggtggaaccccgtttctactaaaaatacaaaaaattagacaggcatggtggtgggcgcctgtagtcccagctattctggaggttgaagcaggagagtggtgtgaacccgggaggcggaggttgtggtgagctgagatcgcgccattgccctccagcctgggcgacagagcgagactccgtctcaaaaaatatatatatgaaaataaaaataataaataaaaattaaccaggcatggtggtgcaggcctgtagttccagctacttgggaggctgaggagagaaaattgcttgaacctgggaatctgaggctgcaggaaaaaaagaaagaaatctgcacacagtatggtttattttctttctttctttttttttttttttttttaaagacggagtctcaaaaaaagtctagagtgcagtgtcacgatcctggctcactgcaacctctgcctcccaggctcaagcagtcctcccacctcagcctcccaagtagctgggatacaggcacgggccaccacgcctcgctaatttttattgttttgtctcccaggctggtcttgaactcatgggctcaagtgatcctcccgccttggcctccccaaagcactgggattacaggtgtgagcctctgcacctggccagtgtagttacttactttttcagttttttaaaatcttgtgtgtcagaatatgcgtaagcactggtaccaaattgtgtcagaagaagccagactgagtagtcggaatcccccttggattcccaaggtggccgtgaaggggcctggctgaggtcccctgccacctgctgtggtcttgattctctgcacctatgcaggactgcatttaagcagcaaggtctccccacttgtggacccgtgcacctgccccatccaggcgccaccaccccgcctgctggtctgcatgatgagcacacgcacacacagcacatgtgcacacacagcacatgcacacacacatgcagacacagcacatacagcacatgtgcacacagcatgtgtgcacacacacagcacatgcacacacagcacatacacagcacatgtgcgcacacagcacatgcgcatgctcacacagcatgtgcgcacaaacagcacatacatagcacatacacacatgcagcacatgcacacacacacagcacatgcacacacacagcacatacatgcagcactcacagcatatgtgcccatacaaggcacatgcacacagcacatgcgcacacatagcacatgtgcatacacagcacatgcacacatgcagcacactcacagcacatgtgcccatacaaggcacacgcacacacacagcacatgcacacacagcacacacacagagagcacatgcacacagcacatgtgcacacacagcacatgcacatacacagcacatgtgcacgtgtagcacatgcatgcacacagcacatacacatagcagatgtgcacacagcacgcacacacaacacgtgcacacacatgcacacgtgcttacacagcacatgttcatacagcacatgctcatacacgcagcacatgcacacatacacagcacatgcacacatgtcattctgcatgttgtcctgcaggatgaatgcctggggccctcctgcttctgtgttctgggtctgtacgattttctggcctttctgtggggggagggttagagtctggagcacttcagaaataattgataatttatttgaagcattatgtgcaaattttaggtgattatggtacatatggtttcaagggggttttaaacaaggacatgctaagatctcatttctagccataaagtaaggttttgaacctgaaaggtttgcttggtgaagagggactgctcctgagaatgggtgatgcagcgccggattctgaggttagaaatgacttgtttcttcacgtggacagctctgggtgctgcccagtgtggacactggcccctcagtcctgaggcacagccctgagacctgcaccctgctgggtatcgtgtgggtctgtcttctctggaaaagtcagattctgtctcgcttttccagggactcatgctaaagaaattctgtccgttttatctgtgcatagcacaaggaggtgttcgttttctgaaatcgtgtgtcacctgtgtcctttaacctgtacttttgttcttctagggtgactgttgttgttgttgttttggagggaggatcttgctctgtcgcccaggccgaaggtagtgatgcaaccacagctcactgtgaccttgaacgcctggcctcaagtggtcctcctgcctcagcctcttgagtagctgggactacagatgtgcaccaccatgcctggctaatttattttttgtagagatggggtctcactgtgttgcccaggctggtcttaaattcctggcctcaagcaatccttttgtctcagcctcccaaagtgctgggaccataggcgtgagccgcgcctggcctggactattatcggaatactcctagagcgtctttgcagtatttttgtagttgaggtacaggtttgcgcgagtaagttagctttttactttgctgctagggatgtgcatgtcaatactctttttttttttttttttttgagacagagtctcgctctgtctccaggctggagtgcagtggcgtgatcttggctcactgcaacctctgcctccctggttcaagggattctcctgcctcagcctcccaagtagctgggactacaggcatgcgccaccatgcctaatatttgtatttttagtagagatggggtttcaccatgttgcccagggtggtctgatctcttgacctcgtgatccgtccgcctcaccctccctaagtgctgggattacagatgtgagccaccgcgcccagccttagcttttttttttttttttttttgggcggagtctcgctctgtcgccaggctggagtgcagtggcatgatcttggctcactgcaacctccgccccccgggttcaagcgattttcctgcctcagcctcctgagtagctgggattacaggcacataccaccacgcctggctaatttttatattttcagtagaaacagcgtttcaccatgttggccaggctggtctcgaactcctgaccttgtgatctgtccgtcttggcctcccaaagtgctgggattacaggcgtgagccactgcgcccggccgctcagatactcttttatgtgattgttttggtgtagctgatttcacagaagaaaacaattgggctgtggggaggtgggatgtactctttattttatattatgttttttggggcagagggcagcatttgcaggaatagaataactcagcaagcccccggtcccgctggttagtggggtgcacgttcaatacatcagtccccctctcctcctgattgtttagaagcaaatccaagacaccatgtgtctgcgagtgaggtgttttcccccaatacagcataaccatgatccattctcacctaaaacatccacagcgatccctgcatttcatcacaagcccagcccacgtgccagtctcttctggctggctcacatcaggatctatttgttcctgtgatgctggtcactgttccctcgttcctgcaagcgtgttggtagatccacaggcctgtgattggtgagaatgcttcttgtatggtggccactcctctcctggtctcctggtctttcctcaggctttacaccgtgaaaagacataacacaagctggctgcagtggctcacgcctgtaatcccagcactttgggaggccgaggcgggtgcatcacctgaggttgggagttcgagaccagcctgaccaacacagagaaaccctgtctttactaaaaatacaaaactagccagccatggtggcacatacctgtaatcccagctactcgggaggctgaggcaagagaatcgcttgaacctgggaggtggaggttgtggtgagccaagatcgtgccgttgcactccagcctgggcaacaagagcaaaacttcgtctcaaaaaaaaaaaaaaaaaaaaaagttacacagagccctgccaagccctgacgggagtgttttgggtcattgtcccagaatagctgggatgtcctgttcttccccgcggcgatgctttatctgagcctcaaatatctttgcacctgttggaacagcagtcacttgtcagcagtgtgacttgacctacacttgtggggtgattggattactttccgggataccgcccttgagagtttggttgtgaggaaagtcctctgaaaacgtaagcttgatttctttttgatagaagtatgtatcccataagattcccctgccctgccctgccccgcctgtgctggtaacacgacgcagagctgagtgcagaagtgaatcgcatgcggccggtgtgggatgctcaaggcggtgtcatcttttctcggattgaaaacccaaatctattcataggttaattattttaatattaagataatattaacgttggtttagatagcatttgaatgtcctaaatgcgttctcaattgaatgtctttgccttctgacattggtattctctgtgcatgccacttacttatgattaaaacatatgtgatatttttctataattgtgtggattttagaaaaacctgaaaataactttttttgaaacgtcttttttgatactgacctcacagcttagaagaacatggtcaatttaaagagttttattccaggctagagcctctgccagggggttgcaggaagaaaatctcctttgagccggcccggtcagattgagggggtggctgaggacgcacgcttctgctcgacattgtggccgagccgaggccctgggcctgagggatcacatgtggggcactggccgtctcactgctgggcctgcatgcctgtgacctgcccagccctgcccgacgtctcctgggggctgtccccccgcggggagccgcctcatttggcctccaccacctcctacgtcctctgcaggtctgccgaaggcctgagagtgtgcaggcaggacagggccaagcgtggacagttagggtggctcccctgggtgcgaggcggtacctgcgggtggtgctgtgccttgaaacaaagcgaaggtcaagactgcacacatggagcttccagctgccagtgggtggagggagcgccacctctgtctgccatgcccgggcgtcctggtgggctgcgtgcagtgttggcactccctggctggggttctctgtggagcctgccctctaccctctccgtctgcagtgtgtgactctgggatcccggaggccgcggggctagagcgtggcaccagctgtgctcctgagtggggcgtagtttgggacgcctggagcttaggccaggctccgcaggctctgggggtgtccaatgttcttgggctcccgtgttggcctcaaacagaagtttgattttctcattgttacacggtaggcctctatgagagatttttgtccaaagagagtaagtagtctgtggctcagaaagatgttcaaaggaccactgatttcagccttggactcttgccacatcctttgctgggcaccgggagcgcagaggtttgccctcgggccccacaggctgacgctgtggatgccaggagggaagcgcctgatctgtgcctggctgggcctgaggagcccgtccactgtgtctgagcatgagctgttgtgggcaccatggtggcgcctggtcttgaggattaattttcctgttttcccagtcccttggcctctgtcctgccgggtgcattggcatttggggttttgttcttgaattcaccagcgttttgtggttggtgtacactgaaccagcatccctgtttggacctcttactcctggcccgctgccccctccctggctgttggtccggatcaatgcgtctgtcccccaggagacgcactgctgatggttggggtatcagcaaggtaattaaagttctttggaaactttgtagtgtgcacagctcagaagttaatcttaagtccttcctttcaaacagatggaactaaatcaaatccaggagagaaagttgattaaagtgaactgtactcacattccaaatggccttgagaccttgcgagtgacttcagtgttgtgccgtgcgaacccgtttctggtccctgtgactaagatgcagatgcacagcccacctggcacctcagcaagttccaggccggcgcggggggcacccgatcctttatccttttcctccccatggcttatcacacaaaaaaaggtagagaataaaggtcatttctggtgtcagggcttccatgtgtttattgaaactgttgccccagttacttcagaaaaggcactcactcattgttgacgtcttcctcctcctgaagctggtggagccccagccctcagccctcctggccgtgctgggcagggagcgggagccggcaatccaccccagatgttctggagcagcaggtcccggagcagcaggtcccactgctgaggacatgggcttcgtgctgtcctttcctgcctgctaagtagatacaaaaaacttactttatcagttaccttttcacatgccaagtcaaaacacaaaataatttcattgtcttaaaactgagctttttctaggcaacttttgtcaggcctttttatatttaaatctgctgtgtaacacaccttttctaccaagaatctgtcatcacttatcttagagctgagaaaagtttattctaaaatatttcatcacctcaaaaagaaacccccagtggctcgtgcctatagtcccagcaccttgggaggctgaggcaggaggattgctggagcccaggagttcaagaccaaaaataaaaaaatactaaaaataaaaaaattagcctggcatgttggcgtgcccatatagttccagctactcagaggctgaggtgggaggaccactggagcccagaaggttgaagctgtagcaagctgacatcgcaccactgcactccaggctgcatgacagcaaaacgttgtctcaaaagataatcaatgaaaattaaggaagaaaacaagaaactccccattctcccttctcccccatgcctggtgatgtgccgtctgcttgccgtacctgtgggcgtcctacgtacatagactcagcgtgtgccctcggtgtccgcggctttcactttgtgtgtttcccaggttggcgcacgttgtagcatgtgtcaatacttgcttggtatgtgttttctgcatatcttatgccctttttgttctgtattcctccattactgccttttttcactttaatttccttgatgtttcctttaccatacggtggtcgccccttacccacaggggatgcattccaagacccccagtgggtgcctgaaatcgtgaatggttctgaaccccttatatgctgtttttgtctatacatacctgtcatcaacttttaccttaaaggaatcaccctgtggtgtctctggcatatctgaattgctccgtcatcaacttttaactgaaaggcatcactctatggtgtctctggcacgtctgaattgcagcattgcaattgaacggcctctcttgcgctttggggccgttattaaatgaagtaaaggtgacttgaacacaggcactgtgatgctgtgacagttggtctgatcaccgagatgcctgcgtgtgggcaggtagtgcttgccacgtggataacgccggacagaaggatgacccccggcctggcctgcgagatttcctcacaccgttcagcttgggggcaggcagtttaacactcataagagttgtttacttctggaatttttcatacgatattttcaaaatgacgttgaacacaagtaactgaaaccgcagacaaaggggactgatatatattgagttattttcttagcgcttgccctgagcgttacagcaagcaccttctaacaatctggtttggattaataccaacttaattttaaaagtttacaaaaccatttgctaatgtagcatcattccctcgtctgccctttgtgctcatattgtcgtaccaaccacatctttctatctttttgtgctcgttactttatgcacgtgtcttttaaaccaggaggaagaagaattgtaaacaaaagccatgttgttttgtctcctgttttctctgtgtcgttacctgcactactgctgctcgtttcttcctggaaattcaggtctggtgccttatgtttcagcccgaaggacttcctctgggatttcttgaaggacaggtctgctagtgatgaatcctcttagcttttgtttttgtgggaatgtcttaatttctccttcatccttgagagatcatttcctggatgtggacttcaagatccaggcttttccttcagtgctgcgtgggctctccgctgcctcccctgtcatccggggctgcgtgtcgtgagctgcgcccgtcttcctgggctgcgtgtcgtgagccgcgcccgtcttcccgggccgcgtgtcgtgagccgcacccatcttcctggggctacgtgtcttgagcggcacccatatacctgctgtgcactggctggcctcaagctttgtcctgaaccctgctgaggtttggctgtgatgggtgaagtgtgggtctctgtcagtttgtcctacttggagttcattgagcttgtatgtggggattattatttttattattattgttattttcatcaaatttgggaggtttttggccgtcgtgtcttcaagggttcctctgcccttttctctccctctgtctggcttgagggtgccccacaggccttggagactgctgagttttcttcatgtttctttctgttccctgactggatcgtcttaattgacctatcttccagcgtgtgaattctgtcttctgcctgctcgagtctgctgccgaacccctctctagtgaatttttttttctgtgattgtatttttcagctccagatgtcaagggagctctatttcagtctttctctctgctgagggccctgcgtgcattgtgccctcagggctctggcgggcggtggacagcctggccctggccttcacccctgctgtgccaagccacatggtcactgcagccggcccaggacctcttgggcctttccagcgtgggcacagccctgcacgtgttcacaccttgtagagtcccagaagatgtcagagctttccagaggcccctgtggacatcgcattctcaagtgttttcttttgtttttctggcagtcccttattagtcccaactggtttctctactgtgggcagtgcggctattaaacacttgacactgactgtttccaaccggtgccctggggtagattttttttttttttttttttttttttttttttttttttgagacagagtctctgtcgcccaggctagagtgcagtggcgcaatctaggctcactgcaagctctgcctcccaggttcacaccattctcctgcctcagactcccgagtaggtgggactacaggtgcccaccaccacacccagctaatttttgtatttttagtagagatggggtttcaccatgttagccaggatggtctcgatctcctgaccttgtgatctgcccgccttgacttcccaaagtgctgggattacaggcgtgagccaccgcgcccggccaaccctgggtagaatttttgacaccgagagctctgacccagtcacggcagcaaggtgcccggcaggtgggctcgggcagttgtgcatggaaattttggggtgctccaaatccattctgtcccccaccccaccccagcagctactggttttcagggctgttagattggagaggagatatggagtcagggcaaagttaagcacctgaagtttgttcttatggacactcagcctgtgttttccataaacactcttcggatgattgcaaacctgaccagatttccacagctctgaaaacactggttttgatggtttttaccactttttcttttatagaggaacagattttggaggtccttactttgccattctagaagtgctacctctggaagtttaaaaaaataagcttatttcattaatttaattggccgggtgcagtggctcacacctgtaatcccagcacttttggaggccagtgtgggtggatcacttgaggtcaggagtttcagactagcctggccaacaggttttggtagaaaccctatctctactaaaagaaaaattacaaaaattagttgagtgtggtggcaggcgcctataatcccagctactcgggagactgaggcaagagaatcccgtgaacctgggagacagaggttgtagtgagctgagatcacaccactgcattccagcctgggtgacagagaagagtccttccaaaaaaaaaaaaaaaaaatctctgtgtgtgtgtgtgtgtgtgtgtgtgtgtgtgtgtgtgtgtgtgtgtgtatagaattcatctattgaaccttatttaaaaggttttgttatttagaaagaaggtttaatcttttaaaagggaaggaacctaggtttccaaatatcttgggttttcatggctgtaattccttgatggtgaacttcttagtgtgactcttaaagatgttacaggagccatttgggaatggtagtgagcagttgcttatgacacgcagctgtcaccagtgcgaacttgtgtctccttaagtgttttatccccgaaaccaggactttgtgttcccagtgaagtccttgaacccatgttttctttgatgggggctgtggtctggctcatcccggctcttggtgcagagtgggggctccatgcatatctgctgaatgtgctgaattccggctaacagcaaagaaagtatttttctagcttactggtattttttattgttattgatgtgtacagggtgaatttggaagtgaaaagaaaactgctttgcatgaaaaagaggagacacttcggcttcagagtgcacaggcacagccttttcaccaagaggagaaagagtctttgtctctgcagcttcaaaagaagaatcaccaagtccagcaggtgtgtggaatacgctgttcccttgtgataagacgtgtatagcataaaaatcattttcactttatttcagtgcacagttcagtggcaggagtgcactcatggtgttgtgcatttatagtgttgtacattcagtggcggaagcgcattcacagtgttgtagattcagtggcggaagcgcattcacggtgttgtgcattcaatggcggaagcgcattcaccatgttgtatattcagtggcggaagcgcattcatagtgttctgcattcagtggcagaagcacattcacggtgttgtgcattcagtggcggaagcgcattcatagtgtagattcagtggcggaagcgcattcatagtgtagattcagtggcggaagcgcattcatagtgttctgcattcagtggcggaagcccattcacggtgttgtgcattcagtggtggaagcgcattcatggtgttgtgcattcagtggtggaagcgcattcacagtgttgtatattcagtggcggaagcgcaatcacagtgttgtatattcagtgacggaagcgcattcacagtgctgtgcattcagcagcagaagcgcattcacggtgttgtatattcagtggcggaagcgcattcaccatgttgtatattcagtgacggaagcgcattcacggtgttgtgcattcagtggcagaagctcattcacagtgttgtgcatagttcagtggcggaagcacattcacggtgttgtatattcagtggcggaagcgcattcacggtgttgtgcattcagtggcggaagcgcattcacggtgttgtgcgttcagtggcggaagcgcattcacggtgtgcgttcagtggcggaagcgcattcacagtgttgtatattcagtggcggaagcgcattcacagtgctgtgcattcagtggcggaagcgcattcaccgtgttgtatattcagtgacagaagcgcattcacggtgtgcattcagtggcggaagcgcattcacggtgttgtgcgttcagtggcggaagcccattcatggtgttgtgcattcagtggcggaagcgcattcacggtgttgtgcattcagtggcggaagtgcattcacagtgttgtatattcagtgacggaagcgcattcacagtgctgtgcattcagtggcggaagcccattcacggtgttgtgcattcagtggcggaagcccattcacagtgctgcgcattcagcagcggaagcgcattcacagtgttgtatattcagtggcggaagcgcattcacagtgctgtgcattcagtggtggaagcccattcacggtgttgtgcattcagtggcggaagcgcattcacagtgttgtatattcagtggcggaagcacattcaccatgttgtatattcagtggcggaagcgcattcacagtgttgtatattcagtgatggaagcgcattcacagtgctgtgcattcagcagcggaagcgcattcacggtgttgtgcgttcagtggcagaagcacattcacggtgtgcattcagtggcggaagcgcattcaccatgttgtatattcagtgacggaagcgcattcacggtgttgtgcattcagtggcagaagcgcattcacggtgttgtgcgttcagtggcagaagcgcattcacagtgttgtatattcagtggcggaagcgcattcaccatgttgtatattcagtggcggaagcgcattcacagtgttgtatattcagtgatggaagtgcattcacagtgctgtgcattcagcagcggaagcgcattcatggtgtgcgttcagtggcagaagcgcattcacggtgttgtgcattcagtggcggaagcgcattcacagtgttgtgtattcagtggcggaagcgcattcacagtgttgtatattcagtgatggaagcgcattcacagtgctgtgcattcagcagcggaagcgcattcacggtgttgtgcgttcagtggcagaagcgcattcacggtgttgtgcgttcagtggcggaagcgcattcaccatgttgtatattcagtgacggaagcgcattcacggtgttgtgcattcagtggcagaagcgcattcacagtgttgtgcgttcagtggcagaagcgcattcacagtgttgtatattcagtggcggaagcgcattcaccatgttgtatattcagtggcggaagcgcattcacagtgttgtatattcagtgatggaagcacattcacagtgctgtgcattcagcagcggaagcgcattcacagtgttgtatattcagtggcggaagcgcattcacagtgttgtatattcagtgatggaagcacattcacagtgctgtgcattcagcagcggaagcgcattcacggtgttgtgcgttcagtggcagaagcgcattcacggtgttgtgcgttcagtggcggaagcgcattcacagtgttgtatattcagtggcggaagcgcattcacagtgctgtgcattcagtggcggaagcccattcacggtgttgtgcattcagtggcggaagcgcattcacagtgttgtatattcagtgacggaagcgcattcacggtgttgtgcattcagcagcggaagcgcattcaccatgttgtatattcagtgatggaagcgcattcacggtgttgtgcattcagtggcagaagcgcattcacggtgttgtacattcagtgacggaagagcattcacggtgttgtgcgttcagtggcggaagcccattcacggtgttgtgcattcagtggtggaagcccattcacagtgctgtacattcagtggcagaagtgcattcgtggtgtgcattcaggggcggaagtgcattcacggtattgtgcatagttcagtggcagaagcgcattcacggtgttgtgcgttgagcggcggaaacacattcatggtgttgtgcgttgagcggcggaagcgcattcacggtgttgtgcgtagttcagtggcggaagtgcattcatggtgttgtgcgttgagcggcggaagcgcattcacggtgttgtgcgttcagtggcagaagtgcattcacagtgttgtgcatagttcagtggtgcaagtgcattcatggtgttgtgcgtagttcagtggtgcaggcacattcacggtgttgtacattcggtgatggaatcacattcacagtattgtgcagccatcaccaccatccatctccagaagtcttcatcttgcaaaactgaactctgtccccattagactctcactccccatttgccctcccctggcaccatggctcacacctttaatcccagcacttcgggaggctgaggcaggaggaccactccagcccaggaattcgataccagcctgggcaacatagggagaccctgtctctataaaaaattaaaaaaattagccgtgtgtggtggcacgcacctgtagtcccagcttctcagaaagctgaggtgggaggattgtttgtgccctggagtttgaggctacagtgagctgtgattgtgccactgcactccagcctgggcaacagagtgagaccctgtctcagaaagaaagatctttgcctgcctggcaactgacttttgtgaatgaccagatacagtgacttatttcgaattgctgtttgagtggtggatctctgatgaactggccccttccctcccctagcctcaggttccacctggggatgtttgtgtattcttttgtaaatgatgaataatggaggaaaaaccgtatcaataattttcacctttaatcagcacctcgttcacctttgccgtatttttattaaatgtgcaggtgctccttggcctttgctgaggtcacgcctttgaccactgtcagtggaaggcgttgtgagtcgaggaacgtgccgaagtgcctgctccttttgccccatcaccaagctgaaaagtcctaagtcagagactctcaaatactgaaattgtgttgaaagtcccttacagccatttgcttttaaccaaattgttttaacgaaagctttaaccatttttctcgatagctgaaagaccaggttttatccttaagtcacgagatagaagagtgccgctccgagttggaggtgctgcagcagaggcgggagcgggagaaccgggaaggcgcaaacctcctctccatgctcaaggccgacgtcaacctgtcccacagcgaaaggtcagtgtgtcctcggcaccgaggctgccttgtggccgccagcacccgctgggtcatgcagatgccattggtccccacggctcctggccccgtggctgctgccaccatgcacgctggctcctggtggacggggacccggcttccttcttctctcagttagaaagattgtaagcaccgggaagaaatcgcctgctgtgtctcatctcccagcccccgtgccctcctcccaccctgcctgctgtgtctcatttccccatctggccagattaaaaccagccgttatctcccacacagagcccgacccctcccctttagtgtctgcgtccccgcagcgtgtcctcgtccccggcacggggtgcaggcccacatgtctcgtggttcctgtgctttggactgtgtgcaagtgtcgtgcctcatgcatctctctctgtgacgtgtgtttctgagaccggcccaagcaggggccgtagccctgtccgttcctttctccattgggagcctgtgcctgggtagctgcaggcactgggctgagcgcccagccccgagggctctcccagggcggggtgtgggtctgcttaccacgggccgtggggccgccttccctgaacgcatgggtccaggccacatcctgccttggtgcctcctcacctgcagtgatgctgtccagcaggcttgtctgcccttttgtcgcgtgtggggtcttgagaaactttttgctcctctgacaccatggaggtttttcccaggtcacctcacagggttttaagttttgcttttgtgtgactctggggtgagcctgcagagttgttcttgcttgcacctgtctgggcagtggactcggcactgtgttgccaaacgcagcctccccttggtgcgcgtcctccccgtccccttgtgtgggtctttggctgctcccattggcgtgtccccgcccgaggcctctgtgtcctgctgctgctcccatctgtgtgtccccgctgaggcttctgggtccagccactgctcccgtctgtctgtccccgccccaggcctctgagtcctgctgctgctcccgtctttgtgtccccactcgaggcctctgggttgtgctgctgtgtcctgaagctctgaactggtttggctctgctctggagaccacccagggtccggagaccaggtcgggcttatgggaccctctgagctcacagctgtttctggagcattggtgtctgtcatgctgagggtccatccgtgtgtggggggtgtctgtgcaggtctctctttgttcttttcatcaagttttgtgatttttctgtgaggaccttgccttctgtagcacttggctgtgggtgtctcgtagcttggtgctgactctctccagtcacccaggtcagtgggcgagcgagagctctaaaccgaggggcacagcggccagtggggcggtctgtgctcttaactcgaggggtgcagaggtgggtggtgggcggggtagtcccaggctctaaacacaaggggtgcagaggtgagcccacggtccctggacactggagaggctgcctgtcttgaggtggggtggctgcagacgccctgatgcctgcaggagttgggcattttggggggtggaagtgtgctggggagcaggtggcattctctccgtcaagcccctcctcaggactccccctccctgttatttgcccagaatcttcggtttcgcggggcctgcacgacactgcctcccgttgtcacctcacggtccccacgaatgagtcctcatcgtctgctcctcagggttgggctctctggggacagagctgtgagcagagtagagggagggctggctgtgtagtcactgggtcaacgtgcctgtcctcagcggcgtcacagctcctaaatcatagtgcagggagcgagatgtggaggggcctgtggcctcgggagcccctgtgtgtaaaaacagaagcatcccagccgggcgcagtggctcacgcttgtaatcccagcactttgggaggctgaggcgggtggatcatgaggtcaggagatcgagaccatcctggctaacatggtgaaaccccatctctactaaaaatacaaaaaattagccgggcgtggtgacagacgcctgtagtcccagctactcgggaggctgaggcaggagaaaggcgtgaacccgggaggtggagcttgcagtgagccaagatcgtgccactgcactccagcctgggcgacagagcgagactccatctcaaaaaaaaaaaaagacagaagcatcccagaccgcacgtccacgaggcctagcgagaggctgggagacaccatcctcttcctgccacacaactcctgtgaatgtgtggctgaggcgtgacttggtgttggacagacatcttgtgaaatggctggctggtgcaccctgtgctccaggggaggggcggagcctgtgtgctgctcccgggtgattgacgctgtgcggccacatcgcacacctgcgggacgggtttgccgtgttcctaatgtgatgccttttacacatcagaaatggcatcaggaagacctcacctaggaaagcccgtgtccctgagtgggctccacgtggttgtcttgtctgtggcctcagcttcctgtgctcacatgggcatgaggatcatgtcttccggccccgtggggacaggcagccgtgggccgaggtgtgcaaactggtgggcggcccctcagcagcatccagggtgggggttcttatgccgtgaccagcttgcctgatgatgggtgtctcctgtctcagaggggccctccaggacgccctgcgcaggctgctgggtttgtttggagagacgctgagggcagccgtcaccctgaggagccggatcggggagcgcgtggggctctgcctggatgacgcgggcgcaggcctggccctgtcgacaggtgagtgtgccgggaccagctgcccagccctgtgcttgcagcccctctgtggtcctggagctctctgagaggagcctccgtattgggcgatgcccttgggagcactgccgtcctggtttcctgctagtttccgcacttacagaaggccgagaccggggtttgggctaaatttgtcagctcccgtggacgtggcgctgactcatctcggctggggcgacgttctgagttctgtggcttccttgtcgtcttggctgccatggccgcggccggcttgctcactgagccgcgtgtgccggcatctgctcatcttgtagctccggcgctggaggagacatggtctgatgtggccctcccggagttggacagaactttgtctgaatgtgcagagatgtcttccgtggctgaaattagcagccacatgcgtgaaagctttctcatgagcccagaaagtgtgcgggagtgtgagcagcccatccggagggtcttccagagcctcagcctggccgtggacggcctcatggagatggccctggactccagcaggcaggtgaggcccaggctcccggggtcctgtggagatgtgaacaactgagtagctgatgatgccacacgagcctggtggatgccggtgccaacgacgctcgcacgggtttctccccaaggaggaggcttttctgaaccagatctttgaggaagtgggcttgctacgaatgagagaatctgtttgtttaatttggataataaacaggcccattttctttacttcatgcactgttgcaattccatgtggagtgttttcatatttagagattatcactaagaaaggaaattttttgtaaccgttttagaacattttagacaattaaaaaagacattaagtaggaatacacggaaagcaatcaaagatctttttttcagccaggcacagcggctcactcctgcagtcccagcactttgggaggctaaggtaggaggttcacttcagcctacttcagcccacgagctcatcttgtagctctggcgctggaggagatgtggtctgatgtggccctcccggagttggacagaactttgtctgaatgtgcagagatgtcttccgtggctgaaattagcagccacatgtgtgaaagctttctcatgagcccagaaagtgtacgggagtgtgagcaacccatccggagggtcttccagagcctcagcctggccgtggacggcctcatggagatggccctggactccagcagccagcctgggcaacatagcgagacctcattttaagttagccaggcgtggtggcatgcgtctgcggtcccagctcctcaggaggctgaggcaggaggattgcttgatcctgggaggctgaggctgccgtgagttgtggttgcaccactgcactccagcctgggtgcagagcaagaccctatctcaaaaatgaaaataaaaattcttttttgctaagttttgagttcagaggtaactctgggtctcagcctgtagatggcctgggagccccagactggacacagttgccaggggagtgtctggaggaagggagaggggcccagggctgaactgggaggctgaggaggggtcctcattggagactgtggccacagtgtctcggagggtggctgagatgtgctcaggtcccgtcaccctggcctggccctgcctgggtggtgacggcctgaagggtctgggggtagaagtggcgttctcttggtcttaatgtaggcttcagttatttttgatctggagttttgatttgcaaatgtgttttaacagctggaagaagcacgccaaattcattctcgttttgaaaaagaatttagttttaagaatgaggagacagcacaggttgtcaggaagcaccaggagctgctggagtgtttgaaggaggagagcgcagcaaaggcagagctggcgctggagctgcacaagactcagggtgagcagcatgaggcctcggggcacctggagcacaggcacggggagcaggcctggcctcactgagggaaggaagccttcagaatagggtttttaaagtgaaatgtaaaaacaaagccaacatgggaggcacccatggtttgggaggaatggggtggtcgggagctgctgcggccagcagggctgttggaggcctacacctgggtcctggaagctgctggctcttagctctgctgctctcaggggcagtggccccgtcccttcctccaagcaggctctcctcagttacacccaggactggctttgtcagagcatctgtgtctcccacaaaggtacccttgagggattcaaggtggagacagcagatctgaaggaggtgctggccgggaaggaggattccgagcaccgtctggtgctggagctggagagcctgagacggcagctgcagcaggcggcccaggagcaggcggcgctgagggaggagtgcacccgtctgtggagtcggggggaggccacagccacggacgccgaggccagagaagctggtaaggagcgcgggctgtggagggtggtgcgagctgtggggcgcggatacagctgccacggtttccccagctcccaaggacactcagtgtctctagagggtcaagtgtaaaccagcacgcagcttctcctggaacactgggcatgggaagcttgtgcggatcaggtgaggcatccactggctttgctgccctttcagagaaggcgggttgtctgtcggtcctgctggttggagggtccccacctctgtgaggtggaaataagaggggctctgagtccaacagcagcagctggaggcagagccgagtgcggcaaacaagagctactttaaaatttcatttaaaataaccaagtgcctgatattaaccctcattaggaaaacatagtgttaacaatattagtttgtatcttttcagatttttagatattttagtctcaaaggtatttaaaatgaaaactgtcaaaacataagtttaaaatgtcgagcctgcagggagctgcgtcctcagtagctggttcagctcgagcaaaggcttttcacattgcattcgtgcatctcaggcacgtgggaggcagaggggcctgcgcttctctaaaagttccttccaggatggccgtggcctcggggtcatcccttcagaacacagattggagttagaagcttgggcatcgcaggcaccacctcagccaattcagaagtctcatttattattattattatttttttacatttttctctttagaaaacaaccagcttttgatttttgtggccattctcatttgctgtcttctgtcttgctgatttttgcccttgttcgtgtgattccttgttcctatggttttgtttttgtttttgttttttttgagatggagtctcgctgtgtccccaggctggagtgtagtggcgtgatctcagttcactgcaacctccgcctcctgggttcaagtgattctcctgcctcagcctcccaagtagctgggattacaggtgagcaccaccacacctggctaattttttatgtttttggtagagatggggtttcaccatgttagccagcctggtctcgaactcctgacctcaagtgatctgcctgcctcggcctcccatagtgctgggatcgcaggcgtgagccaccatgcccggccagctcctatggtttctcactgccttcgttgggttggacgcttttggacatgtttgctgcctttcacaggatgtggggttcaggtcgtgcctcctcgtggtgccccagcctttccacctgtggtgctcgtgttgacatctgggtcccacaagcttataattctttggcccagggggcgttttccagggtggaagacattggtcccacgggatgttttaaactctgcctatgactgtgcccacactttgtcctctccttttcttggttcatttctgtcattctcgtttatcccgttctattttttatataaatttctgatgctgaaggattagcctggtgtttttcccctcgtgtatcttttcttgtccttttattttaagtcttttttaatactctgttttagttgtgccttgtatggataccatattcatgactgttttttaaaagcctgtctgtgagtatcttcttttagtcatttagccaagttttatttgccgcacctcctggcgttgggcccttgctcgggggtggattttccttggccagctgtgaagtcctcactgcggtgttgcctgctgccgggctcagggcggcgtcatctccccacgggcctctaagccctgttgcccccgcactctgtgtgtccacagggggagtgcgggggaacctccagggccaggagggcctggagtctcttcaggtcccttcctccaccagtgaagtggtgctggagacatgactcgagatcctgtttcttttcctttgacgccctcgttttcctgcatctcctcaggatttttcagggtgttttcaggaacgtctctgacgtcctgcatcgctctcagcatctttgccctggcggtgctgttgcatctgggcgtccgttgtcgctgtttctccgatgctttctctgcttgtcctctgctgtccgggggcagcctcatggtcgggcccctccctgtagactctgctgccccatttccagtgtcttcgcgcccagccagccggcgctgggccacaccccgccgggggagaccacctggtgtttcatcacctcgagcccttggacttcagccagtcacttcgtttgtcaggcctccgggcagataaaggggtgtgtggcctgcattctgttgaacggcccggtgaggccggggccctgtggctagcgcccccgtgtcaggtgcctgtgtcgtgccctgggcctgagcacgtgggtctgagcactgcagggcttcttcccaaggctgtggtggcccgtctgctgccttgcctctggttcatctcctgccacaaagcctggcccaccagggagtgtcgtgacaggtggatgtgggccctgggtgtccatagcctggctgggctccctgcaggccccaggattgaagctgaggcttaccatgggccttgcagtggcaggcgcctggcatgccgggagtggatctcatggagccctttcgcaggctcgggccaactttgtcactgggaaattctcgttgtttctctggggtcctctttgtttgctttcctttcgacatggttaaccctgccctagtttctcactctggtttgttttctttcctttcaccctggctctgcggttgtgtgactctgcgccagctaccggccctgaccactctcccggcagggcctaggctctgacggtggcgtgaacccggccctggtgtgcagcggccctgcctcgccgtgttgcgtgacgcccccttcgctgtgtggtgttttgtggctctcttcaggtgttgccatctgtcccttttgttctctttgtctccttgaaaagttgatgggcctgcagccgcacaggcagttgtgggcatggtgggcgctgagtctggaggttgttcaaggccagcagcgttgcccagagccctgctgctgacgctgccgtcactggttctagctctcacattctcagctgcacgtttctgtttccacctcagtaaacgcaaactcttgttcataggcacagctgtcactgcagcacacaaggactcaggtttgtaaagacaaacgattgatttgtgtgtgacgtgctgtttgtttgcactggattttgcaaattatttactaaagaaaagtacttcagaccttttgtggcaaacaataaatacagcgatactctaatcttcagtattcataaaaatgggtggagttgtcccattttaacgccccagcaaaacaggagcatttctctaacggtctttactacagtgcctaagctacagtttgtgctgcttttcagaaactgatgtcttgtgatagttacagctgttcttgggctgggtcccagctctggtctccagggagggcctgggccccctggatcccctgtgcctgttcagcgtgggtgtcacctgcttcgccagctgggattgcgatcctcgtgtgcctccctgagtctgcgtgcatgtcagcaggcaccctgccccagtgcccctggccctgaagatggtgatgttctgggccaagcacagcccaggtcgtgtccaggcccagggagtgcagtcaggggagcagctgccctcaggcctcgccgcacgtctcaggttgtgaatgttaccgcagcagcatgtttacagcggactcgccgttaactgctgacagtggcatcaacatttattgagaatgttacttgcattggtcatgatagtttgtgataaaagacttaacacttttacaaatcaaaatgattttttggaagctggtgaaatgtcagttaacatgtatgaatttaatattttagtttttgggtggcttaaagacttcaggattcaggccgggagtggtagctcacagctgtaatcccagaaccagactccatctcagaaataattataataaaatagagacttcgggactcagcagcagagactccatctcagaaataatagtaataaaatagagacttcaggactcagcagcagagactccatctcagaaataatagtaataaaatagagacttcaggactcagcagcagagactccatctcagaaataatagtaataaaatagagacttcaggactcagcagcagagactccatctcagaaataataataaaatagagacttcaggactcagcaacagagactccatctcagaaataatagtaataaaatagagacttcaggattcagcagcagacactccatctcagaaataatagtaataaaatagagacttcaggattcggcagcagacactccatctcagaaataatagtaataaaatagagacttcaggattcggcagcagagactccatctcagaaataatagtaataaaatggagacttcaggactcggcagcagagactccatctcagaaataataataataaaatggagacttcaggactcggcagcagagactccatctcagaaataatagtaataaaatagagacttcaggactcagcagcaggcactccatctcagaaataatagtaataaaatagagacttcaggattcagcagcagagactccatctcggaaataatagtaataaaatagagacttcaggattcagcagcagagactccatctcagaaataataataataaaatggaggcttcaggacttagcagcagagagcccctttttccaagacgctttttcatctgcagtttccacttgggccggggcttcgccaccccaggtctcaggctggttttgctgctggaagagaatttttgaggctaggcgatttatcacagacacacgtttgtgacttacagttctggaggctagaaagcctaaggtcagggtgccagcaggtttggtgtctggtgaggtacccatctctgcttctaaggcagagccttgcacactgtatcctccggagtggagggctggatcatcctggggcagaggcagaagggccgagtgggaggaccactcccaaagccgcttattgaggcattaaaactgctgtgagggtggagcccttgcggcctcgtcaccttttcaaggcccttccaataccatcactctggcagttaaatttcaacatgagttttggaggggacagaaatttaaactgtggtacccagttaattttatttatttatttatttatttgaaggagtctcactttgtcacccaggctggagtgcagcaatgcaatctgggctcactgcaacctccatctcccggattcaagtgattctcctgcctcagcctcccgagtagctgggattacaggcacacgccaccatgtccagctaattttgtatttttagtagagacagggttttaccatgatggccaggctggtctcaaactcctgacgtcgagtgatccacccgcctcggcctcccaaagtgctgggattacaggtgtgaaccaccccacccgacctagattcgcttttgatttaccgatggggcgtttgcctttcccctagacacgtcacaaccccaggctctcagcaccgtccgtcgtctgctgggactgggcttagtcgtgtgtttctgtctgggagactgtactgaaggcagaattcctagagaatcacccacatgtcactcagaagtattcttctcaggcttcagaaatttgctttagccaatgttgttttaaaagatgggcgttttaccccgaattgaagtgacttcattttcggtgggttttgactgaatcaccatcaggagatgcacgtgtcatgcaccagcctctgaggtgcgggggtgtccccgtgtctgtcctgtttgcatccttagctctccggaaggaagtggaggatctgaccaaagaacagtcggagaccaggaagcaggctgagaaggaccgctcagccctgctctcccagatgaagattttggagtctgagttagaagaacagctgtctcagcatcgcgggtgtgccaagcaggcggaggccgtcactgccctggaacagcaggtggcatctctggacaagcatttgcgcaaccagcggcaattcatggatgtaagaattctgaataatacatttttttgcatcactaaaagttgccgttacagcatgaacttctttccagatcgttacgtaagcttctgcagtaggatgttgaagagggcgccccacacctgctgcacaggtgcacccaggtcgctgactcttggtgggtgtcttcttgcccacatgttgtggcgcagccctctgagggccacctcccatggtcttgccatgctccttctcacagtcacggaggcgtcacttggggcccgggctgggcctgtgctgcagctctcactggttcttgtcctcccacccaccagtctcagacgttcctctgtgttccatgcagagagctgtttttctttacttaactccattttacaaagtgactgtgatgaggggggtatttggagtctgagctgctgggcagttgcacttgtacgtgcagtggaagcctgggtggaccttcgctgcaaggggcacgccagccccgttggggtggtcccaacacgctgcctctcctcccaggagcaggcagccgagcgggagcacgagcgcgaggagttccagcaggagattcagaggctggaggggcagctccgccaggcggccaagccgcagccctggggccctcgcgacagccaggtgagtcagtgcagcgtgcagtgctgctggttgctgtctttcactgtgtttttaagctttaactttctttaaatttttgccttccatgtacatgaaatcggcagcaggcgccgctggatggagaggtgaggaggcgtcaacgagatgggcactccctgcgctggcgcccaggctcccctgcgctcgctgggactgtcctgccacccactcgcttttcttgctcttgtttgggctgcagccatctgctttctcttgtctgaggaagctgtagtaggttcgtttatttttttaaaaaattaatggtggattcacacacagttgtaagaggtaagactcggatccctcgtgcctggcacgtggttccccagaggtctcatccacagagccggaatgcagtgtcacagccagtatgggcagggatctggtgacgctgcagtgccttctgccccccacggaccctcgtgtactgggtcacggccatgccgccgtcctttctcgggcaaccactcatctgtcgtctatttctaaaactttaccatcttcctgatgggtgaagcgtgcctgtcatcttgggggattgacaccattcaccgagcctgactctctggagattgatccaggttactgagtgtagccatagtttgttctttatgttgctgagaagtattccattctttttttttctttttctttttttttttttttttgagttggagtctcatgcagttgcccaggctggagtgcagtggcgcgatctcagctcactgcaagctccacctcccgggttcacgccattctcctgcctcagcctcccgagtagctgggactacaggtgcccgccaccacaccccgctaattttttgtatttttagtagagacagggtttcactgtgttagccaggatggtctccatctcctgacctcgtgatctgcctgcctcagcctcccagagtgctgggattacaggcgtgagccaccgcgccggctgtagtattccattcttttctatcagaatagatttcattttcctaacaaattctgtattatagagaatgcctttcttaacacaacatcaccctatacttcctttagatctctgttcagcctctgggtctaggtctccctgtgcagcctgtgggtctgggtctctgttcagcctgtgagtctgggtctcttttcagcctgtgggtctaggtctccctgtgcagcctgtgggtctaggtctctgttcagcctgtgggtctgggtctctctgtgcagcctgtgggtctaggtctccctgtgcagtctttgcgtctgggtctccctgtgcagcctgtgagtctaggtctccctttgggtctaggggagggcatagggcatctattttgtctctgttgttttgggtacttttttgtttggaaaatgggtttttataaaacattctattgtattcctcaagcattttttgttgttttaggttgagttgttacaacaaaagttgagagaaaagttggatgaatttaatgaattggctatacagaaagagtcggcagatagacaagtgttaatgcaggaagaagaaattaaacgtctggaggagatgaacatcaacatcaggaaaaaagtggcccagctccaggaagaagtggaaaaacagaaaaacatcgtgaaagggctggaacaggtaaagcgtctccatgttgtggttgggcacgtggtgaggtgtcccgcaggcatggcttcatcgctgagctggcagggagtgggcagggcgtccttcttcactggcagccaccacgtctgcaccagaaacactggcgtcagggagaaacagaagtcattggtgacgggtagcaagagtactttgacctttctggagattgttgattttatttactgtagtaggatttatacaatttctttatgtctcaagaactctgaatttatccttaatatttcataaagtaaacatttaagattttaggtttaaaaaaatcttagcttattaaatactttgatgagagccccttgtaattgtttcaatctttgagctcaggaactcatgtcagctcccagtgaagagatctccagtgatggttttgcattgctggtgtttgccgtgttgtgtgtgttcgtttgtgtctgagagtttaaagaggggctggagcactgagccaggtgggccatctcatggctggagggggcagggctgcctgtctgcatttctgggtagcggctgtgccctccattgtgagcatttagctaaaaggaattcagctgacttctatgaggttaaaaggttacttgaaaagaggctcagtaagaaatttgattttagaattagtagtttggcctcagacacagatgagaggaggagtctttctcaggtgtgtctgattcttttttttttttttttttttttttgagacagagtcttgttctgtcacccaggctggagtgcagtggcgcaatctcggctcacagcaacctcctcctcccgggttcaagcgatctctcctacctcagcttcctgagtagctgggagcacaggcacgcgccaccacgcctggctaatttttgtatttttaatagagatggggtttcaccatgttggccaggctggtctcgaactactgacctcaggtgatctgcccgccttggcctctcaaagtgctggtattacaggcgtgaaccaccacgcccggccaagtgtgtctgattctcgtaagtgctgatgagaattattaaactggggcctttcctcaggccctgacgtgtttccgttccgctgtcgcagggaggaccgctgagcatcacctgcacttggagcggagttgtccccctggccggccactgcacacatttcagtgacagctgctccagggcggcttcaccccttctgccttcactcagcgaacgtttactgagcttagtagatgccagggttagaaaatgtgtttttatcccttcgtgaaatttggactgtgtatgcaattttatatgtcatgctcttgcgcatgtaacgtattgtgaccattttcgtcatattaaatattgtttgaaaaattttttctaggcaggtaatattcattatatgagcataccatcagccattgccctattttttttggcaagttcttgtcagttttgaaaatattggtaatagtttggtgaatattactgtagataaattcctcacagtggactcgggcacaggctgtggctctcagtcacgtcctgcaccaggcaggcctctgctgggaggtggctgggtcctgggtgccagtgttgcctggtgtgtcactgagtgcaggggcgtgcaggtccacctgctctgcttcaggtgcagctaaagatggtctgtgctttaacaggcagcagttgaggtactgaattcccaaatatttgcctaaaatagagttcttttttttttaataggataaagaggtgttaaagaaacagcagatgagtagcttgcttctggcgtccacgttgcagtctacactagatgcaggcagatgtcccgagcctccttcgggcagccctcctgagggtccagaaatacagttagaggtgacacagagagcactcctgcggcgcgagagcgaggtgagtgcagagtggggccatgggactgccagccctgggtcagtgtccagtgggcttctctgtggcagatccgatgtccagataacacaggcgatgggcttgtgaccactgtgtattcttttcttttcttttttttgttgttgtttgagacagagttttgctcttgttgcccaggctggagtgcaatggtgcagtctcggctcactgcaacctccgcctcctgggttcaagcgattctcctgcctcggcctcccgagtagctgggattacaggtgcacccaccgccacgcccggctcagttttggtatttttagtagagacagggtttcaccatgttggccaggctggtttccaactcctgacctcgggtgatctgcctgcttgagcctctcaaagtgctgggattacaggcgtgagcccatgcccagcctgaccactgtgtattctttgcagttttaccatttgtgtgcgggtacaggtacagggtagtaattgctttaggcatgtgcatttaaatatctcaaagctattttaataatgtcttaattattaatattaatagaatattagatgacttttaatacttttcttcttttgttttaatgaaaggttttggacttaaaagaacagctagaaaagatgaaaggtgacttagaaagtaaaaatgaagaaatactacatctgaacttaaaattggacatgcagaacagccagactgctgtcagcctcagagaacttgaggaagagaacacgagcttgaaggtaagctaccaaaggtccacgtgacgcccgagttcatgttgcttatgccggtgccgagcggccaccaagaccctcatcggggaggcgagtctctggtcttcacagacgcccgtggcccccatgtggcagacagtgcagagagcgcccgattctgcctggggacatgtgcatggaagcagctttctagggatcttgagtgaggaaccagcgacccctgccccaaactgctttctgattgcagcactgatagggatctgaggagaggcacttccctagggcagcaccccagggctgtgagaggcgtgaagctattgggctgttggtggcttgctcttctcaaggaggtgacttgagtaagtggctactcactgtttctcttcccactggcatgatgggaaaaaaatcttaagaacaaatttttttttaaatttttgtgagtacatagtaggtgtatattaaaaaatctatttttaaatcttttattttaatgtagccgtgcttttgaagcaaaaaagaaaaccaaaaccaacctgtttatagtagagatgatattcaaaattgcagagcattcataacttcacagatgcccttgaaagaccttgtgtagaatcgtgtgtgtggtgcccacacaacacgtgctcagtgaatgaacacagcgtgggagaattagtgtgtgtggtgcccacgcggcgcgtgctcggtgaatgaacacagcgtgggagaatcgtgtgtgtgtggtgcccacgcggcgcatgctcggtgaatgaacacagcgtgggagaattgtgtgtgtggtgcccacgcagcgcgtgctcggtgaatgaacacagcgtgggagaattgtgtgtgtgtggtgcccacgcggcgcgtgctcggtgaatgaacacagcgtgggagaattgtgtgtgtggtgcccacgcggcgcgtgattggtgaatgaacacagcgtgggagaattgtgtgtgtggtgcccacgcggcacgtgcttggtgaatgaacacagcgtgggagaattgtgtgtgtggtgcccacgcggcgtgtgctcggtgaatgaacacagcgtgggagaattgtgtgtgtgtggtgcccacgtggcacatgctcggtgagtgaacacagcgtgggagaatcgtgtgtgtgtggtgcccacgtggcacatgctcggtgaatgaacacagcgtgggagaatcgtgtgtgtgtggtgcccacgcggcacgtgcttggtgaatgaacacagcgtgggagaatagtgtgtgtttggtgcccacgcggcgcgtgctcggtgaatgaacacagcgtgggagaattgtgtgtgtggtgcccacgcggcacgtgctcggtgaatcaactcagcgtgggagaatcgtgtatgtgtggtgcccacgcggcgtgtgctcggtgaatgaacacagcgtgggagaattgtgtgtgtggtgcccacgcggcgcgtgctcggtgaatgaacacagcgtgggagaattgtgtgtgtggtgcccacgcggcgcgtgctcggtgaatgaacacagcgtgggagaattgtgtgtgtgtggtgcccacgtggcgcgtgctcggtgaatgaacacagcgtgggagaattgtgtgtgtggtgcccacgcggcgcgtgctcggtgaatgaacatagcgtgggagaattgtgtgtgtgtggtgcccacgtggcgcgtgctcggtgaatgaacacagcgtgggaatgctccctgagtgaacacagcgtgggagagtctcaaaaaacaacaacaataacaacaaaaaaaattttcaaattgattttccatttttccaatttaaaactgtaggcttatttaattaggacatttcatatctgtagggtcagtggaatatttccctattaaggttctgtcggctctgttttgatatggttgttgttattaccatttccaccggcatttctgcccaacaaagaagaggagatagtgcgtgtgaacgagcagctctaggcaccgcaggtttacctcggcgaggtacgccactccctggtgctgggggagaaggggctcttctcacgcttctggctacgcctgcgtctcctgtacgaagtcctcatagtttctgggtgtgattgactggggccttggctttccaggatgacagtcttctgtttcctcatacaatatttataatacttttcaaaattaattttatcagttgggcacggtggctcaaacgcctgtattctcagcactttgggagactgaggagggtgggttacttgagctcaggagttcgagaccagcctaaacaacatgggaaaaccccatctctactaaaaatacaaaaattagccaggcatggtgacacaccactccggagactgaggcaggagaatcacttgaacccaggagatggaggatgcagtgagctgtgattgtgccactgcactccagcctgggcaacaaagcaagaccctgtctcaaaaacaaaattaactttatggccgggcacagtggctctcacacctgtaatcccaggagtttgggaacctgaggtgggaggatcgtttgagcccaggaattcgagatcagcctggacaacgtaatgagacccatctctacaaatttttttaaaaaatttagccaggcatacacctatagtaccagctactctgaaggatgagataggaagatcacttgagcctgggaggccaaggccacagtgagctgtgatcatgccactgtaatccagctgtaatgacagaacaggaccctgcctaaaaaaaaataattttggaggggaccatagaagtaaggagaagtttgtctccagtttgtcacttttaatttccctttgacagaggctactgagatgttatctgtcttagtatctgattgtatcttgtatatttggcaaaaatttaaaaatagccttttgggttacattgaagaatgccttttatggccaggagcggtggctcacgcctgtaatcccagcactttgggaggcccaggcgggcagatcacttgagctcaggagttcgagaccagcctggccaacatggtgaaaccccgtctctactaaaaacacaaaagttagctgggcctggtggccggtgcctctaatggttacttgggaggctgaggcagaagaatcacttgaacccagaaggtggaggttggcagtgagccgagattgcgccactgcactgcagcctgggcgacagagcaagactcgtctcaaaaaaaaaagaatgcctttaaaaaccattgattacttttcagaagaagttgtattatttgtctatagtgctctagaacttgacctctaactataatcttatataatgaaaaatatataaaaaatagtttacatgttaaggacagtatttttgttccattaagaattgaaagctttttaaggacaatccccaatattttcttgtgggatttttcttacagatatgtgcaaattcgtacatccttcattttctgtaattctcctaattttttgtaaagatgcggatgctattttgctttatataataaagaaaagtaaaattccatttaaaggtttgactcttgttaggtttccagttatttcaaggaaaccacatttgctgtattctaccctattttatgtcagtgaagatgtttgtcttctagaagcgtcttttacacttgtggggaaacggagctcccgtctccctggcgtggtcgtggttgttgtcacttgttctgtactgccgtcctccggggctccagccatcctaacacctcatcctcaatgtgggccctccctccctgtgtggcttattctaactctggggttagtgatgtttctttaattttaccatttacttctcccttattctacaggttttaataaagaggtctcacgtcttttgttaaatttatccttaaatattttaggttttttgcactattgtaagtgagatttaaaataattatctagttgtttaccgtgaatacacatacaccttttgtatgttaaccttgctgttaccttgcacaatttatgtatattagtagcgttttgtggattcctgaaggctttttatgtataagataacatcatcttcagataaagacagttttatttctttccaatttttgttatttccttcttttattacaatgtctagcactcccagtacaaagttaaaactggctagggcagtcatctttgcccagctccttgtcttacagggaagtggtcagtgttttgccattaagtatattagctttaggtttttcacaggtgcctttttatcagatcaaggaagttctgttatatttctagtttgctttttctggatctattgaaatagtgatgatatttttctcttttattctactaataaggttaactttattgagtgatttatttcttggagattaaactaaccttgcggttctaggataaaccatacctggtagtgatgtactgcccttttcatatgttacagatattactgaatttgatttgctaatattttgttaatggtttttgcatctgtgttcatgagggatgttggtgcataattgtcttttcttgcagtgttccctaaggctttgtatgaaggttatgttagtctcataaaatagattgggaattttttcactttcttttctgaaagaggttatttaacatagctgggatttcttctttgaatgttttcatagcatcaacaatgaagccatttggagttttatatctagagagattgatggtaattaattttctttaacagactgaggtatttggatttctgtttcatgttgtgataagttgtatttttcaaggaacttgtgcatgtcatcaaaattgtcaaatttctttgcataaagaagtttatactttctctttttttttttttttttttgagacggagtcttgctccgtcacccaggctggagtgcaatggcgcgatctcggctccctgcaacctccgcctcccgggttcaagtgagtctcctgcctcagcctcccgagtagctgggactacaggcgcctgccaccaggcccggctaattatttttgtatttttagcacagacggggtttcaccgtgttagccaggatggtctcgatctcctgacctcgtgatccgcccgactcggcctcccaaagtgctgggattacaggcgtgagccaccgcgcccagtctatactttctcattttgtaactgttcaccttattaaccatttccttacttgccattgaatatctgcaggttttatgctgatggccctccttttattcctgatattagtgagttcgtgttttctcttttattcttgagtctgtctagctagtagtttatccatgttgtcagtgttttcaaagaatcagcttttggctctgatacttttctctctttatttctttgatttctcctcttattttcattattggcttccttctatttaccttgggtttattttctcttctttttctagctttttcagatagaaccttaggtcattgattatagatacttatttttcagtataacaatttaagttttttgtttttagacttcgtgcatagtaaaattagttttttttagtatacagttttataaattttgaaaaaaggatttagtcctgtaataatcaccacaatctcatcactcaaaaaattttctttgtgctgtttctttgtggccacccatcaggcctgctgtcttcctgtctggaattctgtttcgagtcaggtgttgtaatgcactggaaattgatgcatgctgtcgcctgtgtctgttcctttagttgctgagtactgttgtctggatggaccacagtttgttgatccattcacccatcgagggacatttggatagtttctaggttttggcagtgatgaatcgagccaccataaactttcatgcatagctttttgggagaaaataaatgttcacttctttcggttcagtacttaaactgaatgcatggctgattcatgtgtaagtatatatttaaccttaaaagaaactgtcaaactgttttctatagttgcactaccgttttacattccaccagcaatagatgagtgttccgggtaaccacgttctcatcaacatttggtaaggtcagtctttttttctagacattctggtagatatgtagtggtatatcctagagttttgtatttccttaatgactagtgatcttgagcatctttttctatgctatttgccatccatattgtgggggaaatgtttgcttaagtctttcagaaagtttttttttttttttttttttgagacagagtctcattctgtggcccaggctgcagtgcagcgggaacgtgtcagctcactgcaacctccacctcctgggttcaagcaattctcctgcctcaacctcctgagtagctgggattacaggcgccgccaccacacccagctaattttttaatgtttttagtagagacggggtttcatcacgttggccaggctggtctcgaactcttgacctctggtgacccacctgcctcggcttcccaaagtactgggattacaggcatgagccaccgtgccccacctcagaaagttttaaaaagttggattgttcggtttcttattgttttgggaattctttatatcttttgaacgcttttttttgatacatgatttgcaggtattttctcccaatgtatggctggtcttttcattctcttaacagtatgttttgcagagcaaaactttttacttttttttttttttttttgacagagtctctctctgttgcccaggctagagttcagtagcgcatttttggcttgctgcaacctccgcctcccaggctcaagcagtcctcctgtctcagcctcctgagtagctgggattacaggcacctgccactatgcccagctaatttttgtatttttagtagagacggggtttctccatgttggtcaggctggtctcgaacgcctaactcagaagatccgcctgccttggcctcccaaagtgttgggattacaggcgtgagccactgtgccccgccagattatacttttgaagttctgagagctctttccctagcccaattttcctgagaaatttcatagttttactttgcattcaggtctccttgaatatgcttgcatacgctttttgctttttatttttcttttttgacactatcttgctctgtcgcccaggctgcggtgcagtggcgcagtctcggcttaccgcaacctctgcctccagagtttaagtgattctcccacctcagcctcctgagtaggtggaactacaggtgcccacgcccggctaatttttgtatttttactagagaccagggtgcaccgtgtcggccaggctgatcttgaactcctgtgctcaagtgatctgcctgcctcagcctcccaaagtgctggggttacagacgtgagccaccgcgcccggcctcagttcactgatttcaggttttggtgttttacatttagagctaccttcgtatgctggctccagtattttaacgtgatatatgcgttgtgattatgaccgtcttcagtgcgcaccccttgattccagtttatttagtgcatttagggaatgagcagaagctgcgtataatcagaattgtcctcgaaattccttcgcgtgcctgtagagtacagagacaacggccggtgccgcacacagtaaggcacgcgacggggagcagaatgtgcagcgggcattcctagcccgcagctgggaggctgcttttgctaaatgcatggtgttgttcatcggtggtaaatgcataggaaggtgttgttgacagcgtccaaaccaaagccacaggttcatccggttcctttgttttttttctgtaggccagatttgcatttgagtccagagtaattgtgaggtagttccagagaaacctggagttgttatgaaaccctcagttttttggaagaacatattagtctataacaaatagttttaaaattgttagagcacaaatggattagaatttttctattttttgtcattaccaggaatgttatcttaagagaatagagtttggagctatattgacatacatctcaatcctaattttccacttactgtttttatgggtttagaaagatgtttaatatctcagtttcaattttcctgtctttaaagtggaaacaatcgtatttccttacatggctgaggattatgtttcatggcacaagtaaactcacttcgatgcctggtgtcaccgagtggcagtggcagagacgcctcatcaccagcgtcaccacgagcagtgttgggatggaaggggagcgtgcccggctcaccgctttgttggtgcagattctctgcctaggtttcttactttcctcctggagtcagaatgacacctaaaatctaatgcaccttcaggaaaatcaaacaaatcaaagttgtttaaatattaacaaaataacatttaaagggtggtgaaagcatcattctgtagatgtccttgcatggaaaatgactgcattagagcttcgtcccacgatcagacgtggagcacaaggtgtgcaccagggcccagtggcagccaaggtgggtgtggagtgcatccggcaccagcagtttgcttctatggctgctttgtttttcacgctatggagtcttcactccaagaatgcattcaggatgtaacgtgccctgaagtagggacattcggaagtggatacatttaatttgcctctgaaatgtcctctctcttcaggtcatatataccagaagttctgagattgaagagctgaaagccactattgaaaatctgcaagagaatcagaaacgattacaaaaggagaaagcagaggaaattgaacaactccatgaagtcattgagaagctgcagcacgagctgtccctcatggggcctgtggtgcacgaagtcagcgacagtcaggctggcagtctgcagagcgagctgctctgctcccaggccgggggccctcgtgggcaggccctacagggcgagctcgaggctgcgctggaagccaaggaggccctgagccggctgctggctgaccaggagcgcaggcacagccaggccctggaggccctgcagcagcgcctccagggcgcagaggaggctgcggagctacagctggctgagctggagcgcaatgtagccctcagggaggctgaggtcgaagacatggcctcccggatccaggagttcgaagcggccctgaaagcaaaggaagcgacgattgccgagagaaatttagaaatcgacgctctgaaccagcggaaggcggcccactctgccgagctggaggccgtcctgttggccttggcccgcatccgccgcgccctggagcagcagcccctggcagccggggcggcgcctcccgagctgcagtggctccgagcgcagtgtgcccgcctcagccgccagctgcaggtgctgcaccagcggttcctgaggtgccaggtggagctggacaggcggcaggcccgcagagccacagctcacacacgggtgcccggggcccacccacagcctcgcatggatggtggcgccaaggcccaggtcaccggcgacgtggaggcctcccatgatgctgctttggagccggttgtccctgacccacaggtgggctccccccgcgggccatggcagggtatttttttttactctccttttctcctttgatgtcaatgacttctctctgcgctgggcactgggggctgcagttgtcatggtggctcatgacacagcggagaaagggggcctgaagctcgggccagcctgggcctgttccgtgtcagtacgcagtgaagctgggctgaggatttcactgttttgtaccattttaagcttatcgttttaagcttttaaaaacaattctttctttcacataatagggactgtccagtgaaacggagctcactatgtgaggagggtccgcttaagctgcttctctggtttctaaccaaatggtttgtctgtcgatgagcagtgcctgtgtgagatgtggcgagcgagctcttcttttggagctggaggccctgtagggagtcgtcttttaaggcttccacttgtatttgagcagaaccttgggaacttggtgcctaccacccccacaccagctgggtctttgtagagtggctcccactctcagatgccccagtccaccttgctctgtggggtcgtcctgggtcggggcagctttctgctgggtcctcagccccgttcccatgtggcctgctgtggaccaaggtgctcggctgtggatgtcactgccacctccctctggcatccctgctggctgccgtactggttcccagctccaggccacctgaggggcagccccagcaacagcctcctgcatgctcagctttcctctgtctcctctgtcaagggtgatctgcagcctgtcctggtgacgttgaaggatgcacctctctgcaagcaagaaggcgtgatgtcagtgctcaccgtctgccagaggcagctgcagtcggagctgctcttggtgaaaaatgaaatgcgcctgagtctggaggacggcggcaaggtgtggggaggggggaaggcgcgaggtccccccgggagaggctggacacgcggcagcaaggtgtggggagcggggaaggcacgaggcccacccgggagaggctggacacgcggcagcaaggtgtggggagcggggaaggcacgaggcccacccgggagaggctggacacgcggcagcaaggtgtggggagcggggaaggcacgaggcccacccgggagaggctggacacgcagcagcaaggtgtggggagggggaaggcgtgaggcccccctgggagaggctggacacgcggcagcaaggtgtggggaacggggaaggcacgaggcccacccgggagaggctggacacgcggcagcaaggtgtggggaggggggaaggcgtgaggcccccctgggagaggctgggtgcagaacatgtgggtcttgccctgggcagaggcgggtattctgctgaggtgaggagcacagtccgtgcctgcagtgacatgttctctgaatcctttctgttctgtaacgagctgtccataactgttgtgaaatttcgtacgtgcttcatttaagccactctgtagaaacaatcagttgggtttttttcttgtaattgatccaaatggatttaactgtgctcgagggttagtcctggtttgtcttttcatgggaggaccacatcgcccccgtgggcctcacctcagctcaggactttgatggccagcgtctgttttactttgaaaggcctcagatttattcttgtaatctgttcacctcactccatattgtcacttgaaaaaaagctggcacttcttttccccggggaaggaggttgcaccttgaccatctcaaattgtagcagggtggagatttagcgagaaaagcgggtgctggtgcttctcccacccagtgcaccaggggcaggtccccagtgcccctaggaaacacctgcgcaggagctgccctctcctcaggccgcatcaggtgcagatggcacctttattttttttctctctttttttttttttttgagacagagtcttgctctgtcgcccaggctggagtgcagtggcacgatctcagctcactgcaacctctgcctcccgagttcaagtgattctgcagcctcagcctcccgagtagctgggactgcaggcatgcgccaccacacccagctgatttttgtatttttagtagagacggggtttcaccatgttggccaggctggtcttgaactcttgaccttaggtgatccaccctcctcagcctcccgaagtgctgggattacaggcgtgagccaccacgcccagccttagatggcaccttttgatgcactgtctgcacctcgcctcctccagtccaaggcccagcgcagcctccctggacacacagccacccacccttctcctccttctcctctgggacacacatctgtccaccctcctcctcctcctcctcctggacacagtcgcccaccctcctcctcctggacacacagccgcccactctcctcttcctcctccttctcgacacacaaccacccaccctgctcctcctcctcctcctcctggacatgcagccgcccaccctcctcctcctggacacgcagccgcccaccctgctcctcctcctcctcctggacacacagccgcccactctcctcctcctggacatgcagccacccaccctgctcctcctcctcctcctggacacacagctgcccacactcctcctcctggacacacagctgcccaccctcctcctcctggacacgcagccgcccaccctcctcctggacacacagccgcccactctcctcctcctggacatgcagccgcccaccctgctcctcctcctcctggacacacagacacctaccctcctcctgctggacacacagccacccaccctgctcttcctcctccccctcctccctgctgtttgctaaatgtgccccaactactcctccaggctctgaaacccagaggctctaacaccagaagtgctgggcaggtgttttatggtctctagggtggcacggaagcatgcttggtgctgaagcctgctgagacctgggctcacccgagcccctcgcagccctcgtgagtgtcccgcacgtcgctgggacgtttcttgcatgagtgcaggtgccgcctgttcctgggtccacactgcgtgcacctcattggcgtttagagcctgaaagattcttaattccacagaaatcagggaaggatgggcctaggcccgcagttctgaggagacccatgaacctggttcgtgtgcttgtcatgtgctctcgggaaatacatcctgtgtggagagcccttcgcatctcctgcggcaaacagtcttggggccctcatgacaggaacgtttctttgaattttttttttttttttttttttttttttttgagacagagtctcgctctgtcgcccaggctggagtgcagtggcgagatcttgagatcttggctcactgcaacctccacctcctgggttcaagcaattcactgcctcagcctcccgagtagctaggattacaggcacccgccaccatgcctggctaatttttgtatttttagtagagacagggtttcaccattttggccagggtggtctcgaactcctgacctcgtgatccacctgtctcagcctcccaaaatgctaggattacaggcgtgagccactgcacccggcccaattttttgaattcttaagagaaagctcagccctgcctgccaaattcttagaagttacacacacagaaactccaaattcatcacataaaccacaattttgtgttttcggtgctcagatatagaaccttcccatcctttttcccttgtatgaagcttgtgtcctcaatcaccgcagaaataggttatgacagttgccttttaagcaaggagatgtaagccttggttctgtttctcatagaattaaataaacttgaaatgtgcagggctcattgtggaatcacccgagtgctccgaaactccctgaaatccactcattaacaccagacaggtgcgactcctggtgagccaggtattccaccgtgcacctgttctgtttcacctgcagggtaaagaaaaagtactggaagattgtcagctgccgaaggtcgatctcgtagctcaggtgaaacagcttcaggaaaaactgaaccgtttgctgtattccatgaccttccagaatgtggatgctgccgacaccaaatctctgtggcccatggcctcagcacacctgttggagagcagctggagtgatgattcctgtgacggagaagagcctgacatatcaccccacatagacacatgtgatgccaatacagccacggggggtgtaactgatgttatcaaaaatcaggccatagacgcgtgtgatgccaatacaaccccagggggtgtaactgatgttatcaaaaattgggattccttgataccagatgaaatgccagattctcccattcaagaaaaatcagaatgtcaggacatgtctctttcttcaccgaccagcgtacttggtggctcccgccaccagagccacactgcagaggctgggccccggaagagcccggtcgggatgctggacctgtcttcctggagctcccctgaggtcctcaggaaggactggaccctggagccctggcccagcctccccgtgacaccccactcaggagccctgagcctgtgcagtgccgacacatccctgggggacagggcggacacctcgctgccacagacccaggggccggggctgctttgttccccaggcgtgtctgcagcagcgctggcactgcagtgggccgagtctccgccggctgacgaccaccatgtgcagaggacggctgtggtaggtgcctgctctgctcccaggcctgctgttcccgtgggaatgtggtctgcccggcgccacggcagctgccattgtttgttcacctcctgacagcacacacctcgcagtgctgtgtggggccagctctgcaggactggcatcatgggcgcatttagattatttcagttgttcaggtatttttaaaatgcctgagatgcatttgcctgcctcagacataccctgggcatgcttctccactgacgctgactccaacgggcatagcccagacacgtcttcgtgtgtgatgggcatagggttctttgtccagaatggttttttagatttatttttaggaatgcttcctttttttttttttttttttttttttgtgagatggagtctcgctctgtcacccaggctagagtgcagtgacgcaatctcggctcactgcagcctccgcctccccaggttcaagcaaatctcctgcctcagcctccctagtagctgggactacaggcacacgccaccacacccggctaatttttgtagtttagtagagacggggttttaccttattggtcaggctggtctcgaactcctgacctcatgatccacccacctcagcctcccaaagtgctgggcttacaggcgtgagccaccatgctcagccagaaatgcttcatatttttaacaggtttcacatatgctaattaattttaatttatgagttagatcgtattatttctaacataatcattttgggattttgtgtatcttgagtaagataaaattaaaaatcaggtatggttgggctcatgcttgtagtctcagcactttgggaggctgaggcgggaggattgcttgagcccaggaatttgagaccaggctgggtaacacggtgagaccctgtctctacaaaaaaaacacaaaaaattagctgggcgtgctggtgccgcccatggtccctgctcttcaggaggctgaggcaggaggatcacttgaccttgggaggttgaggatgcagtgagccaagattgaaccactgcactccagcctgggtgacagagtgagaccctccctcaaaaaataataatttagcagatacatattatctgaaacatccatatactatcatttcatgcaaaacaatttaaatctgaaatatttactattggctacattaaaatattcctaaagagctgtgggtgaatctgattaaattgttggaagcattcgacctgtgtgttcaccagttttgagttgtttcatctggggtctatgtgggaagataaattcaggcctttgaaagttttcacctggcaaagtcagcgctatgatgtaattactcattattttatgaccatttaaaaatctcttaacaggagaaagatgtcgaagattttatcacaacatcctttgattctcaagaaacattaagttcacctcctcctggattagaaggaaaagctgatagaagtgagaaaagtgagttggttatctttcatttttaattttttatttcagtggtttcctagcacagaatagtcaaaagaattcctgcatcctttgcctggttctgcgtctgccccccgctgacctccaccccggctctgcgctttgtcgggcgtgcacctggggcctcttgacttctgaaaacacgcctgtacctttcacagagccaaggttgctggcccgggccacgctccaccctggaatgttcaccctgatccaaggctggcatctcagctacagctacagaccttgctcagattcacccattgtcccagtagtgtcctttatggaaaagacaccccagctcacaggctgtgttcaggtgtctttggcaggatggagactggggcggtgcacgccatgtttccaggctctgctgccttgcctgcccaccctgcctttccctccccttggggtggacgtccctctctctgctgtgggtttcggggcaccggccctggagaggagccgaggggccgctgactgtggcgtgtcctcgcgatggtgcgtggggggctgcgtctccccggacctcgtggcgggaggtgcgtgggcttgacttgggcctttgtctgtgatggtgcctgccaggtttcctccacctccttctgtgggagatgcggagactgagtattctcttccctctcatgctcacgcccactggtctcagcctcccttggttgccctggcccgcatcagttgttgtggcggttacctgccacaccgtcctttttttcatttcataactttttctataattgttgtctttttacaagtcagtcaccttttgaggtgctctaactttttaaaaaatctgttggatttttcagcgatttagtgttttttgagaacatggtcacaatttaattagaaattttagtatttgcagagtagggccagcagctttttaattttgtttttatttatttgatgaatagtgagcacgcagggtgacagttatgggtgctgaggggaccgtttcctgagcagcctgtgtcccagctccccactcaggactgcagctccctggggatgccacattcaactctcagaaatgtcttctcgtatttgctttattttcaaactctatttgctgtttaaagtggcatcttcagccctcctagcccctcgccacacgccccttgctacacgaggtgcagtctgcacgccctgtgctgtcacagccaaggtttgcccttaaaggacgcgccccgtgttccagcagagccgctgggagcgtgcgtccccctcgagccacttttgtttttcttggctcagtttctcctgtgtgcttcactgctgtcctcgcacacagtgtccaggtgaatgtcatccaagccttccaagcacagcaggtgcttccccaacaactctcaggggctcccaggcggccccttgcccctcctcaacggtctcttatttaccgagacagggtcttgctctctcacgcaggctggagtgcagtggcgtagtctcgactcactgcagcctccacctcccgtactcaagtcatcctcccaccttagcctcccaaagtgctgggattacaggcatgagccactgcgcctggccagccccctcttttttaaggaaacatgtccccagaagcctctgtagaaaaggtgtctggtaggtgcttgtttttgagaacttcctcgtctccctggtggttgtcggttggttggctgggtgcagacacttgggttggaaggtatcgcgtgcctgtccactgcctctgtgcccgcgccctccagtgacgcacaacctttgaggggcctgcgcggtcagggtgtccgccgcctctgtgcctgcgccctccagtgacacgcgaccttggaggcctgcgcggtcggggtggaggatttcctcctcgttcgtccttcctccattcacgtatcctatgattttctctcttctttttgtaattcctgttattcaactatatcaggcctccaagattgattgtcaaattttctttccttatttctacttcttttatttttgttctcatttctaagaggttttctttagaactttatttttcaacatttgtgctgagtgttctgtttctgtgctcatattttaaatttctcagaaatctttcttatcctaactgttcctctctcctttagctttagctccttggtttctttcttttttggagggcgttcttgagtttattttgggcacagccaggtgagaggtccctgcacctgaaggaaggtgttgggctccgaggtgaagcatggtttgtgctgaaggcacagggtccagtgggacaatggggaatgtggtcttggacttgtggagctctgaccacccgctggcggcacctgctggctgtgatctcctctggatggagtgggctggggcatggtgctgggcacccatgtctcggtggcactgggtgacagtgtccgcagcagtcacatcccagagttcctggtacacgctgtgggagccgcagctcaggcagatgcaacatccttcaccctcagagatttctcaaacacctgaagtagatgatttccccaaagatttcttcgttgtcatctttagctgagatacacagggcagaagtaggacttggcaccattattagacacaaagatttgcaggcggtgggtggcctgaggcattttgaggggtacaggcagcaacccagcaccctgcacccttgcactgctcctgaggccttcatgctgctctctcggcacttgccgccactcacaaaaagcactttgttggttcattttgtgaatgacgtgcccgttatttctctgagggggtcatcgtcatcctctgaggttgtactctgcctgcatcgttggcctctactcctccccagtgtgccctctgctcagcaggctgtgccggggcatcatcccccaggtgcccaagtgctgcagcctccgctccccagggagctttgtccacacgggggccccgtctcgctggcatcctcatcctcctgttttgaagtctaacaccctttttccagggcgcctcctcctcgtctgggtctcgtgtcccttacacgatcctgcctcagtttccaaagcgcccccctccctgtgggctggcgcagctgcaggtctctgggatggaccagggccctgggaggttttgaattttcctccttgagaccccatgcccacctgacacaggagctgcaccgcagggaccccatggcaggcacggtcagcgtttcctgagcagtcattggatgcccgtccgctgcctgccttatctccgtggctggcgtggagggtgcaggccccgcacgtcccgctgctcttgagcttgcccaggccatctgggttttgtggagtctttgggggccacgtctggagaagtgagcagaggtcccctaagattggcgctggaatcagggactcaggtgatgttctcaacctgtgaagttgcgttttcttacttgacgtgcgtctttctcaccagggttatgtttttatgaagcatttttggggccatcagtgttttctccgtgagcagaatcacggtgtggttgtcgctggggactgcgggccgatcacccctgtcctgcctctgcagtgcgtcccctggggaaccccctggagagctgtgggtgggaccctgaccctgtggtgtttttaggtgacggctcgggttttggagcaagactgagcccggggtcaggaggccctgaggctcaaactgctggtcctgtgacccctgcttccatctctggaaggtttcagccgctgccggaagccatgaaggagaaggaagtgcgtccgaagcacgtgaaggtatggctggcaggggcggccctcacagcttcacatgtgcagcctcggggcatcccccaagccctgtgtcctgccttgccggggagagccttggagggccagcttttcctgggtgcctctgagcacctgcattttaatgactcacgggaggcagccccacggtggccccggaagccgcccacccagccctgcactggccccttaggtggccgcctcccatctgggcagggagggtcctgtgagcccgtgggcaggtggtgttgccccgagtcgcagagccggcctgtgcctctctcccgcctgtgcctccctcctgcctgtgccctgtagagaagccgaggcaccagacgccgcagtgctctaggactgagccgagttctcttcagacgatgggagagaagccactcagcctccttggaatcaaccttgaaggcagaattttgtggaacttttcataggttttctttcctctcccagtttagcagatcattttatggcaaaaccattgacaaaaacttggctaaacaagtgagtgatagaatgatgccactacaggagcttagtcaagtggtaaacatattcccaaacaaaacagtcttcacatcagtgaaacctcttctgagactgcgcagtaagtcctcacttagcgttgccccgaggttcctggaaactgaccttgtaggaaggacactcctgtgctgctggccgcagctcccgttgtctcagagggccctgagggtgcctttgttacatgcgtttaaaagtcgcggtttccaaaacccatccatgacgttaagtgaggacttactgcattcagaataaaacttgttttactttatttggctgggcacggtggctcatgcctatgatcccagcacttcgggaggctgagacaggaggatcgttggagcccaggagttcaagaccagcctgggcaacatagtaagacccctctctgtcagaactgagtcagttaaacctctttttttcattaaaataaaaaaacttattttactttcttaaacatggaaattggagattttttttttaatcagttttttatatcttctttgcatttcctttttttttttttggtgagacagagtctcactctgtcacccagcagtgcagtcacagctcactgcaacctctgcctcctgggctcaaacgatcctcccacctcagcctcccaagcagcttggattacaggcgtgagccaccacacccagctaatttttgtattttctgtaaagatggagtgttgccatgttacccaggctggtcttgagctcctgagctcaagtaatctgcccacctcagcctcccaaggtgctgggattacagtgtgagccacagcgcctggcctcaaatttttatacaatataaaacgtcaaggagatgtttctgttagtgtttcctatggaaaacaacctaatattagaattcctgatttttaaggaataaatttgattaatgttaactcttcatacttaggtttcataatttaaaaagaaaagcacaaaaggcaggaaaggcctcctgtagcccttgaggcagcagctgcgaagcagaggaggagggggagaggaggaggaagagaaggggagggggaggggaagaggggaggaggaggaagagaagggagggggatgaggagggggaggggaggaggaagagaagggggagtgggaggggaggagggggagggggaggggagaggggaggaggaggaagaggaggaactgctgtccagggagcacctccagctttgaaaggtcccaagtccagttgaaaatcacaaggagtttttttcatggatgtctcagactgtttcaaactcagggttttcctttattgtcttaatttctggcctgtgttttagagtgtggagccctggggttgtgcccacactgacgccgcagtggggaactgagtggagctgggtgcttgccccacttggaggtggctccaggcgcgtgggggacacccactgctcagatgcagccacagacgccaagagtgtggtcgacgctctaatagcccctgtggtccctatgctgaggaggctgagaggtcctgagcacgggtggggccccggccactcttggccacctctggccgtgcctggaattgagccataagtgggcagggtaggtgctggagctcaggaaatgaggactcccctgcctccgccgctgccaccaccaccactgctgacaggcagagccgcctggtcctgagtgtggagatggcagaaccttctcagccctagtgattgtgtctgtgggaccccccaggctgcctcacaggccatgttctaaggtacccactggtctctgccccacttcccggcctcacgggaacccacctgcaagggccccgtgtcacctggcgggaagctgtggcccagggcctctgcatctcttctttgtaagagatgttttttaaaatgcattttctcctctatacagaatctagaaaagcatattaaaaagaaggaaatggcctgtcctctgcagctggaagagaggggccaagcagcttcagggcctgcccgccgccctgctcccccggccctgctcccactgcgccccccccaaccctgctcccccagccacggccttgctccccccgtctccgctcctccccgcaccaccccgctcccctcaaccccaccctgctctgccgcagacctcagtttgcatccatcctgtgccacatacgttatgtttaaagtaaaagtgttttcagttgttagagatgaacatagtgtgcaatttggtttcacactttagtgttaatatttgaccttttttggcatatcgttaaaattacaggaaagcctattttcagtcagtcacacccgtcgtaggcttcatcattgcctcattttgcatttccctctttttggactttattagattatttttctcttcaggtttttatgcagacgtgtcctgtgcttgggtgtgtgctcatgtggtggtgaccgcgctgagcctctgggctctgggctctaggctggtcgtgacaccagcttctccatagggccgtctgcttacccctcagcctctctggcgagacagtcaagtgtgtgtccggacaccagctgctgcgtaatcggtgggataaagcagccgcctcgtgttcacagacctgtgggcagggcctgctggggatggttttctctgctccccgtgcccagcacaggcagcttcaccccacgctggtggtcggcactggcctcagccggaccacgcacagaggcctcctgggtggccatcgtgtggccttctcgtagcgtcccaggtgggcagggagtgtgtgatatgtttgtgatctcgctgtggacattggcctaaagccctgccctgagctttgtccaggcttaggcgggggacggtgtccccctcagggagcaggtggagtggaggaagtggcggggccatctttggagtggcttatagagaaattcactccaagcctggcttccgtgttgtctctctgaaggtcgggagaggtgggcttgaaaaccttgtagcttgagaagtgggtgccgcctgtacgaagccgaggcggtgccctccctctccacagctgcccgcccttcacagagtcctggcggcagctcggggccgcaggtggtgtagagcgtggctgtgtggggtggcaggcaactcccttctgacgcgctttcccgccacaggctttactgcagatggtgcgtgacgagagccaccagatcctggcgctgtcagaaggccttgcacccccaagcggcgagccacacccaccccggaaggaagacgagatacaggacatctcgctccatgggggaaagacgcaggtttattttgcccttcacacacttcttttccaaaggatttaaggagcttgtggtaatggccgcgtccttagggccacgtggacactaggatttctttctttttttttttttttttttttttttttgagactcggctcactgcaacctccaccaccccgggtcaagcagttctctgcctcagcctcccgagtagctgggattacaggtgcatgccaccatgcccagctaatttttgtatttttagtagagacgggctttcaccatcttagctaggctggtcttgaactccagaccttgtgatccacccgcctcagcctcccaaagtgctgggattacaggcatgagccaccgtgcctggcctaggattttttttagcacggccaaaaagactgaggtccaagaaccctggggaggccttcccatctcccacagccagcgcaggctctcggggcaggttccctgcgggacgtggaggtgtgtggggggcagaagggctcagggctttcaggcctgtgccctgtgtgagcctgcggggaggctgagagtggtccctcctggccatgtggccctgcggactcggcccattccagcacttgtcccccagggcctctcctcctgccactcgggtgacttgccctccggcctcattcctccccttgggtctctcctacctccccctccacaccccaagccccagcaactggacctcagggcctcacctctgtgctgtcgaccccgcaccccacttttccccaagtcctccccatctccctgcctgtctgcttccatcaccagggcttgtggaggttgtggagtgggtgccaactcccatcacgctccctcccatctccgtgcccaccctgtcctgcccctgtgcctgcctctgactgggatcaaagctttgtgagggagggaagggctttctccctgtgcctggaacgcacagggtgtgctggtgccatggagagccggtgggagggtcagccccacccgcctccgctcgcccctccagcaggccctggttgtgtgcgagcggcagcctggctggcattcaggaggctcattggtgctgcacgctgcccctggggaccagcgggtagccccttgcagccttaggtcccctccaggccctgggccttgaaggcacagcagcaggaaaagagggaaggagctttgctgacattttcctgaccttactttatcgtctttttcagtctcttctgtgctcatgatggcagcctttgcttctcgtgccttgaatggccctgggcagtgtgtgtcttctcttctgtcagggtcatttctgtttgaacggctgtcagtctgctcagctgccgtaacagaacaccccagaccagggggcttaaacagcagacattgatttcacctgttgtggcatcagggtgcccacagggttggattctggtgtaggcgcccttcctggtttgcggacagcgtctccgtgctgtgtcctcatatgatggagacagcgagtgagctctggtgtctcttcctcttcttaagaggcctcatttaccctgaatcacctcccgcaggccccatctccaaacgcagtcacactgcgaactttagggcacaaggatgcaggtgcatttgtgaggacgccacgtttcttccttcttcctttaggaagtgcccaccgcgtgccccgattggagaggggaccttctgcaggttgtgcaagaggcctttgaaaaagagcaggagatgcagggggttgagctgcagccccgactcagtggctcagatctggggggtcacagctccctgctcgaaaggctggagaagatcatccgtgagcaggtgagtgtcagctctgccaccaggcctcagtttgccccaggggtccagccctggcagagagggtgacacagactgttttgtgtgtgaatttcggtttgtgtgtttctctcgaccgctggaatgtggctgtcacttacccaggtgttgacgctcagtccatgcaggatgctgcacttttccacctgcagctgtaacaggacaggtgtgctcgagatgcaccctcaggcctcactcttttctgagataggtggctaaagaaacgttctccattccaagtagcccctcctaggttgagaggtgctctgtgtgcagggctgggtggcgttggtgccgtggggacactggaaatcctgttcctgccagcatacacgaggaaacctagtgttgagagtaactggcttgcaggcctcacgcagggtagtgcagcccagccctgacgcctgcaggccccagagctgaggcccagcagatactgtgcacccatcccagactcagcaggcttgtcccggcggagctggttttgagggcgggcagcagggaaggccggggcatggggtggctgcccaatgctcaggctgcttgtcccattgtgcccccagggagacctgcaggaaaagtccctggagcatcttcgcttgccggaccggagcagcctgctgtccgagatccaggcgctgcgtgcccagctgcgcatgacgcacctgcagaaccaggagaagctgcagcacttgcgcacggcgctgacaagcgcagaggcgcgcgggagccagcaggagcaccagctgcgcaggcagggtgggtgtcactgtctacactgcctggggcccggcctctgcacctgcccgcccgacactcacctgtgtggccttgggagcagagggtggtgacagggcatcatctagtcaagcccctgagtgttgccatggttgtcagctgataggactgagcagaaaggaccctggagacaggcagcgctgggtggggctggcacggaggcctcactcttgggcctgatgtgggcaagaggggcctgggttgggctctgagtgctggcagattcttgggagctcatgctagagttcaggaatgtctcgtaggtttctacatttaatttagcttcttcgggagtttttatgtagatgctcaggtcatctgtgggtaagtaacgattttttgtttcttgcccgtgttctctcacgtgctgtgccgtcagctgtgtgggcagatgccattccctgctcttagttttgggggcaggagctggtctcgtaccatcgcatgtggggtcaggcgcccttggtcagcttgggcaagtgccctctgttcctagttttggattccgtcaaggggaacggccttgcagttcagcccacggcccttgtcccggcgcccatgccctttgtgctctctggggctgggggccggcgctgtgcacatgctcgtgaggggcatgggtggggctggcgctgtgcaagcgcttgtcaggggcatgggcggggggtgccggcgctgtgcgagcgctcgtgagaggcatgggggggctggcgctgtgcacgtgctcgtgaggggcacgggcagggggtgccggcgctgtgcgagcgctcgtgaggggcatgggggggctggcgctgtgcacgtgctcgtgaggggcacaggggggccggcactgtgcgatcgctcgtgaggggcatgggggtggtgggccggtgctgtctgagtgctcgtgaggggcactggtctgttttctgttgtgcctttttggtcttggtgctgggtagcgccagccccacggggtgcgggaagtatttgggaagtagcccctccgccctccgttgtctagaattggggttatttcttccttaagttttgggagaattttccagtaaagccacctgggcctggagttccctctgttggaggcagtttagggtgtgagtgggggtgaggtggcatttttaggatggccccagggctatatcactcctggactctgtgtctcccggccaggtgggtgggccctggaaggaaatgggcccagagggcagaattgagcatcctggttccacccgcagtgaaagcttctagtccacagaacctcctttcttcccgaagcacatacacctcacgcccccacgagtctgtctctaacctggtgtcacttgtgcagcacgaggagctcatgggggcctgttactgttcttttgtctttctcagttgaactgctggcttataaagtagagcaggagaagtgcattgctggtgacttgcagaagacgctgagtgaagagcaagagaaggcaaacagcgtgcagaagctcctggcggcggagcagactgtagtgcgagatttgaagtccgacctctgtgagagcaggcagaagagcgaacagctgtcccggtccctctgcgaggtgcagcaggaggtcctccagctgaggtgcgcctgatcccccttcctgggacactggcgggagtccccccgttgtgccatgttttcttggtgatgaagggagacagaacctctggtgggccgcagttgggcagccccaggggcaccgcgccctgctgtccctgggttgataatcctgtggtggggggtgaagcacacgtgtgggacctggcagggctctgcctcccctcctggagctcccagcccccgggaacacactctggcccacgtggtcagattgttctgcgatgtctccacgcagatccatgctgagcagtaaggagaacgagctgaaggccgcgcttcaggagctggagagtgagcaggggaaggggcgtgccctgcagagccagctggaggaggagcagctgcggcacctgcagagggagagccagagtgccaaggccctggaggtaacagggtgtcagggcaaggcagccggcatgggctgtgtgcactggaagcctgaagccatgctcctctttcatccttcttttcctgttcttcatggcagtgcacccagttgacagcagtgtgacgtagcaggatagggctgtgtttgcaggtaaaattgcaccttggtgtagtggcagccaccacagggcgaagagtgcgatgacccgtggtggcacgatacccctgctcggagcccccccccgtccctgagcacttgctgtggagatggacacagcctcctcgctggcatccagacagagcacagcctcagaggtctgtgcacaaggcaggctggtggtggggcctctgctttgcatggcggaggcccagcaggcctgctgtggcttctgagcaagtctgtgccagttccatgggttatggctttcaacagcatggaagtggtggttcctagcaagctgggtgtgtatctctgagcctctggtggagtgattttctgaagagggggcaggagcctctggtggagtgattttctgaagagggggcaggagcctctggtggagtgattttctggagagggggcgggcaggggacatctctgaatcattttctggagagggacagactgggaacatctctgaacccaggactcaacaccatttccgaaaaaagtatgtcatctccgcagtctgggttttttgttacttgatgaactaacaaaaaaatgttgtccctacatgtggctaatagggtgcatttcaaaaggtagaattgctgggctaaagtatataaacaaatgtggacaggaaaaccatgtagacacttttcctcttgattcagtgtctcccatcgtatgtgtttgctgtctaggagctgcgggcgtctttggagacacagcgtgctcagagcagtcgactctgcgtggcactgaaacacgagcagacggccaaggacaacctgcagaaggagctgcgtatcgagcactcacgctgcgaggccttgctggctcaggagcggagccagctctctgagctccagaaggaccttgcggctgagaagagccgcaccctggagctgtcagaggccttgcggcacgagcggctcctgaccgagcagctgagccagaggacacaggaggcttgcgtgcaccaggacacacaggcccatcacgctctgctgcagaagctgaaggaggagaagtcccgggtggtggacttgcaagcgatgcttgaaaaggtgcagcagcaagccctgcattctcagcagcagcttgaggctgaggctcagaagcactgtgaggcgctcaggagagagaaggaggtaagtgccacactgaagtcgacggtggaagccctgcacacccaaaaacgagagctgagatgctctctggagagagagagggagaaaccagcgtggttgcaggcagaattagagcagtcacacccacggttgaaagagcaagaaggacgcaaggctgcgaggaggagcgcggaggccaggcagagcccagcggctgcggagcagtggaggaagtggcagagagacaaggagaagctggtgagagccgcctgccggcggagcgtccacacctaaaaacgataagcaattggagttaggatggttcacgtgggggacgcgagatttatgtctggccctctgacctggtctgctctggtctgtgtgccctgacgctggcaccacactgctgttactgtagctttctagaaagtattgaaatcaggaagtgtgagttctccaacttcgttcttcctcttcaagatagtttcagctctgtggggcttcttgctattccacaggaatttgaggattggtgtttgtatttctgcagaacctgccactgggattttcttagggatggcattaaatgtgctgattgctctgggtagtattgacatctggacagtgtgaggtcttttgatccacgattacagaatgtgtctcttcatttaattaggatttttttgagatagggtctggctctgtcacccaggctggagtgcagtgatgtgatctcagctcactgcagtcgccgcctcctgggttcaagcaattcttctgcctcagcctcccacgtagctgggactgcaggcacatgccaccacgcctggctaatttttggattagtagagacagggttttccatgttggccaggctggtctcaaacttctgacctcaggtgatccgcccgcctgggcctctcagactgctgggattacaggcgtcagccaccacactcggctgtttacttaggccttctttagtttctttcagtagtgtttcattgctttcaaaatataagttttatacttttgttaaatttatttacttatttattttttgagatggagtctcattccgtcactcaggctggagtgcagtggcacgaactcaacaatgttgaatagaagggatgagagcaggccgggcacggtggccgatgcctgtaatcccagcactttgggaggccaaggcaggcagatcatttgaggtcaggagttcaagaccagcctggccaacaaggcgaaagcccatttctactaaaaatacaaaaaattagccgggcatggtagtgtgcacctgtaatcccagctattcgggaggctggggcaggagaattgcttgaacccgcaaggcggaggttgcagtgagccgggattgcaccgctgcacttcagcctgggcaacaagagcgagactccatctcaaaaaaacaaaaacactctttggaatagtcgtagttttttttatctccagaagccttggagagtagggaggtggtttggtggtacagacagtgtggccaagcatggcaggggcgtctacacaggaccccagctgagggtgagacgtggtgtgtgtgtttgcctttctcctgggcaagagctcatcctttgatggaatgctcaaaggagtctttactttttgagaacttcctgaaaccacgcctgaagttgccagccaaaacctttaattttgattgtttcttaaaaaaaatagtaacatgagtgcttagaaaatattttctaagttgcttgcttcaggatgcatcttgacctgtattttgagtgaggtggcccttccagagtgatttatttattaattttttttttgaggtagagtctcgctctgtcttccaagctggagtgcaatggcacgatcttggctcactgcaacctccacctcccgggttcaagtgattctcctgcctcagcctcctgagtagctgggattacaggtgcatgtcaccacgcccagcccagctaatttttgtatttttagtagagacggggttttaccacattggtcaggctggtcttgaactcctgaccttgtgattgatccgcccaccttggcctcccaaagtgctggattacaggcgtgagccactgtgcccggcctccagagtgttttttactgaggatagtgaatttgatctggattatagaacccttctctagctgtagccatggaagcctcccaagatagtggcatgctggatacaattccatcttttctaaataatacaatctcattagttcctctgtatcttactttccttactagaaaatagaaaagatactcattcctgtttaagaggcccgagcattgagtgaggcgctgtcaggagggtagagtctgagctgcaccctggtcaccgcagtggcaggggcgctggtgccacacagtgcaggctcagctgtgggtcctctgggctgggaaggcctcagctcagtgctggggttccctccctgacacggcaagccgcctctgtgtgtctgcatcttgggcctcttcccgctggatctgtctttgtgttgtcacaaggaagccccagcggcgctgctgggaatcagaggcccttcagaggctgcttcgtccttccttgccccatcgtgcagtagaccttctgtcccctgcctggtgggagtcgggccctgggcaggggctcaggcgcttgctgacacgcttctcccgggcaccagacatggcctgtgcccccgtcctgcagaaggaaaggctgctgctccttgaggtctggcttaggagctcaggcccacgtggccacccaggctcagccccagggctgcactcaggctcatacgtgtgtgcatgttcacatgcacaaatgtgcctgtctgtgtctatgttggtatgagcgtctgggcgtgtgcgtgtacatatgtggatgagtgggaccagggcacagggaagcgtcatccggtctgttctgtttcagcttctcaggctcctctcctttggaccccgcgtgcttgccctgggcctgatgaaagcctgatagttttaaaaactacgatggaaacgcttttaccactgaatcattctggggtgtgtgattcagctgcctccatgctggagggacacagagcagcacagcacgagggtgtgcagtgtgtcagctgtgggtcccagtacaggaccacaggggctgcctgcccgagggcctgtttctggtctgtgaggggcctcccctgtaacgcggctgtgtgttttgggcttttgcttggcagttgttgttttttttgttttggtttggttttttttggtagatggagtctcactctgtcgccaggctggagtgcagtggcgcaatctcagctcactgtaacctctaccttctaggttcaagtgattctcctgcctcagcctcccgagtagctgggattacaggtgcgcaccaccacgcccagctaatttttatatttttagtagagacggggtttcctcatgttggccagactggtctcgaactcctgacctcaggtgatccgcttgctgcagtctcccaaagtgctgggattacaggcgtgagccaccacaccctgctggcagttttgtgttttgttttgttttgttttgtttgagatggagtctcactctgttgtccaggctgaagtgcagtggcgcaatctcggctcactgcaagctctgcctcccgggttcacgccattctcctgcctcatcctctcgagtagctgggactacaggcgcccgccaccacgcccggctaattttttgtatttttagtagaggtggggtttcactgtgttggccagcatggtctcaatctcctgacctcatgatctgcccgcctcggcctcccaaagtgctaggattacaggcatgaaccaccgcgcccggccggcagttttgtttttggacactgacgtgaacgtcttctctgtcttttttctgttaacaacagcgagaattagaactgcagcgtcagcgtgacttgcataagatcaagcagcttcagcagacagtgagagacctggagtcgaaggacgaggtgcctggcagccgcctccacctaggttctgcccgcagggctgccggctcggatgcggaccacctccgggaacagcagcgagagctggaggcgatgaggcagcggctgctctctgccgcccggcttctcaccagcttcaccagccaggccgtggacaggtgtgcacccacgccacctggcgctcactggtcccttgcagccacccctctgtcccagacccggcccgagggctggggcgcgtctggtgtgaggcccctgctcctttgcacttaacgctctagtcctctttctgagactttgctgagggattccggattggcaagatggcatgttcatattctaatgtcagagaaaaaaatcctgtgattcaaaatacgcctgacgtggggcttccatgttcctttgagggttggcttggttctctttacactctgtgtagttgctcaccacccacagggtcgggtttggagcctcctgtggccccccccccccccccccgctggcactgcccagtgtcactcaaggccactcacacccaggatgacgatcgtgatatttcatatgggcagaaagggtaatgctaatgtttgtctttttccctatacacagaaactcggcaaacacagttctcctttctatacttggacttaatgtatagagcagcatgatttctaagcaaagtttcacttaggacagcattttaaatcattcattccagaggaaagccacggggcctggcaggcggtggcttcccgtgctcggtggcgcgcctcccggctggaggtttctgagctctgcagaagcgtccagccacaggcctgttgcccccgtgggcccctggctctgcctcacggctggacgaagtgattcacacacaggctcctcagaaacctgtcttgtctctcttgagccgtgagctcttgtttagttttgcataatggtcacttggggcgcgtatgcaactttgagtgcccatttatttttacaggacagttaatgattggacgtcatccaatgagaaagcagtgatgtctttactgcacacgttggaggagctgaagtctgacttgagcaggcccacctcctcccaggtaaggggtgagcgcccccaggtccctggcctggctcctcccccagaggggccctctcggcagctttgtggttctttttcacgcttccccattgttcttcctccctcgctgccttctctgaattcatggttgctatctgggtgagtgggtggggtcgaccctgtgggccgagtggggacggatgtcctccatgtcctggggcacttgtgtggtcttcgggggctgagccctgctgccatgggatgctgtgtgactgtgtggtcttcgggggctgagccctgctgccatgggatgctgcgtgactggtagagccccctcacatgctgctcgctgtgcatgacctggacacattgcaggtcgctggtcaggaggggctatggttctgctctggtgctggcggccgatgttcacctccacctggcccagcctgctggctttgtgtttgcgttgacggcctttgctagaaacaaaaacccaagtcctccttggaaagtctgagctcactgtaagctgcctctgaaggaggtgggaatctggctgctggtataaattcttgatgtgtgttctgtggcatttatgaaatcatgactttgatcgtggagcccacgcatgtgaggtgcaggggagctgcgccgcttaccctctggccccgccagctgaacgtcgttgtgggtggggtgcaccctgccccctgtgttgggccctggtgacctttcagcgtgcccaccctccacaggctgaacgtccttttgatggtggaagtaataaacctgttttgaggggcttcacatccgcccccttgggatgaactaacaacggtccagccacctgttaatttcagtgctgttagaacaaccaaacgggctatgctttgtgacaggcctgcgttgttcatacaagccagttgcgtgcaaagtctgtgattcaatgacttttacaattttctgccagctccacaagcttctcattgaaccccagacacattaattacaatccctaaaaataactgttgacaaaaaacacaagtaatgttcatgccctttaacaacaaattcttacaaatttattttcttttctccaagaaaaaaatggcagcagagctgcagttccagtttgtggacgtcctgctgaaagacaatgtttccctcacaaaagcgctcagcacggtgacccaggagaagctggagctgagcagagccgtgtctaagcttgagaagttgctgaagcaccatctgcagaagggctgcagcccaagcgtaggtgtctgtgcttaactcttacctgcctcagcctaacccaccatggtccagagcagctccaccccacaagaggccgggctccctttagggacctggggatgtgggcgtcaccttctccctaaccgccaggctctgttgcctctgtctgaagccttgctaaatgttgtgggatgtttgaacatctcagccgacttccagctccgccacagacggcgtcctcactgaccctgaccgctacttgatgtttggtgcatgttcataaaagggtattttgactaagaatattataatctgatctaatttagagttttagttaaagtgatttataatttttttttttttttttttttgagaccgagtcttgctctgttgcccaggctagagtgcagtggtgcgatctcagctcactgcaacctccacctcccaggttcaagcaattctcctgtgtcagcctcccaagtagctgagattacaagtgcccgccaccacacatggctaatttttatatttttagtagagatggggttttgccatgttggccaggctggtctcaaaatcctgacgtgattccgcccacctcagcctcccaaagtgctgggattacagacatgagccaccgtgcccggcctaaagtgacttataattttcataatggtatagttggatagagttatcttccggaatgtctcatttttttttcttttgtatttaggctattttgtttgtgatttgctttattttttataactttttaaaaattatttttaaatttacatacagtaaaatttgccctttcctggtgtagtgtcatacaagttcacacacacacacatccctgtaaccttcataagtaaccaccattcacagagcacacagcgatggcccccccaaaaagagcagcaggcatctccgcctgccacaggccctggctctctcccagaaaggtgtgtcagtggaaccagcccgtctgggacctcctaaactggcttttttcactttttgggttttttttctgagacagggccttgctgcatctcccaggctggagtgcagtggagcagtcacagctcacttcagccttgacctcccaggttcagggatcctcctgcctcagcctcctgacctgcagtggtgtcagcagcaacctgtgcacgtcctcccgtacactcttaagtcatctctaagatcacttgcagcacctcattcagtgtaaatgccacgtaaatagttgtcatcctgtattgtttagggtgtaggggcaagaaaagaagcacacgtttggtacagacacatcgttttttctgaatatttttcacccacagttggttgaatccatggatgtggaacccacagctgtcgagagttgactgtgcttgtagttaccagtggttggcatttctaggaccggagaatatgagagtgtttaaggcttaaagctttgaatttggggtgattttacaaagaattggttttctgtttctgttaaaatgtaccttttttgcaatcatacttcagcaagtggcatgtcgtaattactccatgttaattctttggctgatcacagcacggcgtaacctaggccctgctgagggggtgctgaagttgaggaggggccaggtgtggtgtggtcagcctggcctccccgcacatggccttctccctcacctgcccccggctgcgtctctaagatgctcttgttgacgagcagctctgtagacagcgctggctgtgcttccttacagaggtcggaaaggtctgcttggaagccagacgaaacggctccacagagttccctgaggcgcccagaccccggccggcttccaccagctgccagcgaggaagcacacaccagcaatgtcaaggtaggaacggtgccacgagtatagaactttggtgcttttttaagtcctgggtttgcaaattgcaggcaaagcatttttgtgaccacaaggttctcgtctgccgggtgtagcagtcacatcactaaaggaaaggacgttcacagaataaacttcggcttgaattttgttttaattgtgcacaaatactgagtttctgtgcttgttaagcgtggaacgtggaaggctttgacaaagtcagcaaatggcggcctctgcagcctgagggaggcctggcccaggggcttgccgggattcggcccaagatctgctgcagtctcctgatggcacacggtccccaccccgtgacgtccatctcatgcccagtttggaccttacctaaggggtgaaatgcaagaagcttcataggggctcatttgatgatgctgtggagaggagcttgtggtcctagatcttgtctgacaaacacaaattgatcttccaacagcaaggttgtttctggccacagatactgttggaaggccgatggctctgtgatgatttgatgggaaaaaacaatctgactctttggaaagagcaatggtgttaatgtgcttttgtcagcaagacagtctttgtttcctatgataaaattttactgctttttttcttttagatggaaaaattgtacctgcattacttgagagcagagagctttagaaaagctctgatttatcaaaagaagtatcttttgctgttgattggtggattccaggattctgaacaagaaacactctccatgattgcccatttgggggtatttccttccaaagcagaacggaaaatcacatctcgtcctttcaccaggttccgcacggccgtcagggtggtcattgcaatattaaggtaaatgccatgacgttcagtcagtgcgttccgcgtctgtctccgtgagtgggcagcacactgcatggttttttggtcattttattccttgaaactccataatatgttctttttaaagatgaatggcatttgaggccttagagaaaatacagatgatgaacttgtcttcaagaagtcatgtgtatgaatctctcaccttctaaaactaaagatttaagggcacctttgtattacagaggaacatcttgacttttaatgggtttcgtgccacaaagaacgtgctgaatttctaaaactgtttttccccctaaacactgtgcggctgtgcctgctccctgatgccacagaggtgtttcccaaggccacgcgcgggcctgtctggagtagcagatgcagcagagagcagctaggaatcccgctcctttcagagaccaggtgccgagccagttcagtcatcgcggctgcaggctgggccaaagtggggtgcaggcgaggcctcctgggttgctgtactctcagcttctctggtcctggggcactttgtctcctcgtctctgagctcccctgaccgtaggcctccaccgtccatccttccacccacccatctgtccatcctgtgttcatggggagaacaccctgcaggaggaagcattttaggcactagataggggaggtaagcagacccagatcctacctcctgtcgaggaggggagatcttttgaaggcagtggtgtcccagaaaggagcagtctctgtgtccctgtgagggcactgcctagggtagctgccaccaaggggccttgacaggtcttatggaggaatcggcagtgtctgctatgcctcaaaggagggaagccacaggcatgatgcttgttccgaaggccatcctagcagggcgtctggggccctgcacactgacctgcatgccctcgtcacctgcactctgcatgctcaccatctgacggactcctgcgagggctggggtctccgtgttctgagcctgtccagtggcatctgtgacaggatgaagatgggagggtcctgcacaccaggcgggagcggcatgtgtttcctagtcactggtgtggccggctgactttgaactggagtcgtcctgagctgggccatggtgggtgtctaggggaccatatggtccacggtggggccgcagtgaggctttgtcaggtggttgggcatgggaaggtcgccgccgccggcagccctgcgagcactttggatgtgtgcacccggcatgccaggcccgagtcaacagactggccgaccttggcgtcctggtccccatgggcagcgaggcccccattctgcttgtttggtcacagtggggttttcattgctctttcccttcctgtcttgccgtacttttaagtgtgtcttgtctcttttttttgtagattacgttttttggttaagaaatggcaagaagtagatcggaaaggagctctggcacaaggcaaagcccctcgcccaggtgggactccagctgctgttgaccgctggactcacaaacctttctttctactcttgtttttcattcactttgggtcatttttcagtgttgatggggacgtaataaagcacggtaagaaaatccgtgaattccgtcagagcagtcgtccagagggaaggcgcgcccggcgtagggaggtcagagctcatgttagctatgaacacaggtcacaggggcgtacggcgatgggaaacactgagatgctcaatatattgattatttaatagtgtttagcaaaatggtctttttttattccttaaatcaactgaaactcacttcacgtctctttccttgtagagcatcatgcttatttctggctcactcacatctttgtctcgggagttctctgccgagccattgccccctacagcagagagcacagctggctgcactagtgctgaaggagccagccccagagcagggcatttccaggggctcttgtcccagagcggcaggcgttgtgtgcagagaacgcccctcccacgcagcacagagaacgcggggtgggtgtgtggctccgggcctgtggggcttaggctgcctgaaccaccgccgactggcaccatgactcggcattcctggaagtgccttaccaagttgttgttgttgttttgttgttttttaagagacgggcttgctctatcatccaggctcgagtgcaatggcacagtcacagctcactgcagccttgaactcgtgggctcaagccatcctcctgtgtcagcctccccagtacctgggactgtgggcatgagcactgcgcctggcagctgtatcagtgttgactccacattttaatagttgcttcttgaaattaaaatgctttgattcagccttcaagccatcaggaaagtttgcccctctgagtcacacctggtggtctccagggttcctgcccctccctcctgagccagctcctcagagcggatagaggcaggacccccacccaggtcttgagacccccctgccccgcactcccccggagacgggctacccctgcagatgcagatagtcaaagctcaggtttcttccaaagcttttaaaaagatattgtaccttgagcactttaaaaatgtcttaaaattgccatacaggctcttaaaagcttatacgtttaaactgttgatagatgggcctttactaaaatgcattcatttattttcctaatcccttggttgttaaataattctggggaagggccccgagcacgacagccgcagtctccacccagaaccagagagtcccccccaacccgggatgtaccctctggccacaccagggaccctgccagaggccgcagactggcagcagcagcctccccacacagtgggggaaggtcagtgtgatgccttcaggccccgtctcctgccagggctctccctccagcctacatagggcctcagagaaatgcatttttagttctggctttggcccagcccagggcaaggcaggaaactctccagcgtgagtccgtgagggccaagaagtcccgccctgttctgggggaggacctggcttttctggtgtctctggtgcccgagagcccggtgctgccatctttagtgaaagagtaaatggtggccgagggctccttttgtgagggatgtgccttggtgaagaaggcatgttccctgccgtgaagatacttggaagctctgggtggagagggaaaagggatacccctggtgctccctgggcctggcggaaggctaggaggaaggacagctgaggtgaggactgagtggggcaggtatcaccctgacaaacagtttgggaagatcaggaaaggcaggtgagacctggtgcagaatccaggttgggtaatagatacatcgtcgaagatgtagcaagcaaagtaatatactcaactctggaacattgcacagaagcttttaaagcactctgtgacactttttgtaatgagggatctgaaggaaacggccccagagtcacccatccccacgggtctggttggcggggctggtgcctttcttctgcactcagtcaccatggctccgtctgtcaaactcaactctttttttttttttttttcttctcttggtgtggtaatttgtttgaagagccactccatccccaaattcaagattagaaagatccctgactgcttctcaagatccagaacattccttgacagagtatattcaccatttagaagtgatccagcaaagattgggaggggtactaccaggtaatgcaagtcctcgccgagtatttattaagctgattatcactgtaccctggaaacgtagggtctgttgaaagatggctggtattcagcttagtaaccaaagtttcagtctgaacaatcagtgtcactaatagtattagaatagaggctacaagtgaagaatctcacagaagtctaagccagtgtactcagtgatacgtgctgaggtcagtttgacttaatcaccgtctggacttttttgtcctttctcttacattgatagcgaacataaagattatatttcgaccaggatataatttgttcagtgtttcttaaatatcataatttaaaccactgtataattcatatttttaccaaaatttacatgaattcagtgatagtgtttcaaaattgtggaattcttttcaaaaaatctgtgaagccttgtaaccaatttgctgcctcatttttatttatatgcagattctacttcaaagaaatcctgccacccgatgattaaacagtgaataaaatgtcatggctctttcctgcgacaattctatttgaggaaaagatttgtttttcccttttcccaaggaagctcgtgggacagcatgggcactactcttcatgtgcggtgacaccagcccccagatgccttgaattaagtgtcctcacctttatgcatgactgcaaagccagctggagcattttctatggagcctccgtatgttttaggcccatgaccttcgtgaggtgacgggcactcactcccatgagccctggctgtgtgctgttgtgtgcctatcggcagatccatccttcctgcctccaaggaggatacacagagaatggcttcctgttgttttgtttattttcttaacgtgtacagatggaaacttcatttaaaaataaaaacaaaacaactcaaaaaggaataaaatttaatcactgttttgtttgtgaatagcccttgtgttgttttttttttccattttatccattttatcagtttgcctttctcactgactaaaaaattgagcagagagtttatgttaaactcgtaagtcaaaaattttcagtggaacccggagcattcttgaatagccacttgactgttgtttactcttacttggtttcttatttttttaaagatgctgccactatgtatccacctctcatggccatgctttttgtttttgagatgggagtctccctctgtcacccaggctggagtgcaatggtgcaatctcggctcactgcaaccgccgcctcctgggctcaagcaactctcctgcctcagcctcctgagtagctgggattacaggcgcccaccaccaggcccagctaatttttgtatttttagtagagacagagtttcaccatgttggccaggctggtttgaattcctgacctcaaatgatccatcctcctcggcctcccaaagtgttgggattacaggtgtgagccaccacgcccggctggctgtgcttttttatgtttcactcatactcgcttagactagacagtaatacctagccaaggaccctttatccaaaaatgtactagatgggtataatttttttatttttagagacaaggtctcgctctgtcacccaggctggagtacagtggcacaatcacaactcactgcagccttgacctaccaagcccaaatgatccgcctgcttagcctcccgagtagttgggactacaggtgcgcaccaccacgcctggcactaattttcgtatttcttttagagacaaggtttcactttgtttcccggcctggtttcaagctcctggctcaagcaatcctactgtctctgcctcccgagtagctgggagtacaggcacgcactgccacattgagctagttgttttttgtttttttttttttttaagtagagatggagtttcactctgttgcccacactggtcttgaacccctagcttcaagtgatcctcctgccttggcctcccaaagtgctgggaatacaggctcaagacactgtgtccagccctaacttatagtttattgaaggaaaaataaatgaaaccatgaggaaaaagatgaacatgggctattctacagttaactgccctcgtttcatcaaagacaatgggacatgaatgtgaggagcctgttctagcttgaagccaagaagctgtcagccgggtgtggtggctcacacctgtaatcccagcactttgggaggtcgaggtggccagatcacaaggtcaggagtttgagaccagcctaaccaacatggcaaaacccggtctctactaaaaatacaaaaattagccgggtgtggtggcaggcccctgtaatcccagctactcgggaggctgaggcaggaggatcacttgaacccaggaggcggaggctgcactgagccgaaagtcctcggtaccaaaaggtgccagtgaagacactagattgcagataaggatgttcctgttttcattgtgtatgagccacccagtttccctcaaaaattgggatcaatagcaccagttagtgcagtaactccatccctgggtgttggctcaggcagcagtctcaactgctagttcaaagttcaaaataccaccattgtcgtacctggtagaagcagtcctcccttgggacagtggagttcagagttacaagatgagaagcaaaaattccttctggggttacttggcataacagtaagaggggccattcctatctgcagcccttaggtttccaagccagcatatgctggctgtgggagaagtagcactaggtattgttcagttaaagcctataccacatcctgtattataacatccatattgacagggcattgtctccaatctggcatcataactgagccttcgggaggcctttccaccatccactaagcaagctacttctgactgataggagtttggggtaagatgagggcatcgtacaaccacatgcttagagccacacttgctctcagaagagttttctggttagaagcgatgatgaattaggaatttgggaagtctgcaaatgagtgttgggcgggaaaagcaaattcatatgcagaataggaatggatagatgcagggggacagcagagctggagaactgcatgggagcctgggctaccgttcatgctgcctgctgccgcctccctgacctgctggaggcttgtctccttttctaacacgagctgcctgtcctacagttccattctgacactacctagagtcagaatggacacagttcccacaagttaaggacaaagtccttccatttttaattaatttatttttgtagagatggggggtctccctgttgcccaggctggtctcgaattcctgggctcaagtgatcctatcttggcctcccaaagtgctgggattacaggcgtgaaccacagtgcctggcctaaagtccttcaattctggtactacctggagtcagcacagaccctaaaagctaaggactcagtctccacgtcagacgtcagccacaagtggtgtttccaggctacccgcaattctgcccagccaatttataagtttgtggggttttcagccccacccctgtaggtttaataatttactagaatgatgcaaagtactattcttgggattaccagtttattatacagggtacaacaaaggaacagccaaatggaagaggtgagcaggacaggtatggggctcagagcttctgtgtccactgcaggcgtgctgccctcccagcactatcgggggaacccatccccaatatttcaacgtaggttctttctattttccctaagtgtcggccagtctgagaaatagagtacaaagaggaagtttagagctgggctgccaggggtgacatcacatagtggtaggaccgtgatgcccacctgagccgcacaaccagcaggtttttattaaggacttcaaaaggggagggggtgtacgaacagggagtaggtcacaaagatcacatgcttcaaagggcaaaagggagaacaaagattacgtgcttctgaggccaataaagatcacaaggcaaagggcaaaatcaaaaactcctggtaagggtctatgttcagctgtgcatgtattgtcttgataaacatcttaaacaacagaaaacagggttcaagagcagagaaccagtctgacctcagatttaccagggagtggttttttcccccaccctaacaatcctgagggtactgcaggagaccagggcgtatttcagtctttatctcaactgcgtaagacagacactcccagagcaagcatttatagacctcccccaaggaatgcaattattttcctagggtcttaatattccttgttaggaaaagaatttagcgatatctctcctacttgcacgtccgtttataggctctctgcaagaagaaaaatatggctctttttgcccgaacccacaggcagtcagaccttatggttgtcttcccttgttccctaaaatcgctgttctgttcattttcaaggtgcactgatttcattattgttcaaacacacgtttttttttttttttggtttgtttgttttttgagatggagtctcactctgtcgcccaggctggagtgcagtggcgccatctcagctcactgcaagctccatctcccaggttcatgccattctccttcctcagcctcccgagtagctgggactacaggtgcctgccaccacacccggctgattttttgtatttttagtagagacgggttttcactgtgttagccaggatggtcttgatctcctggcctcgtcaaatgcacgttttacaatcgatttgtacagttaatgcaatcatcacagtggacctgaggtgacatacatcctcagcttacgaagataacaggattgagattagacaggcataagaaattataagagtattactaggaagtgataaacgtccatgaaatcttcacaatttatgtccctctgccgcggctccagccggtccctcggtttggggtccctgacttcccgcaacacagcacaacccagaacctctgtaagcctcattggctaagagtttttatcaaggcctcattacatagtcatgatggattggattattgatcacatgattgaacttaaactccaaccccctcccctctccagaggtttgagggtggggctgaaaatcctaatcctccaatcatgtggttgggtcctctggtgtccagcccccaccttgaaggggccccaccacaatcacctcaaaagcctgaatagaaaacttttaatgactgcacctgggatggatgcctgatatggtttggatctgtgtgtctgcccaatctcatgctgaattctaatccctaatgttggaggtgggacctggtgggaggttactggatcatggggacagttcctcgtgaatggtttaacacctgggtgctgtcctcagacagtgaatgagttctcacgagatctggttgttcaagtgtgtggcacctccatcctctctctgcctcctaatacagccatgtgaagtgccttgctccccctttgtcttctgccatgattggaagcttcctgaggcctccccaaaggaaaagccactatgcttactgtacagcctgcagaaccgtgagccaaatatacctcttttctttataaattatccagtctcaggcattttttttttttagatggagacttgctctgtcacccaggcttaaatggcacaatcttggctcactgcaacctccgcctcccgggttcaagcaattatcctgtctcagcctcctgagtagctgagactacaggtgcacgccaccaggcccgactaatttttgtacttttagtagagacagagtttcaccatattggtcaggctggtctcgaactcctgacctcaggtgatccaccggctttggcctcccaaagtgctgggattacaggcctcagccaccacacctggcctcaggcatttctttatagcagtgtgagaacaaatacagtgcctcacagagagatgctgattctcaaaacccaacaataccaccttgcttgcagacccccaagactctgatcccaatacagcccacagaagcatgaggcataccataggaggacagcctatacacaaatcattaaactggacataaacagcattccactgaaactggaaataatatacacaaaactatgcctgaacagattcagaaggcataagtatgtgacccaagtgagtgaccaaacacatgctgccgcctcttctacttcacacccctcagtctacatctgtggtttcacgggacgctccctaggaccagttgacagaagacgaaaaaatacaggtttgttctaccaacggatccatacggtatggtggcatgaaccataaatagttgctacactagtgactcacacctgaaatcccagcactttgggaggctaaggcaggcggatcatgaggtcaggagattgagactatcctgaccaccgtggtgaaatcccatctctactaaaagacacaaaattagccgggcatggtggcgtgtgcctgtagtcccagctactcgggaggcggaggcaggggaatcgcttgaacccgggaggcagaggttgcagtgagctgagatcgcgccactgcactccagcctggaagaccgagtgagactccgtctcaaaaaacaaacaaaaagatggttgctacactacaacctagtttagggttggatttttgaagatttccagctggcaaaacttgggagggtacagctggtggtccatcttatgtggaaaggaaggtgtctgaatttactgatctgcaagcattcccatgcagttacgcactgtccagctggtcaataacagaaagattgcaaagaacggtttcaaggaagtcttcagtgccgggctcagtggctcatgcctttgggaggctgtgcctttagcatgctgtctcagcgctctgccaggcaggagggcccatggacactacacttccttggctataaagtgaatctcgtttgaaatgttgtgtgcttatgtcagtgaaacaaacactccttaagcctttctggctgacacttgtgagtaggaaaagacaagcctcgtatctggaatatgagactattcttgtgaaaagtgaaccaccagcccttccaggatgggagagttccaatacagtaaactctccttataaaatggggactatgtctaaagacctctgtaaacctggatgtttgtgctccttgatgaagtgacccacaatgggagtatagcactggtctcttttgctggcaggttagatatttaggggcagctagatattaaccaaagccgggtagatctcttttgctggcaggttagatattcaggggcagctagatattaaccaaagctgggtagagagcatgggttgctgtcaggcccatgaacagcgtccatcaccttggctaccttgtccatgtgcccatcatgccagtagtacagtagccaataaaagatgctgtccaatatcaactggctgagtcaactgtctacttggttgtataatgcttctttcatggatgctctctggtgggcattaacattgtatacaaagaacattgtacttcgtgctattccaatttatctgaccacataaatctaccacacacctccttatctccaacttccgattgttttccttccaggcccttaaccagttacccaggccctctagcattgcccatggctccatgtatattctcaccttgggctacttcttccacaaaaaagtggacgaccaggagctctgcctgaaattctgcctattgagaggatatgcccttatcaccatttttcaaggtcacccctgagaaggctgtaatgtagctgctattttcattttgaactcatactgagccaacccatttatacaccatgctcacgatttttactcctgtcaactggctataagggccccctcacactgtcacaggtgtgaaatgacattgtggctgatccaacagttctggaagtcatgtgcatctgtgctctgcagctcatttggtaacctctgtacattctcatgctcaaccttgaatatactacttccatattatgagggaccgttgctggccccaactgatgttatgacttttgctagtttaacattaacaggcagttctggttgcatggtcacctggtggcttacggtcaggcgttccatctctgtcagagacaagtggcataccagaagacagatctacacccgcccgccccccaaatgcatacaattctctgctccaggtggcatgacagaatctctacattgcatcattctgcaccattaataacaccaaaaaaacacctgttggactatatggcccaggcaatagcattacttcatcacaacccggatctactgtacagacgtttccagttctgggctctttccaaaattggaaatctcccaattccactagtctctggaccagagcaatactcccaggtgtgggacatgctgcctccagaacctgaggcaagaactagctcgagaaccaacaagcgtcttgctttcttaacggcaggaggtgcaagcagcaataattcattcgcttttggaagggatgccctagagcacccctgaccactggagccctaaaaatgttaggattgtagcaggctcctggattcctgtagggtttatatgccactctctggagcagctgtctccaggatcttctgcacttctcatctggctgatcaacatgtcactgatgtaaaggaacaatgtaatattctacaggatgtctaggtggtccagatctctttggattacgacagagagcaagagaagtaacataaccttccggcaaaactgcattttaattccatgcaaatgcaaaatgtttttgatccctgataggtacagaaaagaacaaatccacctagtcaacaactacctaccatatctggcagagaggctattacggatactttttttttttttttttgagatagagtctcacactgtcacctgggctggagtgcaatggcatgatctcggctcactgcaacctccacctcccaggttcatgggattctcctgcctcagcctcccaagtagctgggattacaggtgcacaccaccacacccagctaattttttgtatttttagtagagacagggtttcactatgttggccagactgaactcctgacctcgtgttccgcccaccttatcctcccaaagtgctgggattacaggcgtgagccactgtgcccggccagggatacttcttagatgagtttgcagcagtgtacccaaaacaactactggttgacagcaaatagagtaggctgccattctccaggatccttgtgacttctgcaggggtcatgctggtaaattaaaaatgttggtaaccaccactttacatcacttggatccttagaagtggcacttatctctgccattcccgctctgggataattgttttataatcttggtaggggatggggcagtttcaggtttctgtttggctttttccattttgttatctaactctataggtcagggacctggaatgagcattcactgccaagtatgtcaatgccaattactcactcgaaggctaagaaaatatcactagatcagtccactaggtctacgggtccactgtaagctggacctttagcagaactccatcaattacctggccaccacatgcagccactctaacagaaggggatgatattctaggcatctggacatcaatttagaccctgtgtccacaagtcttccaaatgtttggctaatcacttttctccaggatgtagttatcaaaagaaattgctatcagaccctttggaaaagtacctggggattcatttctgttgtacttgtactgttataggtccttcttcctggtgtttggccacctctcaagtaatgtttccatttctgaaaactggctcagttccagaagctgggcatggaatcctgattttttaaaactgggacaagcatctttatttatttttttcaattgagacagtcttgccacattgcccgggctggagtgcagtggtgcaaccacagctcactgtaatcttgaactcctgggctcaagtgatcctcccaccttagcttccccaaatgctgagattacaggcacaggccaccgtgcctggatggatttttttttttttttttttttttgccagctgagtagtacccttcttagctgcccacctgttttgcctccagggatgccatgtttattgaccagttctataaccatacaagtgaggtccccttggctgccactcagaccctgctggctgctataattgcaatcctctgacttctgccagctaagtgttgcctttggcttcttgggtttttttctttggtccccactatgtcccagaatggcctcttttgtcttaggatcctatcatccccagtgctatcacccagccaagttctggaacagcctttctattgtcattcttgcctacagagatgagccatcactgaatattttagtgacatcagtgcccctttcatcatcctatgtctaatgatctttataaatgacgtgttatttacaccttcatgtggaatatgatcgtctcaaatgtcttctagatgcacggagtatataaatttcaacatgcccacacccctgaaccttttactcccttccaccactgtctgccatagcaattttgccatttcaattttgcttaccatggcccatggctttttccaagtgtggtgttttaaaaatatactggcaaattttttgatattcttccctttagaagatgaagcctaattcctctccttttgaatatgggtaatttagtgactcatttcttccaaataggaagtagccgaagtgatggtatgcaacttctgaggctggttcacaaaaaggatacagctttcttttgtcctttgtctttagattgcccttggaatccagccatcatattgtgagaaagcctcggccacagggaccggccgtgtaggggtgtgctggctgacatccccaatctgggctgcagccaatctccagtatcagctgtcagacattcgagcagatgaaccttcactcattccaacctctagcctctgaactgctccagctgaggcctcagacactgtggaagagagataaccaatccccactatgtctgacccacagtaacctagagagatcaccgatccccactatgtctgacccacagtaacctagagataagaaatgattcttgttttaagccacgaagtgtggagtaatttgttaggcagcagtagctataccgccattctaggagccatccttgcaggaagtctgcagccactctttgccaaggtgttaaatcacgtatttcaataaacacatctatgcaagtttacattccagctcccttcatcaagcaccctcataatccagccccaaactttcccagctcctgtcagtacatgttggctgggtggtacagcttgttatgggctgaagtgtgtccctctcaaaagatgctgaagccctaacccctggtcaatgtgaatgtgacattatttggaaatgggtctttgtagacaagttaagatgcgctcattagagtgggccctaatcagtatgactggtgtccttctaaaaagaggcccatgtcgaatgacctttgtcaatgatgttacttatgccttcgtctggagagacacacacaacaagatcaccatgtgaatataaaggcaggactgggacaatgcctctataagccaaggaaccaaagactgccagcaaaccaccagaagctgggagagaggcatgagacagattctccctcccagccccagaaggaaccaaccctgtgaaaactttgatctcagacttctagcctccagaactgggagacaataaatgtctgcccagtttgttactgaagccccagcaaactaataacgcagttcttctgagggggagggagctatattctcttttctatctcattgtttccagctgaataatgcaaaagaaacaaccataattatacatctactgagcagtaagtggagggaggaggagtagtgtcaggttaataggagaggtgagccaccccggcaggcttcaggttcaaggcaggccaggtgtgatggctcactggagcctagaagtttgagacaagcccgggcaacatagcaagaccttgcctctacaagtaataaaaaatgtatccaggtgtggtgacacatacctgtagtcccagttacttaggaggctcaggtgggaggatcgtttgagcccaggaagttgaggctacagtgggccatgatccagcaactgcactccagcctgggcaacagagtgagacactgtctacgaaaaaaaggtttaaggcagtttggggagtcaaaacctttgaaggcatctacccaggtatctccaacccatgtatgacgggcttttcttttctttcttttttttttttaaaagacagagtctcactcctgttgcccaggctggagtgcagtcacagctcactacagccctgacttccagggctcaggtgatccacccaccttagcctcccaagcagctgggaccacagccgtggccaccatgcccggctaattttttgtgttttcagtagagatggggttttgtcatgttgcccaagctggtcttgaactcctgaactcaagcaatcttcccgccttggcctcccaaagtgctgggattacaggtgtgagccactgtgcccagcctcatcttttcttagcagggatccaaacttagtggaagagtattgccttgtttgggtgttttgctatttttggagttcagtcaaacagggatgttaattcctgggcctggttcttgtctttgacctgctgcagtaaatgaagcttctctatatgtaacgggacagattcactggcttacaactgtttgttgcttgccttcagctgaccactattcttaagagtctcggttggcactaagcaatagctatccaatccccctttccttccttttatctactacgttcaccatatatgaaatgtctgatacttcacccactcgtggattccatttcactagttcaccctcctacttcaccactggtgagtgatgcagcctcgaatcccatcttctcaccagctttaatgctgcagaatggtttctccagaagcagacgctgcgactgagtttggggtacgaggatgttgacatggtatcaacacccgtgaaaggaaggggaaggaagcaggactgggcggaggaagaagggtatgtaagtcccgcaaagctttggccaacctcgtgtggagctctggaacgagaactgctgaagttcgccagactcgggcactcctgcctaactcagtaacaggcgggcggcatcgggacacggacacgctgctcaggccccgccacagccaccctcgcaccgtcagacacactcccacacattcggggagcagggccttcaggacgccggcggcgccctctcagtctagctccgccaggcccctcgtccgtcctcccgccctccaaggtcacctcgcggtccgacatggctgctggggctccttcggggccaacgatgtgtacttctagggctgttttttaaagcaaaggagtgaacacaggtaaaggcacgagaaaggtgcctcgacgccaccacggactgcgcagcgttcgcgatcagcacagcccgaaagggaagacagcggtcaacgcggacgcgccatggcgcggggaccaaggaggagccccgagaggggcggggctggccggagggccgcgcgcggggccaccagcggcgcctaggggtcagcgccaacgcccacgggttggtcatccccacttaggcgcctcgggccgcaactaagcagcctgcccgcctcaagcccgccaccctcaagcaggcccagcgcagagcctgtcgggagcggcgctctcccgcctctcccaatgggagcccggagcggcatcgacgcgtcttcggggccaatggaagcgaggctctggtgttgctgggcggggccgggagggctgcgcgggcccgagacccactgcgcacgcgcgctcgctacccgcccttcccgccgcgcacgcgctcccgtgtagggccggccgggcgctcaggagcgcgcggggcagcggcggcgcggcggagccatccgcgctcgtgcccgcgcgggtgcgttgctgtcctggccgcgcccctgtcccgccgcctcccgctcctcgcctggcggatgtaggttgttggcctgaggggagctacgtagccgaggtttgcgctgccgccgccaggcccggtccggttccagcctctgcccggacgctagccggcctggccatggctgaccgcgggtgcccgctggaggcggcgccgctgcctgccgaggtgcgggagagcctggctgagctggagctggagctgtcggaaggtgagccggaccccgccctcaacccccgcgacccgccctcagcccggtcccccgcgcagcccctcactccgggacccccgcgcggcccctcactccaggacccccgcccttcacccccgggacccccacgcggcctcgcccctgggacctctgcccctcaacgggaccccggttcctctaccctggaacccgcccctcgccccggagacaccgttcctcaaccctaggaccccgcccctcatgtgggaccccagcacgacccctcgccccgagaccccggccccttacccccgggaactcccgcccctcacccccgggacctcctgcccctcacccccggaaccccgcgcggcccctcaccccggggaccccgcccttcaccctgggagccccgcgctgcccctccggactcccgaccctcagccccgggacacccgcgcggcccctcaaaccagggaccactgccccgcctctcatacaaggacccctcccccatacaaggactcctccccccaggcccttcacacctgggacccttactcctcaccccgggacgcctgccaaacttctggagacctttccctatccccagctgctcccccaatgggatccgaccccaaggactggctttgactaggtcgtttggacaggtgtgagaatcttgagaggaatgaccacttttgccccaagctgtgagccccgcttttctcaaggctgtaggtctgggcttggtctgggcttcaccaggatgactgcgcccgttgtccgcaggcagctacttcccttggagctgggagcccttgccgcgcgcctcatactctaggagctgcaccctgtgcctcattttattatctataaagtggggttataccagcactttccattttggattgttatgaggctaaaataccttaatatatgcaaagcacataacacttaggagttgttagccccctcatggaattttttaaagtaaaaaaaaaaagtcgtataaatggttggttgataaaaatagactggagtaatctggcttcagaggtggtgggtggcatttcccatttggatgttatccctttcaaggcctgtgtcctgatattccttttggctgtctttgggaaagagttaagttcttctccagtgtcagaaaggacttgcagtccttgaagaaaagcatgtaattgattcttactctgtttttgagatctaaatgcattttcagcttttagaatccattttttaaataatcttattatccttaatttaagtttcagattgataagattttgctgggtctggggtagttatttctcaaaacatctaaataatatgcactagcatacagtaagtcatttaatccttgccaaccttagggaggtagatgctgttgtgatcttgttttacatataatacaacatgtacttgcaactattttgaattcagcattcagatttttaacaatgttgtgacatgtggcacattttttttttttgagacggagtcttgctctgttgcccaggctggagtgcaatggcgtgatctcggctcactgcaacctctgcctcccaggtagaaatgattcttctgcctcagcctcccgagtagctgggattacaggggcttgccaccacgcccagctaattttcgtatttttagtagaggcaaggtatcaccatgttgaccaggctggtctcaaactcctgacctcaggtggtccgcctgcctcggcctcccaaagtgctgggattacaggcatgagccaccgtgcctggcttgtggcacatttttaaaaatggaagtacaggctgagtacacagtggctcatgcttgtaatcccaacactttgggaggccacgttggcttggagacgggagttcagaacagcttgggtaacatagcaagactctgtctctacagtattaaaaaaaattagctgggcatggtggtgtgcacctgtagtcccagctacttgggaggctgaggcaggaggatcacctgagcactggagcactccagcctgggcaacagagcgagaacctgtctcttctcaccaaaaaaaaaaaaaaaaaaaaaaggaaagaaatggatggatttgagaattcttggtgattagatgctcctaggcagtctgacaaacttaaattaggaatgggtttgacaggatctactgtactgcatttgttaaggctctttagggaaaatcacatatacgcagtttagattctgtgcatttcaaacatatttttgcgtattgctcctaatttctgctccaatgtattcattattccctcaattttttgtgttgtagttgtgtttgagtgcttgctaggcattgacaattgaatcctttcctcaaagaactttataatttgtgcgacagaacacaagtacttaaatgaaagaaatgtttcctatctgttggatccatttatgctattgtcatcttagagatatgtaggggatgtataggtaagtaaaggtataagattatgtaacatggagaggaacctcgaaaaatagcttaagctgagaaagggggtaaacaaaaaaagtattgagcccagaaatggtggcttaggcctgttatgtttgcattttgggaggcccaggcaggaggatcacttgagcccaggagtttgagaccagcctaggcaacatagggagaccctgcctcttccaaaaaaaaaaaaaaattggctgggcatggtggtgtgtgcctgtagtcccagctacttgaggggccgaggtgggaggatcacctgacgaggttgtgagcctttatagtgtcactgcattccagcctgggagacagagtgggaccttgtctcaaaaaaaagtgttaaagggaagacagcagagaacagagtagtagagtggcagccaaggaggtggaagctctggcttcttggcttctttccctgctcctagactggcctgacacttttcttttggccaaaataggtcagtgattacttaggcacagtcacacgtggacctgcttccagggcgcttccacaggttaatgctggcttatgtagtttatgtggtggttgttgttgacgtgggctctccctgttggatttggagatgcttactggtaaggactttgttttaggcagatttttggcttcttcacacagtggtgggcatctggtaaagtgtctgtgaatctcctgtggattacaatgtctctaaacgtgggtttagttagctgtaaaagggggtgaataccagctttattgacattccaggtttattgtcaagattcagtcacatagtgtgtgtgaaaatgcttcgaaactggtaaggtgttttatttatataattaaagggagatattagtaatgagttatagtcctaaaacaaccaacattagtgtttcattgttataatttttatatattgtcaaaatagtgtaacttttttatagcattcacatttatctaagtgagaaattgcctaaaacttaagagttgtcactgtgcttggtaggttggaagaagaagcttaacagtgacaaagatgctgtcttcaacagaaactggtaatgagtgatacctgaataatctagaaaatcctgcatgccttcccctcagcctgttgaaagtatcctctgcctttcttcatacctcacacctggccttattctccagcatcctcactgcattctcatcatcaaccatagtgattggcgttggccctgagggaaggttctggtagaatgctatgatttatttccatagggcaagtttgctgaatttctgttatagattcccaagagggaaataaggcatagctgtgttcttgctccttaacttttctggctgttttgccctcttgacttaggagtctgcttcagattaagatgaagatgaagagtagaagtacatggaaccccactcttcttagaccccctgccccccaatcatgaacacatacagaagaattcatatgtgtggttcctgaaaacctatcaggatgttcattgatggaagtgagatcattagaggtataaccttgatatttaaaaaagaattaattcccaaacctttgtgctttgcctgttgctgtaacaaattaccttggacacacctcacagctgattttggcacaccagtgctgtacgtgtcttggagctattgctgctgaactgctttaaaaacatggacagtggtattttgttctttgttttaatagactacagtgggttagagaggaaattcctacacaataggctacctttatcccattccaattactttattctggttaataggtctattccatagctttaactttagtctttttcttgatttcttatattctaacaatgcaggacttctagtctagatggaataaaatgaaaagggggaaaaaactctgggtatacaggaagagacttctctcacaaagcttttttcctctttaactgtctttaatttctaaaatctgggatatatttgtgtgtgtgtgtgtgtgtgtgtgtgtgtgtgtgtgtgtatattttgagacggagtctcactctgttgcccagtctggagttcagtggcgcgatctcggctcactgcagcctccacctcccgggttcaagcaattgtcctgtcttagcctcctgagtagctgggattacaggcacacgccatcacgcctggctagttttttgtatctttagtagagacaggatttcaccatattggccaggctggtcttgaactcctgacctcgtgatccacctgcctcggcctcccaaagtgctgggattacaggcatgagccatcgcgcctggcccataattcttaattttcaaaatgacagcctgtcattgcctttgtgttaataaacatttgttgtgcttcttgaatattttgtggtatataaaagttctcatgttcagccaggcgcagtggctcacacctgtaatcccagcactttgggaggctgaggcgggtggatcacctgaggttaggagttccagaccagcctgaccaacatggtgaaaccccatctctactaaatacaaaaaattagccgggcgtggtggcgtatgcctgtaatcccagctacttgggaggctgaggcaggagaaccacttgaacctgggaggcagaggttgcagtgagccgagattgcaccattgcactccagcctgggcaacaagagcgaaacttcgtctcaaaaaaagaaaaacgttctcatgttcagattctactcatctgtcaaaggccaccccaaatgctctctatcttagtctattttgtgttgtgtttgtgttctataacagaacaccacatataggtaatttacaaagaaaaatttatttctcacagttccagaggatggaagtccaatattaaggtactagcatctagcaaggactttcttggcctgtcatcccatggtggaaggtgagaaggcaagagaatgtgtggacgagagaggaagggggccaaaatcatccttttgtctggaacgcattcctgataactaacctgtccctgcgataacagcattaatccactgatcatctcttaaaggttctgccgctcaacactgctgcattgggcactgagtttcttcctttttcttaatattcatgtctttttttttttttttttttttttttttcaagaaaacacacaacaaatgtcagaatatgagatagggaagttctcctggaacagcatgtagattattttctagagcactttagttaaatggtacttaatgatgataattcttctgaacacaattcagaatttgaaccaatatttgttgtttcaggaaagcagaatttcctttgaatgatggataagaatggtgaggatctttataatatagaataaattgctgaaaagaaactttgagggaatattcaaagcaccctcttattttgaaccttccttgatcatctctaatgtgactgctttctcagaacttccatatcatttgtcccctcttttggagttcttgctgctttttgtttttgtatttgttttcacttattcagtaattattcagtgtccactgcatcctaggtaatatttcagctgtcaaaagtcagattttggctgggcatggtggctcactcctgtaatcccaacactttgggaggccgaggtggttggatcacctgaggtctggagttcgagaccagcctgaccaacatgacaaaaccccgttgctactaaatataacaaaaaaaaaattagctggtcatggtggcacgtgcctgtaatcccagctacgtgggaggctgaggcaggagaatcgctcaaacccaggaggcagagggagactatttttataatgatactaagatgccatttctgttttcactgtgttgacacttgtactgatggtccaaaagcagtaatagggaaaactgctgggcactttaacgtaaattgaggcagggactccaagtgtcactgatagtcattatattattcgctacctctccacttgcagttttaaaaaaacaaaaagggctgctttcacttaaacagaccctgatgaagcagtaaaaattaaaaaaaaaaattggccttttgtcttttcatgaggaaatgggaagtacatgaattgcttttgctgcacaaagaggtacagtgcctgttttgagaaacagcaattgtgtagtttgagttgcaaagcgaactagctgcttttattgtgaaatgccatttttgcttgaaaaagtgggtagcagacaatctgcagttattgagacttgggtatttggtggacgttttctggaaaataaatgagaggaaataactgacaatttatgaccaatgataatatttgtgctttcaagcaaaaatcaaaattttgaaaaaatttatctgctacagtgagcttgacagtttctcaatagttaacgacttctttgatgagattggtgacaatataatgaatgagtatttgatattatataattaaatgtgtcagcatttggaagatccacataattttgtgaactaatattttccagctcaccattgcaccacgttacaaagtcatagtgcatgggtaaaagattcattcaaaagatagaccaatggattttaatgtagtgatatgaaaagttcactgataagagttatagattctacattataacttttttttttttttttttttttttgagatggagtcttgctctgtctcccaggctggagtgcagtggcgcgatctcagctcactgcaacctctgcctcccaggttgaagtgattctcctacctcagcctcctgagtagctgggattacaggtgcctgccaccatgcctggctaatttttgtatttttagtagagattgggtttcacgtgttggtcaggctggtctcgaactcctgacctcgtgatccgcccgcattgatctcctaaagtgctgggattacaggcctgagccaccactcccggccacaactttttttttttaagagactcccccttgcctggttttggtgttgtatcaaggaagaatgtccacagtgatctgaaaaggctgctgagacaccccacctttttccaactgcatgtctctctgaaaaaggatttgattcatagacttcaaccaaaaaaaccacacagtacaacagattggatacaggagcaggtatgagaatccatattgtcttctctgaagccagagttaaagcaacttgcaaaaatgtaaaagaatacctcttcttactaaatgtttttgttttcagaaatcttttatttttagtaaaaaatattatttaccttaatatctagtcagtttattattaaaaattttaaatgagttaggccgggcgcggtggctcacgcctgtaatcccagcactttgggaagtcgaggcgggcggatcacgaggtcaggaggtcgagaccatcctggctaacacagcgaaatcctgtctctactaaaaatacaaaaaatcagccgggcgtggtggtgggtgcctgtagtcccagctgctcgggaggctgaggcaggagaatggcgtgaacctgggaggcggaggttgcagtgagccgatatcgcaccgctgcactccagcctgggctacagagcgagactccgtctcaaaaaaaaaaaaaaaaaaatttaaatgagttaaatatttaaaaaatttcacagtattagttttgtttgtttgtttgtttgtttgttttttaagatagtgtctcgctctgttgcccagttgggagtgcagtggtgtgaggatagctcactgctgcctttaactcctgggttcaaatgatcttcttgcctcagtctcttgaataactagaacatagtagctgaaagacatggatgtcatcatctatttctttatattttttgtaacattttaaagctattgcctagtttaataattatttcagtttgtgtatgtaaggacaatcaggcatttaaatttataaaacatgtttgaaaatctttaaaagttacacttactgactagttgcttgtctgttgcactaacaaaatttattattcatgtttcgggaataccctctttaggttttgtttgttttttttttcatagtaaattatcccagtacaagtgtctttgtacaaaattttgatttctaagtttctttaaaaatatcaatgccagctgggcccagtggctcacacctataatcccagcactttgggaggtcgaagaggatggctgaggaggttggatcgtttgaactcaggagtttgggatcagcctgagtgacatggtgaaaccccatctctgctaaaaaatatgaaaattagggctgggtgcagtggctcatgcctgtaatcccagcagtttgggaggccgaggtagacggatcacttgaggccaggagtttgagaccagcctgggcaacatggtgaaactccgcctctactaaataaaaaaaaaaattagcctggcatgggggcaagtacctataatcccagctactcgggagactgaggcaggagaatctcttgaacccaggagccggaggctgcagtgagctgagattgtgccactgcactccagcctgggtgacagtgagactgtctcaaaaaaaaaaaaaaaaaaaagctgggtgtggtggtgcacgcctataatcccagctactctgatggctgaggcagggagaaccgcttgaacctgggaggtggaggctgcagtgacctgaaattgcaccactgcactccatgataccctgtctaaaaaaaaaaaaaaaagagagaaaatcggcgccagaacaaatcctacacaagcccacttgtgtcagaaatttaaaatagtcagactcatagaagcagagagtagaatggtggttgccagagactggggtggtgggagaatctggaaggtgttgatcaaagggtatatagtttcagttatacaggatgagtaactgctagagagctgctgtacagcatagtgcatatagttaacaatactgtattgtatatttaaaaatttgttaagagagtagagctcatgttaaatgttcttatcacaaacaggaaaggaagaaacttttagagatgatgtttatgtttatgtttatggtgatggtttcacagggatatacttacctttaaattcatcaaaatttatatattaaatatgcacgagttcttataggttaatcatgtcgatttaaaaaaagaaatatcagtgatttcaattttaatatcctaaaactttaaacatgcttcattgccagctattctgtacttgtttaattcctgtctttctttcaccgcttaagtttaaacttcactttctgttggaggctctgccttctactaaagcccccttctccccaaccttcacagaataaagtgcctgtgctctgtatccttttaaaactcattgtatcactcttgtaggatcataattatttgtttcatgattatttgtttgcttgtcttttctataccattttacagggagcatttcaagaggaaggtttgatctgctcatctttctgtctccagcaccttgcacattttaggcattttaatggatgcttattgagttaataaaagtgaaaacttcacatggtgtttattcagtttcaaataaagaatcctctgtaaatggattcaaacttagcttttttacagcagtttttctaattcagtgaacccatcagcaggatggatctgtgcctcagggagctgttgaatcagagtgtggcctttgttgctttaagtgaccagaaagaaaaaacttaagaggagactgagataagtgcactgttgctcctgtcctcctgtaggatccaggctaagctggagaggcctcactggtgtggagctcgatgacgtacatctaatctaatagtttgtttggggcccatgagggcataatccactgatggcctcatcgccatgctgtgggtccacactaccctcaagctgaggctatgcttcctatagcaggaataccaaggctctttcccaggagtcctgatgagaactttgtctcaaggactcctcattggcctggccggaactttcttagtgctgcctttagtctaagactttttctgtcccacctgccttcctttcctcttcccctggcaaacatctactggttccctccccattttccctcaagggcattttcccacataaatctccctttcacgtagtgtgtcctcagtgagcattagccacgtgtgactgcttctcttatcatcagggcaggtcaggggccaggatacctgttccatcttttgaaaaaaaagatagaattcaagagctgcagttttgtttttcaaatcacatatttaatcttttaatgtattattttggctgatgtgatatacatttatttagtataaaaatgaattcaggccaggtgcggtggctcacgcctgtaattccagctctttgggaggccaaggcaggcggatcacctgaggtcaggagttcaagaccagcctggccaacagagagaaacccccatctctactaaaaatacaaaaaatgggctgggcacagtagctcatgcctgtaaccccagtacttagggaggccaaggcgggcggatcacctggggttgggagttcgagaccagcctgaccaacgtggagaaaccccgtctctactaaaaatacaatattagccaggcgtggtggcacatgcctgtaatcccagctactcggaacgctgaggcgggagaatcacttgaacccaggaggcggaggttgcggtgagccgagatcgtgccattgcactccagtctgggcaacaagagcgaagctccgtctcaaaaaaaaaaagggggggccaggcacggtagctcacgcctgtaattccagcactttgggaggccgaggtgggcggatcacgaagtcaggagttgaagaccagcctgaccaatatggtgaaaccgtgtttctactaaaaacaaaaaaattaggtgggtgtggtggcgcatgcctgtaatcccagctactcaggaggctgagtcaggagaattgcttgaacctgggaaatggagtgagcagagatcacaccattgcactccagcctggacgacagagtgagactctgtctcaaaaaaaaaaaaaaaattagccaggcatggtggtgggcacctgtattcccagctactcaggaggctgaggcaggagaatcgcttgaacccaggaggcggaggttgcagtgagccaagataataccactgcactccagcctgggaaacgagtgaaattctgtttcagaaaaaaaaaaaaaaaaaagaattcatattatttggtcactcttctatgttataactgaagaaaggaaggaaatgaattagggttaagttaatgggaaaactttattctgccagtacatattttgtttatttaatctcgctctgttgcccaggctggagtgcagtagcactatcatagctcattacagcctcaaactcctgggctaagctatcctccgctttagcctcccaagtagttaggatttcaggtgcactctaccgtgcctacttttaaagtttttttttagattcagagtctcaccacgttgcccaggctagtcttgaactcctggtttcaagcgatcttcctgccttggcctcccaaagtcctgggtttacaggcatgagccactgtgcctggccttatttgtttttgttttttaagagcagtcttaggttcacagcaaaattgagagaaaggtacggaactatcccatattcccccacccttatacgtgtacagcctcccgcattatcagcatcccagtaaatcttttaaaactaatttttgctgtgcagtgagcttgcttctgggtagaattaacataatccttgtggctcaatctttacacctttaaattagctgacattttcagtattgcactggtctattaaaaagactaggaagttatacactgcttagcaaagaaaactattgtcagtgaagacacaacacttaaaaatagctgttacttctattgtgtattgatagattatcacttagactaatgtacccaagggtctcccttcccttttcacacaggaaatgcatggcctctgttcttaggatttcctgggttcttgaaggcagcagctaaaattatagctgggagacagtgatcatgcgggggtttcctttcagactttgaattaatcagctataaggaaagaatagaaatcctgtgtcttctttctacactgaactgttcataatttaagagtaccattttggaaatagcagacaaagagcttttacactctttcagattttagaactttttctgcagtatctttagtaaagaacctttaaattaagtctctgaaacaaaaggacacaattgttggtatgctgaagccctaaccccaatggattatatttgaagactggaccttaaggagatatttaagatcaaatgaggtcaagggggtgggccctcatccaataggactggtgtccttataagaagaggaggagacaccagggatatttgtgcatagaaaggccatgtgaagacataggcagctgtctgcaagccaaggagagaggcttcaccagaaatgaaccctctggcaccttgatcttgagctttcagtctccagaactgtgagaaaataaatgtctgttgtttaagtcgcccactctggtattctgttacggcagcctgaacagacggacactcagtgtgtcatcctgttgtttaacaacattcaacagactgagtgccaggaggcttacagtctagcaggggctgaaagacatgtaaacagtggcaatatcatgaaatgtgtacagaacccagtcagcccaaggggagggatcatcagcactgcgcaagctgggccaatagaggaagtacagtttccttgagctttgttttgaaagcatgtgtgaagagggtggagaaggaggagcggggatggacatgaagacaaagggaggtgaaccgaagttgagtgggccaaggaattccaggcagtgttccacaggtagaggaggaaaggcaggggctaacttacagcagggctcacacatcctagtaaggaatttggacttgattctctggagtctagacaagctggttgaaacaaactcaaattcctccctgtagctggttgggtgttgtggatgtgtgaggtgaccaagagtaaggcaggaggggtgctggtacctgttgcctctagaatggcactgtttagaactttctgctacgatgggaaagttctgtggtgtccagcatggtggccaccagccacatgtggctactgaacacttgaaatgtgggtagtgggacgagggaactgattgttcaatttaatttacttttaattaattaaaatttaaccatgcatggctaatggctgctgtactggacaacagcaaagtgtatgctctgcatgaaggcttcctattaacaagaaataccatgaaaatacattttattcctaccactgctctcgacaaaggagagaaaatgagcaagatgaaaatatgtgtacacattcaagaactcagtgaatcttgtaaacagatgtcaatttcctatttttaattaaaggctatggggcaggagtttgagactaccctgggcaacatagggagaccctgtctctacaaagaaaaaaaaattagcaaggtgtgttggtgcatgcctgtaatcccaactatttgataggccgatgtgggaggattgcttgagattgaggctgcagtgaaccgtgattatgccactgcactccagcctgggtgccacagtgagaccatgtctcagggaaaaaaaaaggggggggggccatggcggtggtttttcttgggtgctttatttattttttattttattttattttggagacagagtcttgctctgttacccaggctggagtgcagtggcgcaatcccagctcactgcaacctccgcctcctgggttcaagaaattctcctgcctcagcctcccaaatagttgggattacaggcgtgtgccaccacgcccggctaatttttgtatttttagtaaagatggggtttcaccatgttggccaggctggtctcgaactcccgacttcaagtgatccacccacttcggcctcccaaagtgctggaattataggcgtgaaccactgcgcctggccaggtgctttactttaaacaggtcttctttaataaatgatggagccagcagtacccccacacagccccacctttttaaaaaatgtattaacaaaacatttctgcataatctcttttgtctctttctgtctccctctttgatttagaaagattgttctgcagtatgtgaaaagtagattggaggagtctgaaattgggggacagaaaagttagcttgaaaaacccattgcagtaatccagggcaagagattttgctggtctggacagagctgagccaataggatggagagggcaatcagaagtagagccagcaggcttctgtgtgaagtgcacagtaaaggagggtctagggtgactctggagtttctgaaacacctgtctgggagatgatggtgctgctcacgaagacgtggaacacaaaaggagtgtgaggctgctctaggagatctgagtggtgggacccagagtgcatttggatatatgagtctagtactttctagaaagggctaggctagtaatttggaagtcatcagcacatagatagtaattggagtgaatatgattaccccataaggagaaatgaataatgcaaagagagcctaggaaaaaactctgaggaacccaaatccatacgggaaaggcagagaagggagagactgcagggaagactgaggaaggagacagaacatgtgtgggcatctgtgcagctgaggcagggaaatgtgtgtggaggattttctgggtcagtattcatgaccaatcatcaggcaaagatgactgtacttcctcaaatctcattgaaatggttgaagaggtttttttgttttttggtttttgttttcctaaagaggtgagatctcactgtgttgcctaggctggtcttgaactcttgggcttgggctcaagtgatcatttagcctcagcctcccaagtagctggaactatagctgcgcacccccacatcctgctaggttttcagaattgaaaaggaattcatagtctaggttctgggaaattggaacggtggatcagagcagtgaggattatctgattagggaagatagggatggagcaggtctgcagcagatgtacagtgcatcctctgaacaaagttgtggaggaggatgggaggtggtaatgaggaaaggatatggttttcatcggttttccagagtctgctgatgtattcctgtagaaggtaccaccagttgtttggggaagtgggcactcagcagccctatgtctgcctcaaccagagactcttctccacttaacactcttcctaactgttcagttgaacagaagatgtgcagctgaaaggttggaaaaacattgaagtggataatatctaagttctcctttcagttgcaaggctagtctaagttttctaatcatgaatgtttagtaagaattatttcaccatgtggctttagctcaccaagtgatatttaaaaacattcttccattaaatacctgctattttaaaaggtttattacctatttatacacaaacttgttagccaagagctatatttttatggaagagtcttgttacctttcactgacattgttatctacctgtatgtcctgaatgcatgttcagggtcttaacttctgttagaaggaataatttaaacaagctcatgagtactgtagaaaatatggcagacattcatattgagcaagtactctctggtccttggaaagtgcagtatagtcagccacaggcttcagtttgaaagtcttttaagagttagaaacttctgaatatggaagactgcttcttgtttgatttttctctaattgtgaaatatttcaaacataccaaaaacttgtgtgagtcatgatatatgtacccacgtacctaccacccaatttttaaaaaatgaagatttggacacattagattcatatttgaaccattatagagagagatgactcccattcactctctgattccatttgtcatcttcccaacttctctcctgaatttggtattttatcatttaattgcatttccatatatcctgaaacaatcgatagtgtttttgcatattttaaaactatgtaaatcatctttataaatccttctgaaacttgctttttacctcaatattatgttttaaaaattatgatgattggctgggcgcagtggctcacgcctgtaatcccagcacttcgggaggccaaggcgggtggatcacgaggtcaggagattgagaccatcctggctaacatggtgaaaccccatctctactaaaaatacaaaaaaaaaaaaaaaaattagccaggcatggtggtgggcacctgtagtcccagctactcgggaggctgaggcagaatggtgtgaacccgggaggcggagcttgcagtgagctgagatcacaccactgcactccagcctaggggactgatcaagactccgtctcaaaaaaaaaaaaaattatgatgattatgttaatacatgtagctctggctcaatctgactaactgccgtgtggtattatcttatatggttataccatgttgtggtagtttttttctcccaagtgtatttttgaaacaaatagaggatgagcaatctacagagttggcatcagcatgactccacagtcctcttggagaagagtgcccgaggaaggcgcagggcactagcccagaagcacagatagagactagcatggggaagagctcaggaaaaggagggaaatggagagagccatcagacagggtagtaagtgtaggagtcaatgtgtgctcaatatagaggaagcagatctagggtgttcaaggcagatttgggatgaatctcacgtcttctagtcatagcatcactctattttttttttttttttttggagacagagtctcactctattgcccaggctggagtggtggagtggtacaatcttggctcactgcaacctccacgtcctgggttcaagtgattctccagtctcagcctccccagtagcgagattacaggtgtgtgccaccatgccaggttaatttctgtattttttattagagatggggtttcaccatgttggccaccatggtctcaaactcctgacctcaaatgatctgcctgccttggccttccaaagtgctgagattacaggcgtgagccactgcagccagctcgtagcatcgctcttaatctggaagttgacgtacccctgctaggccgtggatatgtaaaaaggatcatttaatttctctgtgcatctgtcttcaagttttacactggtcaggtatggatcactcctcgttttcttgcctcctcctgctcttcctctgtgtgggcacctccagtaggaccggtccgattgtttgggtaaatctagcaacattgacttaagcttactcctcccatggtaagtcaaggaagcacgtgccctttttcctaatagaatatcaaaactaaagatttatacgtatatatttttatccaggcgtggtggctcacgtctgtaatcccagcactttgggaggctgaggcaggcagatcaagaccagcctggtcaacatggtgaaaccttgtctctactaaaaatacaaaaattaacggggcgtggtggcaggcgcctgtaatcccagctacttgggaggctgagacaggagaattgcttgaacccaggagggtcaggttgcagtgagctgagattgcgccactgcactccagcctgggtgacagggtgagactccgcctaaaataaaaaaaaagatttgtgtgtgtgtgtgtgtgtgtgtgtatttctttttttttttttttcttgagtcagagtcttgtcctgtcgcccaggctggagtacagtgccactatctcggctcactgcaacctccgcctccctggttcaagtgattctcctgcctcagcctcctgagtagctgggattacaggaacgcaccatcacacccagctaatttttttgttttgttttttttttggtagaggcagggttttgccatgttggccaggctggtcacgaattcctgacctcaggtgatccacctgccttggcctcccaaagtgttgggatacaggcgtgagccaccacgcccggccatctttcacatttagatgcgtaattcacctggaatttaatttcatgcgtggtgtgagggaagagtgatttcatttctattgcagttgggtaatcagttgactcagaacatttggaagaggctatccttcccctgctgcttcggactgatttctgctgtgttgttctacttgcttatcttagcacctgctccattctgtcttcatatctggtaaagtctgcccttttaattttattttgtttttcaagcttgatttagctaatcttggccctttgtatttccctatatactttggaatcagcttgtcaatttctatgcaagaaactttcaagaattttttttttttttgagagggagtttcgctcttgttgcccaggctggagtgcaatggcgcgatcccggctcacagcaacctccgcctcctgggttcaagccattctcctgcctcagcctcccgagtagctgggattacaggcatgtgccaccatgcttggctaattttgtatttttagtagagatagggtttctccatgttggtcaggctggtctcgaactccggacctcaggtgatctgcctgcctcggcctcccaaagtgctgggattacaggcgtgagccaccacgcctggcaaaactttcaagaattactcaggctgactcttgtgatccacttggagagaaattacacttcacagtattgagtcttcagattcatgaatgtggtatatcctttcatttctttaggtctttaatttatctcagtaatgtttttataatgttgttagtttctgggtagtggtcttgcacacctttcattaaatttattcctggatttgagatacagtatttttcagtcctagaatttatgtttttttttttaaattcacaatcctgctttttaattccctaaacatattgattatggttattctaaagttccattttctatagctttctattattgtttctcatggattttagtcatagtttcttgctgccatatgtgcctaattacttctgatcaaatgccagacattgtctatatagtgatcatttgtgaccacaaagggcttacttttgcatctggtaggtagataggttgggaatagatgcagtccaagatcactttaatctatatagagagaaagtgatttgaaactggctccagtccttatgagtgctgctctatttttagttcatacccaaggtgtggtccttctgagtcccaacaaacaacctgggatgctttccagggcacctcgtccgtgatgagctcctgcctctctgagtctgtccaagttccactcagttcagctacttggtgattactttttgacttcacttggccctcagttcttcacttctgtaatgtcttcagatttaaagaaaaactttaatgtgatctttttagttgttcccattggaagagttggtctgagtgctataattttgtcagtgccataaatggagttcctatgtgtgtgtatgtattcagtttaatgaacatatttttcatattttattaaaaactgagataaaatatttactacacatttaaaaagcccgcttttaattacaaatgaatgagacagtggacattcaaacactgctgtggaagcatatctatactcttcagcgttaagcataataatttgcttatttttttttaaggtctcattctgctattcaagctggagtgcagtggtgcgatcatagctcaccgcagcctcgaactcctgggctcaagcaatcttctcacctcagcctccctagtagcttaggactataggcatgtgccaccacagccagctaattggttttttttctttttttgtagagacagggtctctttatgttgcccaaggtggcttctaactcttgggctcaagcagtcctcccaccttggcctcccaaagtgctgggattacagatgtgagccaccatgcttggctgcataaataatttaaattgcagtcagataggctctacttttgtgtattagatctgtatatttaagacccctgtgtttggaaactttaaggcttggaaagtgaaatctctacgtgcttatattaagaacgactgttaccagtgaatggtgccaccgtgcaaaatattactcttcacagattttcctcaccttttgttctgtgtcacgagcttggagactgcctgtatttttttttttttttgtgtggcatctgttttcaagttttattatggtcaggtattgtattagtctgttctcatgctgctaacaaacacgtaaccgagacttggtaatttataaaggaaagaggtttaatggacacacagttccacatggctggggaggcctcacaatcatggcagaagatgaagaaagcaaagggacgtcctacgtggtggcaggcaagagggcgtgtgcaggggaactgtccttttataaaaccatcagatcttgtgagacttactatccggagaacagcatggggaaaaacctgcccccgtgattcagttacctcccactgggtccctcccatgacacgtggggattattacaattcaaagtgagatttgagtggggaggacacagagccagaccatatcaggtgtggatcatccctcattttattgtttcctcctgctctgtgtcggcacctccagtaggacctgtctagtcgtggcagctgtgggctttcccagctgccatggcacagagaccttgccttgggatcctgggtaagcttgtgtggcccaagttgggacctagtggactctttggacccgttctttggcagcaagggaaaggccaatacctttccaaaggaataaacactggcagctgtgtccagctcacttgggtccaaggtctctggtgtgtatctgatttctggctggtgcccaccttggaggcggtaaaagtgacctgaccaaaggcagactgtactgtactggattggaacctgccgggcccttggggctcccagccattgtgtcatgccctgttggggtgcttcttccttagccacacttggtccattgtggagtcacccagctgctaactgcctgaagtacttctttgtcagacactcctttcagactccggaaagctgatttgcttgagcccagaagttggaggctgcagtaagctatgccactgcactccagcctaggtggcagagcgagaccctgactctaaaacataataaaagaccaaacaagaaaaagaacagcaccatcatccccaaacactcctcatattatccctttgcagtctcccggtcccccagctgatctattccctatccttatgggtttatcttttccgaaatgtcatataaatggaatcatatagcatgtaacctttcgagaatggctttcttctttcagcgtaatgtattttgaaatttattcacacttttgcaagtatcaatagtctgttcctctttattgctgagtagttttccatagtatggttacgtcacagtctcttcattcacttgacatctgggttgtttctagttttttggtgattaagaataaagtggctataaacaattgtgtacaggtttttatgtgaacacaagtttttacttctctagggtagataatcaagtggaattgctgggtcgtctggtgagtgtttgctttactgtataaagaacttccacactgttttccagagtggctataccattttgcatgcccatcagcaatatatgagtttctattgcttcacagtctttgtcagcacttgacattgtcagtatttttaaagctttagctgtttgaataggcatatagtggtatctcattatggttttgtgtttcctaacagaaggaaaatgataacagcggaaatcagtgaaactgaaagcagaaaaaacaataggaaaaaatcagtggggccaggtgcagtggctcacacctgtaatcccagcactttgggaggctgagacgggtggatcacttgaggtcaggagttctagaccagcctggctaacatggtgaaaccccatctctactaaaaatacaaaaattagccaggcgtggtggcgcatgcctgtaatcccagctattccagaggctgaggcaggagaatcacttgaacccaggaggcagaggttgcagtgagccagttgtgccactgcattccatcctgggtgacagagcaaaactccgtctcaaaaaaacaaaaacaaaaacaaaaaacagtagaaccaatacctggttctttgaaaagataataaatttgataaacctctaacaagaccgacagtgagaaaataccaaagacacaaattaccagtcaggaatgaaagaggccaatctctatagactgcacagacattaaagcatgataagggagtactatgaacaactgtatccatatctggtcatatgcccagtagatgtttcgggcaacgattgaccacatatataacagtggctccatgagatcatgataaagctaaaaattcttaccacctagtgaccttgtagccattgtaacacaacacattactcacgtgtttgtggtgatgctggtgtaaacaaacctgctgtgctgccagtcttaaaaatctaatccatataattaggtactgtacataatacttggtaatgataaatgaatgttactggtttatgtatttactgtacaatttattgttattttagagtatattcctattatattttaaaaatgttaactgtcaaacagcctcaggcagacccttcgtgagctatttgagaaggctttgtcattataggaagtgtcaagcttccatgcatgttattacccttgtgcactactcatctttgttcctgtgacctgtaggggtagttgagtgcttttgagaatgggtttttagaaattgtgttgccgagtgaaggacttggtgatattactagggatttggcatctgtgatcctaagtgagattcttctgcagcagtggagttcagccagagccatattccgtacctctgtgatgcagattaattgcctctcctacacacatgcacatttgaaaattactgccttctaaaccttaaaaagttgtgcacaagttgaaatttaataagtgaaattgtacagttatatcctgaacctgatgaggattgtcactgcagcactgagcatgttggtgtgggtggtggctggctgtggacctgggagtgtgcagtgatggagtgagggggtgaacaaggatgatgtacttccaaggggtacccgggtcagtgcagtgaatcaggtgtgctcattgcattgaggaagggttggttttaaaaatggaaggcttagggaagaaaatagtgatttataatatgatgccattcgggtcaattaaaagtacacagacacaaagcaacatgcattctgcagaatatattctaaaagacactataaaaaagtttctaaaagacactatagaaagaagctataagaaaatatgtctaaaagacactaaatgcaaaaaaaaaaaaagtctgaagagatggaacacagtggggacacagggaataaataaatggaaggacaggcagataagcatgagaggcttgggaggagccaagtgagctcttaaagcagaggctctgtgcagagggcagggcttgggcgcagtgcagggtggagtaggtggggaggttgtggtaggctggtgtggaccagagcagctgcttggcccacaggccgtggctcaggctcttcttctgtaggatggcatattaatgcctacccagaggcttccactgaggcttaacttagatgtcagatattcaacggtgtcagtctgttcacacaacaaatcctacaataaaaaatacatctaaaggaaatactcaattatgtactcaataaatgacatcagcctgtgtcttctgattcacagcagccttactgctttgcttgcttgttttgagagaagggagatcttacaaaacactaaaaactctaccatgttcacccagaggacaagctaatcatgagaattgtaatatgtatttctggtctaaataaagtcttcacatcacacatcccctgttagaacttccaggtatgtgtaggaaaccaaatagtgtgcttacattaagaagtgttttcatgatggtgcatttcctacctcattcctaggtggtttaatttgttttcaggctgtttttccttatgataatttactggaacagccgtcctttttcctcctttcccaaggacaccccttggcctgggacggcttgtgtcccatgggtcccttattgcaatacttgtgaaacttgaacctgcacaggagttactggaggatcttgataaagtgcggatttggattctgtcagtttgggatatggccttagagtttgcatttttggcaagctcccaggggatggtgatcacaatttttaaaatttgaagtgttatttacacacagtaaaattcacccttactcttctacagtggtacagatttttgacaaacgcatatgctcatgtaaccaccactacactcccaacgtagaacagtttcaccaccctcaaaattctcttgtcttttcctcactcccagcccctggcaaccactagctgtatctgacgctatggttgtatcttttccagaatgtcataaaagttgagtattcagtagccttttgagtctggcttctttcactcagcagcatgcatgtgagatctatccaaattgctgtgtgtatcagtagtttgttccttttttattgctgagtggtattccattttatgggtccattatagtttatttgtccagacacttcatggaaggacatcagtgtttccagtttttcaatcataaattgatgtttaattttaaaattttggaattgtagaagaaatgcaattcttttttccattgttgttttaggtgacatcactcaaaaaggatatgaaaagaaaagggcaaagctgcttgcacgttatataccgcttattcaaggtaaggtcaatacactcaggtgttacatagcaattatattgtttcataacatgtgatttttaaattgtttttagagtttaacatttgttagcaatgttaaaccaactttaaacactggtatatgttgattattgattgagacagggtctcgctgtgttgcccaggctggtcttgaaaaatatgcctctaatattaaataataaaatccaaaggcatagattataatttaaagctctggcttgatacagatctcagatctcattcccaaagaggatttattttatttttatgattatgaacaacctggcacaattcttactagggctagagcatctattgtaaagatgtcggttcttcccacattagattgatttgtagattcagtgcattcatcatttcaataggttttgtgtgtgtgtgtgtgtgtgtaacttaacgagttagttctaaaatgtatatccaagtataaaaggtcaagagacccaaaatattttcaaaaaagaatgaggtgagaggattggcccaaccaggatatgaagagttattattaaagccgttgtcactaagacagactggacagctcagacaaatgcatatgtgtgcggactttgcacatgggaatggtggtgtggcaggcatggtgctggcatagttctttatccatatatgaaacacatgacattggagacaaaaatcggttccagatgtattaggcctaaatgtgaaaggtctttaaagcctttagaaaatcttacaggaagattgttgccatctcaagataggaaggattttttgatgtcactaaaggtaccaaaaagcaggaaccataaaggaaaggattgattaattggaccacattaaaattaagaactttttttcaaacgtcatcataaagagattgcaaagacaaactacagagtgtgagaagatagttgtaacacaaataagaagtagtatccagaggccaggcgcggtggctcacgcctgtaatcccagcactttgggaggctgaggtggggggatcatgaggtcaggagttcaagaccagcctggccaacatagggaagccttgtctctactaaaaatataaaaattcgccgggcatggtggtgcgtacctgtagttccagctgctcgggaggctgagacaggagaatcacttgaacctgggaggtggaggttgcagtgagccgagattgtgccactgcactccagcctgggcgacagagtgggacttcatctcaaaaaaaaaaaaaaaaaaaaagaactaaagaactagtatccagaatgtaccgagcagtgctgtccagtagaacttcttgcagtaacggacatgttctctgactgcattgtccagtatatgaaacaccagccatgtatgatgattgcacataagaggcaaggtcttactctgttgctcaggctggtgcacagtggtgtgatcatagctcactgcagtctcaaactcctgggtttgagcagtcctctcacttcagcctcctgagtacatgggattacaggtgtgcaccaccacgcccagcttactgattgagatggggtctcgctatgttgcccagactggtcttgaacttctgacctcaagcgagttttctgcctcagccttccaaagtgctgggattacaggtgtgagccaccacaccttcccttaatttaattagtttaaacttaatagccagaaagtctcccaacatgataagaaaagtctagtagagaaatggatgaagattcaaataggttatttcataagaggaaatccaaatagccaatgagcaaatgtaaagatgtttaacctcactagtaatcagagcaatgcacattgtaaccacagccatctgtcctgttggagaggattcaatcagtaggatgcaggcagctagtattacatagtaaagttgaagaggtgcagcagttcttcaggtacatatttgccctagagaaactcctatttgtttgcaccttattctcttgtacaaaaatgttcattatatctgtaaactgccaagaactcaaatacccatcaacagaattcatacagcggaaagctaaagacctacatgcatcagcaagaatgaatcttgtaaacatcgtgaggatgaaggaagcaattacaaaggcatatagccaatacaagcttaaaaaaagacgccaaaccgatctgttaatatttagagagctggtgtagtgagtccagaaagagaaggaaatggttttcacagaagccagcacaccatttcctcatggaagttaaattggagagggccacagggacccctaaggcactgagtgttttatttcataacctatgtggtggttacattgattgtttcttaataatattcttaaactgcatacatgctttgtattgcctatattggtatgatatattttataacagatcaacaacaacaagaagattgacgaggctctttatatgctgatatttattcacccaaaataaaaacaaactcagagtaaaattgggattgaaggaaactattaaaatatctctaaagcccatttgtccaaaatcaccagcaatcatcaaactaaacaaccagatactgtagccatttccattccaaatgggtaaacagaaatgctggccatgcccattcttattacacattatttgggtggtcacagctgatgcagtgcgatggaaaacaaagcagaataaataaatattagagaacaaaagataatcatctttaaatataggtgatattattttatacctcaaaaactcatgtgactgctcatgtaactattagtaagtgattttggtttgatatgaagatagaaggcaaatatgcggcttttctctagcaatatttctgttttcaaatatgaaaaaatcttattcataatgaaaacaaactgtcaaatgcttattaatgcatttggtaagaaagacagaacctacgttaggatcgtaaaatctatttgaaagaaataaccaagaccctaatatatgaagaaacataccagtttcctaactggaaaaacttaatacatcctataaaactggcagatctcaagttagtgtgtgaacataatgtagtccagtctgaataccaggcctgaggttttcctaaacctaggattggaagtgacccattagaagaggcaaagttctgagagtagcccatcaatttttgaaaaagaacactggtgataaaggactggcatttgagttactaaacctgattgtatatgctttatagtcacaacaggaggatgccagtgtacagagtacacgacccagtcagtggaagaaaagaagtccagaagtgatttgagaggatatgaaggaggaagggttaatttaatagctggtactatccttctgcaggcaagaaccctcttcctcctccccaccattagtgaacataaacttcagaataattaaagttctaaatatgtttttaattataaaaacatacaattcaggagactatttgaacacccctttgagtaggaattgtcttcataggcaagataggagacctgggagctagaacagaaaagatggacaggtgcgataggctccctagaaatgagaacatttcagaatgactgagctgctactcgccaggccacagctctgtatgtgtacacagttcagggtgtccacagcagacaaggagtgaggcttcctggtcttttagtgagggtctttagttgggtaaagtagcagaaatccaaaggagaggaaatgtggatgggcaataaatattaaattatgttcaacctcagtggtagatatggaaatgcaaattaaagggcaccatttttctcttatcacattggcaaaattctagaactttttataacatctagtgctgacagagagtggagaaatggcacttttcatacattgcttgtaggagtgtgaattactgtaacctttttggaaagttatctcttcatatctgttaagttaaaaatatatctactccttcatccaataatttcacattgggttttgtatctatctttgttgaataaatgaatctatctcaaagaataaaaggatgcatattttggaatacaagtgtaaggaagtccgtctgtgtatatgtcactttacagcatgcttgtttatcatccataaggtgtaagactctgtattgtccgttgtgaactttaaagttgttttatccagtcacaaaaagccaaaagccagtagggattctgctcattatgtattttgtacatatatatacacacacagacacacacaaacacacgtgtgtgtgtgggtgtgtgtgtggatgtgtgtgtggatgtatatgtacatgtgtatgctcacattttgaagggctaatactgatttctgtagagagtgttcccattctccagtgctgtataactgaccaccccaaaatgtacacagtacttgaacaacatcagcagcatctgttctgctcataaatgtgcagtgtaggcccagctcaaatgttaccttgtccctgtccacagagccagagctgggtgctcaagtcctgggccaacatcctgtgagggctcctcagtcacagctgtggctgttggggtggggagactcctgctgccgagcacctggctccccacccctgcctgtgtctccctctgtcctcatgtggcccctccactggggggcttaacactctagacttggtgtgtggtgttgcacagagccaggtagagccgtgtcgcctttcacgactagccttggaagtcacacagcatcacttctgccacactgcgcttgttggggcagtcactgacctgcccaggtttgaggcagcgtggactctgcctcttcagggagtggtaagggctggaggagccagcgggactgcaattcctgctggccaattttatgaaacattttgaaacaaaggctaaagctaaatgcatatttttgttgaagcacagctgcaggttttgctttgtgctgtctgcaaatgtcagcaaattggcttcaaatgataccagggattttgttcagtgacttgaacaactgttccccattccttcgctcaccgtaatgtgtcttgagggcatctgtgaccaggggaccactgcccagagagtggaggtcctggtgagggagtgtggagagcagcagcgtgaccttgatctgccctgatttggaggcggagcaagtgggtggtgcggcgagggcagctggcccggcctgagcaggtcccagcctctcagcactttgggccctgacgccatctttctaatgcccctctcgctcttgttttctctgacttttcacttttttcctgtttgtatcagagggctactggtggaccccagtggtggtctggtgagctgtttctcactcagggtttaccgacactgtagaacaatgctggggacgaacagcacggaccatttcagacttggaaacgtaattcagaggtgggctttgggagggctttctaccacggctcccacccctgatgtgagctgccatgtactgtgctgccaagggtacagggccagctgtttgatcatcacccttcatgcggatggtgaatgagaggcagggctgggtgatgtggggagaggagagcacggaagtggatgttgcccttaacccacagcatttatgcgtctatcactgacttccagattaaaggctctttgatagagggtatgcaacagatgagaaatgtaagctgttttcaatggactttttcataattggaaaagcaaattgttcacataaggtattcccataaaattgtgtttcaggaatagacccatctctgcaagcagagaatagaattcctgggccctcacaaaccacggccgctgcacccaagcagcagaagtctcggcccaccgcctcgagggatgagcgcttccggtcaggtagggtcacagcctaggcagtggggaaggtggacgggcctggagcccttggactcttgccatgaagtcttccagttatttttcctttgccacaatatctgccaaagaaattattttcacataagcagtaatgtacatcatcatatttttttcaagaaaaacatttaaccttcacgtaaccacagtctgttttaatgtatggtgtagctttagtggcactttcttaggggatgcctacaaaactctctagagaagtcttcttctcactcttactagaataatttctttaaaacttttgtacactttttactttgaagttgatactaataatttttgtgctttatggagcagctttactgctaggtgcaggtgttttagtatttctttttctaattttggagatttccttccaattagatttctgccactctgtttggcagtgcttttatgaatatttaaatttgtctctgatgttttacttgaatcaatagaatggccattgaaaaaaattcacattttctattatagtttatatattaataacttgagcacgttatctatttaatattttcaccactgtgtggttgtatattttcttcacatttaagctcttttgacaggcctttttcagaaaaaattttaatagggataatggttgttttaagaatactgaaaacaaagattaagattttaaatgttttttcaacagggagtgtaaagaaatagtctaagaaatattcgaacagataatgtcttaccaatttgatacacatttataaaaaactttatcatgtggcaaacagcttcttctctgattgtataaataatatatgcttagtgttaaatatataaaaaatattataccaaatttaaggacaaagttaaaaatcacctgatacccctgaatcctgagatggccgccctcagcatttcactgagcactgttgtcctcatgcctggatgcagatgcacgcacacatgtgtactttccatgagagtggtcctagaaaaggtctcctcctttctgccgctccttattttctacatgtcccagctcttctccccaaccctgttccctgctcatggaagtgatgttaataaactggtttctgcccttgtgaagtttatactaggtgtattctttatcttttgaatacaggtcttttatcataaatatgatttgccaatattttctctcaggctgtgatttgtctttgtgtttctttaaagtatcttttgaagagcagaagtttttaatcctgatgaagtctaagttatcatttttttaaattgatagtgcttttgttcttgtgtttaagatatctttgcctaacccaagattacaaagattctctcttgtgttttcttgtacaagttttgtagttttaggttttttagtgccattttagtgcccttaagtttgtgatctttttttttagttaattttagtgtaagtacaaggtatgaatcaaaagtttacttttttgcatggaggtagtcagctgttcctgggccattccttaagcctatgctttctccagagaattccctttgcacttttttctaaaagcagttgcacataaatgcgcgcatctatttctggactctctgttctgttctattgatctattcgtctgtctttatggcaaaacagtgttctcttgatgatcataccttaataataagtgttaaaatcagtagtgttagtccttcaactttgtttcttatctgtgttctgttgtatctaatgtgtcttttttccttcttgcacctttaagatttttctctttatcactgttctgtgggctcgattatatcctctctgaaattcctatattgaagccctaaccccggtgggatgctatttggagtttggtcctttgggaggtaattaggtttagatgagatcatgagggtggggccctcacggtgggatcggtgcccttataagaagaggcattggccaggcgtggttgttcacgcctgtaatcccagcactttgggaggctgaagcaggcggagaccagcctggccaacatggcaaaaccccatctctactaaaaatacaaaaattagtcaggtgtgatgacacatgcccatagtcctaggtattctggagactgaggcatgagaatcgcttgaaccggtaggtggaggttgcagtgagccaatattgccccactgcactccagcctgagtgagactctgtctcaaaaaaaaaaggaagaaaaaaaaaagaggcactagagcttgctggcccccgccctgccccatcaacctatgagtacaatggttagaaggcagatgtctgtaagccaggaagagagccctcaccggacaccaaccatgaggcaccttgatcttggacatacagtctccagtaagaaaaatttgtgttgtttaagccacttagtttatgctgttttgttatggcaactgagcagactaagatgctggtgttgagtgatttgattatgatgcacgtgggctggttttgtttcttgtgcttggggtttgttgagtatttttggatctgttgatataccctatcaggttgatattatctatatttttagttctaggttgtttttaatctatacttattttcctttttttctaagacagcaataatgtttaggggaatcacagtaacttccaaatccatcacaagggtctcagtttgtttcttgctctcttttcgtgagtgcctttttccatgagtgttttcagttaagtccttgtgtggaaatgcttttcgaaccttgtatgtctgataatatttttattaaatattcatatttaaatgataatttggctggatataaaattctaggtttaacactttttgtcttcaaaactattgcttttttgtgcctggtgttactactgagtattgtcagtctgtttcttgatctttcaaggtgatttacctttttctctggaagcttttagaattgttctgtgtctttgatatccatgaatttcctttatcatatgtctaggtgtgaattcttcacctttcctgagtaggaaaaggtttaacctggccctacaagccatttaaatgtgagatttttaaatgttttcagacatttgttggggaaaattgaagcgtctacaaaactggccatcattgtattatagctcccctggacccatagtcgagctccagaaattctgggccatccatgccctgccttggattaatctatactctacctgcttcctcccttcccatatggtttcatagcaaatctcggatatgttatttcatttagatgtcataatattctcgatctctgtcattttgatgtcgtaatagtcttggtttctgtatctgaaaagattgtatttctaaaagataatgccattttcacaaagtaattaacaataaatacttccttaatagcaaatattcagccaatgttcatatggcttttgctcgtatggcttctaaggaacaagtttatttggacccaggattcaaataagagctacacattgcagttggttggtaagtgttttcagcctctatgaaccttagtttgtaggagaagctgagctgtgtttgtctgatggttcctcttggtgtctctgacatgctttttaggtcactaggtttgatgaaagtcaggttacaacgttcagctgtttacaagactgtcatgggtggccctgtgttcctccaccaagaggcctgttgggcctgactcttggctgttcactgtggtgcttgaaaaccagtgatttttctcagttcttagattgatttcctttgggctgcaaaatggtgaaatttagattctgacattccttcttcactcaaaggccagaatatttccgtaaagagaaacttctgttatttacaacttggtacaggaaagaaagtcaagatgaatatttaattctttccatttatttactagttttcagaacaataggttgagtcactggcctcctccaatggcaaccaattgattgcgtttcctcttttcctttttcttcttttcttctgtcagtatcatatttgatgtttcagtccattttagtatttattcttaccgatattcagattgtcccattcttcgccattgggaatctcttcaaattggctcgagttgtttgaccatttcctggttggctgttaggataagaagttctaggttcatcctgggcatttctcccctgctccagaatctgccatttctaagggttttttttaagtgaggatggtgtttcaagaccacagtctgggcactaggatgctgattgctattgggctgattgttgtttgtagacattttcactgtacagaggtaagacagacttttaaaagacaggataccacatttgtttgtagtgacataatctattcagattcagaactgcagggtctgtacttcatctctctctctccctccctcccttccctccatccctccctctttctctttcgctttttctcttctcttctcttctcttctcttctcttctcttctcttctcttctcttctcttctcttctttctctctctctctctctctctctctctctctctctgtttttgagatggagtttcactcttctttcccaggctggagtgcaatggcgtgatctcggctcaccacaatctctgcctcccgggttcaaacgattttcctgcctcagcctctcaagtagctgggattacaggcatgcaccaccatgcccggctaattttgtgtttttagtagagacagggtttctccatgttgaccaggctggtctggaactcccgacctcaggggatccgctcacctcggcctcccaaagtgctgggattacaggcatgagccactgtgcccatcctctctctctctttcttttcttccttccttccctttctttccttctttttctctttttctttcttgggttctcactctgtcacccaggctggaggcagtggtacaggcatagcttactgcaccttggaactcctgggctcaagtgatcctccagcttcagcttcctgagtagctgggaccacaggcgcatgccactgcacctgcctaattaaacaaaaaaaattgggccaggtgcggtggcttacacctataatcccagcacttacagaggccaaggcgggcggatcaccatgtcaggagttcaagaccagcttggccaacatagtgaaaccccatctgtactaaaaatataaaaattagccgggcgtggtggggggtgcctgtaatcccagctcctcgggaggctgaggcaggagaattgtctgaacccgggaggcggagattgcagtgagctgagatcacgccattgcattctagcctggcgacagatcgagactccatctcaaaaaaaaaaatttttttttcagaaatgtggtcttgctgtggtgcacaggctggtcctggcctcaaacgatcctcctgcctcagcctcctagagcgctgggattacaggcatgagccactgtgtccagcctacctctttcatctacatttgtatctcctctccctcatgagtgtccaagctctagctatggtagaatcagactattaagtgcttttcatttgccatatcccacaggactcacgaagaatctatatgacaatgccttcactgctatcaacaatatgagagagtttaaaagtttttgttcagttatttttgtccttattagatatttctggaagtagaggttgaccagtctaacttcagtgttttaaagtcagctgcaatagtttaaaccaggggtgtccaatcttttggctaccttgggccacgttggaagaagaataattatcctgggccacacataaaatacactaacactaacgatagctgataagctaaaaaaaattgcaaaaaaatctcataatgttttaagaaattttacgaatttgtattaggctgcattcaaagccctcctgagccatatgaggcccatgggccacgggttgaacaagcatggtttaaaccaacaactagatacacatttaggctcatttgtttcactttattttcaattttggggatttctcttttattcagttttgatttataactaaggaaatatttacaagattccaaagttagatctacaaacaaagaaatatttaaagaaatctaggaccaacatgtgaggatagacagagagagcttctattccttttacccccactgaaaacaaacaaaaacatgaaacttaatttgttactttataaacagtcttgtaaaaagtatttttactgctgtccttcctgtgtagatgtccacactgaagccgtgcaagcagctttggccaaatacaaagagaggaagatgcctatgccttcgaagagacgttctgtccttgtgcattcgtctgtggaaacctacacccctccaggtattgataaacaatgtcaagtgtggcttttttttgagtgtttcacaggcctgatgttatcctatttacttcccattgagttggaatatccgtctggcctgtagtatagattggacgcatttggagattaaaaatgtttgcatatgctcgtattccttacctgaaaatctatggtgtacatagtattcttacccaaatgggtacttgctttctataagactttttgtgtggatcttaatttcttttactaagatgctatttatgtcttttagtaaagagaagaacctaaagcactaagaggagcctaaaataagcactaagctaaagcttcctgaattaggaattttacagttattgtcatcttattacctataacttaacaggttgtaaccaggacttatatgcaacagtataagactatttggaaagttttgcggttgattttgttgttgttttattgttggtaccattagaaatgaaaacttttatatgaggtttctctctagcaataatgtattttagtcttcctgttaaactgtacaagatgtcgatagtgtctaatgacttcacattcatgaacttgcattgttgtcatatatttaaagtatcaaaaatagtgacacccatttttggtttgaggtatttggagatactacacaataaaaccaaacacaccagattcgtaagatgatttagtggttttggtaacactttcttgcttaaaagaagtttattgttgaaaaaaatcttagaaatggctgtcaaattattgtttttgctaaatatagctatagacactatccaattttaaaataatgttttaataattgtaaaacccataatgaaacacacagtcatgctgacttgaagaaaccttaatgtacagttaattttgttgtctgaagcaattttctcggagaaggaattgtttttagggctagttcacatgactcccctgaaaggatgcatgtagacagggctgcggttctcccatggccaccatgttgttgctggggccatgcacaggccaggatgccttctcactgcctccaagatgtagggccgggcacaggctctcccctgggtgatgctgactgatgtgtggatatggtgtccgactctgtggacatgcagtgcagcactgaatattcacagaacacccccactgaggtatatgctgaagccgtttaggagatcagaggctgtcttcactgagtgtgtctggtaccctgtggctgagttctctctggggagctgggggctcatggaatcattttccccacagtagggcttcttgcatgcccttctagattgagggtgacctttgagctgactgcgtggctttgggcagagctgtgccaggtgtacagaagcatgctgcacacaggtctgggaggctccagtgtgagtgggaactccgtcctcctcttgactcatcccgatatcatgcctgtcatcgttattttaaccacagacacgtcgtctgcctcagaagatgagggctctttacggcgacccgggcgactcacctccactccgctccagagccattccagcgtcgagccctggctcgaccgggtcattcagggctcgtccacctcatcctctgcatcctccacctcatctcacccgggagggagacccaccactgctcccagtgctgcagccacgccgggggccgccgctaccactgcactcgcaggcctcgaggcccacacccacataggtcagtaataagctgctgcggcccctgtgccagcagagcggggtcaggagtgtccaggacagaggagcagatggagggcacctgagccaggcgccaccctgcagacttagctgcaggcctgagtgctctccaagtgactgaggtcacacaacccagataacccatactggcttatctgcctgagacattaaattgattttgagcttttaataattgcacttgaaagaaatgggctaatatttggttaattcatcattcagattaaatccctaataaccttttgaacaatacagctcagttgcaaattttttcccccatcaagacctacgtatttttcatctgggaaatgtccttttggtaacaaaagtagttgttgatacttctttaatttggcagtcctagtcctttggggcatggggcatttctcatagtcccccagaagggtgtggtgtttctcagtgtcataacaccttcctgctcttgaggggaagctggtgcatgcagtaggtgcaggggtagatggtcagcacacatccatacctgctggtggctgtgatcatcacccttgacctggccgcctctctgttgtctgtgcctttcctcttggctatgtgttcacagctgcaggcccattggttgtctctgtacctggctggaattctgaggttggggtagagggctttcgctcctccagataccaggttagacagcctttggcctgaaaaggtgtcagtcagagctaatcatatgatgcatggatctttcccaaatcatggaatcctttaaattacattcatcttagagatgaaaaaagtgtaaacctttcatcctttgaaattctattttttaactaaaacagcagcatagttagctgtatgtagctggcatgtgaaacccacatacactcttgcacaagtaccttaaaatacaatcagtattgttgaagactcatcttaatcccctcctttttttcccagatgaggaaggaagaaaaaaaagtccagcgattgtaacttgcttgagatcagacagcagccttaagtggtgaagccagggctgataccagttttcttgattcctattcattttctttgctttttgttgcttttctgccaaaactgaaaggtgacacctgtgacacgctggtgtttgtgctggggtccccatgggtgccgagctcttttttgtaagacctcggtcatttggctggactgggggcaagttgggtatgttgggtggcccacagcttctgtctcatcatcctctgtagtgtgcatcactgttgctcttcatgtttttgtttgtttgagtcagcacatctcttgtgtttccattgaacatgtgtccttcttctgaggcgtccgtctcagatgaaagctcacagtgccctgctctgtctccacactgcttccagctcataaaggaactgccaagactacaagggtagcagcaggcagcattttccacagagaaagtttctcttaggaaaacagcctgctcagattgtttctgtagctttcctgggtgttccatggccagaggctgctgcccacctttcctcaaggtggtgtacagtccatatcttgaaaacagcttttgcactgttgtttgccttctctgttcatcgttggtgatttaactttgtagaaatacatagttaactccaattctgaggcaggggcaggaaaacagtagttttaaatgttctgttacctcatttcttctcccagaagctcctttctaggtgagatggtgcaggagagcaaacaaaacatttgtagtttgagtttattagccattgctgagtcatctcaacactgtttccgggtgggttagaaataaaagcttattcagcatgaaaaattagccacagttcagaatgtttaaccgtacagccctcaactttccagtgattgtggggtgtctttaagcaaagcattgaactctaatgtgtgtttgaattagatgttttcattctctgaaaaggacttggctgcaattatttataatgtaggtttattacctatgttggtggaagacagctcctgactcctgcagatgcagctgtaatcatctcttcctttcttgttagtcctagcatcaacattttgtgatcaattctaatacatttaaaaaaaattcttaacttggacttgatttaatactttgcttacaggattgcaattttctacagattgtagctacccacatcctaaatgttggacatagttaatttgaatttctaaatctcaaaaatactcaacttccctcttatgacagaaatcatcctttgttttagtttctaacactagatgtgtcttcaatttaaactaaggaaagaaacatgaaaagaggaagaatatattaagtaaaaaattcgaggtagaacatatcaggtaaagataatttttaaaaatatatcactttcagttttggattaaggaaatcaaatacattaagccttttttatacaaatgtaaatacctatttttaaaagcagtacttttaattatagtagcttcttttaattatagtagcttatttttattttgaatgtagtttatgtttatttttatgcagcttttttttttatttttccacctagagacagggtcttgctctgtcacccacgctggagtacagtggcatgatcataggtcactgcagccttgaactcctgggcttaagaaattctcccaccttagcctcctgagcagctgggactataggcaaatgccagcatgcctagctaatttttaaaaattttttggaaagatggagtttttactgtgttgcccagactgggcttgaactcctgggctcaagtgatcctcatgccttggcctttcaaaatgttaggattataggaatgagccactgctcccagccattatatagctgttttaaaaaactacttgtagtacatgtatgtataccatgtatacctttttttccatatatacttttaaaatcatttattctttttgctagatttggaagagtggggaaatttctttttaaactaaaagaacctcctgatagacatactttaaaatgctaatttgatcagcatcaggctttttcaagggttgtgaaaaatcttaacggtttagattttttcaaaaggtatattctgctatgcagacagtgagtttgtgctttcatatacttcagctttctacaaacctagtaaaaagttactgctttacattgtacctaggagtaccacagtgatactaacaggtaccttcattaaaatattaaacattaccagttgtctctacctaacatagactagtgtttatttatttatttttttggagataagatctcactctgtggcccgggctagagtgcagcggtatggtcctagctcactgtaacctggaacttctgggctccagtggtcctttcacctcagcctcctaagtagctgggaccacaggtgtccaccaccatgcccagctaatttttttttttaagagatgggagctcactatgttgcccaggctgatctcaaattcctgggctcaagtgatcctcctgcctcagcctcccaaagtgctgggattataagtgtgagccactgcacagctagtgttgattttttttttttttttttttttttttttgtgacagggtctcactctgtcccccaggctggagtgcagtggtgcaatcttggctcactgcaacctccacctcccgggttcaagcgattctcctgcctcagcctcccgagtagctgggattacaggcatgcaccaccacgcctggataatttttgtatttttagtagagacagggtttcaccgtgttggccaggccattctcgaactcctgacctcagctgatctgcccgccttgaccttccaaattgctgggattacaggtgtgagctaccatgttggcccctatgttgattcttataaatgggcgagcatctgtgtattcattgttgtggtagaacacaatttctatagtcatatagacacagtgcctttcctagtggtagacccaattataaccataattcctataggaacttacagtcagccagcattctgaacagatagatggactgtaccatggaaataaaacacaaaaatgtacattcagacaatggaaggagtgacttttacatatgttccagatctaatgtctgtttttaaatgttacaccaattctactttaagaacttgattgtggccaggcgcggtggatcacacctgtaatcccagcacttcaggaggccgaggtggttggatcacttgagtccaggagttcaagaccagcttggccaatatggtgaaaacccgtctctactaaaaatacaaaaattggctgggtgtggtggcacatgcctgtaatcccagctacttgggggactgagacaggagaattgcttgaactcaggaggcagaggttgcagtgagccaagattgtgccactgcactccagtctgggcagtgataaagtgagactccatctcaaaaaaaaaaaaaaaaaaggaacttgattgtggtctcttagttttgcagctgttttaactggcagtgggggaagttttaatttctgtagttttattcttttaggactgcaaaggtttggtgtccaacatacttttttgggggttgtagtagtttgtatgatcctggctgtttttttcataatgtaacaaaaaaatgtaccagtgacaattgatttcaaatttgtttctgcttccttgagggaatttcttccttccttccttccttccttccttccttccttccttcctttctttctttctttctttctttcctttctttctttctttttctttctttctttttctttctttctttcttttctttctttcttctttctctttccttccttccttccttctttctttcttttttctttttgagagagagtgtcgctctgttgcccaagttagagtgcagtggtgcaatctcagctcactgcaacctccgcctcctgggttcaagtgattctcctgcctcagcctccccagtagctgggattacaggcatgtgccacgacgcccggctgatttttgtatttttagtagagacggggtttcgccatgttggccaggctggtctcgaacccctgacctcaggtgatctgcctatgtcagcctccccaagtgcagggattacaggtgtcagccaccatgcccagccccttgagggaatttctaaccaaaatctcatcaggccattgtgacaggcaggtttactctgtgcctgcctctgtgctgaagatggtggttctgagtctggatccctttgagaattgagccacccacatgcacgcagatgtctgcataacgtgtctgggagttcatagggtcccagtatgcctttggtcagccaagaaaacaaattaatgaaaataccacactctccccacttagaactcagctagtggagctttagactaacggggtttcaagagcagcttaatactcatttgacttaacagccactttcattttgggtgtgtttttcaaaagcagatctgcattctgcccctcctgatgtcaccacgggcctcgtggagcattcgtactttgagcgtccacaggtggcttctgtgagaagtgttcctcgggggtgcagcgggagcatgctggaaacagcagatggtgagcctgcctctctttctcctcgtgaaatagcagaacacaggttttgtctttgggtattgaacacagctttaatgtattcactgtagcaaacccaagccaaacgtcagttttaatccatgcagataaatagaaaccagtgtgtgcagttaatgttatagaaagcatcatgtggagaaataattggaaatatcaatggaattggtcagaggggaaacgaggagagtggggagggaaaagacttccaaatttagataggatgcaaagggcgtttcgatctgcaatatagtagggaaatgagaagctgtgggaagtttctttatttagattcaatgtggcagacagaatgacttagtcagtgcgagtgcacacacccacctatgacagaacagccccctacactctccatcttcagcagactgtgaaatcggtgcaacagcaatcatggtttcccatgtgcaggctcagagatgtcagtgtaactttcataatgtcctcatttacaccatttctttttgaaacagtcttcaatgtcttttatcaaaatcatgtcaatttttttcccaaaataataatttaaataaaaattaagaggagctcagagctagggcctatcatatatgttggtactcccaaacagagtgtcagattttgttgagggctttcatctccttgtccagaggcagaagaaaaatactgaatcaacatgaagcagtctgtacattggctagacatgtatttaattcaatttattactctttatatttaaaaaaattaagagcttaattaaagggtaattgacataatgaattgcacatatttaaagtgtacagtttcggctgggcgcggtggctcacacctgtaatcccagcactttgggaggctgaggcgggcagatcactaggtcaggagatcgagaccatcctggctaacgtggtgaaaccccatctctactaaaaatacaaaaaaattagccgagtgtggtggcgggcgtctatagtcccagctactcgggagactgaggcaggagaatcgcttgaacccgagaggcggaggttgcagtgagccaagattgtgtcacttcactccagcctgggcgatagagtgagactcctttctcaaaagttttaagacatttgtacagctgtggaaagcatcactacaatcaagatagtgaccatatccagcacgcccaaaagtgtccttgtgttccttggtcctcctctcttcggatccttctggctttccccatacacttcaggcagccaccgatttactttctgtcactatagattagattgcattttctagaattttatataaaaggaatcatacagcgtttacgtttatggtctgccttctaccactctccataattattttgagattcattcatgttctgtatcaatagtttactccttctcattgagtaatatttcattaaatggatgcaccacaatttggctgttcacctgttgatgtgtatttaggttgtttctagtttgggccggttacaagtaaagctgctatgaataatcaatcttgtatacgtttttgcatagatgggtactttcatttcttttgggtcaatacctagaagtagaatggctgaattatattgtaggtgtatttcacctttttttttggagactgagtctcactctgttgcccaggctagagtgcagtggcatgatcttggctcactgaaacctcgccatcctgggttcaagcgattctcctgcctcaccctcccaagtagctgggattacaggcatgtgccaccacgcccagttaatttttgcattttcagtagagatgggatttcaccatgttgtccaggctggtctcaaactcctggcctcaagtgatccacctgccttggccacctaaagtactgggattataggtgtgagccaccatacccagcctattttaactttttaagaaactgccacgctgttttccaaagtgattgtaccattttacattctcattattagtagtgagagtatcagttcctccacaccctttccaacagttggtattatgtttaaaaaatttcagccatcccaataggcatgtagagatatctcattacagtttcaatttgcatttccctaacggctgatggtgtgttgaacatctttttatgcacctatttgccatctgtgtatctcttgagggaaagtatctgttcatacttttggcctatttttttttttaattgtgcttgtttttctttctttctttctttctttctttctttctttctttctttctttcttttcttttctttcttttctttctttcttctctttttttttttttttttgagacggagtttcactgtcacccaggcagagtgcagtggtgcgatcttggctcactgcaacatccacctcccaggttcaagcaattctcctgcctcagtctcgtgagtagctgggattacaggcatgtgccacgatgcctggctaatttttgtctttttagtagagaccaggctggtcttgaactcctcgtctctgcctgccttggcttcccaaagtgctgggattacagtgtgagccactgtggccagccaaattgtgcttgttttcttattgagttttgagggctgtttatatattctagatacaagtcatcccatatgaggtttatcatttgtattttctcccagtctggcttgctttaacaatgcctttcaaagagcagatggtttacatttttatgacattcagtttaccaaatttttttatatattgtgcttttgtgtcatatctaagaaatttttgtctaacccaaggtcacaaatgttttctcctatattttcttccagaattttatagttttagtttttacatttaggtagatagttcattttgagttaattttagcctaagtatcaggtatgaatcaaagtttacatttttgtatgtgggtattcagttgttctagcatcatttataataaagaccattcttttcccaccaagtttccttggcatctttaatgaaaatcggtagaccatgttggagagggaagggtctatttctgggctctgggctctgtgtgttgttccgtttccttatttatctgtccttacacctcgtatagccatgaccactgtgattttcttaaaattcttgaaattatacagtttgagtcctccaactctgctttttttttttaattttctgttcttttttttttttttttttttttttttaagacaaagtcttgctctgtcacccaggatggagtgcagtggcttgattttggctcaccgcagcctctgccttctggtgtcaagcgattctcctgccttagcctcccaagtagctggaactccaggcaactgccaccacacttggctaatttttttttctttactacaggtgcataccagcaagcttggctaatttttgtattttttagtagagatgggattttgacctgttggccaggctagtctagaactcaagtgatctgcccacctcagaaccccaatgtgctgggattacaggggtgagccactgtgcccagccccccattttttttttttttaaatagtgactctgttgcccaggctggagttcactgacatgatcatggctcactgtagcctgaaacttctggactcaagcaatccttccttctcagcctcccaaggagcagggactgcaggcacaagccaccacatccagataattttttattttttaaattttttgtagagacagggtcttgctgtgttgaccaggctagtcttaaacttctggcctcaagcgatcctctcctgccttagctaaccaaagtgctgggattacagctgtgagccactgctcctggctggccaatgactttttttttttttttttttttttgagaagaagtctccctctttcaccaaggctggagtgcagtggcgcaatctcggctcactgcaagctccgcctcccgggttcatgccattctcctgcctcagcctcccgagtagctgggactacaggcgcccgccaccacacccggctaattttttgtatttttagtaaagatggggtttcactgtgttagccaggatggtctcgatctcctgacctcgtgatccacctgcctcagcctcccaaagtgctgggattacagggccatgacttcttaacattaccatggaatagtcgtgacctcataaacttcctgaaagggacttggatgccccaggggtccctggaccatttaaaaaactgcttaggccgggcgcggtggcacacgcctgtgatcccagcagtttgggaggccaaggcaggtggatcacgaggtgaagagatcgataccatcctggccaacatggtgaaaccccatctctactaaaaatacaaattagccaggtgtggtggcgcatgcctgtagactcagctacttgggaggctgaggcaagagaatcgcttgaacccaggaggcggagattgcagtgagctgagatcatgccactgcactctagcctggcaacagagtgagtctccgtctaaagcaaaaaaacaaaaacaaaaaaaaacctgctagcttagaacaagtcctgtttcctggaaggcattcagtaagtgttttctaaatgaattgattccaaaatgactgtccagtggggcccacacttggatggatttgtaagctctgatgcatcgtgtggtttgtccttggaccttacacctgtgtccacttcttcagatgtgtcctggcctcagtgctcctctgtccttcccgtgacaggtgtccctgtgaacagcagagtgtcctccaaaatccagcagcttctgaacaccctgaagaggccaaagcgccctccactgaaggagttctttgtggatgattttgaggaattgttggaaggtaagagttgtccaactttgagcttttctgtttgtatgaaaagggtggccacgaagttgagaaacacaggcaaatgtatattatacatggatattgctatatatattctgtttccagactcagtggtcactgggtgtaatggtgaatttagaatcacatgactgcttcctttatttgagcaggtagaaaatttgctgctcatattcaagtgacttggcatttcataaaaattcttctacggttttatttaacttacattatttaaatgtttaatttaaactttaactctgaaatacttaccttcttgtggttttaaagtatttaattttcagcatagatttggctgcttttcagaattttagcctctcatatgtgaatgaaatacgtatttaggaagaatacacacatattttttaaaagagaaaactagcaagcagaaaccagaaatgaagccagtacaaacatgtgagtgtgtcgttagggccacaggggccccatgctggtcctactcgcagaccttggctgtttgtacagtgacactgctgacagccgaccagcccagagtctcctccacacccgaggattagacatagctttcaggagattatttccccgttgtaatcagatagtgtgtattagtcagggttctctagagggacggaactaataggatagatgtatacatataaagggaagttcattaaggcatattgactcacacgatcacaaggtgaggtcccacagtaagccatctgcaagctgagagcaaggaagccagtctgagtcccagtgctgaagtacttggaatccaatgttctagggcaggaagcatccagcacaggagaaaggtgtaggctgggaggctaggccagtctagtctttccacgttcttctgcctgctttattctggccgtgctggcagctgattaaactgtgcccacccagatttagggtgggtctgcctttcccagtccactgactcaaacgttaatctcctttggcaacaccctcacagacacacccaggaagaatactttgcatccttcaatcccatcaagttgacatcaatattagccatcacacagtgcctttcaaattcagagtttattggtatgaatgcatcttagagcagtgtttcttaccacttgggcaaattttggttatacagctcctagaaaaagattaattctttttaaagtaaaaaacaagattaaagtaatctttttccaggagctatataatcaaataatctttttttttttttttttttttgaggcagagtctcactctgtcgcccaggctggagtgcagtggtgcgatctcgaatcacttcaagctccacctcctgagttcacgccattctcctgcctcagcctcccgagtagctggtactacaggcgtccaccaccacacctggctaatttttttttgtatttttagtagagacagggtttcaccatgttaaccaggatggtctcgatctcctgacctcatgatccacccgcctcggcctcccaaagtgctgggattacaggcatgagccaccacgcccagcctataatcaaataatcttttaattctttttctttgaacatagtgatagttgtttggatccctaggctgaagtggtggttctgcttgctttcctcctgtgtgagtgggccaccaggtcctatctccaggctgtggatacctggctgttcaccgctgtggtgccgggggtagcagaggtgccacagtcctgtccagaagttgggaaagtgggaaccactccaaggtcacctttgtctgtgaggttgtggtcaccaggatggtgggttgtttttaactttatttcacagccgtcatcatccatgactaaagctcctttaatcctttggttagttgtcggtgactgtgatgcaaaaatcgaaacaaattattgtaagcttttttatagttgggattaaaaaacaatattataaactatgaatgcttaaaaacagaatgtgttcgtggtgctctgaattgctgattttaaagttttgattttgcttgtagttcagcaaccagatccaaatcagccaaagcctgagggaagcgagacgagtgtgctgagaggggagcctctcactgcaggtgtcccccgaccgccgtcgctgttggccaccttgcagcgctggggcacaacacagcccaaatccccctgtctgactgccttggatacaactgggaaagccgtctacactctcacctatggcaagtgttaacagaaagcagttgtgcttctgggttagctgtagaatgtcacacacataacacagcatagacatacagcttgataaatattcctgagaaaccagcacagctggcagataaatagaacattgacctataccaggtacccatcccaccggaggggaccactcactgatgcatggtgactgccattgctctgggttcaagtgtttggagcgttctatgtatgcattctgaacagtgtagtttagtttcgtcttattttcaactttgtataaggggaatcaggcagtatgtatttctgtgtgtttgacatcttttggttccatactatgttttttttgtaacacaaatagtaagcatatatacaacctgatgaattcacagagtgaatatggtcctgtaatcagcactccaagcagaagtgttgctaggttcaaagcccctcacaccccttccacacgcaaagggtaactactgtcctgactgcccacactgttggctttacctgcctttaaacaagtgttcttttagtttattctcattgatggtattattttatcgtgtgaatatactggaacttacttacacactcttaagtagatggacatttgggtggtttccactttggggctattgtgtatagtgctgttagggacatgcttatgtgagtttcttggtgagaatatgtaggcatttgtgctaggtataaatgcagaagcagaattgttcagcattaggacatactgccaaacagttttccaaaggcagtgcagcagttttcactcccacaggcagtgagtatgtgaggggttccagttatctcttttctcaccagcttttgatattgtttatttcattatagtctttgttgtaggtgtgttgtagcacaggctaatttgcatttgcctggtgacaaattatgcttttcatatgcttattggttgtttgaatatccacatttatgtactattcaaatatttggctcatttctctgtttgctaatgctttcatctttcttttttattttttttctgagaaaaggtttcactctgtcactcaggctagagtgcagtggtgcaatcatagctcactgctgccttgacctcctgggctcgagatgctcctgcctcagcctcctgagtagctgggaccataggctcacatcaccacacccagctaatttaaaaaaaaaaacaaacaaaacaaaaaaaactttttttttgtagaaatggggggtctccctatgttgcccaggctgatatcgaactcctggctaaggcagtcctcccatcttagcctctcaaagtgctgggattacaagtgtgagccactgcacctggcctcttatttctttgtatgtttcagataggcatctttcctgagatgcatgttttgcaaatgtctcctcactatttggattgccttttaacacttttaattatggcttttaatgaatgaaaagtcttaatgtaatctaacttacatgttgtttttttttcctgtattgtagctaagtttttgtctaatttagaaattttttaccaaacttaaggtcacaaagatattttcctgcatgctcttctaaaacctttattgttttacttttcacatttaggtgtgatgatccatttagaatttaattttgtatattgttggagtaaagttgtatattgttggtataaagttggagtcattttcttatgagtatctaactgactcagtatcatttattgaaaaggcaatcctttccccaaagtactgcagtgttactttgttatatagtgggtgaaaaatgtacttgcgggtctgtttctgggctcctgttggcggggggtgttgtcagtctgttgtctctccatgctctgaatcactgtagcattaggagtcctcttgctctgtgatggttcctcaagattgccttgactcttcttggctctttgtatttccaagtaaactttagaattaacttgtcaatttccataaaaattactactgggatattgattggcattgcattgaatctctagttcaatttgagtagaattaatgttttataggttgagagcatcccaaatatgaaaatccaaaatccaaaatgctctaaaatctgaaactgcttgaagctgacatgatgctcaaagaaaatgctcattggagcattttggatttctgatttttggacttgtgatgcgatgctcaactgggaaataaatataatgcaaatattccaaaatctaaaaaaaaattgaaatcccaaacacttctaatctcaagcatttcggataagggatactcaacctgtattacaattatggaatcttccagtttatgattgtggaatattttcccctttttaaaggcctgcttcaatttctgtcagtaatgtttttatactttggaatacagaagtcttgagcaccttttattagatttattcctgttacaagtgctgtaatttgtaattttctctactgatttgttgcttatatatagaattgcaatctatattattattattttaaaatgatgactttgtgctgggcgcggtggctcacacctgtaatcccagcactttgggaggccgaggcaggcggatcatgaggtcaggagatcaagactttcctggctaacgcggtgaaaccccgtctctactaaaaaaaatacaaaaattagccgggcgtggtggtgggcgcctgtagtcccagctacttggcaggctgaggcaggagaacggcatgaacccaggaggcggagcttgcagtgagctgagatcgcaccactgcactccagcctgggcgacagagcaagactccatctcaaaaaaaaaaaaaatgatgactttgtatccagttatctcactaagttaacttattagttctttgtttactcataattagaagtttgtctatatatcttttgtattacctgtctacaaaaatcacattattggtgaataatgatagtgttattttgtcctttccaatacttaaacttttattctttttttttttttttttttttttggtttttttttttttgcacaagctagaacctccagtacagtgtgaaatagaacaatgttgaagagtgggcattcttgcctgtttttccatctgaggaaaagcctgtggtaattaagtatgatgtgttctgtagttttgtttgcttgtttgttggtagaaactgtcagattaagaacgttcccttctccttgtttgttaaaagttgttatcatgagttgggattgaattttgtcaaatgctttttctgctgctagaaagaagatcatatgattttcctccttcattaatttggtgaattattttgattaattttctaatgtaaagcagccgttcatttgtagaataaatcccacttggccataatatcttacccttttaaatatacacccagatttaatttgccaataagttgtttaggatttttacgtctgttttcattagaaaaattgatctgtaattctttaagaaaggagcccattgccagcctttgatgagtatgcctagctcacagcctcaactgttaaaccagcgttcaaatctaggtcatgctattggcagagcagtccctggccaatggccaagtaaggcagtgggacaagggcctattttctgttagcatggactttccttaaaaacagcattgggcttgtggagactgtcagttctacattgtggcttgacagctcctcctgcccaatcttgctacctgtcttttcctatcacagatttttattctttagtaatccttttgcatgcctgagcctttctcagcgtctgctttgtgaagaacccagcctgtgacacacttcctctttttttttttttatatattctccttggcttgcagtttaagtctgcatttatttacaaagtgtaagatattactaccattgtgtgtatttatttatttttttgagacaaggttgtgttcggtcacccaggctggagtgcaagggcgtgatctcggctcactgcaagctccaccccccaggctcaggtgatcctcccacctcagcctcccttttacctgggaccacaggcacacaccatcatgcttggctacttttttgtatttttagtgtagtcgaggtctcgccatgtggcctgggctggtctcaaactcctgagctcaagcagtctgccggcctccctcccaaagtgctgggattacaggcgtgagctcccatgcccggcccattgttttttgtttgtttgttgttttaatcaaccatacatttttattctttcttttactatatacattccttcctgagattctgtattttcctgggtaatcatttccttctggcctgtagaacttcctgtatgttcgttatactgtagctttgctggcaacttcatttttgaaggttatatttcgtggtggtttatcttctttcagcaatgcaaagatattgtttataggcttttgagaagatgccagaccattgttgctctattgacagtaatgtgtatggccgcttaaaaagtgttctttttatttgaattgcagccgtcttactatgacatttagaggtgatgttctttgaaaatttcctgtgatgttctttgaaattttcaagatgtccacagggcttcttgaatctgtagaatggtgtctttcatctgtttgagaaaaattacagccatcttctcttactatattgcttcttcctcactttttttcttctctccttctgggactccagttacacttatactttttccctgagtcctacatttttaatgttcttttttatattttgcattctttcttatatatacttcaatttgtatattttctattttcctttattcaaattctttaatcttgtcttctgaaatttctttttttttttttttttttttgagatggagtctggctctgtcgcccaggctggagtgcaagtggtgcgatgtcagctcactgcaagctccgcctcctgggttcacgccattttcctgcctcagcctcctgaatagctgggactataggcgcctgccaccgcacccagctaatttttttgtgtttttagtagagacagggtttcactgtgttagccaggatggtctcgatctcctgacgtcatgatccacctgcctcggcctcccaaagtgctgggattacagccatgagccaccgctcttggccctgaaatttctaatctgctgtgaaatcctgatgagttccttattttagatattgccttttcagtttagaattttcatttctttattatagttactattctaatactctggaaaaatttctcattattccatacactttcctaatctttgcttctgctgccttgaatacacacattaattattgtaaatgaaagtctttgttagctaacaccaatatctgtatcacctttgggtctgttgctcttgtctgtgttttctctctctttttttttttttttttttttttttttgagacagagtcttgctctgttgcccacactggagtgcagtggtgatcacaactcactgcagccttgacttcttgggctcaagaggtcctcccaccacagcctcctgagtagctgggactacaggtgcacagcactacgcccagctaattttttctttctttcttattttcttttttttatagagatggggtttcactgtgttgtccaggctggtcttgaactcctgggctcaagtgacctgcctgcctcagcctcccaaagtgctggattacaggcgtgagccaccatgcctggcctttttgattgaatattgtatgttgtgtataaaaacattatggcaggtccagacaatgccatcttccttaagagaaacctctttcccctccaagtagagtagtggctggctggtcgctgcagtccagtcatgcctggcccagccggcctttgctctcctctggctctcctgggctttctgccagtgcctggtgtgtccatgtgtctctttcctctgatggcttcccagccgtggcgttggtctcctcgtggcttcttaacaaccccattctgcttttcagaggttttccacatgggctcttggtctcctgctgcacacagccagaggattcagcacatgtcctgcaggaggtggctgtgctctcgagactcctagcctctaccaaaagctctgcaggtttcttcatgtcctggtgggactgctccaggtggatactcagccccccgtgggggctggaatccctgaacatggacagcgtaaagacagctgcagctcagctcactttccggagggttttccctctctggaatcttaactcctctagttgtctttgctgagcagcaacttgctgcctccaaaagatcatttctgcattttattcagtttttaaactcatcttaggcaggagtgctggtctgccaccagtaccctctcctactcggaagcagagtcttccaccattgtgcttttaaaattcatccatgttattgcgggtagttgtaattcatttatttctgttgaggaatgaatatatcagaatttacttaagcattatgctgttgctggaatacatgggctgtatccagttttagctactagaaacagtgctcccaggaagattctggtgtgtgccacgtggtagctaagcatatgtttctgaaggttgagtacttaggagtggaagtactaggtctagggttatgggcaccttcacattgctgagatggcatcaccgttctccagttcacccttggcccatcagtgtgggtgggccctacctgctccccatcattatcagcacttggtattgtcaggcttatgaattttagctactctcgtgagaatatggtggtatttcattgtggttttaatgtgcattttactgataactaaatagattgagatctttcctgtcattttaacttgctcttttgttaagtaccccttgaatcttttacacattttttctgtagtgaacggctgggcacggtggcttacatctatactcccagcactttgggaggctgagatgggtgaatcacttgaggctaggagtttgagaccagcctggccaacatggcaaaagcctgtctctactaaaaatacaaaaatcagccgggtgtggtggcatgcgcctatagtcccagctactcgggaggctgaggcatgagaattgcttgaacccaggaggtggaggttacagtgagccaagattgcaccgctgcactgcagcctaagtgacagagcgagaccctgtctcaagaagtatatgtaaataaaatgaaaacaagtttattaagaaagcaaaggaataaaagaatggctactccataggcagaccagcagcttgggctgctggactaagaatacttagagttatttcttgactatatgctaaacaaggggtggattattcataaattttctgggaaaggggtgggcagtttctggaactgagggttcctcccattttagaccatctaggataacttcctgacgttgccatggctgctgtaaactgtcatggcactggtgggagtgtcttttagcatgccaatcattgtaagtagtatataatgagcagtgagttcaaccagaggtcacttacattgccatcttcatttgcggggacttggccagcttcttcaccacacatgctgttttatcagtaaggtctttatgacctgtatcttgtgccgacctcctatctcatcctgtgacttagaatgcctaacttctgggggtgcagcccagcagatctcagccttattttacctagcccctattcaagatggagttgctctggtttaaacgcctctgacatatttcccctctctgttttatgagagaagccttaattctaaaggttgtagagggacaaagattcatcttctataacttcttcaggctgaacaggagtgatgacattcctgcctaactattagggtcttttatatttgagaaagaaaggagctaagtcagaaagcatcagtatggtgagggccattcataacgccaagaaaatttggtatctggaagattaataagtgttcagtttaagaaaacattgagtaagcttatcctgcattcctacacagagtacaacagcaatatattccacaacagtaaaacaaaataagtaaaattatcccaagtaaattaaatagggattttcatgaactgggtaactgttggaactaagatgatatgggattgctagctgattccagtgtgcccagaattagaatattgatctagatttttttttttttttttttttttttttttttttttttgagatggagtcttgctctgctgctcaggctggagtgcagtggtgcgatctcggctcactgcaagctccgcctccagggttcacgccattctcctgcctcagcctcccaagtagctgggactacaggcacccgccaccacgcccggctaatgttttgtatttttagtagagacggggtttcaccatgttagccaggacggtctcgatctcctgaccttgtgatacacccatctcggcctcctcaagtgctgggattacaggcatgagccaccgcacccagcctgatccagatttttacattacccatctctcttgtttctctctactttactcaattgttaaaagctgtaaatagctcaaaagagaagttttcttggctctgaaaaacaaaacaaagaatcagcaacaatttaagcaaaaagtcaaaacaagttacttctgttttctactggttctattagtcctattagttcagctcatgtcaaaacaagttacttctgtcttctattagttctgttagtcctattagttcagctcatgcagttaactcctgttcgatattcatgaacattttggctctccatgagagtcctgaaagtttttcctctattctaatgtcgcaacctccaaagttatcagaaacctgcattcaaaaacacctgttagagttctctagttgattataaaaccaccttctaaagaggacccaaacaagacaacaattttgtatggatgacagaatgccttagggcagcctctacaaaagccacaattgactaggaattttgattacttctgtgacatggaacaatttaacataccaattatattaataacatgtactgtcatatcagagttatagaagtttcacacgattttggaacacaaaccaataacatatttatacaaatatagcccaaagaaagccacgcatcatttcatatctgacagtgcttgctgtgtgatttttataccaaataagctgaatatgtcattttttggacttgagaggacctaatatctaaaagattaattaggtcaggaaaaggcagaatttagagtatgatgttggaaagtttgtcaaatattaaaggtttaaacgcttgatattacaaaatagaatcccaggtcaccataagtcattcatttacccaaaatgataactcaaaaatttttaaaaggcaaaatcctttactcattaatagaaggaagacttagctttccaaataatctgtctcctttctttcccttctttttcctatagtttattcaaaaggcaaacaaaaatctttgttttcttttctttttttttcctgagacggagtctcactctgtcacccaggttgaagtgcagtggcgtgatctcggctcactgcaacctccgcctcctgggttcaagcaattcttctgccccagcctcctgagtagctgggactacaggtgtgcaccaccatgcctggctaatttttgtatttttagtagagaccggttttcaccatgttggccaggcttatctcaaactcctgacctcaagtgatctgcctgccctggcctcccaaattgctgggattacaggcatgagccattacacccagccatctttcattatttttttaatataaaaatcctgctcaagggagaaagcaaaatttcaccattgcattagcgcattattgatgtcaaacccaattcttaataaaaccttgtagacaaatctattcaaccataaggtaagattctcataaaccttttataaccctttacactttttgttaaagagcagattcatgctccaagaaaactgttgtgcttttattccagtattcaatttatggaaaaactgaataatacccctttaactttaggccagtgtgttcacacacaatttcttttacaagattaatttttcacaaaccttccacaacttgctcaaaccttcagcattattctatccaactgaaaataatcctttaaccctttaatctaggcaaaaaaaaatccacattcccatgacttcttacaatctttttaccaaaaacacatttcactttccgtgcacatttcacacttgcaggtagaactgcttttcccatagtcccatagtctcaagtgcatgttacattgttaaccgaagaagcagtttatgaccgtaaagcatttagcaaacctaatatctgacctgtctaatttagaccaaatgcctaaatttttgaagatatttttattttaccaatagtctttaaaactgtctttatttcccaaaggttacttaagtcacatgaactaaaaggcattacagttttaatttttctgacaagatatttggtttaaggtcttagtatttttaaaccagttaatcaaagctctttcatatataaacatcacacacataacatgtaaatagacagaagatccaggagacgtaagattttccattttccagtttctaagtttcttaactggattactggcttcagggtggagctctttgctaaacagggctagggaaacatgcagtttctggagcctaataagcagctggaaggcaaagcagattccaaaaatcaaagttctcatttctataccagatactggatcctcaaaaagggaatcagcccatcccccatgggagtgttatctctcagtggggcttgggggacatttccataccttctaggtggccaagagcatgcttctctgatccaaacatgcagagaggtgtgtattcccctacaactgccattagctacccccaaagtatatttcctccctagttattacaccagagctctctcgtcatgtgaaatcaaaaccgtcagataacacagtgctgcaaaacagagcagagccttagattttgagattttaaattttaaattcctggggtttcatgaggaaaacagaggttcttcccaaaatggggtctgtggctcctcctctgtttcccccaaagagtcccaggctgttagaccttgaatatctgcttttaaggtgacttttaaccatagtgctcttttatttttttaattaatttaaaaaaattttttttttgagatggagtcttgctcttgttgcccaggctggagtgtaatggcgcgatctcaggtcaccgcaacctctgtctcccaggttcaagcgattctcctgcctcagcctcccgagtagctgggattacaggcatgtgccaccatgcccagctaattttgtatttttagtagagatggggtttctccatgttgatcaggctggtctcaaactcctgacctcaggtgatccacccgccttggccttccaaagtgctgggattatagatgtgagccaccaatgcctagcttcttatttatttatttatttattttttgagatggagtctggctctgtcgcccaggctggagtgcagtggcgtgatcttggctcactgcaacctccgcctcccaggttcaagcagttctcctgcctcaacctcctgagtagctaggattacaggcgtgcgcctggctaatttttttttttttttttttttttttgtatttttagtagagacggggtttcaccatgttggccaggctggtcttgaacccctgatcttgtgatccacccgcctcagccacccaaagtgctgggattacaggtatgagccactgcacctggcccatagtgcttttttttaaaattccttttaaatctcttattacccaacttcagccaggccttacggccaaaggtaacctcccaggtgaaaacaataaactttagccaataagctacagtattgggcacttggactattcccagaagaagtctagagcatccaattctgagcttgcaaaggcttttaactgctcgagataacctttagagctaactatgatatgaaccctcaaattcctgttcactcggtggaaaccaagagaaagtacctccgcgtggttacaagtcaactcccaaggacatttttcaacatgtggtctctgggcaagatgaaggagcagttgccctgagtaacagaaaagatggaaaagagaaagggagaaaagcattgcctatggcagtatggggaaggtgaggagctcagggaggccggagaaagacccagccattgcggcgacgctgaatcaaaagttcaggcagccgcttgtcagtaatgaagggatcttttccagctgtcccgtcagctctggagtttccccttttggggagaaaaaatgctcccatgttccatgatcctgtacatgcctaaccttgtcacccaaagccgtcagcaaagagtgcaaggcagatgaatccagagagaatagtggttaacattctgtagtgccagatccattcttggccacgagggactttactgaagggggaccctctaaccccttatatcttaggaaggtctctaaccttcccaagttgggcctcgaacccaggtttgttcaagtgcccttgccttttattaagaggggcctttaacccactctgtcttaggagaaactctgactcccctaagttgggactctaacccagttccatcctttaccctggtaaatgcaccccacttacccaaagtcggccaattggtgctgtggtcttatctcctttgggtcgggggtctcctcagtattgtccctttggaattcaccgggaagatgttcccagaaagggatcctattccagaccccaagagaggctccttggaccttgtgcaagaaagaattcagggcaagtcagtgtagtaaagtgaaagcaagtttattaagaaagcaaaggagtaaaagaatggctactccctaggcagagcagctgcaccttttctaatacaggatcatttataggaattttttatattatattctggatcccagccctgtgtcagtaataccttgcgagagttctctccctctttgtggctggctttccactaatggtagcttagtgaacagaagttctatcaatcaccttcttttcttttatgatttttgctttttgcttttttttttttttttttttttttttttttttgagacagagtcttactcttttgcacaggctggagtgctgtggcgtgatcttggctcactgcagcctctgccttccggatcaaacaattattacgcatcagcctcccaagtagctgggagtacaggtgtgcaccaccaggcctggctaattttttgtatttttagtagagtcagggtttcactgtgttgaccaggctggtctcgaactcctgacctcaggtgatccacctgccttggcctcccagagtgctgggattacagttgtgagccaccatgcctggcccgatttttgcttttatgttctctttaagtactgtttcccttggctgagatcaaaacattattccattaatttgggaaaatgctgttgttttactgttcacatttaggtctgccattcacctggaatgtgtttttgtgaatggtgtgggactgggttcccgggttcgtttctaaagaaagataacctactgtcccgttcttgtctaaggaggagacagcccttgccccactcttctgtggtggcacgtgggtcatcagttgagttgtccacacatgggtggatctgttttgctgttctctgttttatttcactgatttattttctatctttgtgcctataccacactgtcttaattgccatagttttataataagtcttgacatctgtagagaaagcctgccatcttgttttcttcttcaaaagtatcttacatgctcactttggcagcacatacactaaaactggaatgatgtagagaagatgagcatggtacctgtgcaaggatgacacacttttgtgaaatgttccatatttaaaaaactgaaaaaaagagtgtcttagcaattcttaccctgtgcatttctggatccactttagaatgagcttatcaggtgtcacagtatacctactgagattattagcattactttgagtcttaagagaattaacacctttgcattattattattattattattattattattattattattattattattattattattattttgagatggagtttcgctcttgttgcccgggctggagtgcaatggcacaatctcagctcactgcaacctctgcctcccgggttcaagtgattcttctgcctcagtctcctgagtagctgggattacaggcgcctgccaccacacccggctaattttttttatttttagtagagatggggtttcaccatgttggccaggctggtctcgaactccagacctcaggtgatccacctgccttggcctcccaaagtgctaggattacaagcgtgagccacccgcacctggccacctttgcattattgagtcttccagcccttggacatctgtccctccattcaaatattttttactttatctcagtaatgtatggttttctgtggggagattttgcatatttcttgtgacagtctcaagtacttagtgtgtgtgtgttttaagcttgtggtggatactttcatcaaaaacgttcattcctttttttttttttttgagacagagtttcgctttgttgtccaggctggagtgcagtggcacgatcttggctcactgcaacctccgcctcctggattcaagcaattctcatgcctcagcctcctgagtagctgggattacaagtgcctgcctccatgtccgcctgattttttgtattttagtagagacagggttttaccatctcacccaggctggtcttgaacgcctcagctcaggcaatctgcccgtctcagcctcccaaagtgccaggattacaggtgtgagccactgcgccaggcctgtttactctgtattgctagtatgtagaaatcaaatggtgtttgtatgttgatatatttagcagccttgctaaattcagttacaaaagattcataagctacaccatcgtgtcatctgcaaataatggtagttatatttccagttgttcagctttttctccctttttgcactggctaagcctttcagtaaaatgctgaaaacagacatcctttacttacttctctcagaggggaagctttcaatatccaaccattaattatgatatttcctgttgggtttctaaagatgccccttatcacattaaggaagtatgtttccttttattctgagtttaagaagaatttcaaaaatcatttaaaatcattttaaaatcatgaatgatttaaactgtttttcttttcttccatctattgatatgattgttttatttttcacctttattttgttaatgtggcaaattatgtgggttttctgttgaacctctttgcattcctgagataaaactgacttggtcatgatgcattattctttttatgtagctggattcagtttgaaattctttatgcattacaattattaacaccttaaactgaccttttaaaataggctaaaacagtggtttgagttgaggttttttttttttttttttttgagagggagtctcactctcgcccaggctagaggacagtggcacagtctcgtctcactgcaacctctgcctcctgggttcaagcagttctcctgcctcggcctcctgagtagttgggattacagtgtgtgccaccactcccagataattttttgtatttttagtagagacagggtttcaccgtgttgaccagtctggtctcgaactcctgacctcagatgatccacccatcttggcctcccaaagtgctggaattacaggcatgagtcaccgtgcccagtctagtattttttttttctcattcatttctcaggtcccacagttcacttatttcatagtgttgcacctgagcttcatattattacacgggaaattgagcgctcatttgcagggcatggctactcaacctgcttgcgttgtgccacagggacttaaagggctcagtgatgactttgtgttgcttctttgataggctgcttggtgagggggtgttaaggctccttcaagtgtggggggttagactcagatttctcagtcttcctgtcccatggtcacccctgcctctgtcgtcctctctagacacccccagtcctctaggcttttcctttctctattgtcctgtcttcctcagtgaagctctcccctattgagtgcttatgagcatagcagctgcgccaggaggggtgtgtggtgggaaggacctcaggggataagagctggttcctgggccctgtgcctggcgtgaggtcctgatggctttccaagtaaagaatggatggcattgatacccggatcacctttggatctgttgctttggtttatattgtctcttgatttttggtcaggggaacttctctttggggatggctggtattttaacatcttaaatttaacatattaaattaggaatttaacatgttaaaacaaagatatgacccatttcatgaattgttgtaaagattaaagaaattatgtgctactcttacaaatgatgtaattgagggatatttaacgtaatgaaaatccatttacaatgcaatattaatttaaaaagtagggtgaagtatctcatttcttgaaaattttacaggcatgtatacgtgtttatatgtgtatagctgtatatatatgcacacatatgtacatatacatatgtataccaaatactgactttttctgcttgctttttttttttttttttttttttttttttttttttttttttagataatgtctttattgcccaggctggctctcactgcaacctccaccttccaggttcaagcaattctcatgcttcagcctcccgagcagctgggattacaggcacacaccaccacactgagctaattttttgtatttttagcagagatggggttttgccatgttggccaggctggtctcaaactcctggcctcaagtgatctgcctgcctcgtccttccaaagtacagggattacaggtgtgagtcactgcaacctgcctctgctggctcttctgtagtccagattttctgtaataaaatcctattttatttttgtattaagaaaaataaatctgtaagctatttttaagagaaaacaatgatgttcattacaacattgtgcagaatagttattagttggaaactacctaaatttccactaatggggtaatggtatatttcggggtattttggtttctacattaaaatgttaattacttgtttcttaaattttacattgcttagtatttttattttgttttaggtaaactttggagtcggagtttaaaactagcttatactctacttaataaactgacaagtaagaatgaacctctacttaaacctggagacagagtaagtaactagaatgtcactttgttggaaggagcaaaagcagggacttaaataatctgtttcattgaaattagtgttctatcatttagttagaattacagcattaatacaagggatttaaaatcagcagtgaggactgggtgcggtggctcatgcctgtaatcctagcactttgggaggctgtggtgagcggattgcctgagctcaggagtttgagaccagcctgggcaacatggcaaaaccctgtctctactaaaaatacaaaaaattagctgggcgtggtggtgcgtgcctgtaatgccagctacccgggaggctgaggcatgagaatctcttgaacccaggaggtggaggttgtagtgagccaagatctcgccactgcactccagcctggcgacagagtgagactccgtctcaaagagaaaaaaaaaaaaaagcagtgaaaaatattaaatatggcaaagtttgtgatgtagagtaaagcagcattctttttctgcactcgttgtttcattgtttgtccactgtttcttcatcttcttttctgtttgacttcatatatgttgatattaaaaatgttagattccagagcttagattttatgaattaaaatctgaaggtctgaaaccctgctgtgaaattctgtatttttatctccttccctattctatgtgtccaggtaacctccttgtacctatctgccaaaataggatgctggagacttattctcttgtgctacactgccctatatggttggcagtagccatttggggctatttaaattaaccaaaattaaataaaataaaaaatttagtttcttggttgcacaagccacatttcaagggctcagtaggagtgtggctagtagctactgtatttatagatcagaggtagaacatttctgtcatcatagaaacttctgttggacagtactactgtaggcaagctggaccagaccggaggaccctggtatactagaaagtccagggtggaaaataggagaacatggtgaaaatcaacataccagtgaaatcccctagtgagaaggtcacctgtgtcagatcacccaacaaggaaactgcaggttaacaagctggcagacagttccaagtagctctttcagtgcctaagtctttaatatgaactattagccaaggacttttaagaaggaaatgtcaatatgagagaaaataccaaaagacaaagaaaagggaagggaagagagggagtgagaaagagacaagaaaagtaaggaagggaggaaagaggaaacaacaaggaaagctagatacagaaaacaatgtttctaaaaagtgagtattaatattcttggaaatcagagatgaagatgtttcataagtcaagaaaaggatgccggtaggaaagactaagagatggagagcggagtaaaataggacaaaaagactcgatcaagaagacacaacacctgactgataactggagtcgagaaagagaaaggagaacagaaagtagaacattttaaatgaaaatagtaattcaggacaatatcccggacctggagagtgtaaacattcaaggatgcacaccaaaacgcatgcccataatattgcataatacgaggggtacagaaaagaatcccagagctttcaggggaaaagtaggatgtacacaaaggattggcaatgacagtggcttttgggatttctcattggtaaaactgaaagagagtggaatgatgcttcagacattcagagggaatataattttaacttaaaattctgttcccagagattcaacagatttgagaatagtatagccattttcagacatgcaggactcagaaacgtttggctcgcaagcactttcttgtcaagttcttagaagatgtccctcagccacatgagtgagtgagtgagtagggtgcaagcaggaggaccacagtggaggccccaggacgatcactggcagcagtccagggggggcagcagagccaccatcaggagaaccaagactccagggtggggtggaatcctcagcacccaccatcaggagaaccgagaccctcagcagtggagtcctcagcagcaggggacactcacggctctcctgagtgggtggttatttggaaaatgacccaccagtaggtgggtatttgacccagctgagggagtattttaaaacaaattagctagagaatacacagaaagcaacgcaagtagaaatggaggtagctgttatcagaaaagaaaggaaatgtgtacttggctataaaaatgtaaacagtttaagaataatactttatgatatgttgtgctcatagatgagattttatgcaacgctttagaatgaattcaagaatcactaattttcttgaaaaacattcttacaaggataaagactttcagattcttgacttgcaagagaatctctttggttaggtgaatcataataaaatggacaaggtcacagtgattgagttgaagaaattggtggcaaattctgcctcctataatattacactttataaaagtgagcacagctcttcctaacaaattctgtaaaaatatactttccataccaaacatctagtctgaaggttataggttacattctgggcaaccactgttaaaaccaaattttgaaggagaaccttgcccttttcaacaaacaaacttgttagaaactaaatttccagacctcaagtacagaatatagatacagcttaaattttgtcttacaaagtcagcacttattggttattcattgttgcgtgttctcaaaggccctgagtcaactgtctctactcagttaaatactatttggacttgtcccttatggtttcaagcacaattattacaatatttggggcttacaaaaattttatttataactagcttttaatttaactagatattgtaaaaattggaaatttggaatattcatttctttgtcctgttgtaggtggcgctcgtgtttccgaatagtgaccctgtgatgttcatggttgcattttatgggtgtctcctggcagagctggttcctgtccccatagaagtgccattaacaagaaaggtagcaaacccatggctcaggtcccgtgtggttcgcttctgaacttgataccagcagtatcttacttccttttcactcatgtgggcaggcagcaagcagctgttttgacagaggagagaaagctagtagtcaacaggctggccaggactcaagagaaatcagatgccgttttgcctgcctctcttcttgttaatgagaggggcactgagaaccgttttgctggtgatgctcccacaccacactcttattaggtggagctgttctatcatctacatgaatttcccaacagaaatgatagccattttttcctctaatgaatagaattatgattcaataagattttgttcaacttttcctcaaaaccatatgtttatagaaaataattattatttcttagggataaatatatcattacagtgatatagctcacttctcagtggcagttttgaataaacgagatggaaattatcttgcatttctgttcacttatatgaccgtaggcagtttctgttgctgataaattattaatgtggggtcttgctgatctaggtatctgtaacatttttgatataactatcaataatatgattactgaaaaaaaatagacaaggcatgaatttgagaaaatcagttttctgtcatcctgtcccagaattcaggcagttgttaacaggagcattatccagaaatattcaagaatcccaaaagtaaaatttgcaaatcaaactagtgtatctcaaagcataatatgtgatgggcaggtatttgaatgcagtggttcttaggagtaaaactagagatttgtcaaatttatatgaagaaaatgacagaatactgctgagggacacagaagacttggctacaaggaaatgtgtttctgtgtggaaataatttaatatcgttggtgaccaggcctctctagattaatttgtaaatttcaaacatgattcaatagaaatttcaatgccattaactttggagtttattaaaaatgcttctaaatgtcatttgtaagaataaactttgagaaattagcccattaaactttatatttcaacacaaatacaaaccaaaattatcttttaaatttaaacatagttgtcacattttcatgaactatttccgtgaaaagatcatatatatcaataatgggactgaattattctggaagttttatgagggatgaaaaaaagatctgttctctgtgcatggcctggagcaccaagggtctggggctgtggctgctgtgagcaccccaccccacacggtcactctgctttctgcaggatgcaggcagccagcaggttgggtttctgctgggcagctgtggagtcttcttggccctgaccacagacgcttgtcagaaaggcctccccaaggcacagacaggagaggtggcagctttcaaaggtgaggcctcccaagggaaggggagtcagtgttctgactgtggtctgtgttaaatgcatggtgttccagaaattaaacatgacagaggtgtctgggtcttcagcaaaagtgatcccttgttcgagtccttggtgaatctcggttttcatctggcttcatgtctcgacctgtactgtctaatgtggtagccactggccggatgtacctttttaaattatataaaatgaaatgagactaaaacttgcactccttattcgctcagtagctagtgctgcatgttggaggcgcaggcttcgagtgtggggagcagatgcctctgactgcttgctgttctgtgtcctgtctgtgtgtcacaggttggcccccgctctcctggctagtgattgatgggaagcatctagccaagcccccaaaggactggcaccctctggcccaggacacagggactgggactgcctacattgaggtaatgactgttcctaacttagagaatgtaaaaacatgtcccacaggcttaagtcttgcttttcataagaatgtaagttgctattcttttttgttaagtttcggcctaagagttcttgttttatctctgccctggaaatacagagtgtcatataaatccttgctcagatccttccaggtttctctctcatctaattctctcctaactggctccctggggatgcagacagttatgagggagcccatggcgcaccattaccctcgggcacctgcccaagaggagccacaacttccactgaagcatcccctcagcggccagggttttgccatgtacctgggctgctggttagaggccgatggttagaggagagacactgaccacttcttcttttgaagattctaccagtttccattctgtctgttgtcacctctagaaataccacatcatgtttttttccttgaaatctttcagtataaaaccagcaaagaaggcagtacggtgggggtcacagtgtcccacgcatccctgctggcacagtgccgggctctgacccaggcgtgcgggtactcagaaggtaagggctctcgggggtggggcggtggcccctccagcctcacacagatacctgacgtacctaatcatgtgactgtcactgcacctgtcaaaaccacccctgggtagtgcctttgcccattaatccgggtcatgccaggtagggagatgcactgtctttagcatgcttacagggtctctgtggttgtgctggccaagagggcacacggtgtctcttagcagagtccagacaaccccatcagggttgttttcagtaaatgcacatggatgttgattttatggaacatggaacctatatcccactgattgatttatacacagtgctgggttcacaggcctgccctggggggctggcttactctgtgacatactgagggtcagggcatttttcattcaaaaagaggaaaacacttttagttttctattactttatctatgactgtagttttgacctcagctgtcatggatataaatatataagtagaatctttatggttatagatgatctgttgataaagtatagtcagcacctgatttacttcaaatgtcagatacttaacttgagatatctttaaattaatattatttaattgataagtactaattgtatatatttatggggtacactgtgacaattttaaaaactgtaaaaatggactcagtagttttcttacattgtaatactagaattgaacaaaactactgagtgaaattgaatggtatgtctaaatatctaaaatataggtgttcaggccaggtgcagtggttcataccagtaatcccaccactttggtaggctaaagcaggaggaacacttgaggtcaagagtttgagagcagcctggacaacatagtgagaccctgtctctacaaaaaaagggagaaattttaaatagaatttttaaaaaagaaaaaaatataggtgtttaaaagcaagggtataagttgagggcacagctaaagcttttacttgagatttggaaagtgattttaggtattttttaagggctttattaaaaaagttagatctttcagatcaagccccgtgactttctttgtcttcagctcagagctgatcttacatatgtcacctacaatttgggttctttagccaggcgtgatgatgtgtgcctatagtcccagctactcgggaagctgaggtaagaggaccgcctgagcccaggagttttgggctgtagtgggctgtgctaaccaggtatctgcacgaagtttggcagcaacatggtgaccttctaggagtggggaaccaccagcttgctaaggaggggtgaaccgacccaagtaggaaagggagcaggtcaaaactcccatgccaatgagtaatgggattgtgcctatgaatattcactgcactgcagcctggcaacgtaataagacctcgtctctaaataataatgataataatttgtgttcttaaccaacagagaaagggtgtttatagtactgttattcatggtgcaacagcatttcctggcacacaaatcaaacctctcctgtttgcctttggagtgctgtggcctttggcgagaagccaggtctgcccacagccccaggctctgtcctttctgcctgtgcaaggtgggagccggatattagagaagacttggccaggggctctgagcagagagctgtgctgggaaccctcaggacccctatccactccagcttcctaagatgtgttagctgcatacctctgggtgagaaaacgggcagaggaagagtgactttccgaagggtgatgcaaaccaccagctcttacagaggggagatgccggatcacggcctctgggtgtgagaattgaggagatgtggtgtagagttgagaagtaagaatatccctgacagtttttcatccccacctcttgattctgagaagaatacccactcaaaaatatctgatgagaagatgtggagaggccgagtgcggtgacttacacctgtaatcccagcactttgggaggctgagacgggcagatcacttgaggtcaggagtttgagaccagcctggccaacgtggtgaaatcccttctctactaaaaatacaaaaattagccaggcatggcagcgcatgcctgtagtcccagctactcgggaggctcagacaggagaattgcttgaacctgggaggcggaggttgcagtgagctgagattgctccattgcactctagcctgggcaacagagcaagactctgtctcaaaaaaaaaaaaaaagaagaaaagacaagctgtggtgacaccttgtatagcttcttcagtatgtgatgttcctgtgccttctgattagtgctcagcgtggttctctgtgttagttccatgaccttctacttttatgtgtttccagtaatttgaatagataaccaggattattattaattggtatgtggtatttggaaatgctgtatctgttcctgaaacttacatgttgatgacgtactcacctcagaatttctctagaaaatgcatagggcttattgagagggttgctcagtggtgtcaccttctttgtccacttgcagctgaaacattaacaaacgtgctggatttcaaaagggatgctggtctgtggcatggcgtgttaacagtgagtgttgtttgctgatgactaactgttggaacaagggattgagatgaacccaagcctctgcctgaaatgttgttgggagagtacatcggttttgttttgctttttctggtgtggctcgggcccactcgccctaagcatgtgtgctcccccacagagcgtcatgaacaggatgcacgtggtcagcgtcccctacgcgctgatgaaggcgaacccactctcctggatccagaaagtgtgcttctataaaggtaacggataccatggtcagggccttcacccttctttagggaaatctctttgaactgacctttggtgcttaagaaaaaataaagctgacatgtggaactgcagatgtaggctgaagagctgtgggacgtctttcttggtcacacccctgcccaggaatatgggggctttctctgcctctggcatggccctcagggtttcgtgggtgatgtggtaagtagggccacttggtggggtctgggccttacttctctcaacggttgaggtgcctcctgggaccaagcaggaggccccagcatggccacacctgcacagttggcagtctgtgtctctgccctgtggagctcagtggcacttctaccagccactgaggcactggatcacctgggtcacccatgttgccttgttctacctactgggctgtgcccctctagacatgtctcagagcagtgtggaggggcagctctctctgtctgtcctactttatggagggaaactgaagcttgggtaggggtggggggattgctggattccacatgctagccagtgcaggggccagactgaggcctgagaccatctgtttagcttctggggtcctcacacttctcagccagcaccaggggtttggggaaggacaacatgagatgaagcgggcagataggaaaagagcaatatggagcttctaagaaaaaattaatgttggaaatggatctgaggttttgatgtctaaattgtacctcagagttgatttttgtggaaaaagctttgagggtttgttagactgcatgtgagagacggctgcagagagcttgtgacctgggagctaagtgttgtgtctgtctgtgcatgtacacctctctgtgggatgaggtacacgtgtctgtaggcgtgtgagggtgccagtccttgtgacgcagggatgtctgtgccatcctctctctgcagctcgggccgcgctggtgaagtcgcgagacatgcactggtctctcctagctcagcggggccagagggacgtcagcctcagctcactgcgcatgctgattgtggccgatggtgccaacccgtgtgagtgagcctgtgtgcccggcgcataccccacacagtgtcccctcctgcaaaccaaagtagaatacactgagaagcaaaatggaggcattttcactgccattgtcatatagatacacatgtcccatcgtttctatgacacggaacatcttggtgattcactggtttatcccatgcatgtttattaggccactaaatttaaaagcaattttaatatgcttgatgaaaggtacatgccttaatgagagtcatctttcttaagaaattaccagattgtgctgtggcctggggttcctgtttctctttaggcctcatccccaccctcctgccctttgtcctggtgcccccacgtctctggcttctggcttcacttctcccaccaggacccaaccattctccctcctggtttgcctgggtgtcccccacatcctcccaggaggagctccctatggctgctgcctgaccacgtagggcctcctgcgtacggtggtctgaatgggaactgctttgtcaaggctgcacacgtgagctctggggcccaggactgtccagggtctgactcagtacctcctctggggaagcctcaggtgatgctggtcacacaggggctcctgttgcagcacacacctgttgaccaggtattaggggttttcttgtttgttaacctgcatcattgtctatgcactggagactaccctgcatcagaagctgatgtttcatcttatcccctctccagtgtggccgacaccccatctcttgggaggtcaccccacctttgagcacccccagagcctctcattctcttggtccacacctgagccaggcagggcctgcttctgggttctgcagcactgctcaggtctctgcgtctccaccccaggcgcaccgccactccgtggtccccatggtggagtcagagtgtgcacctcctctccagtgcctcttcccatggcactcccctgttgctgcacctgatccttgcagtgccgtgcagcttgtctcccaccacatgcagcaccttcctgtccctagtgatgccccttctgccctttggagcaccagaccatccatggctgtctgatttcctttaaagataccatcttccttgaagaacatgaagtctgagggtacctgtgaaggggccccttccttctgctgatgcagccctgtggttccgatggccgcaggctgcgctaacttgagcatgtccagccaccccttccctgctggccccccagttagtgctggcgttccactcttgttgctctgtgcagggtcgatctcctcctgtgacgccttcctcaacgtcttccagtccagaggtctgaggccagaggtcatctgtccttgtgcaagttctcctgaggcgctgactgtcgccatccgcaggtaaccttattccttgctatgtctcatgagcacttagttgaatcttctgcatacagctgagttatcctggagctgtgcctgtgcctgttaggatccaggcccatttgtgcagtagtaccttggtgcctggccccccacattttgccggcttgggtttgtgtggagaattgggtaggaacttcctgggccatactctggattcttgcagaatgccggcttgcgattttcctgagtgcttcccaaattagaaaggccttgtcatctcgtctgtagctgtggtaaacattacaacctaggaactctttcttactctgaggcaggtgtcggtcagccgtggagtctgtgggaaccactgacctgcctggagaagcacccggcctggtgcttagtgcccggccacccacctcccgggaggcctgtgctgctcctgtggcggtttccctcatgtcatgtttctcagcctagagggcatgttgagcctgcagactgccctgagtgtccttgtgtgtgggtgcggggctgctggtccttcctgtgctcctcactcccctcctgaggtttcctttcccctcttctcacctgccccactcccagctccatcctgtgggtagaactcagtgtgctcacagctgaggtgtcttagcctcaattgtaatcttgtattatagtcatatattcataaatggtatgtgtttccatatatggaactaaccctaagtttttaaaagtaaccctaacttggctgggcacggtggctcatgcctgtaatcccagcactttgggaggccgaggcaggtggatcaccttaggttaggagttcgagaccggcctggccaacatagtgaaaccccatctctactgaaaatacaaaaaattagccaggcgtggtggcaggtgcctatagtcccagctactcgggaggctgaggcaggcgaatcgcttgaacccaggaggtggaggttgcaatgagccaagatcatgccattgcactccagcctgggcaacaagagtgaaactctgtgtcaaaaaaaaaaaaaaaaaaaagttaccctatttaatcacttaacattaaaaaaacgctattgtcgtctacaaactataaattattcttcattcttttgttctatggtgatttgttttgcacaactgtgtaatttttttcatattggaggaaacgcctgttgctcagtattccagttactattgttgtatcacaaacaacaacagtcattttattgtctctcatgctttctgtgggccaggagcttaggaaggcctctgccaggtggttctggcttgcaggagatggtgtttggagggagcggtgaggggctgagacagctttgtgtgtgtacatctcaggcccccacctggtctctcagagtgagctgctctgggcttccttgcagtgcagtggcctcaacaccgtccttctgtttgccgggcttcacagggctccaggcgagtgtcccaagacaatcgggtagaagctgaattgacgttactggcctgcattggaagtcacacagcatcacaaccactgtagtcacaggcccttttcccactgagtggagtgtcgacgtcacattgcagaggggcatgtagtttggagacattgcagcatctttagaacatgcgtttctcacaagtctgtaacatggagcagtggctttggtgcagaatcatgctgcaggcaaggtgggcccacctccctggaatttcatccccctcgtcagttaaacccatggtggttttattttctaggccacctgatctgggaggaccacctccaagaaaagcagtcctgtcgatgaacggtctaagttatggtgttatcagagtggatactgaagaaaagttgtcagtccttactgttcaggacgttggtcaggtgatgcctggaggtaagagacataaccagagtgggtctttgtccatgactgattgaggtaacgaaaagggttttgttttgttttgagacggagtcttgctttgtcaccaggctggagtgcagtggtgtgatcttggctcactgcatcctccgcctcccaggttcaagcgattctcctgcctcagcctcttataaatactccaggcttcatagtagtgctctagaagcaagcatacaagtaaaagatttctcaagaatgtttttcagtgtaaattggaattttactttgtaaaatatttgctcagttttttccctccctttgtgctaagtttaaagatgagctaaaatataaagatgtgtatatggcctatgcaactcacttacagttctttgatatttgggaagacggtgataatagctcactgtgttccaggcacaggcttcatacttcatatgtgttgaagcatttaaccccatggcaaccatgtgaagtgggcagctctgaggaaaatggtaatgtttgtgaataacttgataattaggttatctaagtaagttctagcaagcatgtgttagatagaagcctcatggaagcttcccagaaattcctcgatgtcagaaaggcctatgtgaactcttctgcagaagttggctctgtaggcctgaccgtcatgttagatgttggaggttttccttgctggcctgaggcagaatctggcctgggaggccctggtgacattcgagtggggacactgccacgtggtctgaggctgccctccttgtagccaccccacagctacttcagctttcctgcctccctgtgatggcccttctggggttcacgggcagctgtcagggccccttttggtgacttctagaggcaggaccccatctgtcagtgcagtctccccccttccaatgcggccctgactgtgttaggggttgcaggcactgcgagaggctcagcgtcctggcccttgtgcctgcaactctgcctcttgcaggcggctgtgctaaccggctgtggctgctcaggtgcagaccctgtctgtgggtggtgctggcagcccagccatctctaacctggagcctggggccagctggtgcctgatccctgtgtgtgcacagatgctgggtcctcattgaataagactgaagtatttcagcctgtgtttctagctctacttgttactcatacaaatggcatcatttttttcctgtaattctactgagaaatagaacagtcagtcttgcacggtgcttgaacctgtcgtaaaataattctcctgagaaatagaacagtcagtcttgcacggtgcttgaacctgtcgtaaaacattttcacagacagcaatcattggggtgtcacttatttactcatggggaaaatacaggtaagtgtttaaacttccctggaaaatcatgatgaggtcatgattctgaatgaatcttaggaacatctgtagttgtgcgcgttttatttgtaaaatgtggattaggacaggacatgcgtgcacagcgctcccgtaggcgtgcacgcagcacacctcctcccccgggcgtgcacacagcgctccaccagacgtgcatgcagcgcacccccctcccccaggtgtgtgcatgcagcgctccccctctgccaggcgcgcgtgcaaagcgctcccccaggcactcccccaggtggacccctgtttcccatgaccctccacagcccccgggctgtaccccttgttgtgggactgagccccatggtgaatcctacgggtgatttgtttgcagcagtttttcagtctgccctgtgtaggcctgtgttcactactgtatcaagtgtgtatgtggtgctttgtggcttttcgtgaccttgccccatctctgcatgtgcttgtaagtgttgtgtggcactgatggctgcctggatggccacctggaagcacagacaagcaccaccttccacatcagccaagcaccaccttccacatcagccaagcatggctgcattctctctgcaaagtcttttatctgatttgtggcaaaaggaagcaaatatctggttgtctctctctttctttttactgtctttggagatgagaatatattagaaaaaaactcaagaagaggcacagaaggacagttcctagctgacccaatgggttaattgattgctaagtaaccaagtttcatttaatggaccacagcccattcatttgtgcatctcatgcttttgtgtgaggctgtttctggaggcctttctgtggcagagctgaggactaggcagatgagatcccttgtgggaggcgaaggcagcaggtcaccgagagttgggtagggtgcacttaagtaaaaacagaactgggtgatggggctgtgggaggagtcacactgaggcctgagacatcgtgctccatgaaaaggcgcacatgtacaaattggcccccaaatgcggaaaggccgagaaattgaagaacgaggcagacaggtcgtttgtcagtagagggtggttcattggggaacttacagatagaatcctggtcttgagtggctgcaagacaggtagatctctgcaccgcaaccctccagacccagggcctttgtcttggggaaaaacatctgcgctctggaaagaatgtgcacatggctgagggagtgccctgggcctcatagcctgtagtgtgtgcagcagcatcaaggttgttttggaagttaggcagaacttaaaatgaacaggtatttctccatgaagatatcctagaggcactccttgacttaagattagtctggagtcacatggcagatttgcatttaaaataaggttactagaaagggggcaggcatgggcagagttctgtcaggctctggagcaggagatggtgtcccgggctcgtgtgtggtggtgatggtcaggagccagggccagcagcaccccatgtggacccgagagggcagtatgacaagaggaggcacagggtttatttatcgtagtacaggaaatattttgtcagccggggcttattacatgaaggatgtgttgtactttctggtcaccttacattgattataaaaaatattacatataaaatataaagacttacagctaggtagcatgtgtatcatctgtgtcataaaactccttataagaaggtgctgtgtatataacatcctgtttccataaccgcacatacagcagcaaggagatctttgtgagtgatccatttaaacacgttcttgataattttgagttttttttctcattttagctaatgtatgtgttgtgaagttagaaggtaccccttatctttgtaaaactgatgaagtgggagaaatatgcgtcagttccagtgcaactggcacagcgtactatggattgcttggaatcacgaagaatgtgtttgaggtttgtcccttttcctgactttcatgttgaagttaagttgcatgagcactcatggggtcccaggtgtgctgggtgctgggggattgcagaggctgcggggatggtctccttccacacaggcgctgctggggctgttggcacatggcctgcacacccctgtgtgtcctcccagagtgagggcaaggccagtaccaggaccaggcatgctgtggagggctgggagtcagcgtgcttcccacagtcctgcatgggaggagggtgtgtgggtgcggcctggtggccaataggaaggcactcaccgtggccccagggaaaccagccctctgctatatttgcattgttgtgatgtgagttgttcaggacaagtctagggaggccaggcacccagagcagaggtaaaagggatgcttgtttcctgcctcaggaggcctgcccaggagattgagcagccaggccacagaaactgggcctatgcagggccagcctcctttttccccctggccagcaggcgcacacgtggtgctgagcctcctgccgcctgctgggtctttttggccagttggttggttgtccacagcctgatcgtgcccctctccactttgtgcaggcagttccggtcaccacaggaggagcacccatctttgacaggccattcaccaggacaggcctgctgggcttcatcgggcctgtgagtatgtcctcctgtaccagcactggcagtcagagaaggtagggggtgtggctaagggacacctcgttgcagccccacccttgtcctggccgttcctgacctcccatgtggccttggtcggtggcgctgacctccctgcccatcaccctacctgtgtgcagggccatccacacctccgagactggtgcacagtcctgcacacaggcctgagtcgggggtccccggggtggatgaggatgttttgctttttatatggagtggcaggtttgtgagtattcattatatcattctttaccattttggatgtctaaactattcaaaaataaatgcttctatttgtaacatcttggcccagtgtttctctcaactgggcaattttgccccttccctcccaggggacttctggcaacttttgaagacatttttgcttgtcacaactcaagggaggggagtgctcctggcatctagtgagtacctagaggccagagatgctgctcagtgtccaacctaagcacaggacagcacctgcgatggtattgtcagcccagaaggtccctggtgccgggtttgggacccctgcccttagctcagcagttttcagtccttcacaaactccacccacaactcgtttcccacttgtgagcctttcccatgctgacgctgccccagcagccccactttctttcacatagcctgcccctttcccatgttgcctcccttcctgatgctgccccaccagcccccattccttccacacagcctgcccctgttccaggcctagcttgtcacagggcctgcgttgcagattgggtctgtggggcattgacccgtttgcaaggcgctagaggctcctgtgctgttggccccttcttggggggcctgaccatggtcctggcgcatccagcttctgcccgtgtgggtggagtcttgacgcacaccctttccctcaggacaacctggtcttcatcgtgggcaaactggacgggctgatggtcactggagttcgcagacacaatgcagatgacgttgtggccaccgcactggccgtggagcccatgaagtttgtctacagaggcaggtgatgcgctgcggacccccacgccgggagtagattccttcatttgcagctcgggaagtctttgtgcagtagatggaaagcccagcaaacttgaattcacaaagcctaaaaattgttgtacatcagaaaactcctaaagtaaaaggaaaatatttgcagcaatgataccagagttaatatccttactgtccaaagagttccttggattccttaagaaaataaggttttgatgtaaaatttggggcaaaggctcaaggggacaaatcagggagggaagaattgagtaaagcaaaggagaaatgggtctaagttcctaataaccttggaatgtgaattaaaacagaaaagtgccattttctctgcgagacacatgacaccctccattgcctctggaataaaaatcaactcaacttttctacatgtgtaaagcaaggaccttagagattctcttgagcaaataatagacctctgggcctatgcccctgggcacaggggccaggaagagaattttgcttcttctactcccaagctccttgtctgggaggaagctcttcccctaactggtccactcaaccagctgcctttttaaattttatttttctcaagggggtgccttttttttttttttttttttttttttaaagatagggtctcactctgttgcccatccaggctggagtgcagtagtgtgaccataactcactggagcctctacctcctgggcttcaagcagtcctcttaccgcacctcctgagcagctgggaccacagacatgcaccccacgcctggctaattttttaatttttttgtagagatagggtctcactatgttgctcaagctgctctcgaactcctgggctcaagcaatcctccctccttggcctcccaaactgctgggattacaggtgtcagccaatgtgcctggccaaggatgtgccttttgttactcaaactaaggtacttgggagccaggtcagaccctgcctttgagtagcccttaaagcaatcgtgaggggattctgcaaagtggtgtgtcatcatggttagtcttgaggaaaaagcccagaggatggacaacagagaaggtgggagattgctcagggggctgggaagggcaggctgtgctcatgcatgtgtgcgtgtgtgtgtgtgtgtgtgtgtgtgtgtttgtgtgcgcctgcgtgcagggggagggtggcacagccagggtcatgacccccctcacagcagaaatgggggacacattgggcaggtgtccttagggataacatcaaggtagcccaaaccctgctttgaggtggagcagggagaccaccccctcgcagggccacctgtacctgatggtgactgcgtctgcaggcaggatagcctccctgtccccactagggaagagctgaggaatacaggagcttggaagtggaaccacaaccaattgagagtatatgtgccattggaagaagagcaatagaagatttgcaacatgaactaagatcaagaaatgctaacaaagtaattgttcaaagaacacagtagatggaatacataaaatggatacagctagagaacaagtagagaaggtggaaagtcagattagggaactactctggaagtaaaataggaactttaaaggaactattaagagagatgggagagaataagggctggtgtccagatagcagactcaaggagaagggatatgtttagtggtggttagggattgtctgaggaagcaggtggttggggttctctggactgggaagtggtccacagagggccccatggcatgttgagcttatctgtattctcaccatggaccacacaaaagccaagcaaaacacatcagacttccccacagtggaactggcacaagataacagtgcacccaatttatccaaattgtcactttattgtgcagttgtaataaaaaatatttttaagcatgtaagtttcagaagttttaacacacagaggtccgtactgaaaacagttttggtcaagatactaagagaaataaattcaagatgtgctataagatgtatgagagtaaggagaactcagtactaggtgaggtctgttgtgtaaattgtgtgtgtgtgtgtgtacacacacaccagtcaagtcaaaggaaaggacaagagacggtatatccataatgtcccagagtcagaatggtagacatcctaacatgatgggtttggtggggagaccatcttcttactttatgaaagaaaagacaaagatatcaactcaaagtctaaaagaaggaaaaggcaacacagaaaaaaggaggacatgttgaaatttttaagatagtaaaaacacgtctaaatatactaatcactataaatgtcaatagactaactctagtaaaatagagatgcgatctgttggattaaaaaaatataataaatagaacttttagacaaagatttgtgcagaaggaaatttacatcagattaaggaattttttcttgtaaaaatgtgtgtctttggagctgttttgctttgtcctgaagtcctctgttttttgtgacttgagacacatttcaaccatcctcgaggagattagaatgatgagttactttttgaatgtgcagcaggtagccccatttgatagactgcattttaaatactaggacagtctgcctcttccatcgtgagggtgagaatgcatctgtgtcttgtttggcctcttgccgtgtggccatttccatgtctcatcccgcaggatcgctgtgttctctgtgaccgtgctgcacgacgaccggattgtcctggtggctgagcagcggccggatgcctcggaggaggacagcttccagtggatgagccgtgtgctgcaggtgggcgccccggcacggcctatggttcggtgaatctcccaagctggcacccccactccactccaagtgccaagtggttggcttgtcccgcccggtcctccctggctccagctttgtttatctgtatttttcattgcaaattgacaaattacagctgtatgtatttacgggatacaaagtgatgttataatttatgaatacaatatagaataattaatatatccatcacctcaatatttatttttttctgatgagaacatttgaaatgcactctcacagtgattttgaaatgtacattattatattcaccagtctgtgcaatatatctcaaagaaaaaactttcctcctcctgtctaattgaggctttgtgccctttcaccatcatctcctcattgccccatccctcagcctctgatcacagatttgtggacatgtgtacacaaatacagtgtgtgtgtttcccctttctgagttaaatggtagaaaactgcacacacttctcttcatcttgtttcctcatttaacaaagtgtccagagggcattccatttcctggcctggggaacaggtccacagaggggatgttcctgtcccccacccagcatctccccagcctcaagttgggggcctgtgccaaacagggtccttccctttcaggccattgatagcatccaccaggtgggcgtgtactgtctggccctggttcctgccaacaccttgcccaaggctcctctcggagggattcacatttctgaaaccaaacagcgctttctggaagggacgctgcacccgtgtaatgtgctgatgtgccctcacacctgtgttaccaacctccccaaacctcgtcagaaacaaccaggttagttgaacctaacaacaggatgctctctagtctaacagtggtaacagcggtgcttgtggttagggtgcggccctgctagacctccagtgccaactgcccacgtctttggggctggggtcaagagccagagcgagtgtgcaccccagaatggtgccacctcccgccttcctggaaccagccacgcatgggggaacttaaccacatcacctgcatggtggtttccacctgcctgttaggaaccaattttaatgataaactcaaggatggcatcttagctttgcatggctaggagatggctccctagggctagaaatgctgcccaggatcatcctggagctggacgagctggacacatcacatcacccagtgtctgtgtggcctcggaaatctctcagcaaacggccaacttgccttccctcattttatacatttaaaagctaattttagagactggtttaactttaatgcaatttttcatttctttggtcctgttgatttttagtacatgccaaagtttttttttattaattattgaacacatatcactaaatacatttcatcaggaagatttaatttcctgatttatacataaagtacagtaaaacaaaatatgttaagaattttgctgtgactgaggccaaatcgtatcctctgagatgcgtcgtgtagtaaacttctcaataaggcgtagtttatgttcaagagagaaattctctttgtcacttagcataaaccttgtagctagctttctgaatatttgtatctcagtagaagagttaaatgcctcattcaagtatgttttcaaaataaaaattgtaaataaaatcacgtgatgtttatatatgagaagtcaccagcttttcattcagagttcccccgtttctagaggttggaccagcctcaatgatcgtggggaacctggttgctgggaagagaatcgctcaggcttccgggagagagctcgcccacctggaggacagcgaccaggcacggaaggtgacaggccagttccggggacgggtggacgggtgtctgtgccccggaggcgccagtgagcaagtcgccctctcgtgcagttcctgttcctggctgacgtgctgcagtggcgtgcccacaccactcctgaccacccgctgttcttgctgctgaacgccaaggtgaggcagtgtcacgcccacggggcttggaaacacctgtgggccggtggagccctttgcttgtctagttcatggtgccagtgtcctggttgttctcatgtttagagaacagggtgcctgtggactcagcccccgtcctggttgttctcatgcgtagagagcagggtgcctgtggactcagcccccttgtctggtgcggttctcgctgcctgccctttcctttcttgttttccacacatttcacacaatagtatttctattgattttgtgtttagcaggaaaatttttatcagctcaagtttttaaaattaaaaacagtatacatgtaaatattcctaagtttgtgagctaaaaggaaatgtttattttgtaaaaaattagccatttagaatttctacatttggttacagcttttaaatgacaaatgttgcttcctgccctgctcctgctgctgatttggaaattctcatgtgtttcaagttcctgttgtgtgcattccactgtgctaggaacattcaggatgtcaagaaggagaagctgtaatcttcatattcaggttgtgggcaggaatgcgaaatgcggaaacacagaaagttaaataacttaaaaccctgcaaggcttcctgtcccacgcaccatacaagctgtaagaactcttaagctttggtgtcgtaaagagtaggtcactgtggcttagaatatgctcttctagctcttggtgctgctcattcgaattaaaaaaatacttaatgatgcctacaatgtgcacagtgcacagtaataagattaaaaggacccctactctcaggaggcttaaaatcagtctttcctgctagaaaacaagttccgtaggagagagactttgtttttctggtgtattggaagcatctagaaccatgcccagtaaacatttattttatgattgattgagttctaaagcctacaaaccagccagtgatttatcattgaccaaggtaaaatcagcttatggtgtgaacctcagtatcaatacagtggagtgatgtaacctggagtgctggggagggggctttgaatggaactgggtagcaggggctatgaagaatgatgcccagtggctcaaggcaggaaaggaggccagtgtggtgggggccaggtggtcccaggtaggggatgcagataaggctgggggtcgctgggttttccctaaggatgcagtgggatcccagaccttgcgggctttgagtcccagtccagatctcaggttctgtcctgatggggccctgactcatatggactggcaaagcttccgggatttggaatctcaggatctgcccagcccttgtgcctggacacagcacataagtgcgtccactggtctctctcttccactgccttctgtcagtagaagccaccaatcgagaaacagggagttttgatgttacactggtctgctctggagttttatatttattagactgaattgcactttttatcttcttaagaaggactaaaaaagctgcgaggcctggcaggggatcagggaggatgagtgtcctgagcagagaggtagggttaccaggtatttctgtttgccttgaactggtcacatagccccagtgcccctcagcagagagacagggtgaatgaaggagctggtgtagtcagtcctagaggagacacacagatgcctctgagaaagccggttgcagatgacacacgcccaggctcagtgcaggtgacctgtgggcatggaaagtagtacaattcagggatgtttgcttatcgcttattatgtatttataatggtgtcgtatggaatattttattgaaaaggccagaaaggtcttctttacccacgtgtttctggctctgccctgggtgaatggagtgcccgcatctctccctcttagctgggaccacacaggagatacttgcatgcctgtcccttcactgctagtgagagagtacagatggtgagaaaagacaccagtcgtggaccatgtgcggtggcttatgcctgtaatcccagcactttgagaggctgaggcgggcagatcacttgaggtcaggagttcgagaccagcctggccaacatggtgaaaccccatctctaccaaaaaaaagacaccagccgtacgtctaggactgacacattgtcattatcatggacgctaatcacaaggtgtcgtgtgcagtggcgtgcaggtggtgtgcacgcagatctgcgaacagcccacctgcacgcaccagcatacagatgagctcaaagatcgctttcctagggcaccgtcacaagcactgcaacctgtgtccagctgcacaaaagggctgagagagtggccgcggctctgatggagaagggaagactgagtgttggggaccatgtggctctggtctacccaccaggtgggctcactgtggggctgtccacctgcagctctttgtaagcagcctcctatcctaagcagccccctagacactccctccccgaagcatcttccaaaactaagctcagcccctcctctctgcatgtgtctgcctcctcagctcagctacccctgtggaaacccaggagtcacccatgcccccccagcaccacctcccctcctctctcgcaggaacagtgaacagaggctggtgggagcctcttgcggccggcctcctcacagccagtccttgtctccacaggggtggacctcattgccgcgttctatggctgcttgtactgtggctgcgtgcctgtcaccgtgcggcccccgcaccctcagaacctcggcaccacactgcccaccgtcaagatgatcgtggaggtgcgcctacctggcccgcgggtcagagtctgtgagtgggaggctgcaaggctgccctccgctgcccccttttctgggcagcttgagaggccccgcccacccacccttggcccctcgccatgcaggtcagcaagtctgcatgcgtcctcaccacgcaggctgtcacacggctgctcaggtccaaggaggctgctgctgccgtggacatcaggacctggcccaccatcctagacacaggtgcgtgtcctcgcactgcccaggaccagtcccttttcctttctttgttgtaggtgtggtgtggcctggctgccgtccaaaaacacacgtgaggcaagagcagtcctggcaggagcctggctgacagcagggggtgccccgggccctggtggggagtaggggtccctgtcccatgtgtaaacccacgctccactcagcccacagcagccgcacccagtcccaagtggtgtggagcacagccttgcccctctcacccgcctcctactggcatgggggctggcagctctctgaggctttctgcaaacgctttgaggacacagctcccaccgcatgccgccactccagcatccctgtccccatcattggtgaatgctgtcatgccccatgaaatgctgagggccaacagggtgagggtcagaaacccccctggctcccctctgccgtggacctgtctcagcctgggctggatggggctgggccagggcagctggtgtaggggagggcaggctcagagccaaacagctggccagggccccaaagcctcacgggcttgcctcaaggggagcggtgcctgccctgctgagcctgtgtccagttgcacccagggaggcagtggtgtctggctcatggggccacgagaacttgatgaagcacgcagaacccagagcccgtccacagctattcttgctgtggtcgggactcggctcatctgggctttgccataggctctgtgacttttggcaaatccctagtcctctaatctttcctactggtcagtgacgtgatgcctcccctcttcgccctgcctcgtcccccatccccacaggctcagtgtggtcttggtgggaccgggtagcgtttccatgaagaatgaaatacgctttcctgagcacgcacagcctgcatcgtcacggccccactcccgtctgagctcactctctgcaggactcccaaggacaaatcatgtgtcgcctcttgcctgtgaaagcccagagcgttcagaatacatgtgggaacactaatgttgctggtgtctcctgtttaacagatgacatcccaaaaaagaagatagcaagcgttttcaggcccccctcccccgatgtcctcgcatacttggacttcagcgtgtcaaccactgggatattagcgggagtgaaggtaggtcctctgaaatcttgtttgcttcagcccctagaaatcaggaggagtggacagaaaggatgtcagatgcagatttaaactgacaggtccttcttatgcaaagcacaaagcaacaattttgcttcttaagatttgtgttaaataccaataaatgctaagatgtgattagcctgagagtaatgcgttttctgatgcattatggttatgtctaaactttctgatttatgactgtctagcttacaggaactggtggctttgaagaatctcttaccttgctgggagtcaatagctcaattaaaatttttcaggcggggcgtggtggctcacgcctgtaatcccagcacttcgggaggccgaggcgggtggatcacaagatcaagagatggagaccatcctggccaacgtggtgaaaccccgtctctactaaaaatacaaaaaattagctgggcatggtggcaggtgcctctaatcccagatactcaggaggctgaggcaggagaattgcttgaacccgggaggcagaggttgcagtgagccgagattgtgccattgcactccagcctgggcgacagagcaagactctgcctcaaaaaaaaaaaaaagaaaaaaattttaaaaattcattaccctgaaattttgtttcaaagatttttagtgtaccatttcttgggtattatttaggttatatggggatttgagccaaccgtcttttaaggaaataaatatgatgtttggtagttcggagctatggtctagccatgtgaacagcggacactgccatccaccctctcccctcctgaatttcatttcactttttttttttgaactttattttactcttaagatgtcgcacgcggccacaagcgccttatgccgctccataaagctgcagtgtgagctgtacccctcgcggcagatcgccatctgcctcgacccctactgtggccttggttttgccctgtggtgtctgtgcaggtgagtgcagggcccctgctgcctgccaggtgggagcagctcgtgtggctcttaggaaccttggccttctaaggcaccttttctgggtgctcaggaagccgatgagatgtgtgtgagtgggtttgtttggggatgaagtgggttggagtctgagtctgaaattgagtgaaaatacatttttcattaaatacactgtccgttatcagtacttgggaagaatctgcttgattccttcaaacactagaaagtggcgatccgtctctagaagtgaatgcctctggagtggtgtccccggatcctctccaagtgttcggagcagagctcagaaccccgtgcctgccatcccccaaccttcaccctgtggcatgttttccaccaaacccccccacttggcgtcagaacagaaatcatgcccctgttgtggctggaaaagaagtgttcttgaggaagggaagagtggagtgcccagggtgctgggtgggcgggcggagcctcacgagccttccctctcgcagtgtctactcgggacaccaatcagtgctggtgcccccgctggagctggagagcaacgtgtccctgtggctgtcggccgtcagccagtacaaggcccgcgtcaccttctgctcctactctgtgatggagatgtgcaccaagggcctaggcgcacagacgggtgtcctcagggtgagtgcccagacccgggcttctgagtgtgctgcagaccacagccctgggaagtttaaaaacaacaaaacaaaacaagactcccaaggcccctccctgcagttggaggaagtagagaaaaccctttcccactaggggccctatgtacacatctgtcctcccacggcccacctgtctctgcagctccacaccccgcaggagaggagggtggggggtagggcagggtccctgcgagatagcggggtggaagtctggccgcgtgggagggcaggtgtgggatgcaggtcagatgggaatcgtttagcgcatccacacgtaggattctgtggaacagacacagcctgcggagaggaggttggtgtccagctccacctctgtgtgcccacccggagatttcccaaaacagtgcccagggccctggcaactcactgagctgtggccgtggcctgaccgctcacccctcccgcagatgaagggggtgaacctgtcatgtgtgcgcacgtgcatggtggtcgccgaggagcggcccaggattgcgctgacccagtccttctccaagctcttcaaggacctgggcctgccggcccgcgccgtaagcaccacgttcgggtgcagggtcaacgtggccatctgcctccaggtgaggtgcctggggctgcggttctcgaaagctggctgttggcagcatggagacccagtttcccagttgttaatgtgccgttttgtagccgcctgatctatttctccttctctgggcctttgatatctcatttccatgtaacattttagcttcaagggttttatttttaaagatgttctattctagttggagaaaggcttatttggaaaaaaaacacattgtttttgaacagtgactaataactgtaagactctctaagttagatataaaacacagctaagttcttaaagcaagattgaacttactgttttaagatatctagcaatattaaattgaaacattaataaatgtggtaatttgtgttgactcaaattcatttctgaaaccatgaaatgtcttattaaaaggaagcaccaagtttcaggccaggagtggtggctcatgcctataatcccagcactttgggaggctgaggcaggcggattacctgaggtcaggaattcgagaccagcctggacaatatgatgagaccccgtctctactaaaaatacaaaaattagctggctggtggtgcgcgcctgttgtcccggctacttgggaggttgaggcacaagaatcgcttgaacctggcaagaggaggttgcagcgagccaagatctcaccactgcactccagcctgggtgacagagcgagaccctgtctcaaaaaaaaaaaaaaaaaaaaaaaaaaaacataggtagcaccaagtttcagagattgaagagctcacggcagttctgtttattgcttcctcagatagctacagctgttgcccagattttgtactagtatctcaatttcatttctttctaaaaacatcttaaaaccaaatggctttttagataaccctacatattgaacgccttattcacccacatagtacaagaatagctggaaggaaatggcacctgtccgtgccagagcagggctgagtgcaggtctgtctctgtttccaaagtgtttgcttggccttgtgcctccccatcacagtggcagtgcacgcagggcagggcgggggctctgctcacaccctcttcaccacaaaaagacccctgaccactcaagcctcagacccttgtcacgcagcagaggagatcgggcgggagccttttgtgagctcgcttcctgtgtaggctgtggctgagcgtgggtgccggcctttgtgttagcggctctgcgtctgcaagcctggggcctccttgctagacgtcggaagggtatggatgccacacatgattgcagaaatgatgttaatgggatgttcacgtttgctctttaagatacagaggtgggttttgctctctctttccctgtgtttctcatgtggctgctgcttctgtgtgtgtttcctgtggctgtctcctccctgtctcactctgctgcctccttggcctctgtcagcccaacaggctgggaaagctggctgagcaggtatgaccttgaccttgaccttgttggtgcctctgtgcttccccctcccatgagttcatgtgactttctcgtgaattctagacaaacatgtttcttttgctgtcttactttgttcacagtggatattacttgacatattacaaaagctcccttgtaaccaaatttaaaagtaaaactattttcaaaaaatgttaatgctcatagcattgccttgggaggaagggctgtgtttagttccagtgcagaggtgtttaattccagtgcagacacaggttatgttgtctgggatctttaagggtgatgttgatcagagtactcatttaattgatgttccttattgaataaaatgacacataatgtcctttagtcgggattaatgttaactgtaagattcagaaaggaagagagtagaaaggtgaaggctgccatccatctcacctgagtgagtctcggctgcgagcagtccccggtagaattaggctggttggtgagaggcaaggccctgcctgacagcatggtggaaatgcccctcaaatcctaatggtgttttcatcacagcaagagaccagtgggaatagaaagttgttagaactgaaatgtaaagtggcatgatttggtgttttcagagtcattgagtgtttcgctcaatattatcaagctctgtggatgtttggatggaaagcatcagactgcctgggggaccttgaacccctaggcggactcactgcagggagcagagctgctaccttcttgggtgtccccgggggccagggaggagctgccatgcagctgtacctgtagaaacaagatgttaagtgaggcccctgaacagaagttcctctgctgctctccttccagggcacagctggcccggaccccacaaccgtctacgtggacatgcgggcactgcgccatgacaggtaatgctcccagcctgcctgggccccatggatacccagtggcaaagtgatgcaaaccaggtctgcactgactatgcacccccgggacccaggcattagaggacggcggggccaagtcaggcctaccgggacacctggatgggcacatgagaggacagctggctacattgggccatctgcaccaagaggaagaggagagctgtgtgccccactccgggcgtgcctcccaggggagctcagtgtctatctctgtgcgcccgtgtccccagggctgcagttaacatccctttatctgtcacacaaccaggaagaataagagtggcccctgtgacatttggttctttagagggacagggacagagagaagacaagtaacccatctactggcaagaacgtttcttacccgatgacccatgtgacatttggtttttagagggatagggacagatagaagacaagttatccatctactggcaagaacgtttcttacctgatgctgtcataggatctgacttagtttcatcttgatgaacgatggtggtgcatacagtgtgtgcttgctggtctgtggtcagatgtgtatcagggcccctcccagctttgaagctcagatcccagtcctggattctcaagtatggccacactgtagcttgatgtaaacactaggtttagcttactgggtgccaggggcttgctgggttcagggaggacctaaacgaaatgtagagtgagctgctgtgagcacatggggtgggtggcgagtgcatgcgggtggcggcacttgggaccgcagcgtggttggggtgtccctgccattcatggcaggtgtgctgtggaaaggttgacatcctgactgttgtcaacagaccctcagagtgatcatttccaacgtcatgatctgccctttcagacattactacctgtgtagtaaattttgtactgaaattgttcccttaatttttagggttcgtttggtagaacggggttctccgcacagcctgccattgatggagtctggaaaggtagtggaaaccaagacgcgtgcattctgagtcgcgtctgagacctttgtctgaagcatcaccccgtggagggtgctgggggctgcggctctgatgaacacaggtcgacttctggttggggtgggctcggctgctgcagaagtctccttccctcctttgtggctggtatatagaattacttagttatgtttttaaacacacatctgagctcaaagccaagaaagggagaagttcaggtgcaggaataaagaactcccgctgggtgggtggcaggcctcaggcctctggggccagggccatggaggggggttccggcccacccacacatttagagttaaatggagtggccctggccctaagttggagatggcaaaatctcatgccctagtttagggtgtcagcagggaagaggcccccagaccctgtcggggatctgggggatcctgagatggcccgaggactcccaggaaaaaactgagatgctgcaagaggtcagcagacataggcacagaacagcatcctctgaaccaggaagggttcaaaggaaggaggaaaagccacacagcccaggaaggcagcatgaagagtaagccaggcttgatatgagtcggggaccctggtgccttcacaaccgcagaggcaagggaaggagcttggccaccctgactccgttcactgccatggccacagccacctgtggggagtcagagaggggtccagagagggacccagccaagccatgtgatgtccaggatacagactcctgcagggcagcaggggtgagactgcggacagaaggcacagctgctgtgagggtctcgaggtgggagctacagggaggccagtgggactgggctgagtgtggggagcagaaggagtgcgtgagtgagtgaactcacatgcaggtgcaggggcttgaaaagctcccttcccgtgtcccctgttacagtcacttcaggcggtagaccagccgagagtggagtcgggtgagcttagtggacagcacatctgtgggagccgtgggctgctgcacgtcctcccttctctgagcacagggacatgtgagccgccatcgcacacagctctgcatcatccttggtgtaaactcagcgggtttccctgggtcatggggcctccacgtcgctcttttccctgccctgccatgtacagccgcactgtaattgtttagctcacccccttttattggacgttctttcctattttgctgttacaatcacttgggcctgataggtttgtgtcctggaaagagctctggttttggggctcagctgggacatgcagggagaagatggaggctccaacagcatctggggaaacagaacagtcccactccgccggggagggtctggcggtaaccgtagctcacacctccctgtggcccgtcgtcccctcctcttgcctgccctgagcctgcagtgtcattgcccccatttcatacgtgaggaaactgaggacacagaacaagcatccaggccttgtgcagtcaggtggtctgacctgagcccagtgagggaacactgggaccgggcctgggaggccaggtaagagatggtggcctcttgccgtcctgaattggcacagagccagtgctcagtggttggactgactcggagtcacgggcaggaagaacttcctcatggtcaggttcctggccaagaactaggacagacatgtgcctcctgcagggctgggcacagcagggtcactgcacccctggatggatgcccatcaggtgcgctggcatcacctggctgattgtctttgtaggcttagtgaccctctgcccctcctgacacccagagacgggatcccttctcaggaactggagtcattttgcttatttctattaacatctcttatttctttcaaaattcaaagtcaaatttggagcggcctctaaacttcctgacctgacatgagcacatcagtcctgcaggccagcttctgagggacgttattttaatgtcactgaatcaagagagtctcgtgtcatgttttctttaacaagggacatagctctcctccttccagatcctccccggcgtgaaggtcatcatcgcacacaccgagaccaaaggacccttgggagactcacacctgggagaggtgagcaggggcccatgggaggggcttgagctctccagcctcaccagcttcaccttccttccctttttgcttcagattttggaattctaaacttgcctttgggaatctaccagaaaccatttggcccttgccccgtgtacctcccagacccagttcctatgtaggattttggggtactgtgggacaaactgcctcatccctaggttgacctaaccaagagaggggaacccctaggtttgagggcactgacaggtgagaggagctgcacaggaaccagtggcagtgtggaaaacagctaccttgtgcaggacccagcagctgctacgtaaacgtggtccctggcacccaggcaggagcacagacacggggaactggcaatagggaactctgcaccagaagagttcagggcctccacctgcagctgggaggtttggggagctcagagcccttgtcctgaggacacagtggagggtgcgggtctccctgagaacacagaggctatacaggaatccgttgggttgaaatgtctacatgtattgcacgtacatcttgctgtaatttgggacaggcatgactcattatttacaggcagtggtggcagcttgacgtgcagtcccgaatgtgcagattgatctgttgtcatgggagcataaggactcacgttcctagtcctatcctcttggggaatgtgctgtcaaattgatgtcttcaaaccaggcgggcacaggcatcatttgtgagctctgctgtgaagccagactgggggcttccagcaagccgtgcccagagggaaatcactcagcctcagctggcttctcctgactgggacaagggtgtgagcgtgcgggccctcaggtggtcttaccgtgtcctgatgggaaggtgtcctgggtcccaaccctgagtgtggctggtgtgagggaccctcccctcaaccgtcccacttcctgcacagccaaacccaggtctgtaagtcaagggtgtacccccaagaaatggagagtctgagccaggcatggtgacccacccttgtggcagatgctcaagggaaacgcccctattggccaccccgttctcctctttcagacgctgccatgcaggggcgtcttagagccagtcgaactgaccgtgggttctggacggactctctctagaagggccccatgacacttggtcctgcaggcacaggcctctggtcccttggtctctgcatggatgcacaaaatgcttacgtgtgtagatatgagggtgcacacaaacacgtggacaggtggatacacacacgtgaacacggatagcggacgcacacacacgcgcgtggggctgacgttaaccctgggatgtgccgtctgttttcagggcctctgtcttactgtgagtctgagcagctgcacgctctccactctgtaagaaccctcattccttcagcctgtccctgttgtggaatgtgggttgctcccggccctctcttattaccaacaatagttggatgtgaggaaggtggaattgcccctctcgacttacccacgtaggatagagtcctacagatgacattcttgggtcaaaggaagaaacacagtatttaaggagagaaaagttctgtttgctttctgtgcctgtaatttaacttagttcataaaataagagacaatgaatattatccgccccgacttcgttcagtgttttctggagcattattcttggccagtggatgtctcgtgacagaatctgaactcggtggttggtaacacatcacattcttgtcctctgggcccaccagatctgggtaagcagcccccacaatgccaccgggtactacaccgtttacggggaggaggcgcttcatgccgaccacttcagtgcccggctgagttttggagacacacagaccatctgggcaaggaccggctaccttggcttccttcggcgaacagagctcactgatgccagtggaggtgaggggttgtggtgaagccctgcgtgagtgctgtgcggggaggacctgggctccccaagagcttagtcacctgctagcacacctcactccttgctgtggtctggtattgctccttgtggggggaagatgttctgacagcagttttctctgaaaatactgttttccctccatgactgcccctcactgtccttgggcccttggcctctgctgagggcgtgggggacggtgttggtgataaggctaccaggcttctccccgaggccagaccggtctctctgccgctgtgtctttaccagtggcttccccatgcacaacccatttaaggttgtggtcaatgtccagaggactctgtgcagccaccacaagctggccagataaggcagaacttttggtagctcctatagatggtgtcccgttcacagagataagttatttttaataatacgctcacacttgctgtaactttcctgaggtggttccgtgctgcagagataacagcctgctctgccaggacctccatcaccctttctgcacgtggtgtgcgacctcatgatgtttcagttgagacctccctgtgcctgagagcccctggttgggctcagaggatacgaatgtccagactctgcatgccttggctttctgggcacgtgtaaacacacactgttcacagggcggcacgatgcactgtatgtggttgggtctctggatgaaactctggagctcagaggcatgcggtaccaccccatcgacattgagacctctgtcatccgagcacacaggagcatcgctgagtggtaagagcccaggtggagggcggcttcacgtggtccctccagcccttcctctgggcatgagtgctgtgcatcggttggagcagagcaaggactgctgggccctgggcacaggcctcctgcattgtcaccctggtctgcagtggagctgggtgccatgtagatgagccctatctaccttgggcattgccagagagggctgaggacttcttgtgggttctccctctggatgtactctgcaaaacatggtgccagagcacacctcactgcctgtgtttgggtttggcttgtttttttatctgtttccttatcagtggtaagctaagagattgtccccaaatgcacaggcaaaatgtagatttccacaggtctcatcctgaagtgtttctacttttaatatgagtttctcacatggttgtgactcctgattccttcacctgtagggaacttgtgttgggacaggtacagctttcagcatcagataatgctctgattctcagtaaaagctttagttggaatagacatcctgtaaaatggatctggcctgatctttagattgtaaatggccttaaatagctgtgtgacattggtgggcttcactcttctttgtgccaccctttcccaagcattcattggcccctgtgacctgtgcctgtatccatgtgacccagtctgtcttctctctgcagtgccgtattcacctggaccaacctgctggtggtggtggtggagctggatgggctagagcaggatgccctggacctggtggccctggtgaccaacgtggtgctggaggagcactacctggtcgtgggagtggtggtcatcgtggacccaggggtgatccctatcaactctcggggtgagaagcagcgcatgcacctgcgggacggcttcctggctgaccagctggaccccatctatgtcgcctacaacatgtgagcgcagcacaccggcccaggtgccggagatgaatgagccccagcagtccaaggtgtgatgtgggaagacaccgcagagctcactcaccgggactcgcccttcctgtgctcttacagatccctctcaacaatccccgcatctccttttagaaagcacttcctgaattatttaaagaaatattttgaatctgccaagtacatttacaaaaacacggatgctggtattttaacagatggagagacaaggaaaggaaaggaaaggcctggcatgggcattgtgaggaatcacaggcaccgaggttgttctctgctgtactgcaagtttgcactttctttaggctaaaaatatagttcctgatttttaaaattcagttatttattcccacttcaaatgacaagttcatatatagaatttacgggagaaacttgagaccatttacggggagaaacttgattctgggaagatagcagagtacaaaccagctgcctcacttctgtttcacagggaggctgatggaaaaaggaagcaagctggacccatcctccctgctcacagagggcactgtggtcacacacagtgcctcctctgccagttcctttattgaaagaggtgtgctggctggccacggtggcttacacctgtaatcccagcactttgggaggccgaggcgagcagatcacgaggtcaggagaccgagaccatcctggctaacatggtgaaaccctgtctctactaaaaatacaaaaaattagccgggtgtggtggtgggcgcctgtagtcccagctacttgggaggctgaggcaggagaatggtatgaaccagggaggcggagcttgcagtgagccgagatcacgctactgcactccagcctgggtgacagcacgagatgccgtcttaaaaaaacaaaaaagaggtgtgctgcttgtcagcatgtattgtcacggacactcaataagtgccattttggactgtcaaatttagatgctttgtttcagaaagataagccagcatttagttttaaatcactttcctggtttgtaacttgatgctgtttagttaaattgctagttttcctaacactacaatattaattcttctcgtggaagtgtactgatttattatttttattccaagtcagcagatttggaagcattgtggtaaagtctaaggttttcatatccatagtgctgtttggtgagtaccggcagtacagttgaggggagcagggaacagcattgccccgtattgaaggtggagatggttacattcttcactgctttttgcattttgagttgtgtgcctataaaatttggccaaaccattttattattttgttcaaacttgactaagctgagtgatctaaaattatacagaacctaaatcaaagaagagaatgtaaagtcctttagttacttctaagaatttgaagtcaagcacgaatctaagacatagattatttttatatagctaatgaagagtatgttacgaaattgttgggtttttggggtattgagggtggcaaattttgtgaatcatgcatgcttcacagaaacaaccaggtttttccagaattagtctggatcagtgcctaacaaagctgttattaattctccacacatgagtctggctaactgggccagctctcatgttttactcctgtctggctacaaatagcactgtgcatagtagccctgtttccccatggtgttggactgtggtaaagtatgttgtgacatactggaattctaataatcctgttgtaagtatgtacagaatctatgtaacttattgttgacatacagaggtttgggaagtagtctaatggacattccttacaatagaatggctgggaagggaaagaaaaaaaaaaaaaaactacctaactccaatcttaatgttgtagttttatagcaaacaaaaattgtcagctttttgtattgaaaggtcagtggtggtaagacaaggtgtcttgtaaattaagattttaagaagtgcattaaaatgttttagaattactctgggaattctgtatatcacactaaaatttttatatcattatgttaataaaagttattgactttgtaattctgcattttgaaatgtgtgaaaagggtctttaaattaccccgaataggttgtatcttattttgctttttttctgactataaaagcagttatgcttatagcataaaatctagaaagcacattaaagtataaagaaaattaaaatttcttataattctacctctgagtaaacagcagcattcgtatgtaacataaaccctctcagggatttattttttctttttaaaaattttttacaaaattaggatcaagtgcttttttaaataatttgcttttgtacttaataaattatagactttaaaatctattacatatattcttctacatgtttcagtggctgtattttacaagtgtgccatgagtaaatgtagtatttgctgtattgccgtacatcagcgttgtttcaacaggactgcagtgagcccagatgcacgtttacactgccatgattacaattactgccttgggctcagttcttataggtagagtgagtgggtcagagttcatgccaggtgtgaagctttgggtacctgctgccctccagaagggcaggatgacagcatggaaaaggcctctttgcagatgccaagtaatgttggcaatggacatgtgctcaagattaaaataactctttaacaatttgataggcaaataagtgttgtgtctggtcatgttgaatatgtcctcgtgttcatggccatttttagttcttatctgatgtattttgttcagatttggcagtccttatggtcaagttttttcttactgacatgtaggagtctctttctattaagaattataacctccatatacttcttactttttcttgtgggttatttgtattttggttctatctgttttggtgcagatggttttttagatgttatatttatgcaaactggttattgtgtttgatttcagattatgaatatagctgatttatttcaaagtggttctactggaatgatcagcataaaccaatggggagtacatggcagagaaataactaacctccagtatttgcctggttcctgccacagtgctggccttcatgttggcagttccagaagtggggttgagggagagagagaatacttgaagaaataatggctgaagacttcctaaatttgatgaaagacctgaatataagcatccaagtagctcaacaaattccaagtaagatgaactcaaagagaccacacagataccaacatttcagaagccaaagccagagaattttgaaagcaacaagggagaagcaacttgctacatacaaaggatcctcagtaacaggtccccaagccctgggccacagactgttaacagtctgttaggtaccagaccacacagcaagaggtgagtggtgggtgagtgagcattaccacctgagctctgcctcctgtcagatcagtggtgacattagattttcataggcatgcaagccttcttatgaactaactgcacgtgccagggatcgaggttgcacactccttataagaatctaatgcctgatgatctgaggtgggacagttccattccaaaaccatcgtcctgtgccccctggtctgtggaataattgtcttccacaaaaccagtcgctggtgccaaaaaggttggggactgctgctcaataagattatcagcagattgctcatcagaaactagaggccagaaggtagtgggccaatatattgaaatttaaagtagttttttctaattctgtgaagaaagtcaatggtagcttgatggggatagcattgaatttataaattattttgggcagtatggccattttcacgatattggttcttcctatccatgaacatgggatgtttttccatttgtttgcatcctctcctattcccttgtgcagtggtttgtagttctccttgaagaggtccttcacatcccttgtaagttgtattcctaggtatttcattatcttagtagcaattgtgaatgggagttcactcatcatttggctctctgtttgtctgttattggtgtataagaatgcttgtgatttttgcacattgattttgtatcctgaaactttgccgaagttgcttatcagagtaaggagattttgggctgagatgatggggttttctaaatatacaatcatgtcatctgcaaacagagacaatttgacttcctcttttcctatttgaatatgctttctttctttctcttgcctgtttgccctgaccagaacttccaatactatgttgagtaggagtggtgagaaagagcatccttgtcttgtgccggttttcaaagggaatccttcctagtttttgcccattcagtatgatactggctgtgggtttgtcataaatagctcttattattttgagatatggtccaccaatacctagtttattgacaggttttagcttttaataataaagtttataatgtaaaaaataaaaaatttttagagaaaaaagtttataaagatgtctaaaaatgttttgcacagttgtacaatgtgttttaagctaaatgtttttacaaaatagccaaaaacttaaaaacatttgaaagtttataaagttacagtaagctaaggttaatttattattgaagaaaaattatgtttagtgtagtctaagtgtacaatgtttataaagtctatagtagtgtacagtaatgtcctaggccttcacattcattcaccacttacacccaaaataactttgagttctaccagctccattaatggtaagtacttactatgatttgagtgacccccaatgtggcagtattaagaggtggggcccttaagaggtgattggattaatctattcaaggattgatagattaatggattatcatgggaatggggctgatggctttgtaagaagatgaagacctgagctagcatgctcagcgcccccaccatatgatgccctgcactaccttgggagtctgcagagagtccctaccagcaagaagaccctgacctgatgtggccctcaaccttggacttctcagctgctataattctaagaaataaattcatgtttttcttataatgtagccaatttcaggtgttctgttataagcaacatacaatggactgagtgccctgtacaagtgtactgattttaatcctttatactgtatttttactaccttttctaaatttggacatgtgtttagatatacaaataccagtgcattacaattgcctacagtattttgtacagttacatggtggacaggtttgtaacccaggagcaataggctatatcatatagcctaggtgtgttgtaggctaggtttgtgtagatacatatacactgtatgttgttcccccaatgatgaaatcacctaaaaacacatttctcagaacatatttctgttgttaagtaatgcatggctgtatgcacaaaaggaagtgagaaagggatttaaatgtttcattaaaaaaaaacacagaagggcgcaatacaagaaatgaaagagatataaggcatatagaatatgaagtgacagaagtaagtctctccttattgataattactttatctgtaaatagattaaatggacagagattggcagaatggggaaaaaacaggatctaactgtatgctgtctacaagagactcacatccaaagacacagtattaatatattgagagtgacaggatggaaaaatatattcactgggcacagtggctcatgtctgtaatcccagcgctttgggaggctgaggcaggtggttttcttgagcccaggaatttgagaccagcctaggcaacatgaagagaccacatctctaccaaaaaaatacaaaaattagctgggcattgtggctttctcaggaggctgaggtgggaatattccttgagcctgatgggtggagattgcagtgcaccaagatcacaacactgtactccagcctgggagacagagtaagaccctctctcacaaaaaaaaaaaaaaaaaaaaaaaaaaaaaaaaaaaaaagatattccatgcaaatagtaatcaacagggagcagaggtagctataataatatagtttaaataaaaaatgattacaagaaatgatggacattaataaaagattcaattcagcaagatgtaacaattgtaaacatttacacatacaatgacagatcatcaaaatatatgaaatgaaaactgacaatagaagggagaaaggagaaatagacagttctataataatagttggaaatgtcagtgccctgctttgaataatggatggaacaataagacataagtaaggaaatggaggctttaaacagcacaacaaactaactagatctaacagacatatgcagaacattctacccaacaataaaaatagaatacacattcttctcaagttcacatggaacattttccaggatagacaacatgttaggccacaaattaagtctcaatagatttaaaaatatacaaagtctctccttaaaccaaactgggataaagttaaaaatctatagcagaaggaaaactgagaaaatacagaaattagtgaaaattaacacactttcaaacaaccaatggatcaaagaagaaataacaagaaaaattagaaaatacttggaaataaaaacaatgtaccaaaacttatgggacccagcaaaagcagtgctaaagaagcaatttatagctataaatgcttacattaaaaaccaagaaggacctcaaattaacaaactaacattacaacttaagaaactaaaaaagaagaacaaactaaacccaaagttagcagaagtaaggattagtgcagaaatagatgagagacaatagaaaaacagagaaaatcaagaaagccaaaaatggtttctttgaaaagatcaacaaaattgacattttagctagatggaccaagaaaaaaagaagacagattactaaaatcagaaataaaattggaaacgttaccaattctacagtaataaaaagcattaaaaaatactatgcacaattgtatgccaacaaatggaaaaacctagaatagacaagttcctaaaaacacaaaacatatcaagactaatcatgaagaaatagaaaatctgagtagacttataactagtaaggagattgatttaagtaataaaagatctattgacaaaaacctgatggcttcattggtgaattctaccaaacatttaaataactaacactaatcctttttaaactttttcagaaagttgagggaaaactttcaaacttactctatgaggcaagcattatcctgatactggaaccagtcagacactacaaaaacagaaaactacagaccatgattccttctgaacattgatgtaaaaatcctcaataaaatactagcaaactgacttcagcagcatattaaaaacactatatagcattacaaagtggggtttactcctggaatgtaaggatgattcaatatataaaacaatcaatgtaataaaccatattaatggaatgaaggggaaaaaccacatgtgatcgtctcgattgatgcagcaaaggcatttggcaaaattcagtaccctataatgattaaagaaaaaaacaactaggaataaaaggaaactacttcaacataatgaagtccatatatgaaaatccacaacaaacatcatactcagtagtgaaaatctgcagaagctttttctgataagatcagaaacacagcaaggatgactgcgtttgtcacttccactcaacacagaactggaagctcttagagcaattaggcaagaaaaaaaggattctaaattggaaagaaacaattcaaattatctctgccaatgatataatctcatatgtagaaaggcctaaagattccacaaaaaaaagtagcactaataaatttagcaacatagcaggatacaaggtcaacacacaaaaatagttgcattttcatacactcacaatgaacaattcgaaaaggaaatcaggaaaacaattccattgacaatagcatcaaaaaatatttaggaattaaccaaggagatgaaagacttataaaatgaaaagtacaaaacattgaatggaaaacatcgaacaatacaaagaaataagtggaaagacatcttatgttcatggattggaagtcttaatattgttaagatgtcagtactactcaaagccatctacagattcaaggcagtccctatccaaattctaattatggtttttgcagaaagactaactcattctaaaattgatatagaatctaaagacactctgaataaacaaagcaattttgaaaaagaaaaagctgtaagacagttctccaaataagatatacaaaaggtatacacctttgaaaaatgaaagcaaaataaggacattcttagataagcaaattttgttgttggctgacatcaccataaatactaaagaaagtccatcagactgaaagcaagtgacccccgatggcaatttttaaaaatttttaagttctagggtacatgtgcaggatgtgcagatttgtttcataggcaaacatgtgccatggtgatttgctgcacctatcaaccaatcacctaagtccagcatgcattagctatttttcctgatgctctccctcccccagtgtccccccaacaggccccagtgtgtgttgttcccctctgtgtgtctatgtgttcataatgttcagctcccacttataagtgagaacatgtggtgtttggttttctgttcctgcgttagtttgctggggataatggcttccagctccatccatctccctgcagagaacacaatctaattcctttttatgattgaatagtattccatggtgtaaatgtaccacattttctttatctagcctaccattgacagccatttgggttgattccatgcctttgctattgtgaatagtgctgcaatgaacatacatgtgcatatatttttgtaatagaataatttatattccgctgggtatatacccagtaacgggattgctgggtcaaatggtatttctgggtctaggtctttgagaaattgccacactgtcttccacaatgattggactaatttgcattcccatcaacactgtaaatgcattcctatttctttgcagcctcaccagcatctgttgttttttgacgttttaatagttgccattctgactggtgtgagacagtagtatctcatttgtggttttgacttgcatttctctaatgatcagcgatattgagctttttttcatatatttgttggccgcatgaatgtcttcttttgacaggtgtctgttcatgtcctttgcccactttttaatgaggttggttttttcttgtatatttgttttaagttccttgtagattctagatattgggcctttgtcagatgaatagattgcaaaaattttctcccattctgtaggtggtctgtttgctctgatgatagtttcttttgctgtgcagaggctcttcagtttaattagatcctatttgtcaatttccttttgcttttgttgcaattgcttttgatgttttcatcatgaaatctctgtccgtgcctatgtcctgaatggtattgcctagattttcttctagggtttttatagtttggggttctacatttaagtctttaatccatcttgagttaatttttgtataaggtgtaaggaaggggtccagttttaattttctgcatatggatagccagttctcccagcaccatttattaaatagggaatcctttccccattgcttgtttttgtcatgtttgtcaaagatcagatggttgtagatgggcagtcttacttctgggttccctatcctgttccaccggtctatgtgtctgtttttgtaccagtaccatgctgttttagttactgtagccttgctgtatagcttgaagtccaatagcatgatgcctccaacttcgttctttttgcttaggattgtcttggctatatgggcttttttttggtatcatatcaattttaaaatagctttttttctaattatgtgaagaatgtcaatggtagtctaatggtaatagcattgaatctatacattactttggggagtatggccattttcacgatattgattcttcctatccatgagcatggaatgtttttccatttgtttgtgtcttctctgatttccttgagcagtggtttgtagttctcctcgaagaggtccttcacttcccttgttaactgtattcctaggtattttattctctttgtagcaattgtaaatggaagttcacttaagatttggcactctgccttgtctgttggtgtatagaaatgcttgtcacttttgcacattgattttgtatcctgagactttgctgaagttgcttatcagtttaagaagcttttggaggctgggcgtggtggctcacacctgtaatcccagcactttaggaggccgaggtgggtggatcacgaggtcaagagatcaagaccatcctggccaacatggtgaaatcctgtctctagtaaaaatacaaaaattagccaggcgtggtggtgtgtgcctgtagtcccagctactcaggaggctgaggcaggagaattgcttgaacctgggaggcggtggttgcagtgagccaagattgtgccactgcactccagcctggcaacagagcaagactccgtctcaaaaaacaaacaaacaaaaacaacgacaacaaaaaaaaccttttgggctgagacaatggggttttctggatataggatcatgtcatctgtgaacagaggcagtttgacttcctctcttcctatttgaatatccattatttctttctcttgcctgattcccttgctagaacttccaatgttatgttgaataggagtggtgagagggggcatccttgtcttgtgccagttttcaaggggaatgcttccagcttttgctcattcggtatgaaattggctgtggatctgtcataagtggctgttattattttgaggcatattccttcaatatccagtttattgaaagtattaatgtgaagggatgttgaattttattgaaggccttttctgtgtctattgatataatcatgtggttttcatcttttgttccatttatgtgatgaattatgtttattgatttgcatatgttgaaccagccttgcatcccagggatgaggccaccttgatcatggtaggataagctttttgatgtgctgctggatttggtttgccagtattttattgagaatttttgcatgaatgttcatcagtcatattggtctgaagttttgtttttttgttttatctctgccaggttttggtatcgggatgatgctcgtctcataaaatgagttagggaggattccctccttttctattgtttggaatagtttcagaagaaatggaaccagctcctctttgtacctctggtagaattcagctgtaaatccttctggtcctgggttttttttggttggtaggctatttcttactgcctcaatttcaggacttattattggtttattcagagattcaacttctttgtggttcagtcttaggagggtctttgtattcaggaatttatcagtttcttctacattttctagttcatgtgcatagagatgtttatagtattctctgatggttgtttgtatttccgtagggtcagtggtgatattctctttatcattttcattgtgtccatttgattcttttcacttttctttgtctagctagcagtctatctattttattaatttttttcaaaaagccagctcctggattcgttgattttttttgaagggtttttcacgtctctgtttccttcagttctgctctgatcttggttatttcttgtcttctgctagctttggggtttgtttgctcttggttctctagttcttttagttgtgatgttaggatgtcaattggagatcctcctagctttttgaagtgggcatttagtgctataaattttcctcttaatgctgctttagctgcatcccagagattctggtatattgtctctttgttctcattagtttcaaataagttcttgatttgtgccttaattttattgtttacccaggagtcattcaggaggaggttgttcagtttccatgtagttgtgtggttttgagtgagcttcttaatcttgagttccattttgattctgctgtggtctgaaagactgttataatttcagttcttttgaatttgctgaggagggttttacttccaattatgtgatcagttttagagtaagtgccatgtggtgccaagaagaatgtatattctgttgcttttgagtggaaagttctgtagatatctatcaggtctacttaatccagagctgagttcaagttctgaatatctttgttaattttctctcttgatgatctaactaatattgacagtggggtgttaaagtctcccgctattattgtgtgagagtctaagtctctttgtaggtctctaaaaacttgttttataaatctgggtgctcctgtattggctgcgtatatatttaggacagttagctcttcttgttgaattgaaccttttaccattgtgtaatgcccttcttttttttaatctttgttggttgaagatttgttttgtcagaaactagtattgcaacccttgtttttttctgttttccatttgcttggtaaattttcctccacttctttattttgagcctcatgtgtctttgcatgtgagaggggtttcttgaatacagcacactgatgggtcttaactgtttatccagcttgccattctgtgtcttttaattgggacatttagttcatttacatttaaagttagtatggttatgtgtgaatttgatcctgtcatcataatgctagctggttattttgcagacttattaatgtagttgcttcacagtgtcactggtctgtgtacttcagtgtctttttgtacaggctggtaatagtttttcctttccatatttcatgctatcttcaggagctcctgcaaggcaggcctggtagtgatgaattcctcagcatttgcttgtctgaaaaggattttatttctccttcatttatgaatcttaatttgaccatatataaaattctgggttggaaattcttttctttaagaatgttgaatatggcctccaatctcttctggtttgtagggtttccactgagaattctgttgttagtctgatggacttccctttgtaggtgtcctggcctttctctctggctgcccttaacattttttccttcattttgaccttgaggaatctgatgattatgtgtcttggggctgatcttctcatggagtattttactggggttctctggatttcctgaatttgaatgttggcctgtcttgctggtttgggtaagttctcctggatgatatcctgaagtatgctttccaacttggtgccattctccccatctcttccaggtaccccaatcagttgtaggttcagtctttttacataatctcatagatctcagaagttttgttcattccttttcattcttttttctttaatcttgtctgcctgtcttatttaagcaagatagtcttcaagctctgagattctttgttccacttggtctatttggctattgatatttgtggttgcattgtgaagttctcaagttgtgtttttcagctccatcagatcatttatgttcctctgtaaactggttattctggttaacagctcttgtaatgttttatcatggttcttagctcctttgcactgggttagaacataactcctttagctcaatggagttcgttattacccacattctgaagcctacttctgtcagttcatccatctcagcctctgtccagttctgtgcccttgctggagaggtgtttcagtcattcgaaggagaagaggcactctggctttttgagttttcagcgtttttgcattgatttttttctcatctttgtgagcttgtctacctttgatctttgaggctgctgacctttggatggggttttgtggggtctttttttgttgatgttgttgttgctttctttcttttaacagctaggcccctcttctgtagggttgctgcagtttgctgggggtctactccagaccctattcacctggatccctcctgcacctggaagtgtcaccagtggaggctgtagaacaccaaagatggctgcctgatccttcctctgggagctcaatctcagagggacaccaacctgatgctggtgggaacgctcccgtataagattcctgacaacccatgttgggggatctcacccagtcaggaggcttgggatccgaggcctgcttaaagaagcagtctggctgccccttggtggagtgggtgcactgcactggagggactcctctttgtccaaactgcccagcctcttcagaaccagcaggcaggaaagattatgtctactgagttgtggagatcacagctgcccatccccctaaggactccattccagggagatcagagttctgtttgtaaacctctggctggagttgctgaaattcccacagggaggccctgcccattgacggggaatggatctgggtcccacctaaagcagcagtctagccatgatctgccacagccactgtgctgtgctgtgggaaattcctcctggttcaaactacccagtcttccccgcaccagcagaggaaaacggcagactggagctgcagtgatggtggccgcccctccccctaggtactcagttgtcttaggcagtctctagccagctgccactagctgcaacctgagcatctggacagctctgtacttgggacccaaggctctggtggtttgggctcatgaggggatttcctgatctgtgagttgcacagatctgtggaaaaaacatggttttccaggcaggtagcacaatcagtcactgcctcccttggctggggatgggagctcctcttgccccatggtgctcctgagtggtccatcgctccaccctgcttttcccgactctccatgggttgtgccaaccacctagtcagtctcaatgagagaacctgggtacctcagctgaaggtgcaggattcactcaccattttcattcttctcagtgggagccaccaatggcagctgcttctagtaggccatctttccactttgctggtaatttttttaacaaccaagtgaatatgccaaatggtaacttggatccacagaaaaagcaaagagaaccagtaaaggtaaagataattatataatggtaagactataaatgcatttttccttaacatgaatgaattaaacagtttattaaaaaggcagagattgtcagaaaacctgtgtaaaaacaagcaaacaaacaaaaacaaaaaataagacccaactatatgctgtccacaggagatacaccttttattcaaagatacaaatagactgacagtaaaaggatgagaaaaggtacatcattcaaacagcagccacaagaaagctggagtggctatactaatctcatacaaaatagacataacaaaaaattcctagagacattttataactatagaagggtcaatctatcaggaaaagctaacaattacaaatatgtatgcacccaacaacaaaacactacaatacacaaagcacacaactgacagaaataagagttggagacttcaatgtctcactttctataatgaataaccaagcagaaaatcaactaggaaataaaagatataacattataaacaactagacctaacaaacatctataaaacactccacacaacaagaaagtatacattcttctcaactgcacatagaacattctctagaacacaccaccatatgctaggctataaagcaaacctctctaaatttaaaaggatataatacataaattatgttctcctacacaatagaatgaaattaggaattgatatagtttgaatttttgttcactccaaaactcatactaaaagttaattcccattttgaaggtgtcgggaggtgggaactttaagaggtgtttgggtcatgagggttatgtgctcattaatgggttaatgccattatcacagaaatgtgttcattatcacaggaggagtactgttataaaagggcaggtctggcctccccttgctctctcttgcctttccacctcccaccatgggatgatgcagcacaagggtcctgccagatgctgccccctcattcttcgatttcccagcctccagagctgtgctaaataaatttctgttcattattaaatacccagtcttaagtattttgttatagcaggacaaattggaataagacagaaatcaacaggaaaaaatttggaaaactcccaagcatatggaaattgagcagcactctactaaataaccaatggatcagaggaaaacaaaagggaaataaaaaaataccctgacataaatgaaaatgaagacacaacatatcaaaatttatggaatgaagctgaagcagtgttaaatgtctagctgcacatgcgtataataagaaagaagaaaaatttcaaatcattaacctagttttatcctggaaaaagaagagtaaactaaacctaaagaaagcagaagaaagaaaagataaatattagaatggaaattaatgaaacagatattgaaaagcacaagagaaaaacaataaaaccaaaaactgaaaagatttttaaaaattaacaaaactgtagctaggctaagaaaaaagagaagactcaaattactagaatcagaaataaaaaagggcattactacagatcttacagaaataacaaaggatgataaagaagtagtatgaacaatcgcatgccaatacattaggtaacttagatgaaatggatacattcctagaaagacacaaactaccaaaccccacttaagatcaggcaatctgaacagacttataacaagcaaaaatactgaataagcagtaaaacaccatacccacccagacggcttcaccactaaattttactaaatatttgaaaaatatttgaagaaaaattaatatcaaatcttcactatatatatatatatatatatatatatatatatatatatatttttttttttttttcttttcttttcttgagatggagtctcgctctgtcacccaggatggagtgcagtggcacaatcttggctcactgcaagctccacctcccgggttcacaccattctcctgcctcagcctcctaacagggactacaggcatgcaccaccacgcccagctaattttttgtatttttagtagagatggggtttcactgtgttagccaggatggtctcgatctcctgacctcatgatccacccgcctcggcctcccaaagtgctgggattacaggcatgagccactgcgcccagcctcacaaaatattcttaaaaattgaagagggaacactcagtttatgaagccagtattatctgataccaaaaccaaacatcacaagaaaactacagaccagtatctcttatgaatatgaacagacaaatccaacaaaatactaaaatgaaatccagcaacatataaaaagaattggacactaagaccaagtggaatttattccaggaatccaagattggtttaatatttgaaaattaatatatgccatatcaatagaataaaaaagcccacatgattatctttatagcagcaggaggcaggtagaggcaggtccctggtgtaacgcgaccttcaaatcaaagacaggttaaagcctgaatgttggattgagagggatcatggcggatgggaggtaggactagattgcagctctgactcagagcagcatgtggagacttgcatcatgaatttttcctccagaacaactgcaagaacaaatcaagaaacctgagaggacccacagaccccttgaaggaagcgattgctcctgcaggacccaggagagaacctaaatactcagccacagcaagacccgcccgaggagagcttgagctcagatatgcctagccctgcccccacccaatagtccttccctacccaccctggtaactgaagacaaagggcatatactcttgggagttctagggccccacccactgcctgttcctccccatactaccacagctgatgctgtctggaaagtgccacctcttggcaggaggccaaccagcacaaaatagtgcattaaaccgccaaagctaagagccctcacagagtccatttcacccccctgccacctccactggaacagattctgatatacatggctgagagacccacagacagttaacatcacaggactctgtgcagacaacccccagtatcagcctggagcctggttgacttgctgggtggctagatccagaaaacagataacaatcactatagcttggttctcaggaaaccacatcattaggaaaagggggagagtactacatcaagggaatatcccatgggacaaaagaatctgaacaacagccttcagctctagaccttccctctgagagaggctacccaagtgagaaggaaccagaaaaccaactccggtaatatgacaaaacaaggttctttaacaccccccagaatcacactagctcaccagcaatgggcccaaacgaagaagaaatccctgatttacccaaaaaagaattcaggaggtttgttataaagctaatcagtgaggtaccagagaaaggcaaagcccaatctaaggaaatccaaaaactgatataagaagtgaagggagaaatattcaaggaaatagatagcataaataaaaaacaatcaaagctacaggaaacaatggacacatttatagaaatgcaaaatgctctggaaagtctcagcagtagaattaaacaagtagaagaaagaaattcagagctcaaagacaagatctttgaattaacccaatccaacagagacaaagaaaaaagaataagaaaatatgaacaaaacctccaagaagtctgggattatgttaaaagaccaaacctaagaataatcagtgttcccgaagaagaagagaaatctaaaagtttggaaaacatatttgggggaataatcaaggaaatgtctccagccttgctaaagacctagacatccaaatacaagaagcacaaagaacacctgggaaatgaatcacaaaaatatcattgcctaagcacaatgtaatcaggttatctaaagttaaggcgaaggaaagaatcttaagagctgtgagacaaaagcaccaggtaacctataaaggaaaacctattatattaatagcagatttctcagcagaaaccctacaagctagaagggattggggcactatcttcagtctcctcaaacaaaacaattatcagccaagaattttgtattcagcaaaagtaaacttcatatatgaaggaaagacacagtctttttcagacaaatgctgagagtatttgcctgtaccaagccaccactacaagaactgctaaaaggaactctaaatcttgaaccaaatcctggaaaaacatcaaaacggaacgtctttaaagcataaatctcacaagacctataaaacaaaaatataatttaaaaaacaaaaacaaaaacaataagccaaggtatacagcaacatatagcataatgaatggaatggtgcctcacatctcaatactaacattgaatataaatggcctaaatgctccacttaaaagaacttgcagaaacttaaggtacacaggtggaaaagacatttcatgcaaatggacaccaaaagttagcaggagtagctattcatataacagacaaaacaaactttaaagcaacagcagtttaaaaagacaaagagggacattatataatgataaaaggccttgcccaacaggaaaatatcacaatcctaaacatatatgcacctaacactggagctcccaaatttataaagcaattactaatagacctaagaaatgagatagacagcaacacaataatagtgggggacaggctgggcatggtggctcacgcctgtaatcccagcactttgggaggccggggaaggcagatcatgaggtcaggagatcgagaccatggtgaaaccccatctctactaaaaatacaaaaaaattaaccaggtgcagttgcgggcgcctgtagtcccagctactcgggaggctgaggcaggagaatggtgtgaacccgggaagcagagcttgcagtgagccaagattgcaccactgcactccagcctgggtgacagagtgagactccgtctcaaaaaaataatataataatagtgggggactttaataccccactgacagcactgaacaggtcatcaagacagaaagtctacaaagaaacagtggatttaaactataccctggaacaaatggacttaacagatatatacagaacatttcatccagcaaccaaaaaatatacattctattcagcacgtggaactttctccaagatagaccatatgacaggtcgcaaaatgagcctcaataaatttaagaaaattgaaattatatcaagcactctctcagaccacagtggaataaaaatggaaatcaattccaaaaggaaccttcaaaaccatgcaaatacatggaattaaataatttgctcctgaatgatcattgggtcaaaaatgaaatcaagatggaaatttaaaaaattcttcaactgaacgacgatagtgacacaacctatcaaaaccactgggacacagcaaagatggtgctaagaggaaagttcatagccctgaacacctacatcaaaaagtctgaaagagcacaaacagacaatctgaggtctcacctcaaggaactagagaaacaagaacaaaccaaacccaaacccagcagaagaaaggaaataactaagatcagagcagaactaaatgaaattgaaacaaacaaacaaaaacaatacaaaagataaatgaaacaaaaagctggttctttgaaaaggtaaataaaattgatagaccattagcaagattaaccaagagaagaagagagaaaatccaaataagctcaataagaaacaaaatgggagatattacaactgacaccacaggaatacaaaagattactcaaggctactatgaacacctttacacgcataaactagaaaacgtagaagagatggataaattcctggaaagatataaccctcctagctttaatcaggaagaattagatatcctgaatagaccaataacaagcagtgagattgaaatggtaatttaaaagttaccaagaaaaaaagtccaggaccaaatggattcacagcagaattctaccagatattcaaagaagaattggtatcaagcctattgaaactattccacaagataaagagataaccctccctaaatcattcaatgaagccagtatcaccctcataccaaaaccaggaaaggacataaccaaaaaagaaaactacagaccaatatccctgatgaacacagatgttaaaatccttaacaaaatactcactaactgaatccaacaacatatcaaaaagataatccaccatgatcaaatgggtttcatgccagggatgcagagacagtttaacatacacaagtcagtaaatgtgatacaccacataaacaattaaaaacaaaaatcacatgatcatctcaaaagatgcagaaaaagcattcaacaaaatccagcatcgctttatgattaaaactctcaggaaaattggcatacaagggacatctatgaaaaacccacagccaacataatactgaatggggaaaagttgaaagcatcccctctgagaactggaacaagacaaggatgcccactctcaccactcctcttcaacgtagtactggaagtcctagccagagcaatcagccaacagaaagaaagaaaggtcatccaaatcgataaagaggaagtcaaactgttgctttttgttgatgataggatcgtttacccagaaaactctaaagactcctccagaaggctcctagaactgataaaagaattcggcaatatttccagatacaaaatgtatgtacacaaatcagcagctcttctatacaccaacagcaaccaagctgagaatcacatcaagaactcaaccccctttacaatagctgaaaaaaaaatttaggaatatacctaaatgaggtgaaagacgtctacaaggaaaactataaaacactgctgaaagaaataatagatgacacaaacaaatggaaacacatcccatgctcatggatgggtcgaatacatattgtgaaaatgacaatactgctaaaagcaatctacaaattcaacacaattcccatcaaaatatcaccatcattcttaacagaattagaaaaaacaattctaaaattcacatggaacaaaaaaaaaaaaaagcccgcatagccaaagccagagtaagcaaaaagaacaaatctggaagcatcacattacctgatttcaaactatactataaggccatagtcaccaaaacagaatggcactggcataaaaataagcacacagaccaatggaacagaacagagaacccagaaataacccaaatgcttacagccaactgatcttcaacaaagcaaacaaaaacataaagtggagaaaggacacccttttcaacaaatggtgtggggtaattggctagccacatgtaggagaatgaaactggatcctcatctttcactttatacaaaaatcaacccaagattgattaaggacttaaatctaagacctgaaactataaaaattctagaagataacattagaaaaacccttctagacactggcttaggcaaggacttcatgaccaagagcaaatgcactaaaaacaaatataaattgctgggacttcattaaactgaagagcttttgcatggcaaaagaatagcagcgtaaacagcccacagagtgggaaaaaaatctccacaacctatacatctgacaaaggactaatatccagaatctacaatgaactcaaacaaatcaacaagaaaaaaaaatcccatcaaaaagtggactaaggacaattctcaaaagaagacatacaaatggccaacaaatatatgaaaaaatgctcaacatcactaatgatcagggaaatgcaaatcaaaaccacaatgtgataccaccttactcctgcaagaatggccataatcaaaaaatagtagatgttgacatggatgtggtgatcagggaatacttctacactgctggtgggaatgtcaactagtacaatcactatggaaaacaatgtggagattccttaaagaactaaaagtagaactaccagcaattgatccagcaatcccactactggatatctacccagaggaaaagaagtgattttatgaaaaagatacttgcacatgcatgtttatagcagcacaattcgcaactgaaaaaaatgttgaagcaacccaaatgcccatcaaacaacgagtggataaagaaatcgtgatgtatatatatatgaatactgtatagccacaaaaaaggagtgaattaatggcattcgcagcaacctggatgagattgtagactattattctaagtgaagtaacccaggtatggaaagccaaacattgcatgttctcactcataattgggagctaagctatgaggacgcaaaggcataagaataatataatggactttggagactgatagaatttggctgtgtccccacccaaatctcatcttgaattcccatatgttgtgggaaggacccagcaggaggtaactgaatcacggggcaggtctttcctgtactgttctcatgatagtatatctcatgagatttgatggttattatatgggggaagttttcctgcacaagctttcattctctgtttgcctgctgccatccacataagatgtgacttgctcttccttgccttccaccatgattgtgaagcttccccagccatgtaaaactgagttctccattaaacctcttccctttgtaaagcctttcctttgcccagtctttcctttgcccagtcttgggtatgtctttatcagcaatgtaaaaattgactaatacagtagattggtattcagtagagtggggtgcaacttaaaagatacccaaaaatgtggaagcaactttggaactgagtaacaggctgaggttggaacagtttggagggctcagaagagacagaaaattgtgggaaagtttggaacttcctggagatttgttgaatggctttgaccaaaagcctgatagcgatatgaacaataaggtccaggctgaggtggtctcagatggagatgaggaacttgttgggaactggaacaaaggtgactcttacgttttagcaaagagactggtggcatttttcccctgttgtagagatatctggaacttggagcttgagagagatgattcagggtatcttgcagaagaaatttctaagcagcaaagcattcaagatgtgacttgggtgctgttaacggcactcagtttgataagggaaacagagcataaaagttcaaaaaatttgcagcctgacaatgtggtagaaaagaaaaacccactttctgaggagaaattgaagccggctgcataaatttgcataaataacaaggagctgaatattaatcctctagacagtggggaaaatgtctccagggcatgttagaggtcttcacagcagcccctcctatcacagtcctggaagcctgggagaaaacagtttcatgggccaggcccagggtccctgtgttgtgtgcagtctaggggcttggttctctgcatcccagccactccagctgtgactggaaggagccaaggtgcagcttgggctgttacccaagggtggcggccccaagccttggcagcttccacgtggtgttgagcctgtaggtgcacagaagtcaagaattaaagtttggaaacctccacctagattccagaagatgtatggaaatgcctggatgcccaagcaaaagtctgctgcaggggtggggccctcacggagaatctctgctggggcagtgcagaagggaaatgtggggttggagcccccacacagagttcctcctggggcactgcctagtggagcagtgagaagagggtcacaatcctccagactccagaatggtagatccacagacagcttgcactgtgggcctggaaaagctgccgacactcaatgccatcccatgaaagcagccaggagggaggctgtaccctgcaaagccacaggggctgagctgcccaagaccatgggaatccacctcttgcctcagtgtgatctggatgtgagacatggagtcaaaggagatcattttggagctttaagatttgactgccccactggatttcagatttgcatggggtctgtagccccagcattttggccaatgtctcctatttagaatggctgtatttatccaatgcctgtagccctactctatctacgaagtaactaacttgcttttgattttgcaggcttataggcagaagggacttgccttgtctcagatgagactttggactgtgggcttttgagttaatgctgaagtaagactttgggggactgttgggaaggcatgattggttttgaaatgtgaggacatgagatttgggaggggccaggggtggaatgatatggtctgcctgtgtccccacccaaatctcatcttgtattcccatgtgttgtgggagggacttggtgggcagtaactgcatcatgggggcaggtctttcctgtgttgttctcataatagtaagtctcacaaaatctgatggttagtataagggagagttttcctgcacaagctctcactctgtcgttgcctgctgccatccacataagatgtgacttgctccttcttgccttctgccatgattgtgaggcttccccagccacgtggaactgtgaattctccattaaacctctttcctttgtatgttgcccagtctcaggtatgtctttatcagaagtgtgaaaatggactaatacaaggacttggggaaagggtgggaagggagtgagggataaaatactataaatagggtgcagtgtatattgctcgggtgatgggtacaccaaaatctcgcaaatcaccaccaaagaacttattagtgtaaccaaacaccacctgtttcccaataacctatgcaaataaaataaaatttaaaaattgctacagaaaaggaaaaaaaaacctgaatgccaagctccaaatctcagataaatccatggaccggattgagaacctctcttcccatttgatgtgctttcctctgattgacccccacccttcacctattttacatatacctacccttccctaattgtttttttttacatttttacattgttgtttccatctttgagtggtgcctttgttttagccttttttgcatactcacaaaccaatcaccacacactcccccattctgagcccataaaagccccagacttggccaggtgcggtggctcatgcctgtaatcccagcactttgggaggccgaggtgggcagatcacaaggtcaggagattgagaccatcctggctaacacggtgaaaccccgtctctactaaaaatacaaaaattagccaggcgtggcagcatgcgcctgtagtcccagctgctggggaggctgaggcaggagaataacatgaacccgcgaggcggagcttgcagtgagctgagatcgcaccactgcactccagcctgggcgacagagcgagactccatccaaaaaaaaaaaaaggccccggactcagccacacttgcagggactgcccaccttcaggcacagggaggactacctgattttgggtaagggtagtgcacccaactcgtgtccccctctctgctgagagctgttttgtcactcgataaaattctccgccctgctcactctttggttgtctgcataacctcattcttcttggacgcgggacaagaacctgggacccgctgaacagcaggtgcaaaaaggagctgtaacactgtagccctcctttactcccctgatgccagctggcccatgcaatgggagtgttggtggggccaggccagcctgggagccatgggccagagtggggtgatgggaataactgaacagaggtcctgctggctaaagaagcttccagctggcaaagcagcaacaacaacaaaaatcctgcatcaacctcggtaaacacagaaaaagcttttgaaaaaaatccaaaaccctaagaatataagggaaatttacctgataaagggcaactacaaaaacccacagttaacatactcaatggatacttaatggatccttcctcacaactgagatcaggaacacccaggggctggggatttcacaagatgtgaagaccagtaggaaagggtggggtgcactttagtgcactatctgcacaccacccaacactcctactttcttgaatgaggagactgcagtccagaggggcctggctactgtaagcctgggcaaaggcagtgatgtccctgctcaggaatccttgggtattagagaagctgaggccttttccactctctgccttgcacagtcaactcttgagtgagggggctggtacacccagaggatggtcacaattcctctagaggtataatctaggcagacagtgctgtcttgctgatctggtgttattaacttccctgaggaaaaaaatcacctgaattcttgtttgatcagtctcacagctaaaaaccccagggagtcatggtcccacttcagacctggggggcctggtacttgggatatgtagcaagatcccagcagagttttgtgcagtgagctgtagggggccatgggacccaatatgccctctgcagtgtcccccaccccctcacagaagaggaaaagttcaggagtggcctcctgaacacctgagacgcacctcagggatctgtattttaaattaggggtgctggggtaagaagacataagaaaagctccttctagcccagccaagtctggcctccttcctgcaaggtttagatcctgggggctttgggctattttcctgagaagaatgccaacctcatcctcagctctctgctcaacatccagccctgtgtaaaagctctaggcttgcctcatgctaacttgcttgaataatgtgtattttctgcactccttcagagagaggccagcccttttctccctaaatgcagtgaaaggaggttgtgccattgtcttgcctgccaggttgctggtggacatggctgtaagggtcataattaaggggggtctcaggacagagaggccaggcatcccttgtgctcacccacctggtccccaaggcagcccagttcttggtaaagaaatactgccaggcaatagctgggctcttgtgggacagggctagtggaacctacttgggtgtctccattgcgagcagaacgtaatagctgtgtgtagaaggtcccactggatgaagggccagtggaaccttcctctgatgcccaaacacttccatctatctgcaattacaaaaatctgatttgtgtctgcacaagataagggtggaatccctaaatttaagaaccccaaaacaaaagcaaacaaaccaaggtgtctcccacaacttcctacgaagtttccaaactctctccagggtcttggctgggggcatgtgggttcaagggcccccattttgccttggagaccaggatggggcctcacagggcagagctgcagggaacagtaatgggcccatgggctcacagggtgtcatgctgtggagacaaactgcccatagtggagatacccaagtagggccccagccagcctgggggaaatttgattcccttgttggttgcaagaggagcagggtctggctgaacaggcctggggccctgcagaggtggggatctggaacagtagacaagagagagccagagcttgacagagggccaggggagcccaggatcaccaactctccacttccgtcctcactgctccctttccccaggcaggggcatggggtcaggagggcacatagtccagggcttgagagcccaatagccttcctgctgtctctgtccctgctggtgggtacaggtggggtatgtccagatactgcctgggggcccaaggccttaccccccgcaatccaattattagatgatgattcctccttttggtggcaggaaagtctggcaattgtgttgcttgtacttctggcagggacagcagcccctgtagaggatggtccgcagcgtccagagatggtgggttcctgcagcccaacttctcaacagcaccttctcactgcaagtcaacaaatggggtcctcagcttggccccagggtctccaccctgagagaccaacactgctggcagggccagatttgcgaagtggctgtggcccagaatcttgtggatcaaacggagaaattgatggagcacagaaaatttctgtggctgaactggccatggaaatggcagcctgggcaacaggttcatgaaaacagacttttcacacctggtcctgctctccaggcctgagcgaactccatgtgttcctggtcaaagctgggggcgggtttcccccacccccttgcccgggcccatcccctgtccacctggggatgctggaggcagcctttggggtaggccaggcctgtgctggccaccaagctgtggcgactaccaccacccactcatggaactggaaggtgcctctgggtgagggcgggccacactcagctagggattgccaggagaggacggttggcatttacagcctggaactaacggcagttgattggataagtccccccagaccccctttggatggtggaggagcccccgtgtgctcagaagctgccctgggaatccctgagggatggtgctggagccaagctccttggaggaccaatgttctccctatctggtttggaagcagagtaggcttctggggacttagtcactttaggattcttggatcagtgtgggcaaaagaggctctggaagggccgattcaacttccggccgaggcggcagagcatcctctggggaggaatgcaggtgggaggcgggcacccgagccaagggcagcccagagctgccccccggcagcagcgcccctcccgccccccaacttaaggtcgcaccctgggcctcccaagcttggtctcctgcccgccagcccagagcatgcaccaggaccagctttgcagggcccggtgcgaaatgaaaacatcgccctttggccaaaagtaaccacgaatttccagaaggcgagagctgagcgagaagtgagcacagggccctggggactccccaggtggctagatgtgaagtggcctcgctgggtcccctccggcctctcccaggcccctctcaccaacccatctctcggccatcacagctgtggttcctacctctgccccacccagcctcgggccctgcgagcctccgggcctcccacactgcctgggacaggcaggacttcctgttttacccgctactgttcagaaggcacagagggaccctgaggaacgtgagctttctgagatggaggccaaggaccacggggagcgcagtgaacaccgggaatggggctggtggcccagcatgcattgtggaaaggcacgtgactgcccgggaccattggcagctccccttcctggtgattggcttagggaagaacatgtgacccaacaggccggaagtcccctgtggagtggctggacgcccccggggaagcctccccctagcgggggcagaagggaagccgcgttttttgcttgcgttgccttttgatggcgctggatcgctgttgctgcgctttttttttttttgagaaggagtcttgctctgtcgcccaggctggagtgcagtggcgcgatttcggctcactgcaacctccacctcccgggttcaagcgattctcctgcctcagcctcccaagtagctgggaatataggcacgcgccaccacgccaggctactttttgtatttttggtagagacggggtttcaccatgttggtcaggctggtctccaactcctgaccttgtgatccacctgcctcggcctcccaagctgcgctctttttattgaacgcaggccctcgcggtggctcagagcccccggtagtgccctcggaagccgcatgtgctggaggcacgttggaggcaaggatcctgcagccgcgacttgaatcgcatgggtcacggaggccacgctggagcccccagagctggctcggattgcgagttctgatggagttgctttttccaggagcgctgccagcgctgagcgttcacctggtgatcaggcgcatcccgggaagcaggccgaagccaccacgcccttgcagggccacaccggccaaccagctgttatctgcatggatgaggaacgcatttaaagaacagcagtgttttcaaataatgctggataaggctttgttttttaaaggtagtggaagttttaagggtgccccggggtaatttctgtagtcagggttccctccgggttagggtctacacggccatggcgggctgcacggtgcacgctttatcactgagacctgactcctaagttactgttaacaagagtccctggggccagtcagcttacacacaggcctaatatagcagaaagaatgatgcaggccgttaaaacagcctttggaaagaggttttcaatttttcaatcacaaagcaaatcaagcttcctaattagctacaacacggctggaaagctcagctcctactaggctgcaagcccttgctgtctgctttcttgcatgaccgtctctgttacaggaaaggtttggctgctttctaatctcactcatgttcaaagaactcgtggcaggcagtagtaaccatggcaacaaaggccatgaattcctggaagtcacattcgccgtctccatcattgtccagtgtttccatgactttgtccacaacctcctgctctttgatttcctaagagagataaaaggagttgccgaccttgtttttaaatggaattttggaccatcaaaacatgattaaaagttgagtgactctgataatttgtgtccgaaataacctaagaacatcaaatgcaaaatatcagaaaagatgtctcatgtgaccagggggctgttgtccaagcagaaatctctgggggtcagtgtctggccctgagctactggaaaaggctgaatggaacagccaagaggtgaaaaactgaaggttgttatcatacttaaaatacctgaaaaaaaaaaataccatctagatcagcctgagcaaatgtcttgaaataaaaataaacttttggccctcctaaacttttcgtgtgttctgtgtgtggaagtccctgtctcaaaggcttccagtggaatttaatgttttgaaagtcttctttgttgctgaagtaactcttgggaacgtggcctacatttgttaaccctgtattctttttcccacttgaattgctttctaggtgtcatgaaactttttcctgacagttctgcctgacattgaagccaaatgaatggtgtggctgttaagtgatgtgcacagcctcagaggaacaaccacagtgcagggctacaaacgtggtgggaaaaatttgggtattgaacactgatgaagagcataaatgcagagtaacaattctccgggataggaaggcttggcctgaagaagtcaagtgtaatgtacaacagctgccttggctataagacacacaggggtcaggcacggtggctcacacctgtaatcccagcactttgggaagctaaggcaggaggataacttgagcacaggaagtttgagaccagcctgggcaacatagggagactccatctctacaaagaaaaaataaaacaattagctgggcatggtccatgtgcccgtattcccagctactcaggaggctgaggcggaggatcgcttgagcctgggaggttgaggctgcaatgagccaagattgcaccactgcactccaacctgggtgactgagcaagaccttatctcaaaaactaaaaaagtaaacaaaacatacagaagattgtaactccacgggggtagaggtggggaggcacctgtggatgggcaggagcagggcactaacttcaattatattatacatctgcttccgaactgaaattaccttgataaaacagggcagcaaatgtttgtgatgccttgaaatgcttaccatgaattatttatcatttacaaattgaaattcccaagtgcaaagctttttctatgtataaaaataataatagtagctactattagttgagctttcactatatgttaagcacttaagcactgtcccgcttcaccctcacaacagcccttgttcagaagaagaacctgggactctcagatcaagtcagaaggcaagattggtggaactagaaaactgcatgtgtgagtgggactgctgtcactctgtcggcttgaatgcctgagaaaaccagtcctggaatcagatgtggggacaccctctgcaaagtttcaggcctgtctgctccactctgaaccattcacggtggggcagtgtttggtgggagtggggacaggagaaccagccagcgccccctccccctgccctgaaaacacggactgccgtgctgctggagccagggcttgccgtcttgcactgagaggcttggccagctcaggagggcagctccccgtccccatgcagcagagccctgccctggtatttatcctggaatagggcttggtgagacactagtgcgctggctcattgtctggtcatttatcccgtttgtgattgctcatatcagtgacccaggaagcccttcactacgtttcatatgtgcacaccactggtgcttcactctggctcaaggcgtgcctcaagccagccttggttctaagagagcatcaggtaccagggggatcacagttcacttccatgagggcatgaggtgggcagtaaagacaggtgggtctgatccaaggacagtggagacggtgggtaggaaaatgagccctaatgcaagggtctggacatacttccaccacaagccacagcgggaactgcctgaagaacagggcttgccaggagcccccacacagcttcctaaagtaggggccccaactaaagacagttcctcaccaatatccgttactccacagagcctcctgcaaagccccagggcttccaaaggatgtgtacagacccctgtcacgtcctcagttaagccagtcatggtcattcatccatgtgccaggctgggtgccccagagcagaagccatgtctgtcgtgcctgcatatctcacagttcttaattagtgctcagtcagtgtttactgagtgaaagtctggcatatcttatctccatagcaaatactaaacttctagctaaagccaaaatatatccttttcctaaaaacattcccaaagcttatttttaacagtttccttttatgttccctttggtccatggtaagtaatgagtctagcattatttgggacgctttggcctttgggaccttgatgcacctactgtacacaagatggttgataaggaaatgaaaacaaggggctcatttgagccagccccacactgagggttccgttactcaaacaagtttgcagaagcagcccaggagtcttggaagggaaatgaaatcaccttcagggcagctgagaagataaagccagtgtacagatggattttaagaggagatggagaaagtgtcaagtttaaaaagcaagactcacctctaagaaatgggaaagctcattgttgatgagctccttcagttcggatttcttcagcttgtgcttgtctccctcccttccagaatattggtggaaaacgtcgatgagggccaccatggccttctccagctcagacatcctaggggctcgcaaaggaaagttgccttctcatctatacctcatcctaaaacatttcatatgttatcaatacagacctcaacccagacaagggggatggaatggccttggcactcttttcaagctcagagcagcaggcatggcctggaggggcattctgggaatttgcacttttatcataatccttccaccggcctcttagacagctgtgggcctgccttctctgtccgtgtgggccacggggatatattcccatgccctctgaattctggctgggttgggccaacagggaaactggcaaaaatacagaggcagagcagcaagggaattcagggattaatttcccctgaattaatccccacagggtccctctctgttcctgcaaggctccaagatgaggtggtagagtgcaggtgagcaaaccatcaactgcaagctgttaaaatcaatctgaaagtgagacagtgactaggagcaaaataagaagacaaaaaatcaatagcattcctatattctatcagtaaagaagtagaaaatacagtgcaaaatatcctatgcatatagcaataacatgtgatctaagactaagtttaggaagaaaaacgtaggtccttccaagagattctgaggaacataaaatgtaggaagtttttcctttaaattcatatgtaaatttaaatcatttttaataaaaacaatggaatttttttggatgggtgacatgacaaaaacagctgtaaaattcatcaggaaaaataaatatggtagaattgccgcaatctttttgaagaataacagtgaaagttatttgatctaccaggaaaaaaaaatgtatcctaagtttaactgatcaaatgggtgtggttctgtcgcagggagggacagaatccagcagaaagctgagctgctgagcctgcattccacctccagtgtaccgaaagggtggctcattcactgcagtgactgggacggcgggagggggtgggggcaggaataggtgtttctctgcagctgtcaaagtaagagcccccctacctccctcacagcaagtaccttacgccacagcctacgaaccaaggaaatatctggtcagtctgggaatgaggcgcattttacaaaggttgccttgtcagttgtttcacaaaacagatgcgcagtcagagaaatttaccagcttttggccttgagttctaatcattaaataagaacgtttgcgctgtcataattaaaaacaaattaataaatcaaatagtgttgaaaaatcattcccatgttgaatatataacttacatcttaaaaataatttggaattattttatttatttctgatcctccgaaggaaacaggattgaagatttttttatactggccagatctttgctaaagtcattctattaataatcagtgtactttattttgctcttgagtccctaaaaatttgataattcacaaatagaacaattaagatggattaaaatctttaacatttcatgctttcttattctttgcactcaagttttcaattattgatatatgcatgtttgtatgtgtgtgtatttttttaaacaaaacaagacacttttacatcattctgatgctcctcaaagtccatgatgatttggggaaaaggaggttaaattgtttttctatgaattgtgactaatgggattattacaaaggaaaggcataaaacatgtatcccatatattagaacactaatagaaaccactagaaaatatggttttcttcataaccacactacaaatcaattaaattcttgttaaatttttccctttgacctaagaaatagttgatggtttatagtttatcttttaagagaaatggaaataaatgtccgtttctttctcacattctttgaatgtcctacattaatcttttaatattgagaacaagagaacttttgaactttaactccttagaaagacaagttacctagcgtgtgaggatccctctaaagaaggggttcgacctccctgagaaactgtgagactgaggaaagttaaaacccaccaaaaccccgatttctttgacccaatttatttgtaattgttacgtaatttctgagtggcgtcctggggctgtggggaccctggcacttcaaactgagggaaactggaaaactgaagagttacttacccagggcggtggaagaaatataaggagaaaagggaagcatttatttatgatataggactaaactagcattaggttctccatcatttttagccccagtgggaagcaaaatctttactcttcaaatagttacagaagaggcagtatttgtagtaccgctgggaaaatgtcaacaatcacttctgggccatgaaacctgacgtttctctgatttatggcaaaacacacctctagctgtctagggctgatgcagtcaggtgtccacaaagcagcagtaatgtggagattaaaacacatcatcctattgacacttctgaaatgctgccaattgtcctaaaggggctttttaagctaccacttagtttctacccctccattccgttccacccaaaagaaaagaaccatttcttcctgagcgtcctcttggcctggctctttctcacctcttccttgtctcaccccttcctggtctccttgctgcaggcgtcgtctctgctgcgggtcctgggcggcaggactggtgggcagaggcagcctcttattccctctgcccagggaggatggatgaaccctggtgcagcccactgcaggccgtggcagccaatgggagccgaaggcgggggtggcagggctgccaggcctgcacacagggctgcattgaccaagcagccccggggacttgctgggagccaggattgcacatgggctgaggaagaaaaaagggcctgtagggcaggaagtggggagtcagctttttgtgcgatttctttattacatgaatattgatgtcaccctaaaggcaaggttgggggtggggagaggagagagacttggattaattgattcaaacaaagcaaatgtgcagccaagaacaagcagcttccaagtacaggctgagcataggagattaagtggcctgcaagttggtttctaatggagaggcccctggagcttctctcctctgccatcctccaagtctggccccactgggcgtgaagttctgtggacagtagtgcttgtctgtggtcagccctgggctcaacggggctgcctcagagaagctgctgaggccagtgtctgcagggactaaaacgggtggtacttttaggggaaaacgtgatgtgtggactgtatcccaaggcctttccctccaccccagggtggaaggtcacagactctcagagttggacgatgccttagagatgtcccgttcgaacgctgttttacagaggcgtgtggacggtgtgcccccttgctgaagcctccagccagcctgaggaaggagaagtccagctgtcccctcaactcgctcgactggagcctctgaacacgggggccagtttatgggttcttcttcacaagaatgaagaagtaggtgttccttctgacaaattacacaagaacattggcccaaactctccaaaaatgtccatggtccccaatggatgcctgacccagcatcacgtccttctcccaacccagtttcaaagtggccgtgaaagggtttcccacaagatatctgtgtacatggctgtcttgctgtcattgttttatccaggacgttctctaccattcaggatctgtaagtgtgccctggaaatagcacagggctgagagctgtggtcttgcgtggctcagcctgccccagcctcctgtgaggaacagcctgagcagtgtggttggccctcacttcctcatcggcttcaccacccctggctgtggtctctgctgaaggatctgacacaggcttgctctgtgaagcacagagcttgcccaggcccaaggaaggcacaactgtgctctgtgccccttcctcgctcagatgttggagggaccattcctgtaagtgctgaccacttccccagagtggcagcctgagctctggattaacccttcagtgtccatagaaaacgctctagcctgctcctgcaggggttaaaaatagtttgaaatccactcatgcaatgaccgtacacctgtgcttagggcactgcgttcagcaggagggcccagccgggcctgccctctgcacactgcagcttcctgggatggcaagtgtggggccgtgggtccaccctgttcccaggtcttggaagcaggctgagagagaggatctgccacagggaggaaaagggctttcaagcgctctggggccccaggatggtattctttgcccaggctccccaggagctcgtggatacaacctcaccagcttcccacagattcctacaattgctgggtctgaatcttggctccaccatttaacagtggtttgactttggataaattcctaagcctttctgtgaaaggggtgaccgtagtccctactttgcagggttgttctgggtgtttttccctgaccttcacacttcctgatcaccctggcttacctgtcctgacccctcagttttaatcttatcccattagactggacagccaccagatccaatcatgtgtgactcccacattcacccaccccctgcagctacattccacaggaagacccttcgctaagtaatgagaaatgcattattgagtgagtggaacacctgaaaagttccatggtctgtagcctacatatgaccatgtggattgctagactagacctctgatttcagcgggacgataatatttcagagtagcaggctaagacaaggtgggcatgtcagccataaacagcagaaggaacacaccgataatcagaatgccttggtccacagagatttttggcagtggtgaattgctcacagtgttccttagaatgaagagatggacagtcgctagagtagtctttaatccacacaacaggaaaacctctaggtctggtcaccgaagtacctaacttgaatcaccacagtggagatcatgggctctctccgagtttccagacctaagttgggtcagacctagagcatcttgattgaagggagaagccaaggccccttgagaaagaatctgtgctagtgagaaagaataccataaaccctcttccacaccttttctgaagtgtcctgcagccatcaactaatgaaaaggaagtaacctagatgtctcagggattgcctcaattgacataaattcctgggaaccaaaaatggcactgtggctcaccagtcaaagcagaaacttgtgatggtcagttcttcacttgatagaggttctaacatgagaccgactcacagggggcccagttggtacactattctccctatagttagtttttcagttcctggttgtataattgaaacaaacatacactagctaaatcccctcactggctctcttacgtatgagatgaggaccatgatggtaggagaagtttagtgaaagtcccagaacttccccttcttatccagaaatactgaatctctgaaagagctttggagattaatgccaccattaaagggttgaaataagcaggcactgtgacacttcttacaaacccatttaactggccactttggcctgtgcagaactcatattgttaccagaaaaaggggtctcgatccagatgtaaagaggggattcttggatctcacgcaggaaggaattcaaggtgagttgcagagtgaagtgagaagagatagtttattgaaagctcttacattccattacagagtagggcatcctcagaaagcaagtagaggaatgcactgtctttaagtgcatatatagctgttttgtctatgtaaagattaaactaagctgtgactatatgcaggcgagcagacagcgtggcaaaatttattattctattgattcaaagaaaactatccttaagattttagtgtgtgcgtacgttaaagcatagctcttgttatcttgaaagcgtatagtgtttgggtattgggatgtctgcactctctgttgttgtagcagtgtgtccttgcaagtatcgttcagctgtttcctcagctataaacatcttaggtctataggttttgactgcaagaaatgtgccttgttaatctcaaaatgcagctgaacttaaagtggcattactctgactctcctaggcgcctgcttccctaacgatatggattatgaagaatgtggactattgcaaatgtaatcagctggtgacttcaattacagctgctgtaccagatgagaaatctctgctggagaaaatcaacatattctctggcactttgcatgcaggtactgatcttactcatgcttttttctcaaaccagtttgcaaggaccaccagaagcagtttacttttacctgacagggtgaacagtatacactcacagtgttgcctgaaggacatgccagttcttctgctctaagcaatgatattgtctgcagagatctagtcatcttgtcagttcacgcaacattacactggtccactaatattgacaatattatgcttattgaatctgaaaaagaggaagtagcaaaggtgggagatgatctccacaaaacttaggggccctccacctcagtgaagtttctagcaggttcagaggtgtggaatacgttgaaatatcccctccaagtgaaaaacaagttgatgtattttgcgccacctcctgtgaaaaagaaacacaatattcagttgggctttgaggattttagatacaacgtttattatatttgcatgtgctactttcagcctatgaggctggaagtttcaaatgggggtcagagaaagtttaggctgtaatgtaagctgctttaccactttgctcataggattcggtagatccagtgatatttgaagtgtctgtggcacattgaaatgcagtgtggaccctctgacaagcacccataggagaattacagcacagagctctgggattttggagtaagtctacgttctcttctgcagctaactgatctcattttgagaatcagcatctggcttgcttttgggccataaccatgggacatcaggagaccatgcagcctaagtgctatctggtctacctggccataaagttgggtgtgcatgtaacagcagggtaccgtcacatggaaatgatgtatgaagctgatcttaggcaaatgtgaaggtgcaaaaagtgcatgagtgactcagattcctttgacaccaactcctgttacattgcctcccctctctcaatccatgtctatgggctcctgggatgtaccttatagctagttgaccatggaagaaaaaagttcaccactggtttacagatgggcttgatatgttggtacttccctggattggacagtcgcggcactgcaaccacagtcaaggattatcttgaaggacagtggtgaagggaaatcttctcagagggcagaactttgagcagtacacttagttgcttactatgtttggagtgagaagtggctgaaagtatggatcagtattaattcatcagcagttgctaaaggtttggttggttggcaacttcaaaggaataggattggaaaattggtgacgaggaaggctctgaaagaggcatgtgatggacctccctgaaggggcttatattcctgcttctagtgggacatgtgtgctttgtcttgctcctgcttcacagcccatctgtggtgcttgtgcgtgtgtatatctggtggtgctctgttccagccacatgtacagagagggcagccctgggtgaccttgcagcctggcctgggccagtggccgaccactgcacactccagaacttcagctacccagctccttctgcatgtccacccactggcctcagctttcctgtgccctggggtgttgtttcctgctgcactgtccaggctcacgtccacaactggaccctgacacctttagtgcacctaacccccagccttggctcacctgtgctctacaggattgtttgaagaactgtaaatgctttgagattttgttctgctcacaagccaacaatgtagaacattatagatgctggcagaagacatgaggtttgtgggtcagagattactcatggcaaaattagtagccagcgtttcatgttcatgttggtttcctgttgcccccattttgtccctttgtccctccactatgatgcagatgagcctagatgaaggcctgcacatgccacgagttgtgctacagtcggctacagtcagcaacactgtgctacagttggcaacactgagcttagggacttgtggatttcatagagagtggtgatgagacttctctttgtccttatttctggatatttctcactgcaaaaacaactctgagaagtgacctgggtaaatcgctgtcagggccttgcattcctggcttacatagcaacagcctgcagggatactcagtgccatggtagttgcctatcccaaccagtgttttcctgctgcctcacaattgtggaccagccctggcctgggcaaccagcaaacttttcacacaaagtatgaaccctggccttggggaggggggtccctcttctgagtgtgccttccttggttgttctccctcaagcccaaggtaccctttagatttctctttgtagttattgtcctatcatagttttatcattgtttatgttgaactttcctgtttaaattactgtgtggtttctgtctcttgagtgcacccagactgatatatcaactaacaagaaaaatgaaaagtttggtaaaattttgaaatcttttgtcagtctaaaattattctttaaaaattaaaaaacctggccgggcgcggtggctcacgcctgtaatcccagcactttgggaggccgaggcaggcagatcacaaggtcaggagattgagaccatctcggctaacacggtgaaaccccgtctctactaaaaaatacaaaaaattagccgggtgtggtggtgggcgcccgtagtcccagctactcgggaggctgaggcaggagaatggcgtgaaccaggaaggcagagcttgcagtgagccgagatcgcgccactgcactccagcctgggcgacagagcaagactccatctcaaaaaaaaaaaaaaaaaaaaaaaaaaatttaaaaacccataatacttggaaagagtaaaggtagaagggacaaaataaaacaataacactgatgtgtaatcaatacttatttgtttcttctgcttattttggatttaatttgcttgttttctagtttcctacagtacaagcttacattactgactttatatttttcttattttctaacccatgcattcaatgctgtcagttccattttgagcatggcttttgctgcatccttcaaattttgttaagttgtattttcctttttacttagttcaaaatattttaaaatttatcttcagatttcttctttgacccatgtattatttagaagtgtgttgcttaatctccaaagattttgggattttcagttatctttctgttattgatttctagtttaattccattgtggtctcagagcatatgttttataatttttattcttttaaatctgttagggtgtgttttatggcccagaatgtgtatcttggtgagtgttccatgtgagcttgaaaagaatgtattttctactgttcttggatgatgtagcctgtagctgtccatcatattcagttgattgatgatgctgttgagttcaattgtattcttattgatttcacatctgctggatctgttcatttctgatagaaggttgctgaaatttttaactataataatgaattcatctattttttcttgcagttctatcagttttaccttgtatatcttagctctgtcttattaatgcatacaagttaaaaattgttatgtcctctggtagtattgacccctttgtcattatgtaatgctcctcttaatccattataattttctttgctctgaaatctgctttgtctgacgttaatatagcaactgccacttttttggattcatgttagcatggtgtatctttctccatccatttactattaaattatatgtttctttatatttaaattagttttttttgtagacaatatatagtttggccttatttttgatccactgtgataatccctatgttttaattggcatatttagataattgctgttcaaagtaattattgatatagttgaattaatatctaccatatttttcactgttttctatttgatgcccttggtcttgtttttgtcttccacactttttctgccttttgtggttttaagtgagcattttatatgattcagtttttcttctttcttagcatatcaattaatacttcttaaaaaatatttttaagcgttgccttagagtttttaatgtatgtttacagctaatccaagtacactttcaaattacactattatcacttcttggatagtgcaagaaccttataataacaaaaatgagatttaccatcactattcattctctggtgctcttcctttcttcatatagacctgagtttcttttttaaaaatgtttaagttcaggggtatatgtgtgggtttattatataagtaaacttgtgtcatggaggtttgttgtacagattattttgtcatccaggtattaagcctagtacccattcattattttcctgattctctccctcctctcaccttccaccctccagtaagccccagtgtctgtttttcccctctatgtgtccatgtgttctcatcatttagctcccacttataagtgagaatatgtggtatttggttttctgttcctgcattagtttgcttacgatagtttttgcctatattcctgcaaaggacatgttcttgttcttttttatgcttgcataatatttcgtggtgtatatgtaccacattttctttaccgagtctaccactgacgggcatttaggttgactccatgcctttgctaccgtgaatagtgctgtaatgaacatccacatgcatgtgtcattatgatagaatgatttatattcgtttgggtatagacccagtaacaggattgctgggttgagtggtaattctgtttttatgtctttaaggaatcaccacactgttttccacaatggttgaactaatttacattcccgccaacggtgtacaagcattcctttttctccgtaaccttggcagcacctgttatttttttacttttgttttgttttgttttttgagacggagtctcgttctggctggagtgcagtgactcaattttggtgcagcccaggctggagtgcagtgactcaatttttgctcactgcaacctccacctcttgggttcaagcaattctcctgcctcagcctcctgagtagctgggattacaggcacatgccaccacgcccggctaatttttgtatttgtttaatagagatggggtttcaccatgttgaccaggctggtcttgatctcctaactcaggtgatccgcccacctcggcctcccaaagtgctgggattacaggtgtgagccaccgtgcctggctattttttgaccttttaatagtagccattctgactgctgggaggtggtatctcactgtggttttgatttgcatttctctgacagtcatcagtgatgttgagttgtttttcacatgctttttggccacatgtatgtcttcttttgaaaagggtctgttcatgtcctttacccactttttaatgggattgggtttgtgtgtgtgtgtagatttgtttaagttccttatagatgctggatatcaaatctttgtcagaggcgtggtttgcgaaaattttctcccattctgtttactttgttgatagtttttgtgtgtgtgtgtgtgtgctgtgtagaagctctttcgtttaattaaatagatcacatttgtcagtttttgcttttgttgcaattgcttttggtgtctttatcacgaaatatttgcccattcctatgtccttaatggtattacctaggttgtcttccagggtttttatagttttggattttacatgtaaatatttctgtatgttgattgtcgttcacaaacagggttagtctgacttcctctctttctatttagatgccctttatttctttcttttgcctgattgctgtggccaggacttccaatactattttgaataggagtggtgagaaagggcatccttgtcttgtgccagttttcgaggggagtgcttccagcttttgcccatttagtatgatgttggctgtgggtttgtcatagatggcttgtattattttgaggtatgttccttcaatatctagtttattgagagtttttaacatgaaatggtgttgaattttatcaaaaggcatttcagcatctattgagatgatcatgtggtttttgtctttagttctgtttgtttgataaatcacatttattgatttgcctgtgttgatctaaccttgcatcccagggataaagcctccttgatcatggtggataagctttttgatgtgctgctggattcagtttgctagtattttgttgaggatttttgcatcaatgttcatcaaggattttggcctaaagttttttttttcttgttgtgtctctgccagattttggtattatgatgatactggcctcatagaatgagttagggaggagtccccccttctcaattttttggaataggttcagcaggaatggtactagctcttctttatacttctggtagaatacagctgtgaatccatctggtcctggactttttttggttggtagcctatttattcctgattcaatttcagagcttgttattgatctgttcagggaatcaatttatttctggttcagtcttgggagggtgtatatatccaggaatgtatccatttcttccgtattttctagtttgcatagaggtgttcataatattctctgatggttatttgtacttctgtagggttagtggtaatatcccctttgtcatttctgattgtgtttatttggatcttctctctcttcttctttattagtctagctagtggtctattttattaatttttttaaaaaaccaacccctggatttgttgatcttttggatggttttttgtgtctcagtctccttcagttcagctctgattttggttatatcttgtcttctgctagttttggggttgatttgctcttggttctctagttcttttagttgcggtgttaggttgtttgattgcaagcattctaactttttgatgtggacatttattgctaaaaatttccctcttaacactgccttagctgtgtccaagagagtctagtatgttgtacctttgtttttattagtttcaaagaacttcttgatttctgccttaatttctttatttacccaaaggtcattcaggagcaggttattcaattttcatataattgcatggttttgagcaattttctttctttctttttctttttttgagatggagttttagtccatcacccaggctggagtgcagagaggcaatctcggctcactgcaacctccacctcctgggttcaagcaatcttcccacctcagcctcctgagtagctgggattacaggcatgtgccaccatacctggctcatttttgtatttttagtagagacagggtttcaccatgttggacaggctggtcttaaacttttgacctaaagtgatccatccgcctcagcttcccaaagtgttgagattataggcgtaagccaccccacctggccttgagcaattttcttgtgctgtggtccaagagagtggttgttatgattttagttcttttgcacttgctgaggagtgttttatgtcttattatgtggttgattttagagtatgtgcatgtggtgatgacaagaatgtctattctgttgctttagggtggagagttctgtagatgtctatcaggtccatttactccagtgctgagtttaggtcctgaatatctttggtaattttctgcctcaatgatctgtctagtactgtcagcagggtgttgaagtctcccactattattgtgtgggagtgttaagtctctttgaagtgctctaagaacttgctttatgaatctgggtgctcctgtgcttggtatagatatgtgtgtgtgtgtgtgtgtatatatatatatatatatatatatttaggatagttaggtcttcctgttgaactgaaccctttagcattttgtatgcccttctttgtcttttttgagttttgttggtttaaaatcttttttgcctgaaattaggattgcaactcctacttttttcagttttccatttgcttggtagatttttacccatccctttattttgagccagtgggtgtcactgcatgtgagatgggtttcttgatgacagcatactattgggtcttggttctttattgagcttgccactctgagtcctttaagtggggatttagcccatttacattcaaggttagtattaatatgtgtggatttgatcctgtcatcatgatgttagcttagacctgagtttctaaaatatcatttttcctttctctggagaacttcttttaacatttcttcagatttattagcaacaatgtttgtttgtcttagaaagtctatttctcctttacttttgaaggacagttttgcagaccgcagaattctaggttggtgggtgtattagtctgttcttacactgctaataaagacatacctgagactgggtaatttataaaggaaagaggtttaattgactcacagtttagcatggctggggaggcctcaggaaacttacaaccatggcagaaggggaagcaaacacatccttcttcacatggaggcagcaaggagaagtgccgaacaaaagaggaaaaagccccttataaaaccttcagatctcatgagaactcactcactatcttgagaacagcagcgtggaggtaactgccccctatgatttaattacttcccaccaggtccttcccatgacacatggggattacaatacaagatgagatatgggtgggaacacagccaaaccatatcagagggtttatttttacaacactttaaatataaccatgtgtcatgtaacaacattttggtcaatggcagattgcatatgcgatggtagcctcatagattataatggaactgaaaaatttctattgcctagtgatgttgtagccatcaaaacattgtagtgcaatgcattactcatgtgtctgtggttatagtggtataaacaaacctactgtgctaccagtcacataaaagtatagtacatcaaattatgtacgatacgtaatacttgacaatgatcataaatgaccatcttactggtttatgtatttactatacaatacattttattattttagatggtactctttctatctatctatctatctatctatctatctatctatctatctatcatctatctatctatctatgtaaagttagttaacagttagttaccagtaaaatagcctcgagcaggtcctttgggacatattctagaacaaggtgccgttatcatagagaatgacagctccatatgtctcattgtccttgaagaccttccagggggaaaagatgtgatgtagaggtggaagacagtgatattgatggttctgacctgtgtaggcttaggctaatgtgtttgtgtttcagttaaaaaaagagtttaaaaagtaaaaaatttaaaaattgttaaaaatggaaacaagcttatagattaaagatataaagaaagaaaatatttttgtatagctatacgatgtgtttgtattttaagctaagtgttattacaaatgagtcaatgagaaaaaaagtttataaagtaaataagttatggtaagctaagtttaatttattattgaagaaagaataattttgttttgtttttgtttttgtgacagagtcttgctcagttgcccaggctggagtgcagtggtgcaatcttggctcactacaacctccacctcccaaattcaagcgattctcctgcctcagcctcccaagcagctgggattacaagcatgcgcaaccaaacctggctaatttttgtatttttagtagagacggggtttgaccatgttggccagtctggtctcgaactcctgacctcaagtgatccacccacctcggcctcccaaagtgctgagattacagacttaaaccaccatgcccggcaaggatattttaaatattttaaaataaatttaatgtatgactggctgcagaggcttaagcttctaatcctagcaccttgggaggccgaggcaggaagattgcttgagttcagaacagcctggagttcaagaacagcctgggcaatgcagcgagaccttgtctctaaaataaataaataaataaatttagcacagcttaagtgtacagtgcttataagcctacagtagagtacagtggtgcttataagtctgcagtagagtacagtaatgcttgcaagcctacagtagagtacagaaatgcttataagtctgcagtagagtacagtaatgtcctgggcattcacactcactcaccactcaagcactaactcacccagaacaacttccagttctgcaaactctgttcatcgtaaatgccttatatgggtatatcattaaaaatcttttatatcatatttttactgtactgtttctatgtttagacataaaaatacttactattgtgtttcattgcctacggtatccagtagtaacatattggacaagtttgtaacctagaagcaacaggctgtatcatacagcctaggtatatagcaggctgtaccagctaggtttgtgtaactgcactgtatgatgtttgcgtaaggacaaaattgcctaatgaaacatttctcagtatgtatccccatcattaagtgatatatgactctatttcattccatcttcttctcgcttgcatagtttttcaggagaagttagatgtaatttttatcttgcttctctatggtaacgtgtttattttctctggtttcttttgagatttttcctttaactatgattttgtgaagcttgaatgtgatatgcctagttttgggggaagggcatttatcctatttgtgttctctgagcttcctggagctgtgatttggtgtctcacattaatcttggggaaattctcagtcattattgcttcacatattgcttctgttcctttctctctttcttcttttattctcattatgtgtatgttacacctttcgcagctatcccatagttctaggatattatgttctgcttttcccgctcagcttttattctctttgttttttagttttggaagtttttattgtcatgttctccagctctcagagattttttcctcggccatgagtctaccgatgactccatcaaagggattcttcctttctgttacaatggttttaaaactctagcatttatttttgattatttcttagaatttccatctttctgcttttgttgcccatccactcttgcatgccatctgctttttctgttaaatcccttaacatattactcatagcttttcaaaattcctggtttgataatttcagcattcctgccatatctgactctgcttgtgatgcttttttaggctcttcaaactagtttttgtcttttagtgtgccttgtcatgttttttgaaggctggaaatgaaatctggctagaaggaactgctgtaaaaagacctttagtgatgcggtggtaggtgcgggggagggaaagcattctacagtcctatgagtaggtctaggtctgtggtgactctgcccccttgaattgtgaccttcacaagtgctcccccatcctgtgagtggaacaggatggctgtagggggctgaaattgtgtatttcccttcacctgcatgaaagtccagagccacctggagtaggtaggtcaggctctgatgtaacccagccagtttggctcctgaggacaggcattgttaagaacagaatgccctatctcaagatgttttcttttttcttccccctgctgaagcacaaggggatctttctccaatatccactgtgaggacctggtcgagctcctggaggtaaaattcacaaaagtgtaggggccctcaggacgggggtccccctggaggtttttgtccctcagacttgccacactgagcctccagcaatttttcgggttttcctaccctggcactggaggtttctgctggagataagttgtgattctctctccccacctgtctgtctctccaatgttgggaacaatagtttgtcttgtgacctcacttctctactggatctaagaggggctgttaatttttcagtttgttcagctttttacttgctgttaggatggagcaaagatttcttagctccttacatgttgaactggaaaccaaaaatgagtagttactttctgaagatataaaatccccagagtaatataataagacatcacaaatgtcactagtccacctgtaaaataatgtgtactacttcttcctcccaataataaaaaagcttgaggagacaacaagggtgccaacaggcagctggttgctggagggcgatcaccacggtgtttcccaggagagtgagaccatgcactctttggcttgggaagaagggtgccattgtgagcaacgctgccatgactctgcgaatgcccaggacattactgtactagccaagagctatcacttgactcgtggtcatggcgttgtggagagctgcctggcattgcagcctgtgaaactgtggaggtaattgggagggggtgatggaggctcaaggcccatggtgtctagtctaccgcaccttgaatgccaaaggcacccatgtggttcaccctctgtctactctgcagatggagggaaatgagatgatgtagctccaggttcccagacgacaacctgccatgacaggaaggggctctccttcccaagcaacagtgctgcctgcccaggccagagcacgaaggagcttgtgggtcaacaggggcctctatttgaatatatcaatcttctgttaagatcttcttcagtcacttggatgtcccttctcccttcatccattcagcaaactcttggctccaatcaactaggcagccagccccgggccttgctggggctggtcagggggtgggaaggggtcattccagaaaggcctgggcagcaacattgttttctcccacaaaggacggtgccatccgccaccaagccactcacgaggctgactccagtgaccgatggccacaggcagaaaaggaggcttgtgttctaaaggaatgtgaggaagagacaaaaagcttctgttgtagcaaatgcaagtattgatgcaatgagaactcactgcctttcctgttctaaagaatgccactcccagccagcaggcagccatggggtcagggcttgggtgctggggccttggagctggattcagatccgacctctgaacaaaccttgtcaaacgacaacctttctcaggctgagtaaaagacagaaaaaaagctgcacccctgagagggctgtaggaggagtaaaggaaattgacacgcacatacatgtgcacacatacagacacacgtgaagggcccaatgcactcacttgggagtcattattattattataaaagttactgttcttgtctgcagaacctggagctggcaggagtcagactgggcaaagcaaagaacagcaaatagcagagggacagagacttctttctgagccagatatattaggtctaaaagggcagagtgaacctactggctactttagaatactctaaatccaggaggcccccaatctggcaaattaaggcagaatatcagcatttcatgggtatcacattttattatttttgaactatgtcaaattccattaattcatttgggttctaaccagtcattccaaagtccatgctcccttccagaagtgcaggcccagcatgagctgagccgggggcagagcaggagcaccgctgtttgccctgggtccatggcaacgccagagcccagctcaacacagcagggcttttgttttcatttttcaactttttttgaggccttgagaaggaagtggagattggagtgtgaagagcccaccccacacaaagccgcttttcatggcacttgctgtgcctgtggtttcttgctcaggaactgagtcttggtgaaatataagaggaagtgtttgaactgatgctggggcaagatctcaaaaggaaaactgagttttcccttttgtagaactctgtcacagatatttattttgattatgctttttataacttttaaggattcttggaaatttgcaataaaatcatgtcaggtttaaatgtttaaaaaatcataggattagcctatttgttttttcactcaacaggagtgtttttcatttgacgacttcagaagatcccacgtcttacagcccgtcccttcctgtaggacgctgtgggccaggacagcacagtactcggccacatgcccaaatgagcagccacaaaagtctaatcaatcgattgttcaaactgcttaactcacatctgtaatcccagcactttggaaggctgaggcgggcggatcacttgaggtcaggagtttgagaccagcctgggcaacattgtgaaaccctgtctctactaaaaatacaaaaattagccaggtgtggtggcgcatgcttgtagtcccagctacttgggaggctgaggcaggaggatcccttgaactcgggatatggaggttgcagtgagcagagatcctgctactgcactccagcctgggtcacagagattctgtctcaaaaaaacaaagaaaaacaaacaaacaaactctacttaacaagtgaggatgctcacgccttgactgtaaaaatgcctgcgtggaattgaaccacctcgacagcaacgacccaggaggtggaaatgagttgttttattttagagatttaaataaagaacataccaaacgtatgagagaagaggaaagctgagaacctaaaatctggacgctcggttgggcacagtggctcacgcctgtaatcctagcactttgggaggccgaggtgggcagatcacctgaggttaggagttcaagaccagcctggccaacacggtaaaaccccatctctactaaaaatacaaaaaaaattagccaggtgcctgtaatcccagctgctggagaggctaaggcaggagaattgcttgaacccaggaggcagaggttgcagtgagctgagactgcaccattgcactccagcctgggcaacaagaatgaaactccgtctaaatatataaatataattttaaaaaatctggaagctcaatccctagcagttttgctactgcagaacaataacctcttttgcttttgaaaaacaaacttcaagttaaaaacactgtgaataacctggcactatatttcaatttttagtgtaactggaatacatccacaggtatatttagcatctagtagttctattgagtgctaatgtaaataaaatttaaatcataggaggaataaactatttttggaattaaaacttaagacagactccataataaaatcaaataatttgatgtaattcctgtaacatatgtactaacattaagttcaacatttaaaattaattatctgttattgtgtattaatttagaaaattaattgcaatcttctgaactctgcctttggggctccctggaacgaggcccaggggccgtgtttgcctgagtcgcatgcatgcacctcccttccccaggcgaggcccacttggctgcgcgcctccccacagcggggaccatgagatgcagaggcagacaaggacagcgtcttggtgatcacaacttttaaaacgaaaaactcagatgcccaggatgagagagcgcacaccccgtgctgatgccccaccctgaacttgctgctgctgtgatgatggccacagaaggacagctgttcacggagccctggccgagctcgctctgtcctcagcctgtgcggctggccaggtcccttggccgtaggaaggctccagaggcctctttgggtaggagagtgtgggggatgggtcagttgctcagcacaccaaggagccaggcctcacagggactcttttagggtccctagattttgcaactcaagtgacaaccactcctgcccctggagtgttgatttgtgtgctccaatgccccccaacatgttggccgtcaggtgccctgccaggccctgcgtgttcagtgtgctctggttcctgggaggaaggtaagacactgagttctgaactctggaggtggaagggggctccttggacagtcacctgattaagcacagccctgaccccatcctggtcacaggggtgtgagtctccaaggacagggctccagagcaccgtgtgataagtcacatgcaaaggaaacctgggcaatggcataaatgaggacctccccttagcagggaaaggagcttagcagccttcggagcctcagcctgcataggaaacgcatgtttctccatcatgatgggggaaactgaggctcaggttgtatcactcagtgtcaaagccaggatttgaacctgggcctgcctccagagtccaagtcccaaccacatgaaatgctgctgtcgtggatcggagcaggaggaaatgccctgctctgactcaaggaggtgcttggactctgcttgtttttgtttttgaaacagagtcttgctctattgtccagactggagtgcagtggtgcaatctcagctcactgcagcctccttctctagggttcaagtgattcttgtaactcatctcctgagtagctgggattacagacatgcaccgccacgcctggctaatttttgtaattttagtagagatggggtttcaccatgttggccaggctgctcgaactcctggcctcaagcgatccacttgccttagccttccaaaatgttgggattacaggcatgagccaccatgcccagccagactccacttcctgatgaaatggcaagagaagagcatgtggggaggattgcagaccttgctatgaccaactttggaaaacacattctgccctctggctgcaccccctacacatgcaaaatagactcacccagacacccatggtctcgtgccattatggcagccagagctccaggtctcaccacttaaccatctccatgcggggtgaggctccatgggcacggctcctcaggcacagcctcttcgatgtgtttccttttcaatccacagacttgtgacctcaagagccaagcacctggcccaacctcttcaccctatgtctaatggggatggggataggacagacaccttggcccctgccactcagaagggggaaactgaggcaaaaagcaggcagtctgcagagattctgaaatccaacctgacccaggtcaacaggtctgtgattagggtgcagtgttgctacagggactgattctctaggcacctgagaagaaaataaaagccagcttggattaaaagaaccagatagtacaaaatgaaaggaggccagtgggcccctgaatttctacaggctaagaagactgcttaaccacaaacacaggctgcttttatttttctagtacaattcctttaataactttgtgggttttctataaattttattgatgttcactccattagacaaaacctgcaccgcagatctcttttaaatagaccattttctattcagggctccctgtgaggctgttgtggaacaatgctgttaagattcccagaaggtctccttaataggggcctgggaggcacatgtgtaccatccctgggaggccctttgcctctgaaaaggctggtgagacaccagttgaactctttctgcatcttaatggagggttttataatcccactcttggcttcatgtctgctctgaacccacatattccctacagggctgtgggtcccaactttgccctgagccctctcattctttgagaatcttctgctgggagaaactggggatgaaaattagtttcatttttgagcccagcaaatcctggctccttcatgtctttataagttctgtttgaaaaccccatcattccttctccagtgcctctctccctaatcatttctcatgatgtgcaggtgaaagaagccagtcattcaatgacaagagccttctttccttcacttccagaacatttccttgcttttcctcagtcccttgccagctgccttctcatgcctgccagcctcctctctggggctgagtcccacagccaacccgcaatgttttttggcttttgtcatggtagcatcccacttcaaagtacctgattctgttctggttactattgctgcataagaaaccaccatctaatagcgtaaaagcatcagctgttttatttttctcccagggcatgatcggttggcacagggtgctggtgtggctcagtgtctaggacctcagctggggagacagaacagctgtggctctgcggctgcggtagaaccatcccgaggtcacgtagcaccaggtaggagagaacatgaaggctgggctcacctggagctgacatttgcagcactgttcatggtgtctctgagaggctgggttctgaggagtgtcccaagagcctgcattcctagaggactgagagagctgcatggcctttcctgagctgcctcgggagccactgcaggcctcgcgacctaggggttacatcagacattacaagtccaagaccaaggggaacaaacacggaccctgtttctcaatgggaagatgtcaaagaatttacagccattggaaaaaaaaacaccacagcttactctctagtcacacattatttacatattagtccattctcatgctgctatgaagaaacacctgaggctgggtagtttataaagaaaagaggtttaattgactcgcagttcctcatggctggggagacctcaggaaatttacaatcatggcgaaagatgaaggggaagaaaggcaacttctttacagggtggcaggaaggagaagtgctgagcaaaggaggaaaagccccttctaaaaaccatcagatctcatgagaactcactcactatcatgagaacagtgtgggggtagctgcccccatgattcagtgacctcccacagggtccctcccaccacacatgtggattatgggaactacaattcaagatgagatttgggtggggacacagccaaaccatatcagggactgaattgtgccccctacctccaaattcatatattgaacccaatccccaatgtgactgtatttgaagatagagcccttagcaaggtattccaaggtgagcaggtctatgcaaacctgcccccaaagtcaaggaggctcagaaagaggctgacaaatcagtttctgagaaacatttaacagtgacttgtgaacagaagctatgtctgtgtcttgggcagcatcgagggaagtgggtggatctcctcattgttaccctcccagacccagggcttatagaccataggggaagagtatgcatgcttcagaggtgatgtgtaggataaccgcatggtaagtaagataatgtcaagattgttttgccctaagggcaggatttatggtaagtgcatgctcttacacaaggaccagtagttaaaatacaaatcttagaggcatttcaggaaccggggtcaatcagaagccaacacggaggatcagcatccaagatggagctgctttaggctccacaggaggtcattaaggttcaacaagatcataagggtgggtcgccaatctgatagcacctaatctggtgcccttataagaagaggaacacatactggagtgctctcattgcatgcacacagtggaaaggccgtttgaggacacagcaagaaggtggctgtctacgagccggaaagagagccctcaccagaaatctaatttgctggcaccttgatcatgcacttccagcctccagaactgtgagaaaataaatttctgttgtttaagcctcctagtctgtggtattttgttaaggccgcctgagcagactattgtatgaaaaccagctatcatcagctagaaaaccagcagctatacctggttactggaagaattgttttttgaggttgtgggactgaggtccttagttcttgctggctgttggctgtcagcctcagtgagttcctagaggcagccctcagtccttgtcatggggaatgtccccaaaatagccacttgttttatcaaagctagtaagagagtctccttgcaaaatggaggtcaaaatcttatatcacagaagtgacatcccattacatcccattacacttgtggtattctatggttcaaagcaaatcaaaggtcccgcccgctaaaggtagggggacactgcaggcgtcaataaggggctgactgctgacagctctgaagccctgccgcccttccaccgcatatcttggtggtctgatgaggaagtgtgcacatggcttcccgtggggccagtgggaagctcaaaccacgcaagtcccacctgcacacatgagctcttctctttccctatgccctaaccccaagaaaacccaggctacccacctccatcctttcccaagccactcaagccagttctagaccagcttgcgtgctgggctgctgcacccagaagcactcatgatggctaacaggtgttttcatgccctcttagggtgtgtcacatcatccatctcaacattcgacctatcgattgggaggggcaatcctgaatcagcagattcaatgcagcaggcacagataccaggaggcagggaaagtggggccacttcagagctggccaaactttgctttatgacaaaccgtagtctactttgctttcttggtaaatgttccacgtgtacctgaaaataacagacactctgctagcggttggtgaagtggatatactgattttatatatttgtgtatatatgtaagtctcatgatatatgccgacatgacgtgtgtcatgttggttaaatgagctgtttgaatctctgtcctccgcctttttgttctgagttacgtgacaggtgtgttaaattccccaactacaattatggatggttccgtttctcctttgagttatattaatttttgaatttctggattttatattttgaaggtatgttatagacacacaaatctggggctgctatttctttctactgaattgacattttatcattatgaaataattctcttatttctggtaataccatttgcattaaagtctgctttttacaatatcagtatgatttgtgttttacactatcagtatggtttgtgttggtgtggtattgtttcactcttttactttcaactaaatgtttctttatagtaaagtatgtttcttataactaccatttagtcaaatctctaaaagagatacttaaaaatattggcattggccgggcacggtggctcacacctgtaatcccagcactttgggaggctgaggtgggtggatcacttgaggtcaggagttcgagatcaggcagaccaacatggtgaaacctcatctctactaaatatacagaaaaaaaaattagctgggaagggtggcacacggctttaattccagctactcgggaggctgaggcatgagaatcgtttaaacccaggaagcagaggttgcagtgatctgagattgtgctactgtactttagcctgggtgacagggctagactctgtctcaaaaaaaaaaaaaaaaggcatgttttctatctttacatttaatgttgttacaaatatagttgggtttaattctgccaccttgctgtttatttttattttattttttattatactttaagttctgggatacatgcctagaacgtgaaggtttgttacataggtacacacgtgccatggtggtttgctgcactgctgtttatttttcatttgtcttgtctgttttttatttctgtagtactctcttactgttttcttttccatttttaaaatttattatttttcttttatcttctattttgcttgttgtcatacatcattgtattttttgagatctcattatgcactcttgacctgcctgaagttattaggatacttttgctttgtcctaacaaagatccagcacgttacaattgtttatttatcccccttgctctgtgtgcggctgttggcatatattccacctctacacattataaacctcacaagtcacaattattgttgatttaaggacaaatgttaaaaatacatttatccatttatttacactttctagtactcttctgtccttcctgcagttatgagattatcttattttagcctgaagttcttcttttagcattttagtgcatgtttgcttcagtcagattctgtttatctgaaaatgaatttattttgacttcctttgtaatggctattcttcttaggcttagaattatacatcagcagatttttctcttttttttttatcattatactgtaagttctgggatacatgtgcagaatgtgcaggtttgttacatatacacgtgccatggtggtttgctgcacccatcaacccatcatctacattaggtatttctcctagtactatccctcccctagccccccacccgctgacaggtcctggtgtgagatgttcccctccctgtgtccacatgttctaattgttcagctcccacttatgagtgagaacatgtggtgtttggttttctgttcttgtgttagttgctgagaatgatggtttccagtttcatccatgtccctgcaaaggacatgaactcatcctttttatggctgcatagtattccatggtgtatatgtgccacattttctttatccagtccatcactgatgggcatttgtgttggttccaagtctttgctattgtgaacagtgctgcaataaacatacgtgtgtgcatgtgtcttcatagtagaatgatttatattcctttgggcatatacccagtgatgggattgctgggtcaaatggtatttctggttctagatcattgaggaatcgccacactgtcttccacaatggttgaactaatttacactcccactaacagcgtaaaagcgttcctatttctccacatcctctccagcatctgttgtttcctgactttctaatgatcacctttctaactggtgtgagatgatatctcattgtggttttgatttgcatttctgtaatgaccagtgatgaagagttttttttcacgtttattggccgcattaatgtcttcttttgagaagggttcatttctcttcattattttttctctaatcttatcttcacactttatttcattaagttgatcttcagtctctgatatcctttcttttacctgattgatttggctattgatatttgtgtatgcttcatgaagttctcgtgctgtgtttttcagctccatcaggccatttatgttcttccatttggggctgggtttatagttttgtaacccctatgccaaatgttgacaccttatagtaattggcagggataagtaggaaattgcttgataaataaatgcaaacaaaaatgtatgctggcaattcttaagacatttctaaattactttgccactatttttaaagctaacttatttattaaagattttaagtaaacttaacatttgactagtctttccctttttctaataaagtattttatttgagcacttttatttttctttaattaataaataaataatttatttgagcacttttatttttctttaagccaattaattatagctcttctatattttttaatagagaaacattgtgtacgcaacacataaatacatagatgtattaggtataccgatagaagtacatcttatagattcctaagacctctttttttttttctatcttagacttgcaaactcttgatcatctgtgtcattgccctggcagttgccggctaaatagccctaaatctgcatattaaaggaaactattagatgaaaaattagatagcaaaatttacattttaaggtacagagaggaaaaagtctggtggtgctaaagagagattaaaaatggatgtgaaatcaaacataaaattatgaaaatctatcataggattgtataaggagaccagttttatttagacagagactccctatattttaactggatctctgagctctgggcagaccctacactgaatcctgggtctccaaaaagcgaaaattattatgaggttagactacatcatgcttttacagtgcacttaaaaaacttttttcaacaaagacatttctacatgtctaaactatactattccttaagaactccagagtagcctctgttgcagtaactattttagtaaaaaaattaggtaacacaatacaaaagcaagcagtttaagagctgagatgaaaaaaaaaaaaagctgagatgaacttgtctgtttacacatttggggttccataaggaaacagaggtttctcctccaaggggaatctggcaccttctccgttttctgtaaggaaccctgggtattacaaactatattaggtttcccatgaagcagagggtgcaagagaaagaagacacgacaaaagtaaatgaagaaaacagaagccagtcaactaagaagaaaaaaacttttgctcaaaaagacaaggtcctaggagagaaaaaaacaaaaaaaacaaaactggaagccttttaaatacaaacacacacacacaggcacacaacacacatatgttggatgttagcttttaattaagcttttaaccattgagctccttaaaaataaactttttcaatctcattactggctgggcatggtggctcatgcctgtaatcccaacactttgggaggccgaggtaggcggatcacttgaggccagtttgagaccagcctggccaacatggtgaaaccccatctctaccaaaaaaatacaaaaatgagctgggtgtggtggtgcaggcctataatgccagctactcaggaggctaaggcatgggaatcacttgaacctgggaggtggaggttgcagtgagctgagattgtgccactgcaccccagcctggaacacagagccagactctgtctaaataaataaataaatctcattatcatatttcagctaggactaattgctgctatttcagaagtaccaagtatcaaaccagaaagggcttaatttaggaactaaacccaggctgtggtggtggaaaaaaagaaggcagaacccttaggtatggaactgcagtgtggggtgacagacattactctttttggttggtctggctagcaaaaatgtggccttgttatgtaagaaaagccctttaagtagtcaaaataaattttttttttctttttccttttgctagctgtttttctccccccaccacatcaccttttgtgtgtgtgtgtgtggtggggaggggttgaaacttagccacttcagaggcctcacttctcataatttggaactttcctttggtttcgatcaagtcagatagagttcgtcaaactcaatgcgaaaaagacaaaagaacaaaaaacagaaacaacaacaaaaaaaccagttaagcgaaacgaaggattgggcaatttataaggttactgagcacactaatggtaaggagaaattaagaccagctggttgttaatcttaatagccaagacaaaccccaattcagttacttcctagggatgggtctgaggctgaagattgctctctaccaccctagaagcagaggaagaaaacccctcatctttcctgtgggaagcgagctcaaactccataaacgagttacctgccttccattgtcatggaagcaggaaaaaactactacttccttatgttggaagagagtaaagcacaccccgccccccaacccccgcccaacacacaaaaggagttgtacagcaaaataaactagatcttgactaaatctgggtagatcagggattctctggagggggtgcttccaggcctcagcaaattgtcctattggtttgagccataaagatagctcaagctggtactaaggactgacagatttgtcaaaggtcagtggcacctctactcagaatccctttgtggttaccaaaatgtgaaccttgaatatctgagtcagatctcagtcaacttaggaagtttattttgctgaatttaaggatgcacgcccatgacacggccgtcggaggccctgatgacatgtgcccaaggtggtcagagcacagtttggttttatacgttttagggagacatgagacatcaatcaatatatgtaagatgaacattggtttggtccggaagggcgggacaactcaaagcaaaggcaggagggagcttccaggtcataggtaaatatgagacaaatcattgcattcccttgagtttctggttagcctctccagaggtggcaatcagatacgcatttatctcagtgagctgagagatgactttgaacagaatgggaggcaggtttgccctaagcagttcccaacttgacttttccttttaagcttaatgattttgcggcccccaaatttattttccttccacatttttttttttaaatcagacttaaggtctgccttgatgttaatgctggaggagtgtaaaaaggcatgtccaactcttacttcccttcgaggccagaatagtctctcaggttgaacttcagggtcccctggtaaaggagggagtccagtcagacggctgcgggggagggggggcttcgaattttatgttttacaggcattagcgccacccatttctccttaaccccaaacttcctctccccacaacagaaacgtcatcattctgcttccacttatccagaagaaaggcagagggcgcacactgcgcagcgcggatgggaaagttaactgaattatttgcgggaagacagaggaggtggggggtcccccaagccccagccattttgtggctcgtaggggttgtcgcttcccaagccgtgaatggcccaaacccgccccccgccccaggtcggactcctgccccgcgcccctctgggtcggaccccaagccgagccccccaaccccgcggctgggctgggcgattggggacgagctccacacatggagaacctggcctcgcctcgcaagaccgcgggacgcgcagatgtgaagtgcgcctgcgcggggcgcagccccagctgcagacgatctgtgagcgacgcgccggcgcaagtcgagggcggtggcttggcttccctggaatgggggacgtcttaggactgcgcctgcgcggggcgccgggccctgggcggggccttcccggctgacggcctgcgtgcactgcgcttgcgcgggttgagggcggtggctcaggctcctggaaaggaccgtccacccctccgcgctggcggtgtggacgcggaactcagcggagaaacgcgattgaggtaggtgtcctgatgggcagctcagatggctggactgcacgtaaggaaggacaggccaggtgaggcgtcctcgcactgcgtgtgcgtcgctggcggacagaggcctccgcccccttttgggacctccgagcgccttcgcgatctcagccactttccctggcgtccaaacgggagctcggtccccgtcacacccttccctgcgtgccgcaccccttcccggccactcccgccgtccagcgccttctacggccacgcccaccccaccaccatctctgtcacgcccttcgcggccacgcccacctgcctggcggcccctgccccgaagctcgcggcgctgtcccagcctgaccctctcgtgcccctgcgtccacgcgtggccctctcgcttcctgcccccttctcaccccccttcactggccacctgttccaaccctccatgatcctgttcctcccgagggcatcttaggagggcagggtcctgcgcgcactgcggcctccactccgaccccgtcccagtttggacccaggtcttccaatgaaaatataattatgcaaatcagtaagcatttgtaactacgaatatcacaaaaataagcttcaagtctggatttagaagtgaagcatgcattttaaacaaagaattgctatgcaattttaaaaacacattgatcccagagcagtgtgtggattacactatcactggaaaaatacgaattgagaagaaggaaaagactggaagatgcagaccttggttcctgttagtggaaacactgtaaggtcccaggtagggacttttaattggaattaaagctatcacacttctaagaaattaatgaatactgatttattgccttaagtcgacacctgatctaacagaaactaacaggcttcagcaaatgaacaagattaacaccttgcagactagtgaagaaaacacactatttgaagtttatgatttttaaatgcttttgtctctgtaaagtattgtaaattttcatttctacactaatcttcacacatacacattttacttctatttggtagaggacatcatgcacattagaagttaagtgaactcaattattaagcaatgtaacaagtactttgtgtctccttctctttttaaaagtagaaatggaaaagaaaatgaaataaatcagcagttatgaggcagagcctaagagaactatggcaacatcaggtgactgtcccagaagtgaatcgcaggtaatttccgttccacttcctaaaaatctgtgtttaatgaatgtgagcattacagagagctaagcgtcagctcacagatgtgatggagcttggcttgtgccttggaaggtggccaccggcagtagaatgcttaaatgtgaagattgtgaggcagaggaaacgcagtgcctgtaaggtgacatcctgcattgggcaccataacaattctaaggaaatacttagccccaaaacatcagcatcatttagggttccatttttggtacgtgaactggcaaagcaagcatattttctgagctgttcaataaaatttcaggcataataccagcaatatattgaaggcaagttggacacattagaaaagatttatgtattcatactgtttctgcctggggtactcatgtagtttcgttcaagttagcagtaaaaaatacccctcaaattgtaaagactgttgattatgtaaaagtcaccaactgaataatagatactgtttttaaaaatcaagcatttccgtatctgttatgtcaattttaatgttttctttttttctctttcattccaatgagctttcatttggctttttatatataggaattttatttatagtcagaatctttcgttaatttctttaattattcataaaatgttttaattccgtggacatcttatttttcttttgagaaatttaacaaatattaggacatttccagaatgatattgtaaacatcaagtacattaaacagtgtacattaagctatatatatgtgtgtgtatatacatatatgtgtgtgtgtgtgtgtatatatatatgtatatgtaaaaaatactgtcgggtgtgtctgtagttcagctactcaggaggctgaagcaggagaatcacttggggccgggagtttgaggatgtggtgtattatgattgtgcctgtgaatagccactgcattccagcacggccaataaactgagacttcatctcttaaaaaagaaaaagcgacactctagataaagtttgttccccagtctcagtcctattcctcctcttctctctctagaggcaaacactactgtgaatcatgagtctgttttgtgccactgcaccatttttatacctctatggcttatatagatatacttgaatgacatatgatattgtttgtgtgggctttttagagtttccatagtggtgtcatactgtcagtgtcacctgtagcttgcctcttcatataactttacctttggggaagttgtccttgttatgtgtgtaatgctggttcaatcctgccactgtagggtactcctgtagtgtgttccttctctgaaagtgtaaagtatcctatttgtagatatgtgtatgggcctgttgcagtctcactgctacacagtaggcatataccccattttacttattccctttttgttggacacttaaattgtttctagttttttctatttcaaacaatgctgtagtgaccatccgtctccatgcctctgtgctccagtaatggcattgcagggtgcaagggattgcaagtttcagttttactggataatgatcagttgttccccacaatgactttacgagttcacaggtctgtcagtagcccacaatagtgcttactaacacttgacagtatcagacttttaagttttggtcagtctcatgggttagaaatggtattttgttatttcaattttgctgactggtcatggtagtatttcagtaatacttgtgttcatcctgttaataccaccctccattatagaagagatgtcttataatggtaatttgtgttttatctctttttttcacacttgatcaatcttttcttagggttttatcaattttatttttataaagaaccaattttatctgtgttgatttctctgtttttctatttcattgatttctgcttttgtctttatttcattctgttgtatttgggttaatttttataacatctgagagggaagcttagataattgattttaaacctttctttaatagtctttaaagctatgactttcctctaatcactgctgtagctgtacctcacatatttaaatgcattttcattcttcaaaatattttctaatatattcaatggaaattagaagttttctgggctatttgaaagtatgttgaccaatttctaaacatattggaaattttactttttcttatttaattttgctttgattacattggttagagaacataacatcctctataatttcagtcttttgaaatttattcaggcttgctttatgttctaatcatatggaatatgttggtgagtgttccatgagtacttgcaaagactatgtattctgcagttgttgagtgtagcattctataaatgtcatgaagatcaaatgtgttattagtattgttgaaatctctatatcttttctgattttttttgccatcttctatcagttactaaaaattctccactatgattgtagatatatctatttttccttttggttctatcactttttgctttgtatattttgagtccctgttattgggtgtatatatttagtataggttttgttttctagattaattgaccttattttttataaaacatctgtctttttacctgttaataaatacttcttttcttgcgtgtaccttttttttaatgctaatatagctgtaccagctttttttttttatcattagtgcttacataaagtgtgtgtgtgtgtgtgtttgtgtgtgtgtgtgtgtgtattttttttccctcaacttaagtccttatatttaaagcgtttttctcgtaaagagctagttgggtctagctcttaggtctgtttttttgtttctctgttaaacacaatttctgcctcttaattggagtatttagtctattaacacttcatgttatgacgaatgtgatgaagtgtaacattttgctgtttgttttatgtttgtcacatttctttttcctgcatgtctccattcctgccctcttgtggataaataaaggattttctataattccatattacctcctttaatagcttgttagctgtatctttttatattgttttagtgttttcccaagaaattgcagtatgcatcctaattcaatttcagtcttttttttaactacttcataaggtaaagatcttagaagttagtttcatttaccagcgtccatatttttgtactgttgatgtaacattttaattttacatatgttgtaaacgccacaataaattatcattattgctttacgctatcgagtctttttttatgaagtaaaataaatagtcttttttatgtttccccacatattatttgccttttttgaggtctttccctttttcttgcattctgtgttttcatgtaggatcatttcccttcaacctgacaactttatgtttatatttactagtgtgagtctgctgtgtcaaactatgaaatgtgttttgcctacatttttttttttttttttttttgagacggagtctcgctctgtcgcccaggctggagtgcagtgatgcgatctcggctcactgcaagctccgcctcctgggttcacaccattctcctgcctcagcctcccgagtagctgggactacaggtgaccaccaccacgcccggctaattttttgtatttttagtagagacggggtttcaccatcttggccaggctggtctcaaacttctgatctcaggtgatctgcccaccttggccttgatggttttttttttttaattttggaaaaatctccaccattatctcttcatttatttttttctgcctcatcttctgtcttcttttttggggtctccatgtaaacataagttagaatttttgctgctgtttgacatgtctcatgctctattcttattttttttttcattttgtgcttcagtttggaaaatttctgttgacctgactcttgaggcgctgatcataaacaagataactgggaaaacaatatgtttgtaaaacaatttcttgagatgtgaaatagtatctatattgtaccaagagtagtcccagctacttgagaggctgaggtaggaggattgctttagcttgggaggtggaggttgccatgagccaggatcatgccactgcactctagcctgggtgacagagggtgacctcatctcaaaaaaaaaaaaaaaaagcgtattcttcaaccctggcattctatcctgcagaaataaaatgtcatcacataagcttgtctgtgcacagacttcttttattgcagcatcggttatggtggtagaaaactggataccaagacaaagtctatcaaagggggatggctgaagaatcaagcggaattcctgctatggaatatcgtatagccattgaaggtagtaaatcagggttctaacagttggagagtttttccagaaggtattgtgtaagaaaagcaaagtgcaggtcaggcgtggtggcccacgcctgtgatgccagcactttgggaagctcaggtgggcagatcacttgaagtggggagttcgagaccagcctggccaacatgatgaaaccccatccatttctaccaaaaatgcaaaaattagccgggcgtagtgacacacgcctgtagtcccagcctctcgggaggctgaggcatgcgaattgcttgaactggggaggtggaggttgcagtgagccgagattgtgccactgcactccagcctaggcgacagagcgagactccatcctaaaaaaaaagccaaacaaagaaacagcctgtgtgtgtgtgtgtgtgtgtgtgtgtgtatacgtgtacacagggctttgtgtgtgacatgggcatggtggaggtgtggaaggccgcacaccggggggttagtaagggttgcctgggctgggtggatcggggatggggtggagagcaagcagagggcagtgctgccttagagtgagtcatgctcctggcatagggaaaagcacgaagggtacaaatagacagtaaggtaaaaaaagatgccagcaagtattttaaaaacgcctaaccacacaaagagagggaaatggaagtaacaacagtgatttttacccatgaaattgacagagactaaagtgattggtatctattgagtgagagtgtgggaagattggtggttccctctcagcaagcggtccagggaacacctttctggagagcactgggtggtaaaaccaaaagccacatagtctcagtccatcaggttcacattcagagacttaccctaagaagattaaggtacatacagaatgatttatgttgaaagaagttcatcttaacatgatttagaatagtaaaaactgaaaagtctaaatgtacaagactaggaaactggataggtaagtcctgataattcatagactggatattaaatagtgttagaagtatatttaataagaaaaatgttcagagtttataaagtgaaaaccataggccacaggcttattgtgtgaacccagtgaatgctttgtacttatgttacgtgtccacttttttaaaagtctgaaagtataaacaccaatgtgctgtctgttattatctgtgatcagtgagcaaaattacaggaggttttaattttcttctgtgtacttggtgttttcacacattttctaaagtaaacacgaattacttttatgtttaggaaaatgtgtttaaaatgtatgtattgagacaaggttgattcattgaactggagtgtgtgatctgaggttctgccccctgcagtgatgtcttccaggcaagcttattcttatataaagtgaacggccaggcatggtggctcatgcctgtagtcctagcactttgggaggatgaggcaggtggattgcctgagctgaggatttcgaggccaacctgggcaacatggtgaaaccccatctctactaaaaatacaaaaaattagctgggtgtagtggtgcacacctgttgtcccagctacttgggaggctgaggcatcagaatcacttgaacctgggaggcggcagaggttgccctgagccgagatcatgccattgccctccagcctgggcaacagagcaagactctgtctcaaaaaaaaaaaaaaaaaaaaaatggaggggttgggggaggctccaaggacctgtgtgggtccaagctgggctctgctgcctcgtggaggtttgtgccatgccatcagctctttccacaggcccctggctgtgcctgcctggggcgctgggcccctggctctgtcctcacactggtttctcttcatggggttgatgatcaccttcaggaagcaaagctgatgaaggacaagggctcctcaccaaatagacactagtggtgcctgtttctgacttcttgctttgatgttctcttttagggtccagataatttttttttttagaaaagaaatgtagagtgaaggtgacagcctttgattatagtagtaaagatgatccaaatagtttgtataataaatacttggacacatgaatctgtatttgaaatttgaaaccatcctaataatatagccaaaaaaaaaaaaaaaaagctccagcgtcctctcctcacgctttccttggctttgagcagggagaagagcctgctgagtgcagtgaggccggtctcctgcaggagggagtacagccagaggagtttgtggccatcgcggactacgctgccaccgatgagacccaggtagccacacgtggtggttaatgctttatggctttcagcatgttcagtgtcaaaaggagataaattttgcagacgtcacaccaaagttaaatgaagaggtattcagatgcgtagggccacacaagacctgtgtgtgaagctcacagcccagccagttctgcctcaagcatgatgtaaagatacgaggcatggagtggggaccctcagccaggggcagaagcacctgttctggtttctacttggaatgtagaacccacccagttaatgaaaagtaaggctaccaaatatatcaagctatatctgcttggacatagctttgtttactttgtgacaggaatttcttagagtcagcctccagtaactcagttggcatagttgagttacaatgaagaggctgttgagaaattctctcctaagccatttgaaaatgtttactccttcttttaaaaaatatctgttaagctgtgccctcctttcaggtagatgttccagaggcatcgctaagtcatggtgtcacttgcaaacattctcagttgctgtcattacccactgactcctgtttgaaatctctgtgattttgtcaccattgatgggatttatcactgagccacatttgaaataccaatgactggttttcttattgaattttaacttttttttttccagctcagttttttgagaggagaaaaaattcttatcctgagacaaaccactgcagattggtggtggggtgagcgtgcgggctgctgtgggtacattccggcaaaccatgtggggaagcacgtggatgagtacgaccccgaggacacgtggcaggatgaagagtacttcggcagctatggaactctggtattgctttctaaattccctgttcagctggccaggcggtgggttctctctagctttagttctactgcaacgttcagagcaggcccatagtcttacaggccagagctcctctgttgtagccactcagctctgacatggttgtgtggaagccactgtggatgacacacaaagtgtgcactgttgtgttccaataaaactttatttatggatcttgaaatttgaatttatactgtacagttttcatgtgtcacaaagtattttcttttgatttaaaaaaatcatttaaaaatgtaaaacccactgttagtttggaggccatccaaaaacaggtggtgggctagatttggcccatggcttagtttgccgacccctggcttagagatatgatttgagcaatgagattatgtgcgtgctccctcagtatttaaaaaaaaagcagtaaattttactttaaaaatgaaattaggctgagtgtggtggctgacacctgtaatccctacactttgggaggccaaggcaagaggacacttggcttgagaccaagtgttcaagaccagcctgacaacatagtgagaaaaaataaaaaatataattcgtctctacaaaaaaaaaattaaaaaaaaatataattagctgggcatggtggtgcacgcctgtagtcccagctactcgagaggctgaagtgggaggattgctcaagccttggaggccaaggctgcagtgagccatgatggcgctgttgcacttcagcctgggctacagagcgagagcctgtctcaaaaaaaaaaaaaatagaaaaaattctataaatctatgaataatactacttaggtcaggtgtggtggctcatgcctgtaatcacaggactttgggaagctgaggtcagagcatcacttgaagccaggagttcaagtctgtggtgagctatgattgcgctactgcactccagcctgggtgattgaaccagactctgtccctaaaaaaataataaaagcccagcttctaaatagcttaccgaaattttttccccaccatggagaaatgcctataacccgatggtccaggcaacaatctctggttacattttaaaactagatgaaaacagttacttgcaggatgaatgttataaaaatgatgttagttgaaagaaggaatagggcaaagaatctataacgtttgactcaattatataaagttaagaggccatattagaaggttttttgtttgtttttgtttttttttttttgagacgtagtcttgctctgtcacccagactggagtgtggtggcaggatcctagttcactgcagcctctgcctcccgggttcaagcaattctcctgccacagcctcctgtgtacctgggactacaggtgcgtgccaccatgcctggctaatttttgtatttttaatgagggggttttgccatgttggccagactggtcttgaactcctggcctcaagtgatcctcctgtctcagcctcccaaagggctgggattacaggcatgaaccattgcgcccggccggaaggtactgtttgtgagtgtgcatgggtgctgagactgactgagggcaggagtggctcccctgttggttgaatggaggttacctgctggtaggggaggctctgggaccagcgtggctgagtcaggagttctgacatgctggcagtgttctggggttggatataggtatagaggtgtttgctatataacaatacttgactaactctgcagatactttttattgcactttttcgcaggtatgccatatttcacaattaaaagtgttaaaaactattcatgtctgtacatggttagtgatttctatccgttaaggaaagatacataatgaaaagccaattccagcctcccacctctgccgcctctcagctcaaagaaccactgcccaccagattcctctgtgcttatgaagtccaagtgacacctaatgtattttacgtttttaatgtatagaaaaggcattgttccaccactcaggtcttcaccttgctcttttcacgtagctgtagtattttgaagatctctcatattggcacctgtcactctttataacagctgcagagcgttgtgttactttaaaagggtcctgttgatatttggacagtggttatttaatagctttttatcatgataaataatgctgtaatggagtcctgtataatcctgttaaatgctgtttagaatttctatagggtaaattcctacggggtgtgtgtgtgtagtgtgtacatgtggtttccttaagtggatcttgccagttcgccctccagaaagatttgctaattatacacttggtctgtttgtgctgctgtaacaaaataccttagactgagtgaattatgaagaacaaagctttgtttctcgcagttctggaggctgggaaggcattggcattggtgtccaagatggcgcctcatggctgtcctcacgtggtgaaggcgggagggctgggagcacctctttcaccacaaaccctttcatagtaacctccaaaggtggcctcttaatgccatcacactgacgattaagtttcagtacatggatttttggagacatttcagaccgtggcatgatggtgtgtgaaagctcatttccctaccacaaatcaaagtgaaaaaggactttgatcttaaaagttaaatatggcatcttttagttttgatttccattttttaagtaagattgattatcttttatgtgtttatgggccttttgtattttttctttttttgtaaactttcatattatttgccccttttgatttttgttgattcgtgtgttaagtaatttagcctgaatttgtgaagttttgtgactttgtgaaattttttcccacgtacaacttttttctttgtatagcctaatatggttttcttttctttgtgacttctttttcttttctttgtgaaaaaccttcctcactataagattataaatacccacacttttgttttcagaactgttatgattctgtgttattttatttttgttttttatgttttttagagatggtgtcacactctgtcgtatgagtggctggagtgcggtggtgcagtcatagtgcactgtatcctcaaactcctgggtttaagggaccttcaccttagcttcccaaagtactgggattacaggggtgaggcaccctgcctggccttctgattctattttaaacaatgagattttaaataataaaaaatctagaaattatttgttgtaaaaaatataatgtaaaattccgccctaatgtatgcccacaaatctccagcgaccccagcctcagttactggacagttcccttcgcgttgatgtgaaacggtgcgtttgtcctgctctggatttcaggggtctgctgtagaattcctgttgtttcactggtctgtttactgcagttcccagtgcttcgtcatttccatcactgcacctttgtaggatctgcaagagctaggtctccagcagttcttttttttttaaagcattttcctcattagccttgggcacttactgttttgaaactaattttattatcattttgttgtgctttctcctttagtaggtactgcatggaatgtttatgttaattttgggagagctgacatctttataacattgactctcagtctctgattacttaagctttgtttaatatctcttagtattttaagataaggacaatatctctttgtcatacatggttgtgcacctttcttgttaaatttgttcctaggtattttttgtgtattattactgttataagggggtgggtgaagtgttctctaaataccaatgagattaacttggttgacagtgatgtccaggccttccatagtcttccataggggtgttggggtcaggggtcatcagctgtggctctgaccctccatctcagtccagacctcagcatggctctaggtcacaggcagtgattctgaatgtgcatttcttccagaaactccacttggagatgttggcagaccagccacgaacaactaaataccacagtgtcatcctgcagaataaagaatccctgacggataaagtcatcctggacgtgggctgtgggactgggatcatcagtctcttctgtgcacactatgcgcggcctagagcggtgagtggggtctcgagcgcatcccgggtgtttgtgccgaggctggtgacgtccgaggtggcctctgagtgtgctgacttgtgaccctgagctgttgggggctcaccggtgactccatggtcttgttgagcaccctgcacgtggggctcagggtcggtaaaatagcagtgcgtggagaccgcgtgctagaggccgtggcgcccgcgtacaatgagtcgcagacagcacagacgggagtagggcagaatagacaatatcccgtgaattgcgtggggcggggtatgttctgtgagacgtttatttcagttgagtagagaaacacgtgcacccacatgtctgtgctgggccttgggtgtggttggtctcatggggttgggagggatgcacacgctgggccccctccccacccctcttaggccgtctatactgtgctgagctgagccgagctgcagccttggagactccttacacagtgggtggggtcgcagcacagtgtccacccaagtccaggctctgcaggacccaggacccagcgcttgggtgcttcccaccagacccttccctgagaacctgggtttgaaattgtctgacaggcctcagatgtggcacagaccagcattgtcacttgggtgctaagaagttgctgtgctggtcatggattaagattgctgtgcgtgtggcagccggctcgggcatgcgagtcttccatccacttgcagccctgcgtctgtgtcttgtccgggaggtgggggcagttgggagggttagaggcggctcctttctgggtgcccctggaggggcaggtgtggccagtcctcgctgcctctgctgtctggaatgctgcttccctcttgtgtcattgaccatttctcgtgatgctggttgtgactcaggagagtagatgacgggccgtgtgccggccggatgtacgctgacggtgcctctgctgctgcaggtgtacgcggtggaggccagtgagatggcacagcacacggggcagctggtcctgcagaacggctttgctgacatcatcaccgtgtaccagcagaaggtggaggatgtggtgctgcccgagaaggtggacgtgctggtgtctgagtggatggggacctgcctgctggtgagggcgggcgtgcgggcagctgggggccggagctggggggcttctgagcacgggctcggctgggccaacctcaggatctcaagggtcgtgcgtgattcattttgatgttttccctaatgtgaggtctaattaatttcttgtgtggacattggctcagtgtcttgaattttcacctgatttaaaaaatgcctttatgagaaatttaagtcaaagttcatgtaacattttcatgagtgatttacatgaactgtgttctcctcggggatctgtaaaaatcctgtgcctaacaggtaaggctgtttctttaatgccagtagggccttcgtccctggccagggtctcctcgccttagactggccccagtgatgctgtgaagccacttgggcatctgtagggccagcatatgcctgtcctgtcagggttgctcaccctgagtttcacatgtgggtggaagtggactgttttctggttgcctgtgaatatgccctgcacaaacgctgtctgcttggagggaagttgacgggagtgtggctggatgctgtctgcccgcgctgtcttcctgggctcagcatcctgggacacaggacattgtagtggagcatcccaacctgaaactttgtctcagtgtagagacccagaaagatggggtctgggtgaaggagtgtggagtatggctgctgctttccaggaaacggtttcccctggtaacagatggcattgggcttttagtcctgttgaaattttgttgtcagaagataaatgtaaatagactcaatgtccatgctgtgacttggcttattaataacatctgtggagccataagatgacacacaggagaaacgggctccactcctaccccctgaaggggcatttgcctttgccctgaacagcagcgcccattcaataagtatctgttgacagctggtgccccggccacggggacaaaaagaggacagagcaggagtgaggctgtggtgaggccaaggttgtgtgggcggtgatacggggaagcctggctgctggagtgtccggctgtgccctggattgggtgagagggacacaggagggacgtggggcagagggaggggagaggagtagccactgtgttcaccgtgttgccgtgttccagggctgcccagtggccggattggccagactgtgttgcatcagggaggcagaggccagatgtagggaactgtgtgtctgaggactttgtgccacgtcctggacaccgaagggagtgccactggtgtgtgagtgatggagtaagaggtgggctgtgttttggaggcccctgggtatgtgtggccgggactggaggccagggactggctgtggtccagccccagcatgcagagaggcctgggacattctgtgtgaggggaggcccctctgtgtgggaggtgcacagacttccaggactgaccatggctttattgtcaggatgcaggagccagggcttggcatggggcaggtgtgggggatgcagagcagggccagcaggcaggatgtgctgatgggggcctggcgtgagcaggacggtgcctcccagccctgagccgcagggagtgggccaccaggactggctgggggccggggtagggagggccctggggagggtggacatctgtgtgggtcttgaacataggatgcccatccgatgtgcagggccagctattggttgggcagtggggacatggcctggggtctcggtgggcgatggcctggaggggccaccctgagcaggacatttggaggagtgctggggtgagtcagacaggaccatgtggtggttttctccagtgcaggcagtggagggggaaggcggagctttgcaggtgagggcttgaggcagttccgacttcagactcccccccagggagactgagggaccaccaccatcattactcaggccaaggaggcccagaacagggcagacggggctgcaagagttcctatggcgatagttgttggggcacagggttggtcggatttgagggagggagggtatgaatctgggagtcgttggtgcggttgtacccaccttcactttccgtccccaggctgcgcctctcctgagctgccgcattctcccctgcacctgtgcgtctggccctcttcacgtcctcctggcctgctgtctgcctctcccctgcacctgtgcgtctgtccctcttcatgtcctccttgcctgctgtctgcctgttctcagagcccctcagccctcaggccttcatctctcctggcccatcttcctactctgacgctgacatgtagtaaaagtctgaagacagagaagagtgcatgtgcgtttagcataggaggggcagctttcagtcagtgcagcaagggcatgtagttgttcagagatggtgctggaacgactgatttggagaaaagaggcccttcttcacaccatctgctaaaataaacctcagatgggctcaagagttaaatatttaagaaaaggaggaaacaaaaaaattgctacaagtttatttgttgttaggatgggaaaggtttttctaagaaccaagttcataatgaagctgtcaaataaaatacttgacaaaaaattccccttcatacattagcacagctaaaaactattaaatggtaaatgcaactaaagaattgcagctaaagaattgtgtgacgtaaagagttgcaataagaaaagcataagataaaggtaacctcatggaaggtgagcagggactagaaaggcagagaaatgccagaggccaggagcttgaacgttgttcaatgccaccaacaatttgaaagtaactgtaatagttttgacctgggaagttggctgagcaatcctctaatatctgatgctcccgatgctgaggttgtggggaagtgtgcaccgccatgccctttttttggcagtgtaaattggtaaagccttttgaaggaaaatagggcagaataagtcaaagagcattaaaatttttttgtttttccagaagcagcaaagttctgaaggagacgcaagtaaagataccacaggtgtcctagattgtcaacagaccatttaatcatttttgttaacaaagcaggtgacaattgagccctaatttgcgttatcattagttgttacaggatcttgcttgttctcctgaggccacgccacgatttccgagaagcaggttgcacactcagcagtctcccactagccagtggcactgcaggtgcaggggctgcctcctggacctttcaggacgctttgcaaggtcactgaggatctccattgcacatttggtagaattaaaagactgccagactcagtcttactgttgttagtgtattcgtgctgtcaatatgtgatgaggacatattatattccgttattctctttagctcaaggaagaataaagaatttggaccaaaattacaaccacattatgacgaattttctaagcaaaagaaacaaagtaactgctgaggttaacaaagatgtaataattctcttcacacagccttgtactgttttattgactgtattatcacaaatcctgagcttaacgaaagtctttataagtcagctcatgaaaacaggcacgtggccagtaagaatttaatttcataccaataacacttcagacttcggatgtatttaaggctgtttgcacatatttatagaatgtgtggtgtagatgatgggacagctccccctcagcaagactctggcctaaatgtatttgctttatttacacaacaagaggataagcgtaaacacgggcactttcagtttgtggcactgaaggacgatctacacagggcaccctgcagaggccacaaccaaggccgcctggcttcccagtgggacaggcctaagggaggacttctggcccctttgcttgatgttcatgttttatgccttgatatttctttttggttgcattccctggagctcatgtagatcattttacttttcagaggtgctagttctggtgcccacacgcacacacacaaaaccatcaactcttctggattccttggttttaaagcttgcctcatacaaagtacagagacatctttttcaggaaacattgccaccacatgcttgaaggaccgcttatggctacacttagacatctccaaccaaggtctcttcacctccttctacaacaatgcactttgtctgcactgggacaaaaaatgacagccttttttcttttcttgtttttttttttttttggcgtggagcatttccgaactttcacgtcataaaaaatgcagcatagttaatcagcagcttgcacttctgagggcacattcacctcgggggaggaggaaggaggaggagctggtgggtgctgagactgcagtgtcctccttcccagcagctggacccagagaccaggcaccaaatttttttgatgaaattatcctaaggaaataatcaaatttgtacagaaatttatgttaaaaaatgttcatggcagcaccgtttaaaatggggagaaaattggaaacaacagaattgtagcaatacatatgatcattaaaaattatgttttagaaagatttttaacagtctttggaaaaagttggtgacatgttgctagtttttaaaaaaagtacagagtatgtacagtatgattccaattttgtgtttaaaaattagacatagtggtaacctagcttcagttccagataagatggagaaggcatactcctttcatgtctcccactgaatgcagctataaatcctggagagtagacagggagaaactatttgaggactctggaacaaagacatagtagcaatcgactggtgaagaagacaagaatttgaagtacggtcaagtatctgtgggctccacatctgtagatacaacctacatgtattgaaaatatcagaaaataaaaataacaatacaacaataaacatcaatacaaataacacaccaatacagtatagcagctacttacataacactgacattgtattaggtagaagtaatctagagatgatttaaagtctgtcggaggatgtgtgtagcctgtatgtaaaaaccacgttattttatatgggggactttagcatccaaggatttgaatatccacgggggtcctggaacaagttccccatagacaccaagaaacaactgtattcctgaaacagtcttgagttatcattttctttcttctccctctatgtatgtacatagagtgtacatacatagagtgagaagcaaagaaggtccatgaaatggaccaattcttttgaaaactgcaaattaccacagttcatctaacatgaaatagataacctgaatggtccaataactagtaaagatattgaattaatagtttaaaaaccttctgaaaggtaaatctctaccctaaatgatttcactggtgaattctatcaacacatttaatgaagaaaaaactccagttctaaacaactttcagaaaagaagagggaacacttcctcactcattatatgaggtaagcattgccctaataccaaaaccaatgttaacacaaaatatgaaacctacagaccaataaccctcatgaacataaatgtaaaaatcctcaagaaaacattagcaaatttaaaccagcaggatataaaaggaataataatacaccataacaaaaaaagaaactatccttggaatgcaaggctggttcaatatttgaaaatcaatcagtgtaatctaccatattaacagtctgaagaagaaaaatcatgattatatcaatacagaaaaaaattgacaaaattcaacatcagttcatgataaaattctcagcaaactagaaagggaaggaaatttaacatgacataggacatctacaaaaaaacctacagaaaatcctaaggagtctatgagaaaatttcctaaaactagtaagtgagtttaacaagatcacagagtgcaaggtcatcatacagaagtcatttttatatcttagcaatgtacaattagaaattaaagaatatcacagtagcttcaaaaatatgaaaggcttagaaatctaacaaaatgtgatctggatgctgaaaatgatgagatgataatgaaagaaaccccagaaaacctaaataaatggagagataagaaggctcaacctagtaaagacgtatgttctttttaaattgatctgtagacttaataaaattccaattagaatccaagcaggatttgttcttatagataagctcattatgaaatgtatatggaatgtaaaggaactagtgctatggtttgtccccaccaaatctcatgttgaaatttgatcctcagtgtggtggtgttgggaggtggggcctagtgggaggtgtttgggtcatgggtgtggatccctcatgaatagatgaatgcccttcctcgtgggtagataagtgagttctagctctttcaggtcccaacaagagctggttgtgaaaaagagcctggcacgcccacttgcctctgctcccaccctgtggtctctgcacgtgccagctcccctttgctttccaccgtgaggggaaatagcctgaagccctcactggatgcccaatcctgaactttcccaaccagcagaaccatgagccaaataaacctcatttctttataaattacccagcctcagatattcctttttggcaacacaaaaatggactaagagaactagagtagctgatagaattttttaaaagaagggtaaagttggaggaactatactacttgattttgaagctacagtaatcaggacaatgtggtgaagggacagacacgtaagtcaatggaatggagacgagagatttctacaaatatggtcaatgggttttttttaacaaaggtacaaaaatcaatttaatggagaaaagacagtcttttcagcaaatgttactggaatagttgtcatccatatctaaaaaacaacacctcaacctcacatctcatacacagctgaacttaaaattgatcatagatctaagtgtgtgaaatgtaaaactataaacctccttgaaaaaatcatagaaaatcttcatcacctggacttgggcaaagactttttactctaaaagcgtgatccatagcagaaaatgttgataaattgaatttcatcaaaactaaaaatgactgctctgcaaaaggatgatgctaagagaataaaaaagacaagctaagattaggagaaaatattgcaaagaacatatccagtgtgtgttctgaatatacagagaaatctcaaaactcaacaggaagaaaacaagccaattgaaaatgggcaaaatacttgaacagacactttaccaaagtggatatacagatatcaaatacacacatgaaaagatgttcagcatagccatcagggaaatgcacattaaagccacagtgagatatcacttacacccattgaaaaatgactacaataaaaaaaaaatctgatagtaataccaactgtcatcgaggatgaggaacagctgaaagtcatgcattgctggagggaacatgccactgtggaaacaggtgggtgctttcttatagacttgtatgtgcactcaccttatgcccaggagtccctctcctgtgtgttcaacccagagatatgcaagctgtgttcacacaaaaacctgtatgtgaatgattatactagctctctttataattgcaaaaaaaaaaaaaacaaaacctggaaacaacccaagtgtccttcatctggataatccttaaggataaactggtgcgtccacacagtggaataccactgagcagtgaagaggagccagttattgaaacaggtaatttggaggaaccccagaaacggtacagtgagtgaaagaaacttgtcttgaaaggttatgtactgtttggttccatttgtatgatattctcaaaaagacacaagaccatggggatggagaccagatcggtggctggagaggctggggtcggggagggcatgaccaccagagaaaagggtgaagagtgttttgggtggcagagctgtgtgtatgctggctgtggttgtgaggacaaaatccacacaagcgctcaagttcgtaggctgtacgccagaaaagctgtttcactacataactgaaaaaataagattgaaaaataagatgtatatattttttgtgtgcgtgtgtagaaaaatacttgaaggtaaactgcagagtgataacagtggttccttctaggtactgggttaatatgtgatttttatgtttgtttgagcttttctaagttttctacattttccgtacaaaacatgtattacttctgtaataaaagcagcttgagattatttaaggaagcaaaacacttctgttgtttctcatcaactacaggatgaagtgcaggctccctgggtggtttgcaggggccacaggccttggccccacctcgctggtgctccctctactcctttctgtgtttgaagcaagttctggttcagacagaaagcctggcctttgagggcgttgggtccccacttcctcagtcatagatgtgatgtgcttcccttgacttgggaccttctgagggatgcaaggtggaccaaaggacccgtgaatggccagggcatgcctgcgtggctttcggtttcttaagcagtgatttcagtccacttaaagggtgtgaaaattctgagaatgctacggaccaaatatattttatgtaacagttgggacccggcaacacttcagggctctttcaaaatctggtagctacgagctcttccgtgactgagatgggacaagagtgaagatttgtccttgcttttagctctgctccagttcatagttctaatgggaaattatgtgacttaaacccaggctgtgagatgcatcagtgacgtgtgggcataaaataaaccctcgagatgttctcttgcatggtacactggcctaggcaggaatattcttgaggctaaaactgtagaactgtcagactagtgttacgaatgtggtggtgagaggcctgtgcagccgcggggcctgtgatgtgtctcctgtgtgtctttcactcctatgcagtttgagttcatgatcgagtccatcctgtatgcccgggatgcctggctgaaggaggacggggtcatttggcccaccatggctgcgttgcaccttgtgccctgcagtgctgataaggattatcgtagcaaggtgctcttctgggacaacgcgtacgagttcaacctcagcgctctgaagtaagtgtccacagctgggactggcaccgtcttgtggggcctcctggtccacagtctgcaggtgggccaaggccctgggagatcccatacgacggttggataaatgagggtacctgtgcacccagataggacaatctgttgtagcattggagtaattaaagcagtatggtgctataacaagacagatgggcagagcagggtagaatgcaaggaacaaaaattttcgtatgtgaaaaaggtggcattacgattaggagggagtgagggccaagtcagcaaattattctggagcagttgattagcccttgttctctcacgccatacgtgaaaacttaattctgcatggaatcagcgtcagcgacagacatccatgggggcctgtgtgcaccatcttaggtggagaaatgagcagcaacaatggatggaatggaccctgggctagatagaatctggcagtctatgtggcagaaatcagcaaaaacacgattgtaaaagcaaacaagtaattagagaaatcacgtgctgtcaggtcttggaatcaattagaaagagatgactagccagatggaattgcagcccaatcatgtgaacaggcaaaccgcaaaaaataaataaaattaccaataaatatatgaaaaattataatgttgttagtagttaaaatgcgaattaaaatacatgctgttttccctaccagacaagcaaagagtaaattaaaatagtagcccaggcttgcctggcagtggcagggaggtgtggctgccagggccttagaggttggcatcaggctgcccaccccagtcactgccagagcctcccacctgagtgttcctcccggcactggaagccagtggccgtccagaggaacgtgattgaattgctgtatatccatctggtggagcactgctgtgtgtctgttaaaaaagaaaccataggtttttagggatatgtaatgatatttagaaagggtttaagagacagtaaagcttggcagaataaaccgtgtatacagaatggatgtttgcttgcataaataaatttatataaatatgtctgggggataaaaataagtatatcacaatgctaagacaggcatatggggaatttaagcttttctttatacttgtccatagtttccaatttttaaatttgtaattttttatcagaaaaataaatgtgtaaatatagtggaatctttattaaaacattcacttttatttgctatttcagaagttactgctttgcttattttttacaacatttctgtggtaaataatcggtgacttacaagcctagtgcagccagtgatgggggttggcaaacggtgacatgcaggggccatgcggcgtctagtgtctgtttctgtgttgaatttgtgtagcaacagagcaagtatttctcctgaaactcagactcactcaggccacctcagcccttctagttcctttcgtttattatagagtaacctacagcaggaataccgcgttcatttactgttaatagaagatccacaaaagattttgaaatcaaatacattctaaaactaggcaagacacgctgcaactccccttgtcctctgggttatgaggggtgagcgttggtttccgtgtgctcagatcccatgaatgagacctcacagggaagcgcccagtgactggcaggctccttaatgcctccaggtcaggctcaggaagtctctggatgcctgggtagagtctgggtcttctcagagcgggaggcacccagggcctgtggaggcctgagggctgctctggggttccagggccccagatagtggcttagcatcctggtgacacagaagggagagcactcaccgcggtcccacgtgtgtgttttgaagcctaagatgtttgcaatgactctcaacagtcgctttgaccttttcccctagatctttagcagttaaggagtttttttcaaagcccaagtataaccacattttgaaaccagaagactgtctctctgaaccgtgcactatattgcagttggacatgagaaccgtgcaaatttctgatctagaggtgagaaaaagatgaattgctccttacattcgataatcagtgaccacgaaacactcagaccagagcctggcttatcaaaaaccttcagtgagtgctgggggtgtgagtgaataactaattattttattatgcaaataagtgaatttataaaacgtttgctactgattttttccagtcttttttcttttttacgttctattttgattctttcatattgtacaccattttatgtctccagcgtcttcattttagatttatgtttaatattctcagcatcttcaaaatcaaataaattatatttcgtttcattatggtatttgcattacagtttttttcaagtattttaagccactcttcatgacagaatcgttagaattccctccgtgaatccctgtctgtggccgcgcggtggcgctcgtgggctctgggcggtttccccgcgcccccgccctgcctggcgccccagctggcgccgcgtctggagatggggcgggcgcggtggcgccggcgcgctttggtttttagttcgttctgctgtggaaaggcccagcctggagctctccaactccttaactggaagagctgagcgccgaaaagattccgcagaatctggggtagaaaattgggcgcaagaagctcagatgcttgaaacgtttctgactgaagcctctgaactcacgatgcgggttttgggggtggtttccccaggctggggggcttttctacggttcctgacgcattcagcgtctgcgcggggcgcgtggagggggccgccccaacccgggccctgcggtgccacgcggtgcccacgcgtgccttgtcatctgcttgacccagaccctgaggggcgagctgcgcttcgacatcaggaaggcggggaccctgcacggcttcacggcctggtttagcgtccacttccagagcctgcaggaggggcagccgccgcaggtgctcagcaccgggcccttccacccgtgagtgtgcggggcgcgggcacggggtgcggggtggggggcaggggagtaggcggggtgcggggatggggcgcgcaggagggggtgggacgcggcgtggcggtcgtgggggggtggggcacgtgggggcgcgggcagtggggtgggggcggcgcgcatgggggcacgggtggtgtagacaccgcagcctgtgtgcccccttccgggtctcgccaccactctgggcccagcctgggcgtccctccgacaacagccccaacgggaggagctccctgtcttccaccccgcgaggagcaccacagctcttcatggtctgacccaaagcgcctccacggggcgtcggggttcacctgacgtttttggaggtgcctgttttttgggacacatttccccgccagcaccctgggcatgtgtggcagtggagctgccttcagggccctgcaggccttccctttgggtggggttggctaccccgctctggcacctgccccgctgacttcccagcgtggtggccccgcgaggggaccccggctccagggaggtcgcagaggtgcggggttgatggcctggcctggcatgtggtccccatcacaagagtcctgtggtggcccctccagtgccatcaccgggtggaggtgggcagcttggaggccagttatacccatccccgagtctgggggcgtggagggggcagtgacctggggcacaggctggggtgaggggtgtgaccagagtcagggaaaaactggagacctgaggagccccccacttcactgctggccccaccgtggacagtgggagtttgagggaagacagagcctgaggaacttagagatgtttccaacgcaacccagtgcagaatcatagcgttttactatttccccccaaatgtgacagttgtcctcaccttgtaaccttcacagaagcgactccttggacctgattctgtctgtgtacaccacagtttaacagcaggagctagatcaccagcctctgcagcttaggcaagggtgcaggaaggggttgcacagccgtcctcctggcgggccggggagtcgacaccacacgggacctttagtgcagctgtgtgtcccctgagctcccgcatcctctgggccacccagggtgagccgtccacacctcctggaatctgagtggtctcaggagcaagcttgtgtttggcattggcaggatctgtctcactagcgtaactttgatcccagtgtatcccatagagtccctttagatcacagggctgggggtgtatatgttccctgagttagcctgaaaagccaagctttgtgtccccaggccctcagggtggactgccggctgtgtgggtgctgttgggggcgagagccagtgcgagcctgagtcagcgccccgagggccatgtggagactgccctagctcagcctccaggtcacacgcacccctgtcttgcagcaccacacactggaagcagacgctgttcatgatggacgacccagtccctgtccatacaggagacgtggtcacgggttcagttgtgttgcagagaaacccagtgtggagaaggcacatgtctgtggctctgagctgggctgtcacttccagacaagaccccacatctcaaaaagtaagatacgtagttgtaagattctgtcctgtgggtgccggtcctcagggagacaggcctgggtggtggtagtgatggcagatgctggcccacactggggtccacgccttttgtgcaggagtgatttaatccttacacagaaagcgcctgttgtcattggcttcatttcccatctgacagcacgggaagtggagggctctggaagggaagtcagggaagtcattccctcaggtgacacggtaagtgagggagagcagagacccacatcagcctgaggccccttgtgccatgtccagagggtcccccagatggacagaagcctgagctgtgccttggcgctccctttacacaggcctctgtggcttcccaggcagcagttagtctaggcgtgtcgtctgtgatgcgtgttctgactggcagccttcggatccgtgtgtgaattcatgtgtagctcgcccagctcacttgggcttcctgtctcagaggctgctgaaaatggaatgttcttctttgggctcaggattaatgtggcaaagaaaataaaaataaatggttttccttcattttttatatttgttttgtgctttgctttgtgataagtttttgttaaaagtttgtcatttaaaaaaattctgcacctgaatactgttctcttgtccaatattaaaccattaggaaatgtagtatgttaatcaaatgatttatcatctgattgacctgttgtcatttatctttttcaggttggagaaaaagtcttccccatctggagatgacagttgatgctttatttggaaagcagtgtgcatatcttgaggggtgatgaacacaagcaaaccaagttgcacctggcttctgcacactcctgcgaaagtcggtgaacattcactccacattgacccctccctagcctggcaggtgacgtcagggtccttcacagacaaacacgcttgggctcggcaggagctgccgtggccacccccgctgcccagtgtctgccctctagaagtaggctgtgtttccaggtgttcacccgtggtgcccacagtgccgacccgtggctgggtcggagctccatgttcctaagctaggtctaggtctacactcctaggacgcacgcatatcagcccgtgtaccctgtgacagtgactgtccccacctcctatgttagtggtgcccttactgccgtcgctcatccactcgtgtgggacgtaggattgcacagggctgtgccagtggcgtgtagggaacactgccctggctcagcgtgcgagctaaggtggtgatgtatgcgatgggactctgcatgggatagtacagttgtgtagacgtcttccaaataaattatgtgttggtccatcgcacatgctcaataaatatttttaaatgagtgaatgtcattgtgtatcctgttttatgcatatatgttattttttgtaattacaggatcatactatatgcattgctttataagtttttctcaatattgtgaaaaaacttccacatcagtagatacatgtccataatttttttttgtattgttttgatttttattaaattttattgaaatataggctgggtgcagtggcttacctctgtaatcccaacactttgagaggctgaggtgggatgattccttgagctcaggagttcaagaccaccctgggcaacacagcgagatactatctctacaaaaaaaatagaaaaattagctgggcatggtggcgtgtgcctgtagtcccagctactcgggaggctgaggcggggggatcacttgagcccaggaggttgaggctgcagtgatctaggattgcactgctgcactccagcgtgggtgacagagcaagaccctgtctcaaaaaccccaaaaaacaaaactgaaatatcaaatatatattgaaaacagtgctagtcatgggtacatagatgatggcattttataaagtggacgcacatgtaaccagcatccaggccaggacacactacagattccccgattccccttccactcagtgcccaccctctcaagggtgatgtcctgacttgtaactgtcgattactcttgcctgaatggagttgtacacgtgttcttttgtgtctgccttctttaattaaacattgtttgtgagactcatctatgaattttagacagtgtggttgtggttgactttttcattgtggcatagtattcaactgcatgaatagaccacagtttatgatcttgtttcacatggtgtccttttgggttgttgccatggtttagctatgatgattactgagactgtggacatttctgtgtatgtgttttggtgcatgtatgtacacatttctgttgggtgtacactgtataccaggttttcaagtcaaggaatctaatatccctgccagctgtgcatgagagttggcatcctcgtcaacacccagtattgtgttttgcattttacctgctctggtgggcgtgtggatttggtatacatttcattgatgactaatccagttttgtagatttgccgctcattttggatatcctgtttttgaggtgcttgtttaagtctttggcccattttactattagggtttttttttttctatttctaattgagattccaggtgttcctgatataatttggctgagtcctgtaacacatatatttttgtgaataaatcttttccctttctgtggcttttttttttttttttttttttttttttttttaatcaagcatcaagctgtgaagaagctgtgtcagtattttcttttttttttttttcttcgagacggcgtcttactctgttgcccaggctggactgcagtggcgtgatctcagctcattgcaacctctgcctcccgggttcaagcgattctcctacctcagccttccaagtagctgggattacaggcatgcaccaccacacctggctaatttttgtatttttgtagagacggggtttcaccatgttggccaggctggtctcaaactcctgacctcaggtgatctgcccaccttggcctcccaaagtactgggattacaggcgtgagccacagtgcccagcctgtgtcaggattttctgtcatggacatggaggctggtggtctgggtgcagtttcatacatggttattagaaaaggcatctcatccaaatgtggtggctcgtgcttgtaatcccagtgcttcaggaggccaagggaggaggattacttgagcctaagagtttgagaccagcctgggcaacacaacaagaccttgcctctacaaaaaacttaaaaactagctgggtatgatggtgcacacctgtagtcccagctacttgggaggcggaggcgggcagatcgcctgaggtcaggagttcgagaccagcctggccaacatgatgaaaccccgtctctactaaaaatacaaaaattagccgagtgtggtggtgcatgcctgtaatcccagctactcaggaggctgaggcaggagaatcacttgaacccgggaggcggaggttgccatgagccgagatcacgtcactgcactccagcctgggtgacagagcacaaaagacaggcatgactttgtacttaactgctcagctttgtaatcactgggggcccagatgctcacttggattctaactttgttggcatctgggcctaaaagccgtgatgcaggtgagcaatgatgcagagggctctgtgcgcctggcgggctctgtttgcctgctgggctctgtgcgcctgctgggctctgtgcgcccgggaaggtgcggccaccctcacgcggaaggcggccagcggatcccggtgcgcgcagctcccagcgctggggttccagcgccccgcctcttcctatagcaaccagcgggacctgccgtcccccggggcaccccgaggggtctgcgcccgcttctttccgaaacgggaaggcgctgggggctcggcagccagagggacgggttcagggagcgtccggtgagcctaagacgcgcctttgccggggttgccgggtgtctgcctctcacttaggtattaggaaccgtggcacaaatctgtaggttttcctctgggggtgggcggaggctccaaaccggacggttttctcctggaggactgtgttcagacagatactggtttccttatccgcaggtgtgcgcggcgctcgcaagtggtcagcataacgccgggcgaattcggaaagcccgtgcgtccgtggacgacccacttggaaggagttgggagaagtccttgttcccacgcgcggacgcttccctccgtgtgtccttcgagccacaaaaagcccagaccctaacccgctcctttctcccgccgcgtccatgcagaactccgccgttcctgggaggggaagcccgcgaggcgtcgggagaggcacgtcctccgtgagcaaagagctcctccgagcgcgcggcggggacgctgggccgacaggggaccgcgggggcagggcggagaggacccgccctcgagtcggcccagccctaacactcaggaccgcctccagccggaggtctgcgcccttctgaggaccctgcctgggggagcttattgcggttcttttgcaaatacccgctgcgcttggacggaggaagcgcccacgcgtcgaccccggaaacgaaggcctccctgatgggaacgcatgcgtccaggagcctttatttactcttaattctgcccgatgcttgtacgtgtgtgaaatgcttcagatgcttttgggagcgaggtgttacataaatcatggaaatgcctcctggtctcaccacacccagggtgacagctgagatgcggcttctccagggtggagcctcctcgttttccagagctgcttgttgaagtcttcccagggcccctgacttgcactggaaactgctcaccttggcatcgggatgtggagcaagaaatgcttttgttttcattcatcctagtgttcataaaatggaaaacaaataaggacatacaaaaacattaataaaataaattaatggaactagatttttcagaaagcacaacaaacacaaaatccaagtattgccatgtcagcaacacattcctactttaagttttatgaagttaattggagtagtggagaacaaaagtggatgtggggcagatctgcgtcctgcatgtgtcttgcagccagactgttccagctgttgcagacctcaaaatagagaggacccaggttttctgattttgccttcttttttttttttttaaatttattattgttatactttaagttttagggtacatgtgcatgatgtgcaggttagtttcatatgtatacatgtgccatgctggtgtgctgcacccactaactcgtcatctagcattaggtatatctcccagtgctatccctcccccctccccccaccccacaacagtccccagagtgtgatgttccccttcctgtgcccatgtgttctcatcgttcaattcccacctatgagtgagaatatgcggtgtttggttttttgttcttgcgatagtttactgagaatgatgatttccaatttcatccatgtccctacaaaggacatgaactcatccttttttatggctgcatagtattccatggtgtatatgtgccacattttcttaatccagtctatcattattggacatttgggttggttccaagtctttgctattgtgaatagtgccgcaataaacatacgtgtgcatgtgtctttatagcagcatgatttacagtcctttgtgtatatacccagtaatgggatggctgggtcaaatggtatttctagttctagatccctgaggaatcgccacactgacttccacaatggttgaactagtttacagtcccaccaacagtgagaggacccaggttttctaagaccaagtcgctacactcttaactgcagtgggtggagtttggggatggacttctcctcagctccctgctgccgctctccagcgtccccgggtgcagaccctctgccgccacagctggagactcccaaaggaggcaagcaagcctcagcgatcccaggaggccccatcggcccttcccaggctttcctctctttaagctcctcctccttcttccctttcttcagaatcgaatctaggcaaggatttcacagtctgagctttgaccaaggacagtaactgggtccagggatggaaaactttgcttctaggtcccgttttgctacagccttgcaagaggactgtgatcaggcctcagtttccgtctctctaaactgaggagtgctctgcggggatctctgcctcctttacaatatttcctccagtgatgtcttcattattagagctgctgacttcaaatgacatttcataatgttgtccctctctgttgtgtcatccagagtcgtttttcttcttatatcttgaaaatagataactaagataatatgaatatcaaactgagcccctttcttcggattttgtaacaaggaaaattcctagtaatgatgaagtaactaaatgaatctggatgtgagctttattttatgattggattagggtatatccatgagccttggacttatctaaaactttaattaatctaaaattatgcagtgttcattacttagcaaaggtatcatggcttggtgtctagcattcttggtagaaagccatcgctgtgttagggagtgttggctgtttattgaggccatcggtgaggcaatgcaagacagacaaatgtggcttcagtactactaatatgacagcagacagccaccagctggaaaggtgtattgagattgtaaagatgtgctccttcccgaggccagggaccagggccacttacagtcccacaatcatctttttgaactgtaaatctgaattcctttccccatgacaaagttgggcagggaaccatcaaactgggattctggaaatcaggatgggggagcagagaatcctgcaccctcacaaaccccttttgctgtgtttgctcctggtgcaagttctcacttcttcatggcttgggggctgagcagagttcctgggggtgtttgtgctacctcagctctctgttcccactgcttggagccggagaggaggcagggatagaagtcatggattaaaggtctggagacagggcaggaagaacggcaagattcagaggaaaatgtttgtttacagccagaatcaattgataggcatccacacagcgttggggagaatgatgcagcacagtgccctggcctggcacgcaggagcctatgaccgttccgtcccctgagccagctcaggctcctcacccccaccctcagaatgtgggctttcatggctgctccatcctgggccacagcccttcaccaggctcctctctggcagggccacagagaataaaagggagcagaaaccacatcctgcacacagatagaacctgcatcagccaaagtgtccatctgaccaagggtctcccttccgcactgcccagggggctacaacatgttgtttggaccacggttactatacctgactctctttaattttttggctcaaattgttttctctccttgattagattaggtaccttggtaatagttacgtttgtctggaacctagaggttgcaagatcatgaaactgcagttataccttcccagaggggttgatggcatcctcagatcctcgacttgtggaatgacctgtgtggatctgactctaggccatctcccattggaagaggaggaaggcttttatggttgaaagaaggaccattgcattataataggtgcagtcattttggaattctcggtatggggagaggcatgtgcttgtgtatgtgcacacatgcatacttgctcaggaaccaagggggtggcctacagtgacatatgtcatgatttttgtttattctgctgctgtattcattttcaattgctgttataacaaattactacacactttgtgccttaaaagaacacaaatttatatttttacaattctgcagaccagaggtccagcagggtctaaaatcaaggtgccagcagtgctgtgtttgttcctggaggttctaggggagaatcacttcccgcacatttgggctgtgggcagaattcaattccttgtggttgtaggacggaggttgccattttcctgctggatgagggccattcccagcttctagaagccatctgcatgccttggtttgaggacccttcgactatcttcaaaaccagcaagggtaggtcagacccttctcacaggctcttcttccttcctttttatggactcatctcattaggtttgcagccacttgaataatcccagatcatttctctattttaaggtcagctgatcaggtcaactgaattctacctataaccttaattattttttgccatgtacggtaacgtatgcatagattctggggattagtatggagacatactaattacactgtagctagatatttgtgtcggagggggggcattattctgtacctagaagagaggggatttgtggggctgcagggtgtgtacatgttcagtgttaactgattctgctaagtggttttccaaagaggcatgcccactaaacactattctctttcattggtctgtttatttattctcatgtccatatcatactgtttgaattactgtcttgatatctagtattctaaatattcttacttcgttattctttgaaattgtgtttgctattttagccttttgcatttccatataaactttagaatcaactggctaatttccataaaaataactgctgggatgttgaatgggattgcttagattctatagattatgtggaggaataatttatattttacaatataaagattttcagcccatgaacatggaatatctctttatttatttgaagatactcttctttaatttatgtcaatgttttatagttttctttcacacatttcactagttcctaactgtttgatatttttaatgcaattgtaaatgatgtcatttaaaaattaattttcaggcaaggtacagtggctcactcctgtaatcccagcactatgggaggttgaggcaggaggatcacttgaggccaggagttcaagaccagcctgggcaacacagggagaccccatctcaaaaaaaaaaaatttagccaagcgtggtagtacctgactgtaatcctaattactggggaggcagagatgggaggaggctgaggtgggaggaggctgaggtgggagggctctgcttgagcccaagagttcaaggctgcggtgagtttgtgccactgtactccagcctgggtgacagagtaagatcctgtctgaaaaaataattttctaattgttgctattgtttcaaaatacatctgattcgtgtatactatcttgtatctaattactttgcttgttaattataaatttctttggatttttcatgtacacatcctatctatccaaaggaacagaaatcaaaatataaaagatatatgtaaacttggaatgtttattgcagcactattcacaatagcaaatatatagaatcaacccgttttcatcaacaaatgaatgaataaagaaaatgtcatatatatatgtaatggaattctattcagtcataaaaagaaagaaaacatgtcatttgtggcaacatggatggaattggagagaattatcttaagtgaaataatccaaacacaaagaaataaatattgcgtgttctcacttgtatgtgggaactaaaatatttgatcacatggaggtcaagaggggaaaaataaataacagagactgggaagggtgagtgtgggagaaaagagaggaagaggaggactgggttaaagggtacaaacatatggtaagacagaaggaattaattccatatttgatggtggagtagggggactgtacttaacaaaaatcgattttacttgggtgatggctgtcctcaatacgttgacttgaccgctatgcgttatatacatgtaccaaaatttcttatgtaccccataagtttatagaaataaaaaacagcaaaaaattgtataaataatgttcagttatctatttttatttaatttagaagcaatcatctaggtaaaagaccagtaggaacaatcctaatatagctagttatagcacacctactatgatacagaaacctggctaagggtcggtcaggcaaaatctcacctcatcctaccaatgaccctataaggtcggtattattattatccctatattttaaatatgtaaaagtagtagtagcctgaccaatgtaatgccaaatggcagaattgggacttaggcctaatgtacctgactcaagaagtagcaatttaatctgtatctccacgtctgtatatggaccaaggagaagtaaattttgtgtttgtgagtacctttaattctttctgtccatccgaaatattctaaccccaaaccccatgccatgagtggctttttagggaaagaattaagaccatgttgtaaaatcttgtaagttgcagtttgcagaattagtattggaccaacaatgtcctcccactcaagtggcataacggtagaaaacactgttactagttagaaatagaatcttaggggagaaactgatagtctaaactacagaacccagattaaaatagaaaaaatctgtactcttccttaaaataatttgactaaattttaaaaaaattatttctgcaaataaacagtattataaagtggtatatttaaacaaataaatatctacctacaatgtaattctttttaatctaatcttgaaccagtggttctggctccatcttatcttgtcataatctttgtaactcatcttgaatgcttttttggagttgcacctgttccttggtttatatatgctccagggatttcttgtcagctggccgtaagacatgatttggcaatttgtcattccatttactggattcatttagctgtgtaaaattgacacttatggatactttagtttcaggaatccttcttataacagtgggctttcacaatctccttcctatgccatgcagaaataatcctccacaagccaagcacaaaagaaaaatcaggttggtggagaacaagtaaagaaaaggaggagaaggtaagtgagagggagaaggtaagtgagagggaggaggaggaaagggagggcctgagaaaagcaaaggtgagaaaagtctctgctgccgtagagcctggagcagcacgaccggcttggccttctccatccccagccagcaatgcagaggacaccgcagggactccccaagtgtccgcacccctgggcctgccagggcctccacctgctgggctgccctccctgtgcgcaaggtgtgaggagattcttggagagagttcccctgggttgcagagtcctaatggaatctcacaggaaaattgcgtggcccccaatgtcctaggtgtagcgttcgtttcagttttttcattagaaatgtgtccctgaaggctcatgtctgtgccttgagaaaagagaaggccatcgtcacaataaccctccgttctgaccaggatggagttggggttgctattgctcaaaagcttccagaaccttctgctcccactcagaataaacccagaacccttgcctgacccagaagccccttggggatctgcctcacagcccacctcaccgatggctcttctcccacccaggcccttgctaatggccctctcacagcactgccatctactcttcagacctgcccatccctcctgcctcagagcctccaaccttctgttccctctgccagaaatcaccacatacaactttgtcttgtctcttttttttttttttttttttttgagacagagtcttgctctgtcacccaggctgccaggctgtagtgcagtggtgtgatctcagctcactgcagcctccaccccctgggttcaagagatcctcctgcctcagtctcctgagtagctgggactacaggcacccaaccaccatgcctggctagttttttttttttttttaagtagagacagggtgtcactatattggccaggctggtctcgaactcttgacctcaagtgatctgcccgcttcagccttgtctctttctgcaggtctctgttcaaatggagtctcatctcagtggccttttctaactactctacctaaaacagcagcttaggccatcattatctgtcccttactctacttgattcctgcccattgtactctacgctgtcagtgttgtatattttctttcttccctccatggaagtgagcctcgtgcttgtaggggctttatcttgatttgttcagcatggtgtccctgtgcctgtagcagttggtaatacagaaaggaagcacatcaagcattacatgaataactatagaaattactggactaacatgtgtgtttgcttttttgtttgtgtttttcactcagaatgattccttcctaggggcttctgagtctcctccctaccccattgtctagccctttaaatacatttgacaataaagttctatctattccccagacatatttggacatgtgtgaattccagcaagagaagtagtttgtttttacccctgaaggcttccagctgtgtgcaagcagacttccacagatgccacatcatcctcttagcagatgtgttctgatatttctaaatccacctaattgtaagctgaaaattctcaattgtgttaaaaattctaaaatttgtaactatttttatttccaatgtagttaacatttcactctacttttaagcagtattcttttgcactagatttctaattgaaagttgttaagaattagttgacatcctaaacttttgtttttttttggttttttgtttttttaccataatttttatttgtaaaaaatgttctgttctgcttctgtttttttttttttcttttttttttttaaatcatactttaagttctgggatacatgtgcagaacgtgcaggtttgttacataggtatacatgtgccatcgtggtttgctgcacccatcaacccatcatctacattaagtatttctcctaatgctatccctcccctagcccccaatcccccaacaggccctggtgtgtgatgttcccctccctgtgtccatgtgttctcactgttcaactcccacttatgagagagaacatgcggtgtttggttttctgttcttgtgttaggttgctgagaatatggtttccagcttcacctatgtccctgcaaaggacatgaactcatcctttttatggctgcatagtattccattgtgtatatacaccacattttctttatccagtatatcactgatgggcatttgtgttggttccaagtctttgctattgtgaacagtactgcaataaacatacgtgtgcatgtgtctttgtagtagaatgatttataatcctttgggtatatacccagtaatgggattgctgcgtcaaatggtatttctggttctagatcctagaggaatcgccacactgtcttccacaacggttgaactaatttacactcccaccaacagtgtaaaagcgttcttgcttctccacatcctctccagcatctgttttttcttgactttttaatgatcgccattctaactggcgtgaggtggtatgtcattgtggttttgatttgcatttctctaatgaccagtgatgatgagagctttttttcatatgttcgttggctgcataaatgtcttcttttgagaagtgtctgttcatatccttcacccactttttgatgaggttgtttggtttttccttctaaatttgtttaagttccttgtagattctggatattagccctttgtcagatggatagattgcaaaaattttctcccattctgtaggttgcctgttcactctgatgagagtttcttttgctatgcagaagctctttaattagattccatttgtcaattctggcttttgttgccattgtttttggtgttttagtcatgaaggcttttcacatgcctatgtcctgaatggtattgcctaggttttcttctagggtttttatggttttaggtcttacgtttaagtctttaatccatcttgagttaatttttgtataaggtgtaaggaaggggtccagtttcaattttctgtgtatggctagccagttttcccaacaccatttattaaatagggaatcctttcccccattgcttgttttcgtcagggttgtcagacatcctaaacttttaaatttaagaatttacattttttaaagaaactgatagtcatttaaaaatccataactcaaaaaataataattcctcctatgttttcaaccaagagaagtgaaaatctgtttacacaaaggcctgaatataagtattcataacaactttcttcttaatagccaaatattttaaaaatagtttatcactgaagaatagttaaacaagctgtaatatattcccacaatggttactacccaacataagaagaatgacatatatactggaaacaacatggacatatctcaaaggcattaaaatatatgaaagaaaccaggtataagataatttactatatgattccatttatattaaattctttttttttttttgagacagcatctcactctataaccaaggctggagtgcagtgatgtgatcacagatcactgcagccttgacctcccaggctcaggtggttcttcatcctgagtagctgggaccacaggtgtgccatcacacctggctaattttgtgtgtgagtgtgtgtatgttttttgagatggggttttgccatatgtgtgttgcccaggctggtctcaaactcctgggcttaagtgatcctcccttctcagtctaatgctaggatttacagacatgagtcgctgcttgtggcctgtaacaaattctaagaaagacaaaactagagtgaaaaaaaagcaactgccaggagctgtggtgtggggagggcactgaatacagcagcatacgagggagttttgggggtaatgaaatgtattttaatggtagtgttgtgtatatgactatatatatttgtccaaatgcattcatttgtacacttaaaattggtaaatttattatatgtaaattaaactcaatcagactataaaaataaacttttgatcctgaaaaaatacctacatacatacaaactacctctgaaacaaatgactttttcagaatttctaatttaaatattcagaaatatgaatgatgatgatgaattttaacaaggcttgcataattcaattcttttttggatcacacctgagaggcatattagctgctggacttatgtagacttccttaccttctttgcatataaaaaaacaggaggttgagacagaaacaagatatgtaattaatgtacaatgaaagtttctactgcccagtaaataaagctttctattgcccaatgaattgtgcctggcagcacaattgatcattctttttaccctcaaagcatccttgaaatgattgactcaaccatgagagaaacactctaaatattctcagatacaaactaataggatcagcttcacagaacacctgcagatgcaactaactaaaaatccagctcaatttgactttaataagaaggcactttattgactcaggtgggtagttcagaagaaggccaggcttcagggtgaatttgagcaaaaagaagctcaggtatgctacccaggactcagtctcttcccaattttctgctctgccttcagtgaagtcagaatcattctgagtgtggcaaaatctctaggaataatttatgaggctgcattcttcatcaaagagggaagatgaacaagcacattcttgttcctaacaacctagcacaacttgtatttgactctaattggaacaactcaggcccttgcccatccccaagtccattagggggaccaagggagtgctgtgtggcacctggcatgagcctcagttatgcacccaccttggaaccagtaactgtgacatagggtgagacagtggtggttaggttaagtcaaccagcacccaccccatgtttcaaaccatgtgactaaataattcagggctctgttaggaagaagaaaggtggatgcttcttgaatagcacccaacactcaactacaatttgatttgacaggaacccagaggccttctccatagaaatctctcacagttgtttggaaagagagcactcagtacaaaaatactatggcaacaaccctgtggcctcaagggtgctacggacttggtgtggagggtggggaaggactcagtgtctcctgcagatgaagcagaagagatggcactgccttagcagagtagaaaatgtttaaccccaagagatgcctacagaggcagctgagccacaccacagactcctacaagggcttgggttagggttaccacgtgtctagataagcagaggagatggtgaggcagacacagaaaggtcggttcaaagctgattgggaagagtgtgatcccaagacccctcagtccacactggcagtcaaatactcctccctgacgtcggaaaaagaaacaatttattttcttcagactttgaaacagaacttttgtaagctccaggacactagataatgcagcttatgtaaagagagtatttagtgaaagccaatttactgagcagggagatcctcagactctttctccctcttggctcccagaatgctagggtcaggcttgcagtcttaggagattggcgacctctttttggagaggatctgcagataccaacattttcagggtttcctcaggtccaggagtgccacgctcctgtggattcttcctctgtggaagcaaaggaagactccatctgtgcatacggaatgcattaattatattttcttattttctgttttcttgatgttctagcatctggggtttactgggaaaagattgcctttcccagggccagccaattaaactaccagtccagaaccaatactcctaaccacctactttatctggctctgatactgtaggagacaataccgctcttccctaatcaccccagggccggtgccttatggactgaaattctgaaatctttttatgcctggcctttccatccttcaacttcccctctcccatgctgtgaatgattgtattggacatttttgttttaatctcagtgacaggggaacacaggtagctctaatatagctgtgacccagatgcttctgtttctagcatgtatttattttgtagcaaacatttacatccatcatttttcactgtcttttgaaaataattaggcaatatctcatctgaggtaggatgtttctaggggttgtgttctgagggagaaaaactaatctgttctctttccactgcattccaggaacagtaagaggaccttgtgcatgaataatttgtttccacactacagagtgattaataagcagattagtaaaaacaattctgcttcacttagtaacagcctcctccaactcattttttctcaacaaacttatttttccagcagaagaatcacagacttcttagagaacccagtgagttttcacaccttaaatctgtgaaatcctcatgttttcttctgccgtatccatagttcaaacaaagatgaggcaaaactagatgcattcctgaaggaacccaagaaattcctctctttctatctctggaatgaaatgcattatctagaccatcaattctaaccttcaaaaaccaaacctgtttgtgagatctccttcaaatactactgtagaccccagtgtttattcattaaatttttaaaatatttgttttatttggaatccatgtatttgtaattttagtgtttgtattaatatcagggagaaatgtttaaatctgtctatgccatatgtgcctctggcttattgcccaattaattgtagcctcaggctaaactttggtttctgtctttaatttttgtcagaacaaatataactgatctcaaaacatctgcttttattgtagggactcgtgctgccatctccattcctatctcttttcttgcaatctgggtggaagttctttaatatgaacatttcagccaccttcattctaccacgtccgctatcagcacattcaaactgatccagccaaggctgtcatcttaggccagggattttttaggaatctattttgctgtgatgcggctggcaccgctttgactcactttatcaccccagggttcttttcattttagaagcccaagaaggcagaaaaagaagtaggtgagcaattaaaccctctgagtcaggagcgtctccccttgtgttaggcaatgttgtagaacattgtgtttagcaagctcctagcagatgagccacgtggctgctgagcacacacgcctgcttgctgctgtgagctcagacaccatcatcatgtcctttccatctctggagggaattgtaagggccacttaataacctctaaatcagagagatgaaggtgcttccccaaaacactgatgacagaatgaaaggtgaggagtgttagccacaggtcaaaagtgcaggaaagtctctcagtgtgggttgttgaagaaatgcaggtcttttttcttttggaagtctccctagaatggggtcaaggactctgcccattctaggatgaaaaattgggatattagacaccctcagatatttatcctaagcttccattttgggctcttaattagtttgttcatccatcacaatctcaaatgctaagcagggcatttgaatctctccacagtgcaaatcagcgccgtcttttaaagttgagtttcttcttattctcacctgatacaccttatttatcccacacccaccccaataacatatcgtgctcattgttatctttgaggcaacccttgaattttactcagcctggagcgctcttcacatgtcttgtccagagccagttcggactcattcttcagccgtgcatcagtcagtgggggctagcttaaactgtggtgacaaacaacctccaaatttcagtggctcaaaaatcttcttcctcatttatttacatctcatgactggtcaggtgagaggtagctctgtgctgtgtcatcctaacacaggaatccagaaggaaggagggaccgtcaataagatccccattgctatagaaaagagaaaaaagcatgcggaatagaacgctgtttcttggagatttctcctgaaaaagtcacgttatttcttctcacctccattggcaaaaaaaaaaaaaaaaaaaaaaaaaaaaaaaaaaaaaaaaaaaaaagtcatgtggccatgggaaaatttaagtaggtgggatggaacagtcagaatgcattcataaaaaatgaactgaaaatatttggagaacagcaccaatgactatcatgaatgccaacatacatccctaacaacccagtgctgttaccctccaaactttttatgtcttgcaaagtattagaacttcatatctgaagccataccactcagagggaatgcaatacatattgacatctcctttaggatgtccatagagaattcaagaaaagaaataatttaaaagtgcttttgggtacagctatttagcactagagggtaagagtagagatagattgtaaagataataatagggttaggcataggattaggatctgggtcagagtcagggccggaagtatggttagaggtggggtcatggtcagggtcaagatcaaagtcagggttaaagtaagggtcagaattaaggaccagggtagggatcaggatttaggttcaggctcaaagtcttgggacagggttagggttaggattagaaccagagctttgttctcaggacccacccgagggtgggtcaccatggctttggagcacctggtagtgtggcgtgtccacagtgaagaccagagtttcattgtccttaagactgacctgggagacgtggctgcaggccattgaggaaggtgaggcaaaagcttcctgtctgctccccgtgtgctgaggagggagctctgccatgggctttactttcacacgttatattctacaagtcttgttttacaaaagcatcccttccttgaggcttcggctgctcatcgctgctcatcatcatagcgtgccataacatatagtaagatttgggtttgtttctgggagagatcttggcatagagaaaggagaaatgcttagagccaccatcaagacagttgggatgaaagctggggataggcagaggctggaggaaacatgtgcaccccttgtaaacacttattcatgttttagttattcacttaaagtgttaaattagtaaaaatagtattgaaaaattgaaaagtaggcatattaaaacttgtaacactatttaagcttagatatattatttgtacctcatcaacattttttattttgttgagaaagtgtaaggttaattggcagcatatttctaatagtagatagaataatgtctgttttataaatgttgacatcctacattacatgtgtgaaccctgaaaatctgagacagctctcagatttttaagaaagtttattttgccaatcttgaggatgtgcacccgtgatgcctccccaggaggtcgtgacaacatgggcccaaggtgatcggggcacaacttggttttatacactttagggagacatgagacatcaatcaatacgtgtaagatgtacattggttcagtccagaaaggtgagaaggccagacagggggcttccaggtcataggtaggtaagagacaaatggtttcattcttttgcattgctgattaccctctccaaatgaggcaatcaggtatgcatttatctcggtgagcagatgggtgactttggatacaatgggaggcgggtttgccctaagcagttcccagcttgacttttccctttagcttagtgattttgattcccaagatttattttcccttcataagattttcctatgagcattaattattcattgtgtattttatcacacaaataaggcacagatttttaaaaaatcatcaacttcctggctacctatatagacataattacatagaagctcaactaaatttgcaaacattccagagtttgggtttccaataattctttgtgattctttaaaaggtaaagtatttttttcccataaaacatagcaacatttaaaatcacccgtagaatgtcctgccatttttgtttctgtagtttcctcattttctgcaaagcctcgctgaggaaattgactttgaatatccttttacactcttctgttttagaaagcattgtggtaaaacattgaatcatcatggtcataagttctgttcacattctttcttgctttgaatattttttcccagtggccaatatttgattctgttgtatcatggctaaaaggtaggcatggcaacaaaataaagacaggaagtctttggaataagtgatcccatcacaatgaatcaatttgccattggaacatatttttacaaagtcactctttcgaaaatatttagctatgaattgaaacagagtctgtatagttaatatttttcctggtctaaggtgaacagcattttagagaatgaactcaggacacaaccacagcacaagaaaaacgtgataattaagtttacacatatgtgttactaccgcaacagaaaacatgtaaagaacatttgatttatgtatcagtctgcactgtttaattttttgtgtcataaatactcttatttaaaaaaacaggactagttaacagtgtcaattactagtaattcatggtataaataattaaacaaggaagtgttcaaaaaaaacagtgttttaaataaagttttattttacatcatcttttttacttacacagaaattgtcaaaaaaaagcagagatttcccatgtagccgcaacctagtttcctctcttattaacatcttctatcagtgtgtctcacatggcttattaatatcttacataatttgtcacagttaatgaaccaatactgatagactattattaattgaagttcatatttcatttggattcccttagttctatcttactctgacccaggatcccatccaggatcccgcatgacatgtagacatcacgtgggctcttcctggctgtgacagtgtgtcaggctttccatctcatgatgaccttcatagcactgaggaggattggtcaggaatgttgtagaatgtcccccattgtcacttcatgttctcaaggtgaactgtcacctttgatgttcacttggatcatttggcagagctaatgtttgtcaggtttctccactgtgaggttatttctcctccttgtccgtactgcatgtgttcttttggagcaagtcactatgcagagccttactccgtcaggagttggctccaccttcttgacggctgagtgtctacatcaattatttggaattcttttgcaaaggagatttctatgcaactccatttgcttattcacctaggtatacaaatacagacacctagataattactttaagctttagttattattcaacactacagtattatgttgcacaattcattcctgtgttggccatcagtagctgtttttattggctcttatttttctttgatatgttttaatttttttagtacttactttctgatacttccagattatcctggctcctatatttactgtcccagttctagtatcagacatttcttcaaagagcctgattactttcagaatggtaggaaaacttacatctggctgctgaatgagcacattgtatcttctccctcattggcaatgctaggaagtatatgtgtgtgtctaacctacctatacacacctaattataaagttttctatgtagaactgtgtgtgtctatattaaactaaacataagtttacgttgatgtctccacctctgatctactatcacatgaatcattctagccttctcgccttgctaatttgtaacctcccacttcaacagtaagaaacctggttcccaccatctgtgacttatgtaagtcattgttttattccagatacagacactgtggttttacaattgttcacaattgcttctgttggaaagaactttataaaatggaatccaataatgaagtatagttcatgtgccttcagcctacagattctattcattttcaaagtttttacctagatttgtgtcttagtccattttgtgcttctgtaacagaatacctgaggctgcgtaatttataagtaaaaaagtttcatttggttcacaatactggtggctggaatgtctcagattgggcggttgcatctggcggggcctcagtctttttcacctcatggtggaaagtggaaggggagcaaggggtgcaccagcgatcacacagcagaagtgaaagcaagagggaagccaaggaagccaggctctttttaattacctgctcctgcaggaattatctattcctgtgagaacagaactcactcacccccatggaggacattaatctattcatgagggatccgtccccacgacccaaacaccgtccactaggccccaccgccccacactgacacagtgggagtcaaatttcaacatgagtttttgtggggacaaaccacatccaaaccatagtaatttgtagcataaattctttttcacatgatgtattctgtcatgggatactccacatcctgagtaatttgatttaatttgaatagagtttgctttaaccatttggctgtaaaattctgcatatttcgacaaatgcattgtggcagatatcccgctattaaagtatcatatggaatgcctcaaacccccaccccatggagccaatggcttcccatctgtgtagtttgccttctccagtgtctcattaaatgaggtcacactgtgtgtatcctcctcagactgtcttcttccacttagcaatgtgcatgcaagattcactcatgtctttgtgtgtgttgatatcttgttcctttctatggctaaatagtattccattacatgaatgtagcagaatttggttatgcattttggggagcagaaccttcctcttctaactttgttccagggttggagaccttcaagttaactgacaatagatacattagtaggagagacaatacttggcttcttgttccccaagtatcattgtgggacaaaattcatcagatggcaggatccagtttacaaagaggtaaaaatagcccagaaacaagaaacaagactagaatctgataactcacaatggctatagttttcctttaaaaaaattttttttgagacagggtctggctctgccgcccaggctggagtgcaaaggtgcaatctcagctcactgcaacctctacctcctgggtgcaaacgatcctccctcctcagcctcctgattacctgggactacaggcacatgccgtcatgcccatctaatttttgtatttttggtagagacggggtttcaccatgttgcccaggctgatgttgaactcctggccttccaaagggctgtaattataggcatatgccaccatgcccggctgtgttatacttttcctttgaaagataaaatttctctctgtagtaaccatcatttttgatcataatcaaagtaagactattcttgttttaaaaataagtctagttttgttagattttgcttgattatttacgtaagtgcagcaagaacaggagatgaccacgtaggtgctttcaggtttctttgctggaagttttcatacagaatctcagatttgacttttaaaggccttattcaggctaaaagccaagccaagaacatactatcaaatttcagctgcagtccttatagctttttgtgaattcctctcttcttgaggccccaaaatatccctaaattcctgggcctaccaggaaatgaccttccttactaacctataaggctgtgaaccctgtaatctaggtatcaggctgggttttctcagagtgctgttgggaatgaagttttttatgttccccccccaaaaaaaaagaactaacatgggaacaaatgatctcttagcaaggcgagctttatttttctgcacaaagggtgctactcaatagctgtccagctacaagagcacaccaaacaaaggagacagagttacttataacctgacgtgtctaccctactgctgtgtccagtttccattggctggaataggacctcccattttacactttacccgattggctgttagtttaaaactttcttaattaggtaaggggaatagaagaaagaaagaaaaggaagttgcccaggggtagttaaggaagcatctccaaataaggaatggcatgcactatgggctggggcttgtctagttctgtccaggcatgctggagcaagctaggacaagtgatttggaacacacacacacacacacacacacacacacacataaaaatagtgggtagttgtgactttataatctttgaggaagaactttcctcaaagttttccacagtgctttgtaagcattgtctccataaaagtcaaccttacttccttaaaattgctggtcataactgatcttaggtacacttcctaaatatgatattccagtaaaaaccttgataatataaccaaaatttccaattatgtcctgttataaggtgaatagattcttattggacttttgctaacaacaatatcatcgtggaaataagagtattcagtaaggatttcaaaattctggaaaaatcaggcaagaaaaaaagataaacgcttcatttctgtttacaaaagtataatctactaaattgttgtaagttacagttagagtaagagaaagagatttcttaaatccagaaactataatattaaccagcaatgctccaaaaagctatacaattataatcaattttcatcagttcattcagtgccatgtaatcaattccagtcttgtggatcttgagttagcagtgtcatgaacccatcagtttcccaactggacttctggagaccttaactgagtcaagtgtatggtcttaaagttatttaagcaatatcatcagaagcctataaccagagtacctgtcatagtcttttctgtgagtctcagagggagtcctgtcttggagacgaacattctgacctgtagttgattgcaggagctttcaggaaagcatcagggggaaataatatctaaatgacgaaaagtatgaaatggctgtgatgaaagatctgatgagagttcattataccacaactgacaaggatattcgattttttctgtggcagacaacatttatttatttctttatttagagacagagtcttgctctgtcgcccaggctggagtgcagcggtgcgatctcggctcactgcaagctctgtctcctgggttcacgccattctcctgcctcagcctcccgagtagctgggactacaggtgcctgccatcacgcccggctaattttttatatttttaatagagatggagattcaccgggttagccaggatggtctggatctcctgaccttgtgatccacccgcctcagcctcctaaagtgctgggattataggcatgagccactgtgcctggcacaacatttaaagtaataattggaattatgactcattactctatagtggcacatagcatggataaggaggacattgacaaacttccaggaattttatataatttctgaaaacataacattttacccatacaaatataacacagggaaggttaggtatctctttttatttgtatcttctgtatggttttccttataaaaaatgcaacctactttacttgcgaaacatgccctacttttcttgcatgctttgcatagagttgtttctagttattctattatttctagtagttttatttacatatattgattataattttaatacttagtaatcttttattttccagagaaaactaggaagtagacagttataaactgtcatatattagcattctatagtaggttagaaaatgtatgaatataccatctcccaacatctagagggatgtgttttctcataatacaattcctcagtgtggcagaaaaaaacatgtttattaacgggccaaaatatctttagtctctctgtaaaaacaggaagccaaaagtatataaacttgaattatttatgttcagtaattaatgttttagtattgtatcttatttataaatggtctagatatttaatgcaaatcttttacttagcttaactttaaggttaaaaattaccaaaagtactttggaaactattcttaggcagatttactgtaaacaaattatttttgaaataatgtttttcgcttttcacaagacggcaccgaaagcgaaggaagctcctgctcctcctaaagccgaagccaaagcgaaggccttaaaggccaagaaggcagtgttgaaaggtgtccgcagccacacgcaaaaaagaagatccgcatgtcactcaccttcaggcggcccaagacactgcgactccggaggcagcccagatatcctcggaagagcacccccaggagaaacaagcttggccactatgctatcatcaagtttccgctgaccactgagtcggccgtgaagaagatagaagaaaacaacacgcttgtgttcactgtggatgttaaagccaacaagcaccagatcagacaggctgtgaagaagctctatgacagtgatgtggccaaggtcaccaccctgatttgtcctgataaagagaaggcatatgttcgacttgctcctgattatgatgctttcgatgttgtaacaaaattgggatcacctaaactgagtccagctggctaactctaaatatatgtgtatcttttcagcataaaaaaaataatgtttttcataagaatgacaacttaattagaatcaaatctataagctttaagattttacgtttctagtaagtataatattagcttatttgactagaactcaagcagaataggaatttatgcttgttttatattcaataatgataattttgaagatatagttgttttattacaccaaaaatcctatattaatcttatttaactaagttttatccaaatcatgttaacttaagaaacatttgatcagttcctatatttctaggagtttggtgaatatttatttataaatgcttatttttttccaagccaagttagaatagagcacttttagaggatttcataaatgaattttgcaatgctctctggagttaagaaaatatcacatatacataacatacattaatagatacacaaacacaaatagagatttcatagctttcatcctgaaatttcagccatgaatcaggcataaatattctgatggttaatttcagacatctacttgatcggattgagagacacacatagctggtcaaacacgatttcagccatgaatcaggcataaatattctgatggttaattttagacatctacttgactggattaagagacacacatagctggtcaaacatgatttcagccatgaatcaggcataaatattctgatggttaattttagatatctacttgagtggattaagagacacacatagctggtcaaacacaatttcagccatgaatcaggcataaatattctgacggttaattttagacatctacttgatcggattgagagacacacatagctggtcaaacacgatttcagccatgaatcaggcataaatattctgatggttaattttagacatctacttgagtggattgagagacacacatagctggtcaaacacaatttcagccatgaatcaggcataaatattctgatggttaattttagacatctacttgagtggattgagagacacacatagctggtcaaacaatttcagccatgaatcaggcataaatattctgacggttaattttagacatcaacttgactggattaagggacacacatagctggtcaaacacgatttcagccatgaatcaggcataaatattctgatggttaattgtagacatctacttgactggattgagagacacacatagctggtcaaacacgatttcagccatgaatcaggcataaatattctgatggttaatcgtagacgtctacttgactggattgagagacacacacagctggtcaaacacgatttctgggcatatctatgagggtgtttctggaagacactgagataaccatgacccaatgtggatgggcactgatatggtttggctgtgtccccacccagatctcatcttgaattgtagttcctgtaatacctacatgtcgtgggagggacccaatgggaggtgactgaatcatggtggtggttactgccatgctgttctcatgacagtgagtgagttctcatgatctgatggttttataaggggcttttcccctttggctcagcacttcttgttgctgccatgtgaagagggatagctttgcttccccttctgccatgattgtgaggcccctgcagccatgtggaactgtcagcccattaaacccctttgttctttataaattgctcagactcaggtatttcttcatagctgtataaaaatggatgaatacaggcagcatccaattggttgagagcccagatagaataacaaggaagaggaaaggtgaattatctccttctgaaatggaaacatccttcttctcctgcccttgacatcagaacttcagggtctcagacctttggcctcacaatcagagttacaccattggcttccccgattctgagtcctttgtatctggagtgagccatgctaccagctttcctggttctccaacttggagacaggctattgtggaacttctcagcctccataattatgtgaaccagttcccctaatgaatcttctctcatctgtctacatatatcctattgattctgcctttctggagacccctgactaatgtgattacaataactacacaattcactagtttatatagaagacttggtttttgtctttgccccattttatatttgtattataactatgtatctggaaaatggaacaagttttttcttcttcatatgagggctaaggcttttttctcaccaatatttttggagattttaaagattttctttttttttgacatagaatcttatggaggctgagaaataattttttttctattttattcttcagccccaggtgtttgcttttgcagattcttgagcacactgagagcctccaaggcatggagtggggtgcctgaagtttcagtgattatagggagttgagagactcaactgggaaaggaaaggtctaaaaggaggcaatttggaagataaaaattttctcaaaggagccattaaagttgtaaataattcttagtaaagtcatgcaaacaggaaaagaagtagaattagttccatattggtggaacacatagtcagcagaggtttgagaagggagaatttagtgaagtgagaagttcccatgaaagcagcaagatcaagatcacagacaccttgaaacaaaaagccaggaataacttccaacccaagaggagaacagagaggcctcaaaaccaaaggtaggataagaaacttgtagcccaagagttatcttccagacaaagaagcctgagattccaacgcagcttcagagagtgctcactcaaaatgttactgaaactgtaggctttttaatgacttagccatgcctgcaaaaggcattccctaaggtggcacagaagacggagcccccatatccaaagatagccaaggagaaagaaagacccctgttgccagagccagtgggcaaaggcaacagaaaaggagacaagggtcctaatgggatgagatcctttcggatttaggcttttatacaaactcctgagaactggcaggttgacagccataaatggggtaccaaactttctactcattggattacaagttctcaggcatccagaatgattaacaaaatgacaatttctagggcttctgtgggagagtatggaaaggtctttttgaaccttttaatgctgtgaacggaagaatgatgaggttcataaatttggaaaggagacatttcttcacttttatgcttatttttatttttttttgagacagagtttcactcttgttgcccaggctgcagtgcaatggcatgatcttggttcactgcaacctccgcctcctgggttcaagcgattctcctgcctcagcctcctgattagctgggattacagatgcccaccaccacacctggctaattttttgcagttttggtagagacagggtttcatcatgttggccaggctggtctgaaactcctgacctcaggtgatccacccacctcggcctcccaaagtgctgggattacaggcatgagccacccacccagtgagagatttattttctataaagggttgtagcctgcagggttgtccttctgacaggctgggaagcatagcctccagccagaagccagaaacagatgcttcaaggaggaggtaaaggaaatagcaacttatgctgagtggaatggccaattagatttatttaataagctctaggaggagtcatgaatatttatggaaggagaaatgcatgcacgcacaattgagtttcttgcttcttcatgggtcccatgtacaaaaaatggcagtgttagcatgatcccagggtggagttttcagccctctgacattaaaaggtgaagcagaggacatgaaaacttgctctgtgcatcctctgtacactggccagaacctctccatcgtgggtggtctcttatcaggcaagaaaggagaggttgatatcagtggtggaggctttgaaagggctggtttctgttaaatccttagggaagaaagcctcatcatggttagcaaaggagggggtataacgatgtgtatcttaaccccatcatcccatcctagcaaagctgagaactcagttttgaaagttactctggggtcccctcagccaagagtgggtctgttcagtcagttgggagcttagaatttaattttcatttatcaatgctaatgggaaagagtacgctgtcttcatggcagctgaatttgcaagaaactccttggatggggttaatggcagctgtatttttctgggagctgtgctttaattggataaagtaagttctggtaagatttcttcatcttcagtatctcaaatgttttcatttaaataatctttataacaacttttgatgtctgagtggattcccacacagtcatctattgtaagactttctgattccttttttttcctttggtcattatgaatagggcttctgtaaataactgcatggtagcttttgatgggaaataacatcaaagtagttgtcaaaatacctaggaatgttatttttggattgtaaggtgagacttgtttagctttggaaaaaaatgcccaacttgtaataggggaggaaaaataattttctgtttttggaattcttagatggaacgctctgtaaaaactgacagattaaaatgagaaaaagagaaaagtttaaaaacatgtatatcttatggttacatgggagatactcagggaaaaatgagtaaatctccaacaggtggctttcaattcaagcataaatactatcttcaacttaaagaaagaagatttgaggtgcagtagtggggagttaaccagcaaaagcacattagacaagagtaaggtacgttatacagacttaagtccatgcattctccattgataagactcttcagtgatttagttatccttctcttcttggtgtcgagagaggtagcttttaaatggtgatttcctttatagatgtaaattttccttacacaagtaacttctactctattttcacaacttcctttgttagcatttttttttttcaaaataattagcttggaataattcttaagccaaagggacatattttggggttgcatattctggtttcctaccattatattttggggtggcatagtttggtcttatacactgtgttccactggcaatgaaaagagttcttgtttttcctccagcaatttgtcatttgttaaagagcttagcagttctaagagatatagaccagctgtgctatctttttgtggttttcagttctctagtatgttgagcatctttttgtaagtgtacttgccatctgtagatcttctttggtgaagtgtctgttcagatctgtgtgcatttttaattgggttgtttaacttattgtttagttttaacaattttttatatattttgaatacaaattctcagatctgtattttgcaaatattttcttcaatatgtggcttgtctttttgttctcttgacaaggtctcttccagagtataaactgtaaatattaagaaatccacattgtcatttcttctgtgtatatcaaccttctgtgtcatttgttaaaattcattaccaaacgcaaaggcacacagcttttcctctatagtttcttctagaaattgtatagttttgcatttttagtgtaaggatgattttgagtgattatttgtgtaagttgtaaagttttcatctacatgcatatcatttcttatggtttccaattaatcattccctcactatttttgggaaagacacaggatagtgggctctgttagagtagatagctagctagacatgaacaggagggggagctcctggaaaagggaaagtctgtgaaggctcacctggagggaccaccaaaaatgcacatattagtagcatctctagtgctggagtggatgggcacttgtcaattgtggttaggagggagaagaggtacctacgcagaaacaccctagaacttctcttaaggtgccccaatcggatgggcgcggtggctcacgcctgtaatcccagcactttgggaggccgaggcgggtggatcatgaggtcaggagatcgagaccatcctggctaacaaggtgaaaccccgtctctactaaaaatacaaaaaattagccgggcgcggtggcgggcgcctgtagtcccagctcttcgggaggctgaggcaggagaatggcgtgaacccgggaagtggagcttgcattgagccgagattgcgccactgcagtccgcagtccggcctgggcgacagagcgagactccgtctcaaaaaaaaaaaaaaaaaaaagatgccccaatcatcattcactctgcaataaaaatgtcagaatattgctagctacatgctgataagaaggacaaaggggacatttttaagagaaacctggcaccataagtacagattagggcagagaaagacattcaaaagaggcagctgcagtagatacaaacgtgactgctgtcagcctgcctggtatggcgggaaggaggctggtgccagagtggattcggattgatcaccacacatgtacctcaatcaacagtgaggaggtcccacaaggctaagtggggcaagtcggggacctatggcagtagcaggaaaacgaaagaaaacaggcggagacttgagacagaggcaggaatgtgaagaagtccaaaataaaaatccctgcacaggactcttaggctgttttcatgcactatcagcctactcctccctatttttgtactataagctctttactctgtatttcttttcaatgaagttatcttccatctttgtactgcctcttggtgaaaagctgtcttccaagttaataactgggacatcagctctccgcagtaatagctccttttcagttttaatttacagaactgatggggattaataactggcgctctgactttaagtggtgcaggaggtggccagtaggggacggcagccgtcacaccgggagcaagagggccctgcgtagtccccatgtgcctgcatgtggcgtgcagccacgacaatgccagcaagagggcccggcactgtgcccagctgccagcaggcgggtgtgctgccactacaatgtgaggaagagggctctgcaatgtccctagctgccagcaggcggcgtgccaccactatactgcgagcaagagagccctgccgtgccccggcgctagcagggggcggtggacaccactgtaaacaagagggccctgcagttgtcctagtcgccagtagggggcgcaatggcagagcaccgtgggcaagctggtcctgtagtgcccggctgcaagcagggggcgcccaaaacgggcttttcagattactcaggttccactcgtctctgcgccgccggggacgtgtgtctctgcgcgtgcaccgcgccacccccgcgctccccgcccggcggcgcgcgactgtgcgactgcaacactccccgccaccctcagccgagcgacgtgcgtctctgcgcctgcgccgcgcctcactcccgcccgcccagcgacccctcccctccggggaggcgccggcgtgcgtctatgccctgtgccgcgtctccccaacagcgccgcgcctctctgcgcctgcgccggcgcgccgcgcctctctgcgcctgcgccggcgcgccgcgcctctctgcgcctgcgccggcgcgccgcgcctctctgcgcctgcgccggcgcgccgcgcctctctgcgcctgcggcggcgcgccgcgcctctctgcgcctgcgccggcgcgccgcgcctctctgcgcctgcgccggcgcgccgcgcctctctgcgcctgcgccggcgcgccgcgcctctctgcgcctgcgccggcgcgccgcgcctctctgcgcctgcgccggcgcgccgcgcctctctgcgcctgcgccggcgcgccgcgcctctctgcgcctgcgccggcgcgccgcgcctctctgcgcctgcgccggcgcgccgcgcctctctgcgcctgcgccggcgcgccgcgcctctctgcgcctgcgccggcgcgccgcgcctctctgcgcctccgccggcgcgccgcgcctctctgcgcctccgccggcgcgccgcctttgcgagggcggagttgcgttctctttagcacacacccggagagcatcgccagggcggagctgcgttcttctctgcacagacttcgggggtattgcgaaggcggagcagagttcttctcaggtcagacctgggcgggcgggctgagggcactgcgagggcggagctgtgttctgttcagcacagacctggggggtaccgtaaaggcggagcagcattcttctcagcacagacgttgggggtactgcatggctttgggacaactcggggctgcatcgacggtgaataaaatctttcccggttgctgccctgaataatcaaggtcacagaccagttagaatggtttagtgtggaaagcgggaaacgaaaagcctctctgaatcctgcgcaccgagattctcccaaggcaaggcgaggggctgtattgcacggttcaactgcagcgtcgcaactcaaatgcagcattcctaatgcacacatgacacccaaaatataacagacatattactcatggagggtgagggtgagggtgagggtgagggttaggggttagggttagggttagggttagggttagggttagggttagggttagggttagggttagggttagggttagggttagggttgggttagggttagggttagggttagggnnnnnnnnnnnnnnnnnnnnnnnnnnnnnnnnnnnnnnnnnnnnnnnnnnnnnnnnnnnnnnnnnnnnnnnnnnnnnnnnnnnnnnnnnnnnnnnnnnnnnnnnnnnnnnnnnnnnnnnnnnnnnnnnnnnnnnnnnnnnnnnnnnnnnnnnnnnnnnnnnnnnnnnnnnnnnnnnnnnnnnnnnnnnnnnnnnnnnnnnnnnnnnnnnnnnnnnnnnnnnnnnnnnnnnnnnnnnnnnnnnnnnnnnnnnnnnnnnnnnnnnnnnnnnnnnnnnnnnnnnnnnnnnnnnnnnnnnnnnnnnnnnnnnnnnnnnnnnnnnnnnnnnnnnnnnnnnnnnnnnnnnnnnnnnnnnnnnnnnnnnnnnnnnnnnnnnnnnnnnnnnnnnnnnnnnnnnnnnnnnnnnnnnnnnnnnnnnnnnnnnnnnnnnnnnnnnnnnnnnnnnnnnnnnnnnnnnnnnnnnnnnnnnnnnnnnnnnnnnnnnnnnnnnnnnnnnnnnnnnnnnnnnnnnnnnnnnnnnnnnnnnnnnnnnnnnnnnnnnnnnnnnnnnnnnnnnnnnnnnnnnnnnnnnnnnnnnnnnnnnnnnnnnnnnnnnnnnnnnnnnnnnnnnnnnnnnnnnnnnnnnnnnnnnnnnnnnnnnnnnnnnnnnnnnnnnnnnnnnnnnnnnnnnnnnnnnnnnnnnnnnnnnnnnnnnnnnnnnnnnnnnnnnnnnnnnnnnnnnnnnnnnnnnnnnnnnnnnnnnnnnnnnnnnnnnnnnnnnnnnnnnnnnnnnnnnnnnnnnnnnnnnnnnnnnnnnnnnnnnnnnnnnnnnnnnnnnnnnnnnnnnnnnnnnnnnnnnnnnnnnnnnnnnnnnnnnnnnnnnnnnnnnnnnnnnnnnnnnnnnnnnnnnnnnnnnnnnnnnnnnnnnnnnnnnnnnnnnnnnnnnnnnnnnnnnnnnnnnnnnnnnnnnnnnnnnnnnnnnnnnnnnnnnnnnnnnnnnnnnnnnnnnnnnnnnnnnnnnnnnnnnnnnnnnnnnnnnnnnnnnnnnnnnnnnnnnnnnnnnnnnnnnnnnnnnnnnnnnnnnnnnnnnnnnnnnnnnnnnnnnnnnnnnnnnnnnnnnnnnnnnnnnnnnnnnnnnnnnnnnnnnnnnnnnnnnnnnnnnnnnnnnnnnnnnnnnnnnnnnnnnnnnnnnnnnnnnnnnnnnnnnnnnnnnnnnnnnnnnnnnnnnnnnnnnnnnnnnnnnnnnnnnnnnnnnnnnnnnnnnnnnnnnnnnnnnnnnnnnnnnnnnnnnnnnnnnnnnnnnnnnnnnnnnnnnnnnnnnnnnnnnnnnnnnnnnnnnnnnnnnnnnnnnnnnnnnnnnnnnnnnnnnnnnnnnnnnnnnnnnnnnnnnnnnnnnnnnnnnnnnnnnnnnnnnnnnnnnnnnnnnnnnnnnnnnnnnnnnnnnnnnnnnnnnnnnnnnnnnnnnnnnnnnnnnnnnnnnnnnnnnnnnnnnnnnnnnnnnnnnnnnnnnnnnnnnnnnnnnnnnnnnnnnnnnnnnnnnnnnnnnnnnnnnnnnnnnnnnnnnnnnnnnnnnnnnnnnnnnnnnnnnnnnnnnnnnnnnnnnnnnnnnnnnnnnnnnnnnnnnnnnnnnnnnnnnnnnnnnnnnnnnnnnnnnnnnnnnnnnnnnnnnnnnnnnnnnnnnnnnnnnnnnnnnnnnnnnnnnnnnnnnnnnnnnnnnnnnnnnnnnnnnnnnnnnnnnnnnnnnnnnnnnnnnnnnnnnnnnnnnnnnnnnnnnnnnnnnnnnnnnnnnnnnnnnnnnnnnnnnnnnnnnnnnnnnnnnnnnnnnnnnnnnnnnnnnnnnnnnnnnnnnnnnnnnnnnnnnnnnnnnnnnnnnnnnnnnnnnnnnnnnnnnnnnnnnnnnnnnnnnnnnnnnnnnnnnnnnnnnnnnnnnnnnnnnnnnnnnnnnnnnnnnnnnnnnnnnnnnnnnnnnnnnnnnnnnnnnnnnnnnnnnnnnnnnnnnnnnnnnnnnnnnnnnnnnnnnnnnnnnnnnnnnnnnnnnnnnnnnnnnnnnnnnnnnnnnnnnnnnnnnnnnnnnnnnnnnnnnnnnnnnnnnnnnnnnnnnnnnnnnnnnnnnnnnnnnnnnnnnnnnnnnnnnnnnnnnnnnnnnnnnnnnnnnnnnnnnnnnnnnnnnnnnnnnnnnnnnnnnnnnnnnnnnnnnnnnnnnnnnnnnnnnnnnnnnnnnnnnnnnnnnnnnnnnnnnnnnnnnnnnnnnnnnnnnnnnnnnnnnnnnnnnnnnnnnnnnnnnnnnnnnnnnnnnnnnnnnnnnnnnnnnnnnnnnnnnnnnnnnnnnnnnnnnnnnnnnnnnnnnnnnnnnnnnnnnnnnnnnnnnnnnnnnnnnnnnnnnnnnnnnnnnnnnnnnnnnnnnnnnnnnnnnnnnnnnnnnnnnnnnnnnnnnnnnnnnnnnnnnnnnnnnnnnnnnnnnnnnnnnnnnnnnnnnnnnnnnnnnnnnnnnnnnnnnnnnnnnnnnnnnnnnnnnnnnnnnnnnnnnnnnnnnnnnnnnnnnnnnnnnnnnnnnnnnnnnnnnnnnnnnnnnnnnnnnnnnnnnnnnnnnnnnnnnnnnnnnnnnnnnnnnnnnnnnnnnnnnnnnnnnnnnnnnnnnnnnnnnnnnnnnnnnnnnnnnnnnnnnnnnnnnnnnnnnnnnnnnnnnnnnnnnnnnnnnnnnnnnnnnnnnnnnnnnnnnnnnnnnnnnnnnnnnnnnnnnnnnnnnnnnnnnnnnnnnnnnnnnnnnnnnnnnnnnnnnnnnnnnnnnnnnnnnnnnnnnnnnnnnnnnnnnnnnnnnnnnnnnnnnnnnnnnnnnnnnnnnnnnnnnnnnnnnnnnnnnnnnnnnnnnnnnnnnnnnnnnnnnnnnnnnnnnnnnnnnnnnnnnnnnnnnnnnnnnnnnnnnnnnnnnnnnnnnnnnnnnnnnnnnnnnnnnnnnnnnnnnnnnnnnnnnnnnnnnnnnnnnnnnnnnnnnnnnnnnnnnnnnnnnnnnnnnnnnnnnnnnnnnnnnnnnnnnnnnnnnnnnnnnnnnnnnnnnnnnnnnnnnnnnnnnnnnnnnnnnnnnnnnnnnnnnnnnnnnnnnnnnnnnnnnnnnnnnnnnnnnnnnnnnnnnnnnnnnnnnnnnnnnnnnnnnnnnnnnnnnnnnnnnnnnnnnnnnnnnnnnnnnnnnnnnnnnnnnnnnnnnnnnnnnnnnnnnnnnnnnnnnnnnnnnnnnnnnnnnnnnnnnnnnnnnnnnnnnnnnnnnnnnnnnnnnnnnnnnnnnnnnnnnnnnnnnnnnnnnnnnnnnnnnnnnnnnnnnnnnnnnnnnnnnnnnnnnnnnnnnnnnnnnnnnnnnnnnnnnnnnnnnnnnnnnnnnnnnnnnnnnnnnnnnnnnnnnnnnnnnnnnnnnnnnnnnnnnnnnnnnnnnnnnnnnnnnnnnnnnnnnnnnnnnnnnnnnnnnnnnnnnnnnnnnnnnnnnnnnnnnnnnnnnnnnnnnnnnnnnnnnnnnnnnnnnnnnnnnnnnnnnnnnnnnnnnnnnnnnnnnnnnnnnnnnnnnnnnnnnnnnnnnnnnnnnnnnnnnnnnnnnnnnnnnnnnnnnnnnnnnnnnnnnnnnnnnnnnnnnnnnnnnnnnnnnnnnnnnnnnnnnnnnnnnnnnnnnnnnnnnnnnnnnnnnnnnnnnnnnnnnnnnnnnnnnnnnnnnnnnnnnnnnnnnnnnnnnnnnnnnnnnnnnnnnnnnnnnnnnnnnnnnnnnnnnnnnnnnnnnnnnnnnnnnnnnnnnnnnnnnnnnnnnnnnnnnnnnnnnnnnnnnnnnnnnnnnnnnnnnnnnnnnnnnnnnnnnnnnnnnnnnnnnnnnnnnnnnnnnnnnnnnnnnnnnnnnnnnnnnnnnnnnnnnnnnnnnnnnnnnnnnnnnnnnnnnnnnnnnnnnnnnnnnnnnnnnnnnnnnnnnnnnnnnnnnnnnnnnnnnnnnnnnnnnnnnnnnnnnnnnnnnnnnnnnnnnnnnnnnnnnnnnnnnnnnnnnnnnnnnnnnnnnnnnnnnnnnnnnnnnnnnnnnnnnnnnnnnnnnnnnnnnnnnnnnnnnnnnnnnnnnnnnnnnnnnnnnnnnnnnnnnnnnnnnnnnnnnnnnnnnnnnnnnnnnnnnnnnnnnnnnnnnnnnnnnnnnnnnnnnnnnnnnnnnnnnnnnnnnnnnnnnnnnnnnnnnnnnnnnnnnnnnnnnnnnnnnnnnnnnnnnnnnnnnnnnnnnnnnnnnnnnnnnnnnnnnnnnnnnnnnnnnnnnnnnnnnnnnnnnnnnnnnnnnnnnnnnnnnnnnnnnnnnnnnnnnnnnnnnnnnnnnnnnnnnnnnnnnnnnnnnnnnnnnnnnnnnnnnnnnnnnnnnnnnnnnnnnnnnnnnnnnnnnnnnnnnnnnnnnnnnnnnnnnnnnnnnnnnnnnnnnnnnnnnnnnnnnnnnnnnnnnnnnnnnnnnnnnnnnnnnnnnnnnnnnnnnnnnnnnnnnnnnnnnnnnnnnnnnnnnnnnnnnnnnnnnnnnnnnnnnnnnnnnnnnnnnnnnnnnnnnnnnnnnnnnnnnnnnnnnnnnnnnnnnnnnnnnnnnnnnnnnnnnnnnnnnnnnnnnnnnnnnnnnnnnnnnnnnnnnnnnnnnnnnnnnnnnnnnnnnnnnnnnnnnnnnnnnnnnnnnnnnnnnnnnnnnnnnnnnnnnnnnnnnnnnnnnnnnnnnnnnnnnnnnnnnnnnnnnnnnnnnnnnnnnnnnnnnnnnnnnnnnnnnnnnnnnnnnnnnnnnnnnnnnnnnnnnnnnnnnnnnnnnnnnnnnnnnnnnnnnnnnnnnnnnnnnnnnnnnnnnnnnnnnnnnnnnnnnnnnnnnnnnnnnnnnnnnnnnnnnnnnnnnnnnnnnnnnnnnnnnnnnnnnnnnnnnnnnnnnnnnnnnnnnnnnnnnnnnnnnnnnnnnnnnnnnnnnnnnnnnnnnnnnnnnnnnnnnnnnnnnnnnnnnnnnnnnnnnnnnnnnnnnnnnnnnnnnnnnnnnnnnnnnnnnnnnnnnnnnnnnnnnnnnnnnnnnnnnnnnnnnnnnnnnnnnnnnnnnnnnnnnnnnnnnnnnnnnnnnnnnnnnnnnnnnnnnnnnnnnnnnnnnnnnnnnnnnnnnnnnnnnnnnnnnnnnnnnnnnnnnnnnnnnnnnnnnnnnnnnnnnnnnnnnnnnnnnnnnnnnnnnnnnnnnnnnnnnnnnnnnnnnnnnnnnnnnnnnnnnnnnnnnnnnnnnnnnnnnnnnnnnnnnnnnnnnnnnnnnnnnnnnnnnnnnnnnnnnnnnnnnnnnnnnnnnnnnnnnnnnnnnnnnnnnnnnnnnnnnnnnnnnnnnnnnnnnnnnnnnnnnnnnnnnnnnnnnnnnnnnnnnnnnnnnnnnnnnnnnnnnnnnnnnnnnnnnnnnnnnnnnnnnnnnnnnnnnnnnnnnnnnnnnnnnnnnnnnnnnnnnnnnnnnnnnnnnnnnnnnnnnnnnnnnnnnnnnnnnnnnnnnnnnnnnnnnnnnnnnnnnnnnnnnnnnnnnnnnnnnnnnnnnnnnnnnnnnnnnnnnnnnnnnnnnnnnnnnnnnnnnnnnnnnnnnnnnnnnnnnnnnnnnnnnnnnnnnnnnnnnnnnnnnnnnnnnnnnnnnnnnnnnnnnnnnnnnnnnnnnnnnnnnnnnnnnnnnnnnnnnnnnnnnnnnnnnnnnnnnnnnnnnnnnnnnnnnnnnnnnnnnnnnnnnnnnnnnnnnnnnnnnnnnnnnnnnnnnnnnnnnnnnnnnnnnnnnnnnnnnnnnnnnnnnnnnnnnnnnnnnnnnnnnnnnnnnnnnnnnnnnnnnnnnnnnnnnnnnnnnnnnnnnnnnnnnnnnnnnnnnnnnnnnnnnnnnnnnnnnnnnnnnnnnnnnnnnnnnnnnnnnnnnnnnnnnnnnnnnnnnnnnnnnnnnnnnnnnnnnnnnnnnnnnnnnnnnnnnnnnnnnnnnnnnnnnnnnnnnnnnnnnnnnnnnnnnnnnnnnnnnnnnnnnnnnnnnnnnnnnnnnnnnnnnnnnnnnnnnnnnnnnnnnnnnnnnnnnnnnnnnnnnnnnnnnnnnnnnnnnnnnnnnnnnnnnnnnnnnnnnnnnnnnnnnnnnnnnnnnnnnnnnnnnnnnnnnnnnnnnnnnnnnnnnnnnnnnnnnnnnnnnnnnnnnnnnnnnnnnnnnnnnnnnnnnnnnnnnnnnnnnnnnnnnnnnnnnnnnnnnnnnnnnnnnnnnnnnnnnnnnnnnnnnnnnnnnnnnnnnnnnnnnnnnnnnnnnnnnnnnnnnnnnnnnnnnnnnnnnnnnnnnnnnnnnnnnnnnnnnnnnnnnnnnnnnnnnnnnnnnnnnnnnnnnnnnnnnnnnnnnnnnnnnnnnnnnnnnnnnnnnnnnnnnnnnnnnnnnnnnnnnnnnnnnnnnnnnnnnnnnnnnnnnnnnnnnnnnnnnnnnnnnnnnnnnnnnnnnnnnnnnnnnnnnnnnnnnnnnnnnnnnnnnnnnnnnnnnnnnnnnnnnnnnnnnnnnnnnnnnnnnnnnnnnnnnnnnnnnnnnnnnnnnnnnnnnnnnnnnnnnnnnnnnnnnnnnnnnnnnnnnnnnnnnnnnnnnnnnnnnnnnnnnnnnnnnnnnnnnnnnnnnnnnnnnnnnnnnnnnnnnnnnnnnnnnnnnnnnnnnnnnnnnnnnnnnnnnnnnnnnnnnnnnnnnnnnnnnnnnnnnnnnnnnnnnnnnnnnnnnnnnnnnnnnnnnnnnnnnnnnnnnnnnnnnnnnnnnnnnnnnnnnnnnnnnnnnnnnnnnnnnnnnnnnnnnnnnnnnnnnnnnnnnnnnnnnnnnnnnnnnnnnnnnnnnnnnnnnnnnnnnnnnnnnnnnnnnnnnnnnnnnnnnnnnnnnnnnnnnnnnnnnnnnnnnnnnnnnnnnnnnnnnnnnnnnnnnnnnnnnnnnnnnnnnnnnnnnnnnnnnnnnnnnnnnnnnnnnnnnnnnnnnnnnnnnnnnnnnnnnnnnnnnnnnnnnnnnnnnnnnnnnnnnnnnnnnnnnnnnnnnnnnnnnnnnnnnnnnnnnnnnnnnnnnnnnnnnnnnnnnnnnnnnnnnnnnnnnnnnnnnnnnnnnnnnnnnnnnnnnnnnnnnnnnnnnnnnnnnnnnnnnnnnnnnnnnnnnnnnnnnnnnnnnnnnnnnnnnnnnnnnnnnnnnnnnnnnnnnnnnnnnnnnnnnnnnnnnnnnnnnnnnnnnnnnnnnnnnnnnnnnnnnnnnnnnnnnnnnnnnnnnnnnnnnnnnnnnnnnnnnnnnnnnnnnnnnnnnnnnnnnnnnnnnnnnnnnnnnnnnnnnnnnnnnnnnnnnnnnnnnnnnnnnnnnnnnnnnnnnnnnnnnnnnnnnnnnnnnnnnnnnnnnnnnnnnnnnnnnnnnnnnnnnnnnnnnnnnnnnnnnnnnnnnnnnnnnnnnnnnnnnnnnnnnnnnnnnnnnnnnnnnnnnnnnnnnnnnnnnnnnnnnnnnnnnnnnnnnnnnnnnnnnnnnnnnnnnnnnnnnnnnnnnnnnnnnnnnnnnnnnnnnnnnnnnnnnnnnnnnnnnnnnnnnnnnnnnnnnnnnnnnnnnnnnnnnnnnnnnnnnnnnnnnnnnnnnnnnnnnnnnnnnnnnnnnnnnnnnnnnnnnnnnnnnnnnnnnnnnnnnnnnnnnnnnnnnnnnnnnnnnnnnnnnnnnnnnnnnnnnnnnnnnnnnnnnnnnnnnnnnnnnnnnnnnnnnnnnnnnnnnnnnnnnnnnnnnnnnnnnnnnnnnnnnnnnnnnnnnnnnnnnnnnnnnnnnnnnnnnnnnnnnnnnnnnnnnnnnnnnnnnnnnnnnnnnnnnnnnnnnnnnnnnnnnnnnnnnnnnnnnnnnnnnnnnnnnnnnnnnnnnnnnnnnnnnnnnnnnnnnnnnnnnnnnnnnnnnnnnnnnnnnnnnnnnnnnnnnnnnnnnnnnnnnnnnnnnnnnnnnnnnnnnnnnnnnnnnnnnnnnnnnnnnnnnnnnnnnnnnnnnnnnnnnnnnnnnnnnnnnnnnnnnnnnnnnnnnnnnnnnnnnnnnnnnnnnnnnnnnnnnnnnnnnnnnnnnnnnnnnnnnnnnnnnnnnnnnnnnnnnnnnnnnnnnnnnnnnnnnnnnnnnnnnnnnnnnnnnnnnnnnnnnnnnnnnnnnnnnnnnnnnnnnnnnnnnnnnnnnnnnnnnnnnnnnnnnnnnnnnnnnnnnnnnnnnnnnnnnnnnnnnnnnnnnnnnnnnnnnnnnnnnnnnnnnnnnnnnnnnnnnnnnnnnnnnnnnnnnnnnnnnnnnnnnnnnnnnnnnnnnnnnnnnnnnnnnnnnnnnnnnnnnnnnnnnnnnnnnnnnnnnnnnnnnnnnnnnnnnnnnnnnnnnnnnnnnnnnnnnnnnnnnnnnnnnnnnnnnnnnnnnnnnnnnnnnnnnnnnnnnnnnnnnnnnnnnnnnnnnnnnnnnnnnnnnnnnnnnnnnnnnnnnnnnnnnnnnnnnnnnnnnnnnnnnnnnnnnnnnnnnnnnnnnnnnnnnnnnnnnnnnnnnnnnnnnnnnnnnnnnnnnnnnnnnnnnnnnnnnnnnnnnnnnnnnnnnnnnnnnnnnnnnnnnnnnnnnnnnnnnnnnnnnnnnnnnnnnnnnnnnnnnnnnnnnnnnnnnnnnnnnnnnnnnnnnnnnnnnnnnnnnnnnnnnnnnnnnnnnnnnnnnnnnnnnnnnnnnnnnnnnnnnnnnnnnnnnnnnnnnnnnnnnnnnnnnnnnnnnnnnnnnnnnnnnnnnnnnnnnnnnnnnnnnnnnnnnnnnnnnnnnnnnnnnnnnnnnnnnnnnnnnnnnnnnnnnnnnnnnnnnnnnnnnnnnnnnnnnnnnnnnnnnnnnnnnnnnnnnnnnnnnnnnnnnnnnnnnnnnnnnnnnnnnnnnnnnnnnnnnnnnnnnnnnnnnnnnnnnnnnnnnnnnnnnnnnnnnnnnnnnnnnnnnnnnnnnnnnnnnnnnnnnnnnnnnnnnnnnnnnnnnnnnnnnnnnnnnnnnnnnnnnnnnnnnnnnnnnnnnnnnnnnnnnnnnnnnnnnnnnnnnnnnnnnnnnnnnnnnnnnnnnnnnnnnnnnnnnnnnnnnnnnnnnnnnnnnnnnnnnnnnnnnnnnnnnnnnnnnnnnnnnnnnnnnnnnnnnnnnnnnnnnnnnnnnnnnnnnnnnnnnnnnnnnnnnnnnnnnnnnnnnnnnnnnnnnnnnnnnnnnnnnnnnnnnnnnnnnnnnnnnnnnnnnnnnnnnnnnnnnnnnnnnnnnnnnnnnnnnnnnnnnnnnnnnnnnnnnnnnnnnnnnnnnnnnnnnnnnnnnnnnnnnnnnnnnnnnnnnnnnnnnnnnnnnnnnnnnnnnnnnnnnnnnnnnnnnnnnnnnnnnnnnnnnnnnnnnnnnnnnnnnnnnnnnnnnnnnnnnnnnnnnnnnnnnnnnnnnnnnnnnnnnnnnnnnnnnnnnnnnnnnnnnnnnnnnnnnnnnnnnnnnnnnnnnnnnnnnnnnnnnnnnnnnnnnnnnnnnnnnnnnnnnnnnnnnnnnnnnnnnnnnnnnnnnnnnnnnnnnnnnnnnnnnnnnnnnnnnnnnnnnnnnnnnnnnnnnnnnnnnnnnnnnnnnnnnnnnnnnnnnnnnnnnnnnnnnnnnnnnnnnnnnnnnnnnnnnnnnnnnnnnnnnnnnnnnnnnnnnnnnnnnnnnnnnnnnnnnnnnnnnnnnnnnnnnnnnnnnnnnnnnnnnnnnnnnnnnnnnnnnnnnnnnnnnnnnnnnnnnnnnnnnnnnnnnnnnnnnnnnnnnnnnnnnnnnnnnnnnnnnnnnnnnnnnnnnnnnnnnnnnnnnnnnnnnnnnnnnnnnnnnnnnnnnnnnnnnnnnnnnnnnnnnnnnnnnnnnnnnnnnnnnnnnnnnnnnnnnnnnnnnnnnnnnnnnnnnnnnnnnnnnnnnnnnnnnnnnnnnnnnnnnnnnnnnnnnnnnnnnnnnnnnnnnnnnnnnnnnnnnnnnnnnnnnnnnnnnnnnnnnnnnnnnnnnnnnnnnnnnnnnnnnnnnnnnnnnnnnnnnnnnnnnnnnnnnnnnnnnnnnnn

SEQ ID NO: 167804 - RNA, 895 nt, Homo sapiens
  source 1..895: mol_type = mRNA
gcgtcgtagtctcctgcagcgtctggggtttccgttgcagtcctcggaaccaggacctcggcgtggcctagcgagttatggcgacgaaggccgtgtgcgtgctgaagggcgacggcccagtgcagggcatcatcaatttcgagcagaaggaaagtaatggaccagtgaaggtgtggggaagcattaaaggactgactgaaggcctgcatggattccatgttcatgagtttggagataatacagcaggctgtaccagtgcaggtcctcactttaatcctctatccagaaaacacggtgggccaaaggatgaagagaggcatgttggagacttgggcaatgtgactgctgacaaagatggtgtggccgatgtgtctattgaagattctgtgatctcactctcaggagaccattgcatcattggccgcacactggtggtccatgaaaaagcagatgacttgggcaaaggtggaaatgaagaaagtacaaagacaggaaacgctggaagtcgtttggcttgtggtgtaattgggatcgcccaataaacattcccttggatgtagtctgaggccccttaactcatctgttatcctgctagctgtagaaatgtatcctgataaacattaaacactgtaatcttaaaagtgtaattgtgtgactttttcagagttgctttaaagtacctgtagtgagaaactgatttatgatcacttggaagatttgtatagttttataaaactcagttaaaatgtctgtttcaatgacctgtattttgccagacttaaatcacagatgggtattaaacttgtcagaatttctttgtcattcaagcctgtgaataaaaaccctgtatggcacttattatgaggctattaaaagaatccaaattcaaactaaa

SEQ ID NO: 167805 - DNA, 20 bp, synthetic construct
  source 1..20: mol_type = other DNA
tggtgggtggcggtgactgc

SEQ ID NO: 167806 - DNA, 20 bp, synthetic construct
  source 1..20: mol_type = other DNA
ctggtgggtggcggtgactg

SEQ ID NO: 167807 - DNA, 20 bp, synthetic construct
  source 1..20: mol_type = other DNA
gctggtgggtggcggtgact

SEQ ID NO: 167808 - DNA, 20 bp, synthetic construct
  source 1..20: mol_type = other DNA
agctggtgggtggcggtgac

SEQ ID NO: 167809 - DNA, 20 bp, synthetic construct
  source 1..20: mol_type = other DNA
gagctggtgggtggcggtga

SEQ ID NO: 167810 - DNA, 20 bp, synthetic construct
  source 1..20: mol_type = other DNA
ggagctggtgggtggcggtg

SEQ ID NO: 167811 - DNA, 20 bp, synthetic construct
  source 1..20: mol_type = other DNA
cggagctggtgggtggcggt

SEQ ID NO: 167812 - DNA, 20 bp, synthetic construct
  source 1..20: mol_type = other DNA
ccggagctggtgggtggcgg

SEQ ID NO: 167813 - DNA, 20 bp, synthetic construct
  source 1..20: mol_type = other DNA
gccggagctggtgggtggcg

SEQ ID NO: 167814 - DNA, 20 bp, synthetic construct
  source 1..20: mol_type = other DNA
tgccggagctggtgggtggc

SEQ ID NO: 167815 - DNA, 20 bp, synthetic construct
  source 1..20: mol_type = other DNA
gtgccggagctggtgggtgg

SEQ ID NO: 167816 - DNA, 20 bp, synthetic construct
  source 1..20: mol_type = other DNA
ggtgccggagctggtgggtg

SEQ ID NO: 167817 - DNA, 20 bp, synthetic construct
  source 1..20: mol_type = other DNA
tggtgccggagctggtgggt

SEQ ID NO: 167818 - DNA, 20 bp, synthetic construct
  source 1..20: mol_type = other DNA
ttggtgccggagctggtggg

SEQ ID NO: 167819 - DNA, 20 bp, synthetic construct
  source 1..20: mol_type = other DNA
gttggtgccggagctggtgg

SEQ ID NO: 167820 - DNA, 20 bp, synthetic construct
  source 1..20: mol_type = other DNA
tgttggtgccggagctggtg

SEQ ID NO: 167821 - DNA, 20 bp, synthetic construct
  source 1..20: mol_type = other DNA
ctgttggtgccggagctggt

SEQ ID NO: 167822 - DNA, 20 bp, synthetic construct
  source 1..20: mol_type = other DNA
gctgttggtgccggagctgg

SEQ ID NO: 167823 - DNA, 20 bp, synthetic construct
  source 1..20: mol_type = other DNA
tgctgttggtgccggagctg

SEQ ID NO: 167824 - DNA, 20 bp, synthetic construct
  source 1..20: mol_type = other DNA
ctgctgttggtgccggagct

SEQ ID NO: 167825 - DNA, 20 bp, synthetic construct
  source 1..20: mol_type = other DNA
gctgctgttggtgccggagc

SEQ ID NO: 167826 - DNA, 20 bp, synthetic construct
  source 1..20: mol_type = other DNA
cgctgctgttggtgccggag

SEQ ID NO: 167827 - DNA, 20 bp, synthetic construct
  source 1..20: mol_type = other DNA
gcgctgctgttggtgccgga

SEQ ID NO: 167828 - DNA, 20 bp, synthetic construct
  source 1..20: mol_type = other DNA
ggcgctgctgttggtgccgg

SEQ ID NO: 167829 - DNA, 20 bp, synthetic construct
  source 1..20: mol_type = other DNA
cggcgctgctgttggtgccg

SEQ ID NO: 167830 - DNA, 20 bp, synthetic construct
  source 1..20: mol_type = other DNA
gcggcgctgctgttggtgcc

SEQ ID NO: 167831 - DNA, 20 bp, synthetic construct
  source 1..20: mol_type = other DNA
agcggcgctgctgttggtgc

SEQ ID NO: 167832 - DNA, 20 bp, synthetic construct
  source 1..20: mol_type = other DNA
cagcggcgctgctgttggtg

SEQ ID NO: 167833 - DNA, 20 bp, synthetic construct
  source 1..20: mol_type = other DNA
gcagcggcgctgctgttggt

SEQ ID NO: 167834 - DNA, 20 bp, synthetic construct
  source 1..20: mol_type = other DNA
ggcagcggcgctgctgttgg

SEQ ID NO: 167835 - DNA, 20 bp, synthetic construct
  source 1..20: mol_type = other DNA
tggcagcggcgctgctgttg

SEQ ID NO: 167836 - DNA, 20 bp, synthetic construct
  source 1..20: mol_type = other DNA
gtggcagcggcgctgctgtt

SEQ ID NO: 167837 - DNA, 20 bp, synthetic construct
  source 1..20: mol_type = other DNA
ggtggcagcggcgctgctgt

SEQ ID NO: 167838 - DNA, 20 bp, synthetic construct
  source 1..20: mol_type = other DNA
cggtggcagcggcgctgctg

SEQ ID NO: 167839 - DNA, 20 bp, synthetic construct
  source 1..20: mol_type = other DNA
gcggtggcagcggcgctgct

SEQ ID NO: 167840 - DNA, 20 bp, synthetic construct
  source 1..20: mol_type = other DNA
ggcggtggcagcggcgctgc

SEQ ID NO: 167841 - DNA, 20 bp, synthetic construct
  source 1..20: mol_type = other DNA
gggcggtggcagcggcgctg

SEQ ID NO: 167842 - DNA, 20 bp, synthetic construct
  source 1..20: mol_type = other DNA
tgggcggtggcagcggcgct

SEQ ID NO: 167843 - DNA, 20 bp, synthetic construct
  source 1..20: mol_type = other DNA
gtgggcggtggcagcggcgc

SEQ ID NO: 167844 - DNA, 20 bp, synthetic construct
  source 1..20: mol_type = other DNA
ggtgggcggtggcagcggcg

SEQ ID NO: 167845 - DNA, 20 bp, synthetic construct
  source 1..20: mol_type = other DNA
aggtgggcggtggcagcggc

SEQ ID NO: 167846 - DNA, 20 bp, synthetic construct
  source 1..20: mol_type = other DNA
aaggtgggcggtggcagcgg

SEQ ID NO: 167847 - DNA, 20 bp, synthetic construct
  source 1..20: mol_type = other DNA
gaaggtgggcggtggcagcg

SEQ ID NO: 167848 - DNA, 20 bp, synthetic construct
  source 1..20: mol_type = other DNA
agaaggtgggcggtggcagc

SEQ ID NO: 167849 - DNA, 20 bp, synthetic construct
  source 1..20: mol_type = other DNA
cagaaggtgggcggtggcag

SEQ ID NO: 167850 - DNA, 20 bp, synthetic construct
  source 1..20: mol_type = other DNA
gcagaaggtgggcggtggca

SEQ ID NO: 167851 - DNA, 20 bp, synthetic construct
  source 1..20: mol_type = other DNA
ggcagaaggtgggcggtggc

SEQ ID NO: 167852 - DNA, 20 bp, synthetic construct
  source 1..20: mol_type = other DNA
cggcagaaggtgggcggtgg

SEQ ID NO: 167853 - DNA, 20 bp, synthetic construct
  source 1..20: mol_type = other DNA
gcggcagaaggtgggcggtg

SEQ ID NO: 167854 - DNA, 20 bp, synthetic construct
  source 1..20: mol_type = other DNA
ggcggcagaaggtgggcggt

SEQ ID NO: 167855 - DNA, 20 bp, synthetic construct
  source 1..20: mol_type = other DNA
cggcggcagaaggtgggcgg

SEQ ID NO: 167856 - DNA, 20 bp, synthetic construct
  source 1..20: mol_type = other DNA
gcggcggcagaaggtgggcg

SEQ ID NO: 167857 - DNA, 20 bp, synthetic construct
  source 1..20: mol_type = other DNA
ggcggcggcagaaggtgggc

SEQ ID NO: 167858 - DNA, 20 bp, synthetic construct
  source 1..20: mol_type = other DNA
tggcggcggcagaaggtggg

SEQ ID NO: 167859 - DNA, 20 bp, synthetic construct
  source 1..20: mol_type = other DNA
gtggcggcggcagaaggtgg

SEQ ID NO: 167860 - DNA, 20 bp, synthetic construct
  source 1..20: mol_type = other DNA
ggtggcggcggcagaaggtg

SEQ ID NO: 167861 - DNA, 20 bp, synthetic construct
  source 1..20: mol_type = other DNA
tggtggcggcggcagaaggt

SEQ ID NO: 167862 - DNA, 20 bp, synthetic construct
  source 1..20: mol_type = other DNA
gtggtggcggcggcagaagg

SEQ ID NO: 167863 - DNA, 20 bp, synthetic construct
  source 1..20: mol_type = other DNA
tgtggtggcggcggcagaag

SEQ ID NO: 167864 - DNA, 20 bp, synthetic construct
  source 1..20: mol_type = other DNA
ctgtggtggcggcggcagaa

SEQ ID NO: 167865 - DNA, 20 bp, synthetic construct
  source 1..20: mol_type = other DNA
gctgtggtggcggcggcaga

SEQ ID NO: 167866 - DNA, 20 bp, synthetic construct
  source 1..20: mol_type = other DNA
ggctgtggtggcggcggcag

SEQ ID NO: 167867 - DNA, 20 bp, synthetic construct
  source 1..20: mol_type = other DNA
tggctgtggtggcggcggca

SEQ ID NO: 167868 - DNA, 20 bp, synthetic construct
  source 1..20: mol_type = other DNA
gtggctgtggtggcggcggc

SEQ ID NO: 167869 - DNA, 20 bp, synthetic construct
  source 1..20: mol_type = other DNA
ggtggctgtggtggcggcgg

SEQ ID NO: 167870 - DNA, 20 bp, synthetic construct
  source 1..20: mol_type = other DNA
aggtggctgtggtggcggcg

SEQ ID NO: 167871 - DNA, 20 bp, synthetic construct
  source 1..20: mol_type = other DNA
aaggtggctgtggtggcggc

SEQ ID NO: 167872 - DNA, 20 bp, synthetic construct
  source 1..20: mol_type = other DNA
gaaggtggctgtggtggcgg

SEQ ID NO: 167873 - DNA, 20 bp, synthetic construct
  source 1..20: mol_type = other DNA
agaaggtggctgtggtggcg

SEQ ID NO: 167874 - DNA, 20 bp, synthetic construct
  source 1..20: mol_type = other DNA
gagaaggtggctgtggtggc

SEQ ID NO: 167875 - DNA, 20 bp, synthetic construct
  source 1..20: mol_type = other DNA
ggagaaggtggctgtggtgg

SEQ ID NO: 167876 - DNA, 20 bp, synthetic construct
  source 1..20: mol_type = other DNA
aggagaaggtggctgtggtg

SEQ ID NO: 167877 - DNA, 20 bp, synthetic construct
  source 1..20: mol_type = other DNA
gaggagaaggtggctgtggt

SEQ ID NO: 167878 - DNA, 20 bp, synthetic construct
  source 1..20: mol_type = other DNA
ggaggagaaggtggctgtgg

SEQ ID NO: 167879 - DNA, 20 bp, synthetic construct
  source 1..20: mol_type = other DNA
aggaggagaaggtggctgtg

SEQ ID NO: 167880 - DNA, 20 bp, synthetic construct
  source 1..20: mol_type = other DNA
gaggaggagaaggtggctgt

SEQ ID NO: 167881 - DNA, 20 bp, synthetic construct
  source 1..20: mol_type = other DNA
ggaggaggagaaggtggctg

SEQ ID NO: 167882 - DNA, 20 bp, synthetic construct
  source 1..20: mol_type = other DNA
cggaggaggagaaggtggct

SEQ ID NO: 167883 - DNA, 20 bp, synthetic construct
  source 1..20: mol_type = other DNA
gcggaggaggagaaggtggc

SEQ ID NO: 167884 - DNA, 20 bp, synthetic construct
  source 1..20: mol_type = other DNA
agcggaggaggagaaggtgg

SEQ ID NO: 167885 - DNA, 20 bp, synthetic construct
  source 1..20: mol_type = other DNA
cagcggaggaggagaaggtg

SEQ ID NO: 167886 - DNA, 20 bp, synthetic construct
  source 1..20: mol_type = other DNA
acagcggaggaggagaaggt

SEQ ID NO: 167887 - DNA, 20 bp, synthetic construct
  source 1..20: mol_type = other DNA
gacagcggaggaggagaagg

SEQ ID NO: 167888 - DNA, 20 bp, synthetic construct
  source 1..20: mol_type = other DNA
ggacagcggaggaggagaag

SEQ ID NO: 167889 - DNA, 20 bp, synthetic construct
  source 1..20: mol_type = other DNA
aggacagcggaggaggagaa

SEQ ID NO: 167890 - DNA, 20 bp, synthetic construct
  source 1..20: mol_type = other DNA
gaggacagcggaggaggaga

SEQ ID NO: 167891 - DNA, 20 bp, synthetic construct
  source 1..20: mol_type = other DNA
agaggacagcggaggaggag

SEQ ID NO: 167892 - DNA, 20 bp, synthetic construct
  source 1..20: mol_type = other DNA
gagaggacagcggaggagga

SEQ ID NO: 167893 - DNA, 20 bp, synthetic construct
  source 1..20: mol_type = other DNA
ggagaggacagcggaggagg

SEQ ID NO: 167894 - DNA, 20 bp, synthetic construct
  source 1..20: mol_type = other DNA
gggagaggacagcggaggag

SEQ ID NO: 167895 - DNA, 20 bp, synthetic construct
  source 1..20: mol_type = other DNA
cgggagaggacagcggagga

SEQ ID NO: 167896 - DNA, 20 bp, synthetic construct
  source 1..20: mol_type = other DNA
acgggagaggacagcggagg

SEQ ID NO: 167897 - DNA, 20 bp, synthetic construct
  source 1..20: mol_type = other DNA
gacgggagaggacagcggag

SEQ ID NO: 167898 - DNA, 20 bp, synthetic construct
  source 1..20: mol_type = other DNA
ggacgggagaggacagcgga

SEQ ID NO: 167899 - DNA, 20 bp, synthetic construct
  source 1..20: mol_type = other DNA
aggacgggagaggacagcgg

SEQ ID NO: 167900 - DNA, 20 bp, synthetic construct
  source 1..20: mol_type = other DNA
gaggacgggagaggacagcg

SEQ ID NO: 167901 - DNA, 20 bp, synthetic construct
  source 1..20: mol_type = other DNA
cgaggacgggagaggacagc

SEQ ID NO: 167902 - DNA, 20 bp, synthetic construct
  source 1..20: mol_type = other DNA
gcgaggacgggagaggacag

SEQ ID NO: 167903 - DNA, 20 bp, synthetic construct
  source 1..20: mol_type = other DNA
ggcgaggacgggagaggaca

SEQ ID NO: 167904 - DNA, 20 bp, synthetic construct
  source 1..20: mol_type = other DNA
aggcgaggacgggagaggac

SEQ ID NO: 167905 - DNA, 20 bp, synthetic construct
  source 1..20: mol_type = other DNA
gaggcgaggacgggagagga

SEQ ID NO: 167906 - DNA, 20 bp, synthetic construct
  source 1..20: mol_type = other DNA
agaggcgaggacgggagagg

SEQ ID NO: 167907 - DNA, 20 bp, synthetic construct
  source 1..20: mol_type = other DNA
cagaggcgaggacgggagag

SEQ ID NO: 167908 - DNA, 20 bp, synthetic construct
  source 1..20: mol_type = other DNA
acagaggcgaggacgggaga

SEQ ID NO: 167909 - DNA, 20 bp, synthetic construct
  source 1..20: mol_type = other DNA
gacagaggcgaggacgggag

SEQ ID NO: 167910 - DNA, 20 bp, synthetic construct
  source 1..20: mol_type = other DNA
cgacagaggcgaggacggga

SEQ ID NO: 167911 - DNA, 20 bp, synthetic construct
  source 1..20: mol_type = other DNA
tcgacagaggcgaggacggg

SEQ ID NO: 167912 - DNA, 20 bp, synthetic construct
  source 1..20: mol_type = other DNA
gtcgacagaggcgaggacgg

SEQ ID NO: 167913 - DNA, 20 bp, synthetic construct
  source 1..20: mol_type = other DNA
agtcgacagaggcgaggacg

SEQ ID NO: 167914 - DNA, 20 bp, synthetic construct
  source 1..20: mol_type = other DNA
tagtcgacagaggcgaggac

SEQ ID NO: 167915 - DNA, 20 bp, synthetic construct
  source 1..20: mol_type = other DNA
atagtcgacagaggcgagga

SEQ ID NO: 167916 - DNA, 20 bp, synthetic construct
  source 1..20: mol_type = other DNA
gatagtcgacagaggcgagg

SEQ ID NO: 167917 - DNA, 20 bp, synthetic construct
  source 1..20: mol_type = other DNA
tgatagtcgacagaggcgag

SEQ ID NO: 167918 - DNA, 20 bp, synthetic construct
  source 1..20: mol_type = other DNA
ctgatagtcgacagaggcga

SEQ ID NO: 167919 - DNA, 20 bp, synthetic construct
  source 1..20: mol_type = other DNA
cctgatagtcgacagaggcg

SEQ ID NO: 167920 - DNA, 20 bp, synthetic construct
  source 1..20: mol_type = other DNA
acctgatagtcgacagaggc

SEQ ID NO: 167921 - DNA, 20 bp, synthetic construct
  source 1..20: mol_type = other DNA
tacctgatagtcgacagagg

SEQ ID NO: 167922 - DNA, 20 bp, synthetic construct
  source 1..20: mol_type = other DNA
ttacctgatagtcgacagag

SEQ ID NO: 167923 - DNA, 20 bp, synthetic construct
  source 1..20: mol_type = other DNA
cttacctgatagtcgacaga

SEQ ID NO: 167924 - DNA, 20 bp, synthetic construct
  source 1..20: mol_type = other DNA
gcttacctgatagtcgacag

SEQ ID NO: 167925 - DNA, 20 bp, synthetic construct
  source 1..20: mol_type = other DNA
cgcttacctgatagtcgaca

SEQ ID NO: 167926 - DNA, 20 bp, synthetic construct
  source 1..20: mol_type = other DNA
gcgcttacctgatagtcgac

SEQ ID NO: 167927 - DNA, 20 bp, synthetic construct
  source 1..20: mol_type = other DNA
ggcgcttacctgatagtcga

SEQ ID NO: 167928 - DNA, 20 bp, synthetic construct
  source 1..20: mol_type = other DNA
cggcgcttacctgatagtcg

SEQ ID NO: 167929 - DNA, 20 bp, synthetic construct
  source 1..20: mol_type = other DNA
gcggcgcttacctgatagtc

SEQ ID NO: 167930 - DNA, 20 bp, synthetic construct
  source 1..20: mol_type = other DNA
cgcggcgcttacctgatagt

SEQ ID NO: 167931 - DNA, 20 bp, synthetic construct
  source 1..20: mol_type = other DNA
ccgcggcgcttacctgatag

SEQ ID NO: 167932 - DNA, 20 bp, synthetic construct
  source 1..20: mol_type = other DNA
gccgcggcgcttacctgata

SEQ ID NO: 167933 - DNA, 20 bp, synthetic construct
  source 1..20: mol_type = other DNA
agccgcggcgcttacctgat

SEQ ID NO: 167934 - DNA, 20 bp, synthetic construct
  source 1..20: mol_type = other DNA
gagccgcggcgcttacctga

SEQ ID NO: 167935 - DNA, 20 bp, synthetic construct
  source 1..20: mol_type = other DNA
ggagccgcggcgcttacctg

SEQ ID NO: 167936 - DNA, 20 bp, synthetic construct
  source 1..20: mol_type = other DNA
cggagccgcggcgcttacct

SEQ ID NO: 167937 - DNA, 20 bp, synthetic construct
  source 1..20: mol_type = other DNA
tcggagccgcggcgcttacc

SEQ ID NO: 167938 - DNA, 20 bp, synthetic construct
  source 1..20: mol_type = other DNA
ttcggagccgcggcgcttac

SEQ ID NO: 167939 - DNA, 20 bp, synthetic construct
  source 1..20: mol_type = other DNA
tttcggagccgcggcgctta

SEQ ID NO: 167940 - DNA, 20 bp, synthetic construct
  source 1..20: mol_type = other DNA
atttcggagccgcggcgctt

SEQ ID NO: 167941 - DNA, 20 bp, synthetic construct
  source 1..20: mol_type = other DNA
gatttcggagccgcggcgct

SEQ ID NO: 167942 - DNA, 20 bp, synthetic construct
  source 1..20: mol_type = other DNA
agatttcggagccgcggcgc

SEQ ID NO: 167943 - DNA, 20 bp, synthetic construct
  source 1..20: mol_type = other DNA
cagatttcggagccgcggcg

SEQ ID NO: 167944 - DNA, 20 bp, synthetic construct
  source 1..20: mol_type = other DNA
gcagatttcggagccgcggc

SEQ ID NO: 167945 - DNA, 20 bp, synthetic construct
  source 1..20: mol_type = other DNA
ggcagatttcggagccgcgg

SEQ ID NO: 167946 - DNA, 20 bp, synthetic construct
  source 1..20: mol_type = other DNA
aggcagatttcggagccgcg

SEQ ID NO: 167947 - DNA, 20 bp, synthetic construct
  source 1..20: mol_type = other DNA
gaggcagatttcggagccgc

SEQ ID NO: 167948 - DNA, 20 bp, synthetic construct
  source 1..20: mol_type = other DNA
cgaggcagatttcggagccg

SEQ ID NO: 167949 - DNA, 20 bp, synthetic construct
  source 1..20: mol_type = other DNA
gcgaggcagatttcggagcc

SEQ ID NO: 167950 - DNA, 20 bp, synthetic construct
  source 1..20: mol_type = other DNA
ggcgaggcagatttcggagc

SEQ ID NO: 167951 - DNA, 20 bp, synthetic construct
  source 1..20: mol_type = other DNA
cggcgaggcagatttcggag

SEQ ID NO: 167952 - DNA, 20 bp, synthetic construct
  source 1..20: mol_type = other DNA
acggcgaggcagatttcgga

SEQ ID NO: 167953 - DNA, 20 bp, synthetic construct
  source 1..20: mol_type = other DNA
gacggcgaggcagatttcgg

SEQ ID NO: 167954 - DNA, 20 bp, synthetic construct
  source 1..20: mol_type = other DNA
ggacggcgaggcagatttcg

SEQ ID NO: 167955 - DNA, 20 bp, synthetic construct
  source 1..20: mol_type = other DNA
cggacggcgaggcagatttc

SEQ ID NO: 167956 - DNA, 20 bp, synthetic construct
  source 1..20: mol_type = other DNA
gcggacggcgaggcagattt

SEQ ID NO: 167957 - DNA, 20 bp, synthetic construct
  source 1..20: mol_type = other DNA
ggcggacggcgaggcagatt

SEQ ID NO: 167958 - DNA, 20 bp, synthetic construct
  source 1..20: mol_type = other DNA
aggcggacggcgaggcagat

SEQ ID NO: 167959 - DNA, 20 bp, synthetic construct
  source 1..20: mol_type = other DNA
gaggcggacggcgaggcaga

SEQ ID NO: 167960 - DNA, 20 bp, synthetic construct
  source 1..20: mol_type = other DNA
agaggcggacggcgaggcag

SEQ ID NO: 167961 - DNA, 20 bp, synthetic construct
  source 1..20: mol_type = other DNA
cagaggcggacggcgaggca

SEQ ID NO: 167962 - DNA, 20 bp, synthetic construct
  source 1..20: mol_type = other DNA
acagaggcggacggcgaggc

SEQ ID NO: 167963 - DNA, 20 bp, synthetic construct
  source 1..20: mol_type = other DNA
cacagaggcggacggcgagg

SEQ ID NO: 167964 - DNA, 20 bp, synthetic construct
  source 1..20: mol_type = other DNA
gcacagaggcggacggcgag

SEQ ID NO: 167965 - DNA, 20 bp, synthetic construct
  source 1..20: mol_type = other DNA
tgcacagaggcggacggcga

SEQ ID NO: 167966 - DNA, 20 bp, synthetic construct
  source 1..20: mol_type = other DNA
gtgcacagaggcggacggcg

SEQ ID NO: 167967 - DNA, 20 bp, synthetic construct
  source 1..20: mol_type = other DNA
ggtgcacagaggcggacggc

SEQ ID NO: 167968 - DNA, 20 bp, synthetic construct
  source 1..20: mol_type = other DNA
gggtgcacagaggcggacgg

SEQ ID NO: 167969 - DNA, 20 bp, synthetic construct
  source 1..20: mol_type = other DNA
ggggtgcacagaggcggacg

SEQ ID NO: 167970 - DNA, 20 bp, synthetic construct
  source 1..20: mol_type = other DNA
aggggtgcacagaggcggac

SEQ ID NO: 167971 - DNA, 20 bp, synthetic construct
  source 1..20: mol_type = other DNA
caggggtgcacagaggcgga

SEQ ID NO: 167972 - DNA, 20 bp, synthetic construct
  source 1..20: mol_type = other DNA
gcaggggtgcacagaggcgg

SEQ ID NO: 167973 - DNA, 20 bp, synthetic construct
  source 1..20: mol_type = other DNA
cgcaggggtgcacagaggcg

SEQ ID NO: 167974 - DNA, 20 bp, synthetic construct
  source 1..20: mol_type = other DNA
gcgcaggggtgcacagaggc

SEQ ID NO: 167975 - DNA, 20 bp, synthetic construct
  source 1..20: mol_type = other DNA
ggcgcaggggtgcacagagg

SEQ ID NO: 167976 - DNA, 20 bp, synthetic construct
  source 1..20: mol_type = other DNA
cggcgcaggggtgcacagag

SEQ ID NO: 167977 - DNA, 20 bp, synthetic construct
  source 1..20: mol_type = other DNA
gcggcgcaggggtgcacaga

SEQ ID NO: 167978 - DNA, 20 bp, synthetic construct
  source 1..20: mol_type = other DNA
ggcggcgcaggggtgcacag

SEQ ID NO: 167979 - DNA, 20 bp, synthetic construct
  source 1..20: mol_type = other DNA
cggcggcgcaggggtgcaca

SEQ ID NO: 167980 - DNA, 20 bp, synthetic construct
  source 1..20: mol_type = other DNA
gcggcggcgcaggggtgcac

SEQ ID NO: 167981 - DNA, 20 bp, synthetic construct
  source 1..20: mol_type = other DNA
ggcggcggcgcaggggtgca

SEQ ID NO: 167982 - DNA, 20 bp, synthetic construct
  source 1..20: mol_type = other DNA
gggcggcggcgcaggggtgc

SEQ ID NO: 167983 - DNA, 20 bp, synthetic construct
  source 1..20: mol_type = other DNA
ggggcggcggcgcaggggtg

SEQ ID NO: 167984 - DNA, 20 bp, synthetic construct
  source 1..20: mol_type = other DNA
aggggcggcggcgcaggggt

SEQ ID NO: 167985 - DNA, 20 bp, synthetic construct
  source 1..20: mol_type = other DNA
gaggggcggcggcgcagggg

SEQ ID NO: 167986 - DNA, 20 bp, synthetic construct
  source 1..20: mol_type = other DNA
cgaggggcggcggcgcaggg

SEQ ID NO: 167987 - DNA, 20 bp, synthetic construct
  source 1..20: mol_type = other DNA
gcgaggggcggcggcgcagg

SEQ ID NO: 167988 - DNA, 20 bp, synthetic construct
  source 1..20: mol_type = other DNA
ggcgaggggcggcggcgcag

SEQ ID NO: 167989 - DNA, 20 bp, synthetic construct
  source 1..20: mol_type = other DNA
gggcgaggggcggcggcgca

SEQ ID NO: 167990 - DNA, 20 bp, synthetic construct
  source 1..20: mol_type = other DNA
agggcgaggggcggcggcgc

SEQ ID NO: 167991 - DNA, 20 bp, synthetic construct
  source 1..20: mol_type = other DNA
gagggcgaggggcggcggcg

SEQ ID NO: 167992 - DNA, 20 bp, synthetic construct
  source 1..20: mol_type = other DNA
ggagggcgaggggcggcggc

SEQ ID NO: 167993 - DNA, 20 bp, synthetic construct
  source 1..20: mol_type = other DNA
gggagggcgaggggcggcgg

SEQ ID NO: 167994 - DNA, 20 bp, synthetic construct
  source 1..20: mol_type = other DNA
agggagggcgaggggcggcg

SEQ ID NO: 167995 - DNA, 20 bp, synthetic construct
  source 1..20: mol_type = other DNA
gagggagggcgaggggcggc

SEQ ID NO: 167996 - DNA, 20 bp, synthetic construct
  source 1..20: mol_type = other DNA
agagggagggcgaggggcgg

SEQ ID NO: 167997 - DNA, 20 bp, synthetic construct
  source 1..20: mol_type = other DNA
gagagggagggcgaggggcg

SEQ ID NO: 167998 - DNA, 20 bp, synthetic construct
  source 1..20: mol_type = other DNA
ggagagggagggcgaggggc

SEQ ID NO: 167999 - DNA, 20 bp, synthetic construct
  source 1..20: mol_type = other DNA
cggagagggagggcgagggg

SEQ ID NO: 168000 - DNA, 20 bp, synthetic construct
  source 1..20: mol_type = other DNA
gcggagagggagggcgaggg

SEQ ID NO: 168001 - DNA, 20 bp, synthetic construct
  source 1..20: mol_type = other DNA
tgcggagagggagggcgagg

SEQ ID NO: 168002 - DNA, 20 bp, synthetic construct
  source 1..20: mol_type = other DNA
ctgcggagagggagggcgag

SEQ ID NO: 168003 - DNA, 20 bp, synthetic construct
  source 1..20: mol_type = other DNA
tctgcggagagggagggcga

SEQ ID NO: 168004 - DNA, 20 bp, synthetic construct
  source 1..20: mol_type = other DNA
gtctgcggagagggagggcg

SEQ ID NO: 168005 - DNA, 20 bp, synthetic construct
  source 1..20: mol_type = other DNA
agtctgcggagagggagggc

SEQ ID NO: 168006 - DNA, 20 bp, synthetic construct
  source 1..20: mol_type = other DNA
cagtctgcggagagggaggg

SEQ ID NO: 168007 - DNA, 20 bp, synthetic construct
  source 1..20: mol_type = other DNA
ccagtctgcggagagggagg

SEQ ID NO: 168008 - DNA, 20 bp, synthetic construct
  source 1..20: mol_type = other DNA
cccagtctgcggagagggag

SEQ ID NO: 168009 - DNA, 20 bp, synthetic construct
  source 1..20: mol_type = other DNA
ccccagtctgcggagaggga

SEQ ID NO: 168010 - DNA, 20 bp, synthetic construct
  source 1..20: mol_type = other DNA
gccccagtctgcggagaggg

SEQ ID NO: 168011 - DNA, 20 bp, synthetic construct
  source 1..20: mol_type = other DNA
agccccagtctgcggagagg

SEQ ID NO: 168012 - DNA, 20 bp, synthetic construct
  source 1..20: mol_type = other DNA
aagccccagtctgcggagag

SEQ ID NO: 168013 - DNA, 20 bp, synthetic construct
  source 1..20: mol_type = other DNA
gaagccccagtctgcggaga

SEQ ID NO: 168014 - DNA, 20 bp, synthetic construct
  source 1..20: mol_type = other DNA
cgaagccccagtctgcggag

SEQ ID NO: 168015 - DNA, 20 bp, synthetic construct
  source 1..20: mol_type = other DNA
acgaagccccagtctgcgga

SEQ ID NO: 168016 - DNA, 20 bp, synthetic construct
  source 1..20: mol_type = other DNA
cacgaagccccagtctgcgg

SEQ ID NO: 168017 - DNA, 20 bp, synthetic construct
  source 1..20: mol_type = other DNA
gcacgaagccccagtctgcg

SEQ ID NO: 168018 - DNA, 20 bp, synthetic construct
  source 1..20: mol_type = other DNA
cgcacgaagccccagtctgc

SEQ ID NO: 168019 - DNA, 20 bp, synthetic construct
  source 1..20: mol_type = other DNA
gcgcacgaagccccagtctg

SEQ ID NO: 168020 - DNA, 20 bp, synthetic construct
  source 1..20: mol_type = other DNA
ggcgcacgaagccccagtct

SEQ ID NO: 168021 - DNA, 20 bp, synthetic construct
  source 1..20: mol_type = other DNA
cggcgcacgaagccccagtc

SEQ ID NO: 168022 - DNA, 20 bp, synthetic construct
  source 1..20: mol_type = other DNA
ccggcgcacgaagccccagt

SEQ ID NO: 168023 - DNA, 20 bp, synthetic construct
  source 1..20: mol_type = other DNA
cccggcgcacgaagccccag

SEQ ID NO: 168024 - DNA, 20 bp, synthetic construct
  source 1..20: mol_type = other DNA
gcccggcgcacgaagcccca

SEQ ID NO: 168025 - DNA, 20 bp, synthetic construct
  source 1..20: mol_type = other DNA
tgcccggcgcacgaagcccc

SEQ ID NO: 168026 - DNA, 20 bp, synthetic construct
  source 1..20: mol_type = other DNA
atgcccggcgcacgaagccc

SEQ ID NO: 168027 - DNA, 20 bp, synthetic construct
  source 1..20: mol_type = other DNA
gatgcccggcgcacgaagcc

SEQ ID NO: 168028 - DNA, 20 bp, synthetic construct
  source 1..20: mol_type = other DNA
cgatgcccggcgcacgaagc

SEQ ID NO: 168029 - DNA, 20 bp, synthetic construct
  source 1..20: mol_type = other DNA
ccgatgcccggcgcacgaag

SEQ ID NO: 168030 - DNA, 20 bp, synthetic construct
  source 1..20: mol_type = other DNA
accgatgcccggcgcacgaa

SEQ ID NO: 168031 - DNA, 20 bp, synthetic construct
  source 1..20: mol_type = other DNA
gaccgatgcccggcgcacga

SEQ ID NO: 168032 - DNA, 20 bp, synthetic construct
  source 1..20: mol_type = other DNA
cgaccgatgcccggcgcacg

SEQ ID NO: 168033 - DNA, 20 bp, synthetic construct
  source 1..20: mol_type = other DNA
ccgaccgatgcccggcgcac

SEQ ID NO: 168034 - DNA, 20 bp, synthetic construct
  source 1..20: mol_type = other DNA
cccgaccgatgcccggcgca

SEQ ID NO: 168035 - DNA, 20 bp, synthetic construct
  source 1..20: mol_type = other DNA
ccccgaccgatgcccggcgc

SEQ ID NO: 168036 - DNA, 20 bp, synthetic construct
  source 1..20: mol_type = other DNA
gccccgaccgatgcccggcg

SEQ ID NO: 168037 - DNA, 20 bp, synthetic construct
  source 1..20: mol_type = other DNA
ggccccgaccgatgcccggc

SEQ ID NO: 168038 - DNA, 20 bp, synthetic construct
  source 1..20: mol_type = other DNA
tggccccgaccgatgcccgg

SEQ ID NO: 168039 - DNA, 20 bp, synthetic construct
  source 1..20: mol_type = other DNA
gtggccccgaccgatgcccg

SEQ ID NO: 168040 - DNA, 20 bp, synthetic construct
  source 1..20: mol_type = other DNA
ggtggccccgaccgatgccc

SEQ ID NO: 168041 - DNA, 20 bp, synthetic construct
  source 1..20: mol_type = other DNA
cggtggccccgaccgatgcc

SEQ ID NO: 168042 - DNA, 20 bp, synthetic construct
  source 1..20: mol_type = other DNA
gcggtggccccgaccgatgc

SEQ ID NO: 168043 - DNA, 20 bp, synthetic construct
  source 1..20: mol_type = other DNA
tgcggtggccccgaccgatg

SEQ ID NO: 168044 - DNA, 20 bp, synthetic construct
  source 1..20: mol_type = other DNA
ctgcggtggccccgaccgat

SEQ ID NO: 168045 - DNA, 20 bp, synthetic construct
  source 1..20: mol_type = other DNA
cctgcggtggccccgaccga

SEQ ID NO: 168046 - DNA, 20 bp, synthetic construct
  source 1..20: mol_type = other DNA
ccctgcggtggccccgaccg

SEQ ID NO: 168047 - DNA, 20 bp, synthetic construct
  source 1..20: mol_type = other DNA
gccctgcggtggccccgacc

SEQ ID NO: 168048 - DNA, 20 bp, synthetic construct
  source 1..20: mol_type = other DNA
ggccctgcggtggccccgac

SEQ ID NO: 168049 - DNA, 20 bp, synthetic construct
  source 1..20: mol_type = other DNA
gggccctgcggtggccccga

SEQ ID NO: 168050 - DNA, 20 bp, synthetic construct
  source 1..20: mol_type = other DNA
ggggccctgcggtggccccg

SEQ ID NO: 168051 - DNA, 20 bp, synthetic construct
  source 1..20: mol_type = other DNA
aggggccctgcggtggcccc

SEQ ID NO: 168052 - DNA, 20 bp, synthetic construct
  source 1..20: mol_type = other DNA
gaggggccctgcggtggccc

SEQ ID NO: 168053 - DNA, 20 bp, synthetic construct
  source 1..20: mol_type = other DNA
ggaggggccctgcggtggcc

SEQ ID NO: 168054 - DNA, 20 bp, synthetic construct
  source 1..20: mol_type = other DNA
gggaggggccctgcggtggc

SEQ ID NO: 168055 - DNA, 20 bp, synthetic construct
  source 1..20: mol_type = other DNA
agggaggggccctgcggtgg

SEQ ID NO: 168056 - DNA, 20 bp, synthetic construct
  source 1..20: mol_type = other DNA
cagggaggggccctgcggtg

SEQ ID NO: 168057 - DNA, 20 bp, synthetic construct
  source 1..20: mol_type = other DNA
gcagggaggggccctgcggt

SEQ ID NO: 168058 - DNA, 20 bp, synthetic construct
  source 1..20: mol_type = other DNA
ggcagggaggggccctgcgg

SEQ ID NO: 168059 - DNA, 20 bp, synthetic construct
  source 1..20: mol_type = other DNA
aggcagggaggggccctgcg

SEQ ID NO: 168060 - DNA, 20 bp, synthetic construct
  source 1..20: mol_type = other DNA
gaggcagggaggggccctgc

SEQ ID NO: 168061 - DNA, 20 bp, synthetic construct
  source 1..20: mol_type = other DNA
ggaggcagggaggggccctg

SEQ ID NO: 168062 - DNA, 20 bp, synthetic construct
  source 1..20: mol_type = other DNA
gggaggcagggaggggccct

SEQ ID NO: 168063 - DNA, 20 bp, synthetic construct
  source 1..20: mol_type = other DNA
ggggaggcagggaggggccc

SEQ ID NO: 168064 - DNA, 20 bp, synthetic construct
  source 1..20: mol_type = other DNA
aggggaggcagggaggggcc

SEQ ID NO: 168065 - DNA, 20 bp, synthetic construct
  source 1..20: mol_type = other DNA
caggggaggcagggaggggc

SEQ ID NO: 168066 - DNA, 20 bp, synthetic construct
  source 1..20: mol_type = other DNA
gcaggggaggcagggagggg

SEQ ID NO: 168067 - DNA, 20 bp, synthetic construct
  source 1..20: mol_type = other DNA
agcaggggaggcagggaggg

SEQ ID NO: 168068 - DNA, 20 bp, synthetic construct
  source 1..20: mol_type = other DNA
gagcaggggaggcagggagg

SEQ ID NO: 168069 - DNA, 20 bp, synthetic construct
  source 1..20: mol_type = other DNA
cgagcaggggaggcagggag

SEQ ID NO: 168070 - DNA, 20 bp, synthetic construct
  source 1..20: mol_type = other DNA
ccgagcaggggaggcaggga

SEQ ID NO: 168071 - DNA, 20 bp, synthetic construct
  source 1..20: mol_type = other DNA
cccgagcaggggaggcaggg

SEQ ID NO: 168072 - DNA, 20 bp, synthetic construct
  source 1..20: mol_type = other DNA
ccccgagcaggggaggcagg

SEQ ID NO: 168073 - DNA, 20 bp, synthetic construct
  source 1..20: mol_type = other DNA
cccccgagcaggggaggcag

SEQ ID NO: 168074 - DNA, 20 bp, synthetic construct
  source 1..20: mol_type = other DNA
gcccccgagcaggggaggca

SEQ ID NO: 168075 - DNA, 20 bp, synthetic construct
  source 1..20: mol_type = other DNA
agcccccgagcaggggaggc

SEQ ID NO: 168076 - DNA, 20 bp, synthetic construct
  source 1..20: mol_type = other DNA
cagcccccgagcaggggagg

SEQ ID NO: 168077 - DNA, 20 bp, synthetic construct
  source 1..20: mol_type = other DNA
ccagcccccgagcaggggag

SEQ ID NO: 168078 - DNA, 20 bp, synthetic construct
  source 1..20: mol_type = other DNA
cccagcccccgagcagggga

SEQ ID NO: 168079 - DNA, 20 bp, synthetic construct
  source 1..20: mol_type = other DNA
ccccagcccccgagcagggg

SEQ ID NO: 168080 - DNA, 20 bp, synthetic construct
  source 1..20: mol_type = other DNA
gccccagcccccgagcaggg

SEQ ID NO: 168081 - DNA, 20 bp, synthetic construct
  source 1..20: mol_type = other DNA
ggccccagcccccgagcagg

SEQ ID NO: 168082 - DNA, 20 bp, synthetic construct
  source 1..20: mol_type = other DNA
tggccccagcccccgagcag

SEQ ID NO: 168083 - DNA, 20 bp, synthetic construct
  source 1..20: mol_type = other DNA
ctggccccagcccccgagca

SEQ ID NO: 168084 - DNA, 20 bp, synthetic construct
  source 1..20: mol_type = other DNA
cctggccccagcccccgagc

SEQ ID NO: 168085 - DNA, 20 bp, synthetic construct
  source 1..20: mol_type = other DNA
ccctggccccagcccccgag

SEQ ID NO: 168086 - DNA, 20 bp, synthetic construct
  source 1..20: mol_type = other DNA
gccctggccccagcccccga

SEQ ID NO: 168087 - DNA, 20 bp, synthetic construct
  source 1..20: mol_type = other DNA
cgccctggccccagcccccg

SEQ ID NO: 168088 - DNA, 20 bp, synthetic construct
  source 1..20: mol_type = other DNA
ccgccctggccccagccccc

SEQ ID NO: 168089 - DNA, 20 bp, synthetic construct
  source 1..20: mol_type = other DNA
gccgccctggccccagcccc

SEQ ID NO: 168090 - DNA, 20 bp, synthetic construct
  source 1..20: mol_type = other DNA
ggccgccctggccccagccc

SEQ ID NO: 168091 - DNA, 20 bp, synthetic construct
  source 1..20: mol_type = other DNA
aggccgccctggccccagcc

SEQ ID NO: 168092 - DNA, 20 bp, synthetic construct
  source 1..20: mol_type = other DNA
caggccgccctggccccagc

SEQ ID NO: 168093 - DNA, 20 bp, synthetic construct
  source 1..20: mol_type = other DNA
ccaggccgccctggccccag

SEQ ID NO: 168094 - DNA, 20 bp, synthetic construct
  source 1..20: mol_type = other DNA
tccaggccgccctggcccca

SEQ ID NO: 168095 - DNA, 20 bp, synthetic construct
  source 1..20: mol_type = other DNA
ttccaggccgccctggcccc

SEQ ID NO: 168096 - DNA, 20 bp, synthetic construct
  source 1..20: mol_type = other DNA
tttccaggccgccctggccc

SEQ ID NO: 168097 - DNA, 20 bp, synthetic construct
  source 1..20: mol_type = other DNA
ctttccaggccgccctggcc

SEQ ID NO: 168098 - DNA, 20 bp, synthetic construct
  source 1..20: mol_type = other DNA
cctttccaggccgccctggc

SEQ ID NO: 168099 - DNA, 20 bp, synthetic construct
  source 1..20: mol_type = other DNA
ccctttccaggccgccctgg

SEQ ID NO: 168100 - DNA, 20 bp, synthetic construct
  source 1..20: mol_type = other DNA
tccctttccaggccgccctg

SEQ ID NO: 168101 - DNA, 20 bp, synthetic construct
  source 1..20: mol_type = other DNA
gtccctttccaggccgccct

SEQ ID NO: 168102 - DNA, 20 bp, synthetic construct
  source 1..20: mol_type = other DNA
ggtccctttccaggccgccc

SEQ ID NO: 168103 - DNA, 20 bp, synthetic construct
  source 1..20: mol_type = other DNA
aggtccctttccaggccgcc

SEQ ID NO: 168104 - DNA, 20 bp, synthetic construct
  source 1..20: mol_type = other DNA
caggtccctttccaggccgc

SEQ ID NO: 168105 - DNA, 20 bp, synthetic construct
  source 1..20: mol_type = other DNA
tcaggtccctttccaggccg

SEQ ID NO: 168106 - DNA, 20 bp, synthetic construct
  source 1..20: mol_type = other DNA
ctcaggtccctttccaggcc

SEQ ID NO: 168107 - DNA, 20 bp, synthetic construct
  source 1..20: mol_type = other DNA
gctcaggtccctttccaggc

SEQ ID NO: 168108 - DNA, 20 bp, synthetic construct
  source 1..20: mol_type = other DNA
tgctcaggtccctttccagg

SEQ ID NO: 168109 - DNA, 20 bp, synthetic construct
  source 1..20: mol_type = other DNA
ttgctcaggtccctttccag

SEQ ID NO: 168110 - DNA, 20 bp, synthetic construct
  source 1..20: mol_type = other DNA
cttgctcaggtccctttcca

SEQ ID NO: 168111 - DNA, 20 bp, synthetic construct
  source 1..20: mol_type = other DNA
ccttgctcaggtccctttcc

SEQ ID NO: 168112 - DNA, 20 bp, synthetic construct
  source 1..20: mol_type = other DNA
cccttgctcaggtccctttc

SEQ ID NO: 168113 - DNA, 20 bp, synthetic construct
  source 1..20: mol_type = other DNA
tcccttgctcaggtcccttt

SEQ ID NO: 168114 - DNA, 20 bp, synthetic construct
  source 1..20: mol_type = other DNA
atcccttgctcaggtccctt

SEQ ID NO: 168115 - DNA, 20 bp, synthetic construct
  source 1..20: mol_type = other DNA
catcccttgctcaggtccct

SEQ ID NO: 168116 - DNA, 20 bp, synthetic construct
  source 1..20: mol_type = other DNA
gcatcccttgctcaggtccc

SEQ ID NO: 168117 - DNA, 20 bp, synthetic construct
  source 1..20: mol_type = other DNA
tgcatcccttgctcaggtcc

SEQ ID NO: 168118 - DNA, 20 bp, synthetic construct
  source 1..20: mol_type = other DNA
gtgcatcccttgctcaggtc

SEQ ID NO: 168119 - DNA, 20 bp, synthetic construct
  source 1..20: mol_type = other DNA
cgtgcatcccttgctcaggt

SEQ ID NO: 168120 - DNA, 20 bp, synthetic construct
  source 1..20: mol_type = other DNA
gcgtgcatcccttgctcagg

SEQ ID NO: 168121 - DNA, 20 bp, synthetic construct
  source 1..20: mol_type = other DNA
tgcgtgcatcccttgctcag

SEQ ID NO: 168122 - DNA, 20 bp, synthetic construct
  source 1..20: mol_type = other DNA
gtgcgtgcatcccttgctca

SEQ ID NO: 168123 - DNA, 20 bp, synthetic construct
  source 1..20: mol_type = other DNA
cgtgcgtgcatcccttgctc

SEQ ID NO: 168124 - DNA, 20 bp, synthetic construct
  source 1..20: mol_type = other DNA
gcgtgcgtgcatcccttgct

SEQ ID NO: 168125 - DNA, 20 bp, synthetic construct
  source 1..20: mol_type = other DNA
cgcgtgcgtgcatcccttgc

SEQ ID NO: 168126 - DNA, 20 bp, synthetic construct
  source 1..20: mol_type = other DNA
acgcgtgcgtgcatcccttg

SEQ ID NO: 168127 - DNA, 20 bp, synthetic construct
  source 1..20: mol_type = other DNA
cacgcgtgcgtgcatccctt

SEQ ID NO: 168128 - DNA, 20 bp, synthetic construct
  source 1..20: mol_type = other DNA
tcacgcgtgcgtgcatccct

SEQ ID NO: 168129 - DNA, 20 bp, synthetic construct
  source 1..20: mol_type = other DNA
ctcacgcgtgcgtgcatccc

SEQ ID NO: 168130 - DNA, 20 bp, synthetic construct
  source 1..20: mol_type = other DNA
actcacgcgtgcgtgcatcc

SEQ ID NO: 168131 - DNA, 20 bp, synthetic construct
  source 1..20: mol_type = other DNA
cactcacgcgtgcgtgcatc

SEQ ID NO: 168132 - DNA, 20 bp, synthetic construct
  source 1..20: mol_type = other DNA
gcactcacgcgtgcgtgcat

SEQ ID NO: 168133 - DNA, 20 bp, synthetic construct
  source 1..20: mol_type = other DNA
cgcactcacgcgtgcgtgca

SEQ ID NO: 168134 - DNA, 20 bp, synthetic construct
  source 1..20: mol_type = other DNA
gcgcactcacgcgtgcgtgc

SEQ ID NO: 168135 - DNA, 20 bp, synthetic construct
  source 1..20: mol_type = other DNA
cgcgcactcacgcgtgcgtg

SEQ ID NO: 168136 - DNA, 20 bp, synthetic construct
  source 1..20: mol_type = other DNA
gcgcgcactcacgcgtgcgt

SEQ ID NO: 168137 - DNA, 20 bp, synthetic construct
  source 1..20: mol_type = other DNA
cgcgcgcactcacgcgtgcg

SEQ ID NO: 168138 - DNA, 20 bp, synthetic construct
  source 1..20: mol_type = other DNA
acgcgcgcactcacgcgtgc

SEQ ID NO: 168139 - DNA, 20 bp, synthetic construct
  source 1..20: mol_type = other DNA
cacgcgcgcactcacgcgtg

SEQ ID NO: 168140 - DNA, 20 bp, synthetic construct
  source 1..20: mol_type = other DNA
acacgcgcgcactcacgcgt

SEQ ID NO: 168141 - DNA, 20 bp, synthetic construct
  source 1..20: mol_type = other DNA
cacacgcgcgcactcacgcg

SEQ ID NO: 168142 - DNA, 20 bp, synthetic construct
  source 1..20: mol_type = other DNA
acacacgcgcgcactcacgc

SEQ ID NO: 168143 - DNA, 20 bp, synthetic construct
  source 1..20: mol_type = other DNA
cacacacgcgcgcactcacg

SEQ ID NO: 168144 - DNA, 20 bp, synthetic construct
  source 1..20: mol_type = other DNA
acacacacgcgcgcactcac

SEQ ID NO: 168145 - DNA, 20 bp, synthetic construct
  source 1..20: mol_type = other DNA
cacacacacgcgcgcactca

SEQ ID NO: 168146 - DNA, 20 bp, synthetic construct
  source 1..20: mol_type = other DNA
acacacacacgcgcgcactc

SEQ ID NO: 168147 - DNA, 20 bp, synthetic construct
  source 1..20: mol_type = other DNA
cacacacacacgcgcgcact

SEQ ID NO: 168148 - DNA, 20 bp, synthetic construct
  source 1..20: mol_type = other DNA
gcacacacacacgcgcgcac

SEQ ID NO: 168149 - DNA, 20 bp, synthetic construct
  source 1..20: mol_type = other DNA
agcacacacacacgcgcgca

SEQ ID NO: 168150 - DNA, 20 bp, synthetic construct
  source 1..20: mol_type = other DNA
cagcacacacacacgcgcgc

SEQ ID NO: 168151 - DNA, 20 bp, synthetic construct
  source 1..20: mol_type = other DNA
ccagcacacacacacgcgcg

SEQ ID NO: 168152 - DNA, 20 bp, synthetic construct
  source 1..20: mol_type = other DNA
tccagcacacacacacgcgc

SEQ ID NO: 168153 - DNA, 20 bp, synthetic construct
  source 1..20: mol_type = other DNA
ctccagcacacacacacgcg

SEQ ID NO: 168154 - DNA, 20 bp, synthetic construct
  source 1..20: mol_type = other DNA
cctccagcacacacacacgc

SEQ ID NO: 168155 - DNA, 20 bp, synthetic construct
  source 1..20: mol_type = other DNA
ccctccagcacacacacacg

SEQ ID NO: 168156 - DNA, 20 bp, synthetic construct
  source 1..20: mol_type = other DNA
accctccagcacacacacac

SEQ ID NO: 168157 - DNA, 20 bp, synthetic construct
  source 1..20: mol_type = other DNA
gaccctccagcacacacaca

SEQ ID NO: 168158 - DNA, 20 bp, synthetic construct
  source 1..20: mol_type = other DNA
agaccctccagcacacacac

SEQ ID NO: 168159 - DNA, 20 bp, synthetic construct
  source 1..20: mol_type = other DNA
aagaccctccagcacacaca

SEQ ID NO: 168160 - DNA, 20 bp, synthetic construct
  source 1..20: mol_type = other DNA
gaagaccctccagcacacac

SEQ ID NO: 168161 - DNA, 20 bp, synthetic construct
  source 1..20: mol_type = other DNA
tgaagaccctccagcacaca

SEQ ID NO: 168162 - DNA, 20 bp, synthetic construct
  source 1..20: mol_type = other DNA
gtgaagaccctccagcacac

SEQ ID NO: 168163 - DNA, 20 bp, synthetic construct
  source 1..20: mol_type = other DNA
ggtgaagaccctccagcaca

SEQ ID NO: 168164 - DNA, 20 bp, synthetic construct
  source 1..20: mol_type = other DNA
tggtgaagaccctccagcac

SEQ ID NO: 168165 - DNA, 20 bp, synthetic construct
  source 1..20: mol_type = other DNA
gtggtgaagaccctccagca

SEQ ID NO: 168166 - DNA, 20 bp, synthetic construct
  source 1..20: mol_type = other DNA
ggtggtgaagaccctccagc

SEQ ID NO: 168167 - DNA, 20 bp, synthetic construct
  source 1..20: mol_type = other DNA
tggtggtgaagaccctccag

SEQ ID NO: 168168 - DNA, 20 bp, synthetic construct
  source 1..20: mol_type = other DNA
ctggtggtgaagaccctcca

SEQ ID NO: 168169 - DNA, 20 bp, synthetic construct
  source 1..20: mol_type = other DNA
tctggtggtgaagaccctcc

SEQ ID NO: 168170 - DNA, 20 bp, synthetic construct
  source 1..20: mol_type = other DNA
atctggtggtgaagaccctc

SEQ ID NO: 168171 - DNA, 20 bp, synthetic construct
  source 1..20: mol_type = other DNA
aatctggtggtgaagaccct

SEQ ID NO: 168172 - DNA, 20 bp, synthetic construct
  source 1..20: mol_type = other DNA
gaatctggtggtgaagaccc

SEQ ID NO: 168173 - DNA, 20 bp, synthetic construct
  source 1..20: mol_type = other DNA
cgaatctggtggtgaagacc

SEQ ID NO: 168174 - DNA, 20 bp, synthetic construct
  source 1..20: mol_type = other DNA
gcgaatctggtggtgaagac

SEQ ID NO: 168175 - DNA, 20 bp, synthetic construct
  source 1..20: mol_type = other DNA
cgcgaatctggtggtgaaga

SEQ ID NO: 168176 - DNA, 20 bp, synthetic construct
  source 1..20: mol_type = other DNA
gcgcgaatctggtggtgaag

SEQ ID NO: 168177 - DNA, 20 bp, synthetic construct
  source 1..20: mol_type = other DNA
tgcgcgaatctggtggtgaa

SEQ ID NO: 168178 - DNA, 20 bp, synthetic construct
  source 1..20: mol_type = other DNA
ctgcgcgaatctggtggtga

SEQ ID NO: 168179 - DNA, 20 bp, synthetic construct
  source 1..20: mol_type = other DNA
tctgcgcgaatctggtggtg

SEQ ID NO: 168180 - DNA, 20 bp, synthetic construct
  source 1..20: mol_type = other DNA
gtctgcgcgaatctggtggt

SEQ ID NO: 168181 - DNA, 20 bp, synthetic construct
  source 1..20: mol_type = other DNA
ggtctgcgcgaatctggtgg

SEQ ID NO: 168182 - DNA, 20 bp, synthetic construct
  source 1..20: mol_type = other DNA
gggtctgcgcgaatctggtg

SEQ ID NO: 168183 - DNA, 20 bp, synthetic construct
  source 1..20: mol_type = other DNA
ggggtctgcgcgaatctggt

SEQ ID NO: 168184 - DNA, 20 bp, synthetic construct
  source 1..20: mol_type = other DNA
tggggtctgcgcgaatctgg

SEQ ID NO: 168185 - DNA, 20 bp, synthetic construct
  source 1..20: mol_type = other DNA
ctggggtctgcgcgaatctg

SEQ ID NO: 168186 - DNA, 20 bp, synthetic construct
  source 1..20: mol_type = other DNA
cctggggtctgcgcgaatct

SEQ ID NO: 168187 - DNA, 20 bp, synthetic construct
  source 1..20: mol_type = other DNA
acctggggtctgcgcgaatc

SEQ ID NO: 168188 - DNA, 20 bp, synthetic construct
  source 1..20: mol_type = other DNA
cacctggggtctgcgcgaat

SEQ ID NO: 168189 - DNA, 20 bp, synthetic construct
  source 1..20: mol_type = other DNA
ccacctggggtctgcgcgaa

SEQ ID NO: 168190 - DNA, 20 bp, synthetic construct
  source 1..20: mol_type = other DNA
tccacctggggtctgcgcga

SEQ ID NO: 168191 - DNA, 20 bp, synthetic construct
  source 1..20: mol_type = other DNA
ctccacctggggtctgcgcg

SEQ ID NO: 168192 - DNA, 20 bp, synthetic construct
  source 1..20: mol_type = other DNA
cctccacctggggtctgcgc

SEQ ID NO: 168193 - DNA, 20 bp, synthetic construct
  source 1..20: mol_type = other DNA
gcctccacctggggtctgcg

SEQ ID NO: 168194 - DNA, 20 bp, synthetic construct
  source 1..20: mol_type = other DNA
agcctccacctggggtctgc

SEQ ID NO: 168195 - DNA, 20 bp, synthetic construct
  source 1..20: mol_type = other DNA
cagcctccacctggggtctg

SEQ ID NO: 168196 - DNA, 20 bp, synthetic construct
  source 1..20: mol_type = other DNA
acagcctccacctggggtct

SEQ ID NO: 168197 - DNA, 20 bp, synthetic construct
  source 1..20: mol_type = other DNA
cacagcctccacctggggtc

SEQ ID NO: 168198 - DNA, 20 bp, synthetic construct
  source 1..20: mol_type = other DNA
gcacagcctccacctggggt

SEQ ID NO: 168199 - DNA, 20 bp, synthetic construct
  source 1..20: mol_type = other DNA
ggcacagcctccacctgggg

SEQ ID NO: 168200 - DNA, 20 bp, synthetic construct
  source 1..20: mol_type = other DNA
cggcacagcctccacctggg

SEQ ID NO: 168201 - DNA, 20 bp, synthetic construct
  source 1..20: mol_type = other DNA
ccggcacagcctccacctgg

SEQ ID NO: 168202 - DNA, 20 bp, synthetic construct
  source 1..20: mol_type = other DNA
gccggcacagcctccacctg

SEQ ID NO: 168203 - DNA, 20 bp, synthetic construct
  source 1..20: mol_type = other DNA
tgccggcacagcctccacct

SEQ ID NO: 168204 - DNA, 20 bp, synthetic construct
  source 1..20: mol_type = other DNA
ctgccggcacagcctccacc

SEQ ID NO: 168205 - DNA, 20 bp, synthetic construct
  source 1..20: mol_type = other DNA
cctgccggcacagcctccac

SEQ ID NO: 168206 - DNA, 20 bp, synthetic construct
  source 1..20: mol_type = other DNA
ccctgccggcacagcctcca

SEQ ID NO: 168207 - DNA, 20 bp, synthetic construct
  source 1..20: mol_type = other DNA
accctgccggcacagcctcc

SEQ ID NO: 168208 - DNA, 20 bp, synthetic construct
  source 1..20: mol_type = other DNA
caccctgccggcacagcctc

SEQ ID NO: 168209 - DNA, 20 bp, synthetic construct
  source 1..20: mol_type = other DNA
ccaccctgccggcacagcct

SEQ ID NO: 168210 - DNA, 20 bp, synthetic construct
  source 1..20: mol_type = other DNA
cccaccctgccggcacagcc

SEQ ID NO: 168211 - DNA, 20 bp, synthetic construct
  source 1..20: mol_type = other DNA
ccccaccctgccggcacagc

SEQ ID NO: 168212 - DNA, 20 bp, synthetic construct
  source 1..20: mol_type = other DNA
gccccaccctgccggcacag

SEQ ID NO: 168213 - DNA, 20 bp, synthetic construct
  source 1..20: mol_type = other DNA
cgccccaccctgccggcaca

SEQ ID NO: 168214 - DNA, 20 bp, synthetic construct
  source 1..20: mol_type = other DNA
gcgccccaccctgccggcac

SEQ ID NO: 168215 - DNA, 20 bp, synthetic construct
  source 1..20: mol_type = other DNA
cgcgccccaccctgccggca

SEQ ID NO: 168216 - DNA, 20 bp, synthetic construct
  source 1..20: mol_type = other DNA
ccgcgccccaccctgccggc

SEQ ID NO: 168217 - DNA, 20 bp, synthetic construct
  source 1..20: mol_type = other DNA
gccgcgccccaccctgccgg

SEQ ID NO: 168218 - DNA, 20 bp, synthetic construct
  source 1..20: mol_type = other DNA
cgccgcgccccaccctgccg

SEQ ID NO: 168219 - DNA, 20 bp, synthetic construct
  source 1..20: mol_type = other DNA
ccgccgcgccccaccctgcc

SEQ ID NO: 168220 - DNA, 20 bp, synthetic construct
  source 1..20: mol_type = other DNA
gccgccgcgccccaccctgc

SEQ ID NO: 168221 - DNA, 20 bp, synthetic construct
  source 1..20: mol_type = other DNA
cgccgccgcgccccaccctg

SEQ ID NO: 168222 - DNA, 20 bp, synthetic construct
  source 1..20: mol_type = other DNA
ccgccgccgcgccccaccct

SEQ ID NO: 168223 - DNA, 20 bp, synthetic construct
  source 1..20: mol_type = other DNA
accgccgccgcgccccaccc

SEQ ID NO: 168224 - DNA, 20 bp, synthetic construct
  source 1..20: mol_type = other DNA
caccgccgccgcgccccacc

SEQ ID NO: 168225 - DNA, 20 bp, synthetic construct
  source 1..20: mol_type = other DNA
tcaccgccgccgcgccccac

SEQ ID NO: 168226 - DNA, 20 bp, synthetic construct
  source 1..20: mol_type = other DNA
gtcaccgccgccgcgcccca

SEQ ID NO: 168227 - DNA, 20 bp, synthetic construct
  source 1..20: mol_type = other DNA
agtcaccgccgccgcgcccc

SEQ ID NO: 168228 - DNA, 20 bp, synthetic construct
  source 1..20: mol_type = other DNA
aagtcaccgccgccgcgccc

SEQ ID NO: 168229 - DNA, 20 bp, synthetic construct
  source 1..20: mol_type = other DNA
caagtcaccgccgccgcgcc

SEQ ID NO: 168230 - DNA, 20 bp, synthetic construct
  source 1..20: mol_type = other DNA
ccaagtcaccgccgccgcgc

SEQ ID NO: 168231 - DNA, 20 bp, synthetic construct
  source 1..20: mol_type = other DNA
cccaagtcaccgccgccgcg

SEQ ID NO: 168232 - DNA, 20 bp, synthetic construct
  source 1..20: mol_type = other DNA
ccccaagtcaccgccgccgc

SEQ ID NO: 168233 - DNA, 20 bp, synthetic construct
  source 1..20: mol_type = other DNA
cccccaagtcaccgccgccg

SEQ ID NO: 168234 - DNA, 20 bp, synthetic construct
  source 1..20: mol_type = other DNA
tcccccaagtcaccgccgcc

SEQ ID NO: 168235 - DNA, 20 bp, synthetic construct
  source 1..20: mol_type = other DNA
ctcccccaagtcaccgccgc

SEQ ID NO: 168236 - DNA, 20 bp, synthetic construct
  source 1..20: mol_type = other DNA
cctcccccaagtcaccgccg

SEQ ID NO: 168237 - DNA, 20 bp, synthetic construct
  source 1..20: mol_type = other DNA
ccctcccccaagtcaccgcc

SEQ ID NO: 168238 - DNA, 20 bp, synthetic construct
  source 1..20: mol_type = other DNA
cccctcccccaagtcaccgc

SEQ ID NO: 168239 - DNA, 20 bp, synthetic construct
  source 1..20: mol_type = other DNA
ccccctcccccaagtcaccg

SEQ ID NO: 168240 - DNA, 20 bp, synthetic construct
  source 1..20: mol_type = other DNA
gccccctcccccaagtcacc

SEQ ID NO: 168241 - DNA, 20 bp, synthetic construct
  source 1..20: mol_type = other DNA
agccccctcccccaagtcac

SEQ ID NO: 168242 - DNA, 20 bp, synthetic construct
  source 1..20: mol_type = other DNA
cagccccctcccccaagtca

SEQ ID NO: 168243 - DNA, 20 bp, synthetic construct
  source 1..20: mol_type = other DNA
gcagccccctcccccaagtc

SEQ ID NO: 168244 - DNA, 20 bp, synthetic construct
  source 1..20: mol_type = other DNA
ggcagccccctcccccaagt

SEQ ID NO: 168245 - DNA, 20 bp, synthetic construct
  source 1..20: mol_type = other DNA
gggcagccccctcccccaag

SEQ ID NO: 168246 - DNA, 20 bp, synthetic construct
  source 1..20: mol_type = other DNA
agggcagccccctcccccaa

SEQ ID NO: 168247 - DNA, 20 bp, synthetic construct
  source 1..20: mol_type = other DNA
aagggcagccccctccccca

SEQ ID NO: 168248 - DNA, 20 bp, synthetic construct
  source 1..20: mol_type = other DNA
gaagggcagccccctccccc

SEQ ID NO: 168249 - DNA, 20 bp, synthetic construct
  source 1..20: mol_type = other DNA
tgaagggcagccccctcccc

SEQ ID NO: 168250 - DNA, 20 bp, synthetic construct
  source 1..20: mol_type = other DNA
gtgaagggcagccccctccc

SEQ ID NO: 168251 - DNA, 20 bp, synthetic construct
  source 1..20: mol_type = other DNA
agtgaagggcagccccctcc

SEQ ID NO: 168252 - DNA, 20 bp, synthetic construct
  source 1..20: mol_type = other DNA
gagtgaagggcagccccctc

SEQ ID NO: 168253 - DNA, 20 bp, synthetic construct
  source 1..20: mol_type = other DNA
agagtgaagggcagccccct

SEQ ID NO: 168254 - DNA, 20 bp, synthetic construct
  source 1..20: mol_type = other DNA
gagagtgaagggcagccccc

SEQ ID NO: 168255 - DNA, 20 bp, synthetic construct
  source 1..20: mol_type = other DNA
cgagagtgaagggcagcccc

SEQ ID NO: 168256 - DNA, 20 bp, synthetic construct
  source 1..20: mol_type = other DNA
tcgagagtgaagggcagccc

SEQ ID NO: 168257 - DNA, 20 bp, synthetic construct
  source 1..20: mol_type = other DNA
gtcgagagtgaagggcagcc

SEQ ID NO: 168258 - DNA, 20 bp, synthetic construct
  source 1..20: mol_type = other DNA
agtcgagagtgaagggcagc

SEQ ID NO: 168259 - DNA, 20 bp, synthetic construct
  source 1..20: mol_type = other DNA
cagtcgagagtgaagggcag

SEQ ID NO: 168260 - DNA, 20 bp, synthetic construct
  source 1..20: mol_type = other DNA
gcagtcgagagtgaagggca

SEQ ID NO: 168261 - DNA, 20 bp, synthetic construct
  source 1..20: mol_type = other DNA
tgcagtcgagagtgaagggc

SEQ ID NO: 168262 - DNA, 20 bp, synthetic construct
  source 1..20: mol_type = other DNA
ctgcagtcgagagtgaaggg

SEQ ID NO: 168263 - DNA, 20 bp, synthetic construct
  source 1..20: mol_type = other DNA
gctgcagtcgagagtgaagg

SEQ ID NO: 168264 - DNA, 20 bp, synthetic construct
  source 1..20: mol_type = other DNA
ggctgcagtcgagagtgaag

SEQ ID NO: 168265 - DNA, 20 bp, synthetic construct
  source 1..20: mol_type = other DNA
aggctgcagtcgagagtgaa

SEQ ID NO: 168266 - DNA, 20 bp, synthetic construct
  source 1..20: mol_type = other DNA
aaggctgcagtcgagagtga

SEQ ID NO: 168267 - DNA, 20 bp, synthetic construct
  source 1..20: mol_type = other DNA
aaaggctgcagtcgagagtg

SEQ ID NO: 168268 - DNA, 20 bp, synthetic construct
  source 1..20: mol_type = other DNA
aaaaggctgcagtcgagagt

SEQ ID NO: 168269 - DNA, 20 bp, synthetic construct
  source 1..20: mol_type = other DNA
caaaaggctgcagtcgagag

SEQ ID NO: 168270 - DNA, 20 bp, synthetic construct
  source 1..20: mol_type = other DNA
gcaaaaggctgcagtcgaga

SEQ ID NO: 168271 - DNA, 20 bp, synthetic construct
  source 1..20: mol_type = other DNA
ggcaaaaggctgcagtcgag

SEQ ID NO: 168272 - DNA, 20 bp, synthetic construct
  source 1..20: mol_type = other DNA
cggcaaaaggctgcagtcga

SEQ ID NO: 168273 - DNA, 20 bp, synthetic construct
  source 1..20: mol_type = other DNA
gcggcaaaaggctgcagtcg

SEQ ID NO: 168274 - DNA, 20 bp, synthetic construct
  source 1..20: mol_type = other DNA
tgcggcaaaaggctgcagtc

SEQ ID NO: 168275 - DNA, 20 bp, synthetic construct
  source 1..20: mol_type = other DNA
ttgcggcaaaaggctgcagt

SEQ ID NO: 168276 - DNA, 20 bp, synthetic construct
  source 1..20: mol_type = other DNA
attgcggcaaaaggctgcag

SEQ ID NO: 168277 - DNA, 20 bp, synthetic construct
  source 1..20: mol_type = other DNA
cattgcggcaaaaggctgca

SEQ ID NO: 168278 - DNA, 20 bp, synthetic construct
  source 1..20: mol_type = other DNA
ccattgcggcaaaaggctgc

SEQ ID NO: 168279 - DNA, 20 bp, synthetic construct
  source 1..20: mol_type = other DNA
cccattgcggcaaaaggctg

SEQ ID NO: 168280 - DNA, 20 bp, synthetic construct
  source 1..20: mol_type = other DNA
gcccattgcggcaaaaggct

SEQ ID NO: 168281 - DNA, 20 bp, synthetic construct
  source 1..20: mol_type = other DNA
cgcccattgcggcaaaaggc

SEQ ID NO: 168282 - DNA, 20 bp, synthetic construct
  source 1..20: mol_type = other DNA
acgcccattgcggcaaaagg

SEQ ID NO: 168283 - DNA, 20 bp, synthetic construct
  source 1..20: mol_type = other DNA
cacgcccattgcggcaaaag

SEQ ID NO: 168284 - DNA, 20 bp, synthetic construct
  source 1..20: mol_type = other DNA
acacgcccattgcggcaaaa

SEQ ID NO: 168285 - DNA, 20 bp, synthetic construct
  source 1..20: mol_type = other DNA
cacacgcccattgcggcaaa

SEQ ID NO: 168286 - DNA, 20 bp, synthetic construct
  source 1..20: mol_type = other DNA
acacacgcccattgcggcaa

SEQ ID NO: 168287 - DNA, 20 bp, synthetic construct
  source 1..20: mol_type = other DNA
cacacacgcccattgcggca

SEQ ID NO: 168288 - DNA, 20 bp, synthetic construct
  source 1..20: mol_type = other DNA
acacacacgcccattgcggc

SEQ ID NO: 168289 - DNA, 20 bp, synthetic construct
  source 1..20: mol_type = other DNA
cacacacacgcccattgcgg

SEQ ID NO: 168290 - DNA, 20 bp, synthetic construct
  source 1..20: mol_type = other DNA
acacacacacgcccattgcg

SEQ ID NO: 168291 - DNA, 20 bp, synthetic construct
  source 1..20: mol_type = other DNA
cacacacacacgcccattgc

SEQ ID NO: 168292 - DNA, 20 bp, synthetic construct
  source 1..20: mol_type = other DNA
acacacacacacgcccattg

SEQ ID NO: 168293 - DNA, 20 bp, synthetic construct
  source 1..20: mol_type = other DNA
cacacacacacacgcccatt

SEQ ID NO: 168294 - DNA, 20 bp, synthetic construct
  source 1..20: mol_type = other DNA
acacacacacacacgcccat

SEQ ID NO: 168295 - DNA, 20 bp, synthetic construct
  source 1..20: mol_type = other DNA
cacacacacacacacgccca

SEQ ID NO: 168296 - DNA, 20 bp, synthetic construct
  source 1..20: mol_type = other DNA
acacacacacacacacgccc

SEQ ID NO: 168297 - DNA, 20 bp, synthetic construct
  source 1..20: mol_type = other DNA
cacacacacacacacacgcc

SEQ ID NO: 168298 - DNA, 20 bp, synthetic construct
  source 1..20: mol_type = other DNA
acacacacacacacacacgc

SEQ ID NO: 168299 - DNA, 20 bp, synthetic construct
  source 1..20: mol_type = other DNA
cacacacacacacacacacg

SEQ ID NO: 168300 - DNA, 20 bp, synthetic construct
  source 1..20: mol_type = other DNA
acacacacacacacacacac

SEQ ID NO: 168301 - DNA, 20 bp, synthetic construct
  source 1..20: mol_type = other DNA
cacacacacacacacacaca

SEQ ID NO: 168302 - DNA, 20 bp, synthetic construct
  source 1..20: mol_type = other DNA
acacacacacacacacacac

SEQ ID NO: 168303 - DNA, 20 bp, synthetic construct
  source 1..20: mol_type = other DNA
cacacacacacacacacaca

SEQ ID NO: 168304 - DNA, 20 bp, synthetic construct
  source 1..20: mol_type = other DNA
acacacacacacacacacac

SEQ ID NO: 168305 - DNA, 20 bp, synthetic construct
  source 1..20: mol_type = other DNA
cacacacacacacacacaca

SEQ ID NO: 168306 - DNA, 20 bp, synthetic construct
  source 1..20: mol_type = other DNA
acacacacacacacacacac

SEQ ID NO: 168307 - DNA, 20 bp, synthetic construct
  source 1..20: mol_type = other DNA
cacacacacacacacacaca

SEQ ID NO: 168308 - DNA, 20 bp, synthetic construct
  source 1..20: mol_type = other DNA
acacacacacacacacacac

SEQ ID NO: 168309 - DNA, 20 bp, synthetic construct
  source 1..20: mol_type = other DNA
cacacacacacacacacaca

SEQ ID NO: 168310 - DNA, 20 bp, synthetic construct
  source 1..20: mol_type = other DNA
acacacacacacacacacac

SEQ ID NO: 168311 - DNA, 20 bp, synthetic construct
  source 1..20: mol_type = other DNA
cacacacacacacacacaca

SEQ ID NO: 168312 - DNA, 20 bp, synthetic construct
  source 1..20: mol_type = other DNA
acacacacacacacacacac

SEQ ID NO: 168313 - DNA, 20 bp, synthetic construct
  source 1..20: mol_type = other DNA
cacacacacacacacacaca

SEQ ID NO: 168314 - DNA, 20 bp, synthetic construct
  source 1..20: mol_type = other DNA
acacacacacacacacacac

SEQ ID NO: 168315 - DNA, 20 bp, synthetic construct
  source 1..20: mol_type = other DNA
cacacacacacacacacaca

SEQ ID NO: 168316 - DNA, 20 bp, synthetic construct
  source 1..20: mol_type = other DNA
acacacacacacacacacac

SEQ ID NO: 168317 - DNA, 20 bp, synthetic construct
  source 1..20: mol_type = other DNA
cacacacacacacacacaca

SEQ ID NO: 168318 - DNA, 20 bp, synthetic construct
  source 1..20: mol_type = other DNA
acacacacacacacacacac

SEQ ID NO: 168319 - DNA, 20 bp, synthetic construct
  source 1..20: mol_type = other DNA
cacacacacacacacacaca

SEQ ID NO: 168320 - DNA, 20 bp, synthetic construct
  source 1..20: mol_type = other DNA
acacacacacacacacacac

SEQ ID NO: 168321 - DNA, 20 bp, synthetic construct
  source 1..20: mol_type = other DNA
cacacacacacacacacaca

SEQ ID NO: 168322 - DNA, 20 bp, synthetic construct
  source 1..20: mol_type = other DNA
acacacacacacacacacac

SEQ ID NO: 168323 - DNA, 20 bp, synthetic construct
  source 1..20: mol_type = other DNA
cacacacacacacacacaca

SEQ ID NO: 168324 - DNA, 20 bp, synthetic construct
  source 1..20: mol_type = other DNA
ccacacacacacacacacac

SEQ ID NO: 168325 - DNA, 20 bp, synthetic construct
  source 1..20: mol_type = other DNA
tccacacacacacacacaca

SEQ ID NO: 168326 - DNA, 20 bp, synthetic construct
  source 1..20: mol_type = other DNA
ctccacacacacacacacac

SEQ ID NO: 168327 - DNA, 20 bp, synthetic construct
  source 1..20: mol_type = other DNA
cctccacacacacacacaca

SEQ ID NO: 168328 - DNA, 20 bp, synthetic construct
  source 1..20: mol_type = other DNA
ccctccacacacacacacac

SEQ ID NO: 168329 - DNA, 20 bp, synthetic construct
  source 1..20: mol_type = other DNA
cccctccacacacacacaca

SEQ ID NO: 168330 - DNA, 20 bp, synthetic construct
  source 1..20: mol_type = other DNA
acccctccacacacacacac

SEQ ID NO: 168331 - DNA, 20 bp, synthetic construct
  source 1..20: mol_type = other DNA
gacccctccacacacacaca

SEQ ID NO: 168332 - DNA, 20 bp, synthetic construct
  source 1..20: mol_type = other DNA
ggacccctccacacacacac

SEQ ID NO: 168333 - DNA, 20 bp, synthetic construct
  source 1..20: mol_type = other DNA
cggacccctccacacacaca

SEQ ID NO: 168334 - DNA, 20 bp, synthetic construct
  source 1..20: mol_type = other DNA
tcggacccctccacacacac

SEQ ID NO: 168335 - DNA, 20 bp, synthetic construct
  source 1..20: mol_type = other DNA
atcggacccctccacacaca

SEQ ID NO: 168336 - DNA, 20 bp, synthetic construct
  source 1..20: mol_type = other DNA
tatcggacccctccacacac

SEQ ID NO: 168337 - DNA, 20 bp, synthetic construct
  source 1..20: mol_type = other DNA
ttatcggacccctccacaca

SEQ ID NO: 168338 - DNA, 20 bp, synthetic construct
  source 1..20: mol_type = other DNA
gttatcggacccctccacac

SEQ ID NO: 168339 - DNA, 20 bp, synthetic construct
  source 1..20: mol_type = other DNA
cgttatcggacccctccaca

SEQ ID NO: 168340 - DNA, 20 bp, synthetic construct
  source 1..20: mol_type = other DNA
tcgttatcggacccctccac

SEQ ID NO: 168341 - DNA, 20 bp, synthetic construct
  source 1..20: mol_type = other DNA
gtcgttatcggacccctcca

SEQ ID NO: 168342 - DNA, 20 bp, synthetic construct
  source 1..20: mol_type = other DNA
ggtcgttatcggacccctcc

SEQ ID NO: 168343 - DNA, 20 bp, synthetic construct
  source 1..20: mol_type = other DNA
gggtcgttatcggacccctc

SEQ ID NO: 168344 - DNA, 20 bp, synthetic construct
  source 1..20: mol_type = other DNA
ggggtcgttatcggacccct

SEQ ID NO: 168345 - DNA, 20 bp, synthetic construct
  source 1..20: mol_type = other DNA
gggggtcgttatcggacccc

SEQ ID NO: 168346 - DNA, 20 bp, synthetic construct
  source 1..20: mol_type = other DNA
cgggggtcgttatcggaccc

SEQ ID NO: 168347 - DNA, 20 bp, synthetic construct
  source 1..20: mol_type = other DNA
tcgggggtcgttatcggacc

SEQ ID NO: 168348 - DNA, 20 bp, synthetic construct
  source 1..20: mol_type = other DNA
ttcgggggtcgttatcggac

SEQ ID NO: 168349 - DNA, 20 bp, synthetic construct
  source 1..20: mol_type = other DNA
tttcgggggtcgttatcgga

SEQ ID NO: 168350 - DNA, 20 bp, synthetic construct
  source 1..20: mol_type = other DNA
gtttcgggggtcgttatcgg

SEQ ID NO: 168351 - DNA, 20 bp, synthetic construct
  source 1..20: mol_type = other DNA
ggtttcgggggtcgttatcg

SEQ ID NO: 168352 - DNA, 20 bp, synthetic construct
  source 1..20: mol_type = other DNA
cggtttcgggggtcgttatc

SEQ ID NO: 168353 - DNA, 20 bp, synthetic construct
  source 1..20: mol_type = other DNA
tcggtttcgggggtcgttat

SEQ ID NO: 168354 - DNA, 20 bp, synthetic construct
  source 1..20: mol_type = other DNA
ttcggtttcgggggtcgtta

SEQ ID NO: 168355 - DNA, 20 bp, synthetic construct
  source 1..20: mol_type = other DNA
attcggtttcgggggtcgtt

SEQ ID NO: 168356 - DNA, 20 bp, synthetic construct
  source 1..20: mol_type = other DNA
gattcggtttcgggggtcgt

SEQ ID NO: 168357 - DNA, 20 bp, synthetic construct
  source 1..20: mol_type = other DNA
agattcggtttcgggggtcg

SEQ ID NO: 168358 - DNA, 20 bp, synthetic construct
  source 1..20: mol_type = other DNA
cagattcggtttcgggggtc

SEQ ID NO: 168359 - DNA, 20 bp, synthetic construct
  source 1..20: mol_type = other DNA
tcagattcggtttcgggggt

SEQ ID NO: 168360 - DNA, 20 bp, synthetic construct
  source 1..20: mol_type = other DNA
ttcagattcggtttcggggg

SEQ ID NO: 168361 - DNA, 20 bp, synthetic construct
  source 1..20: mol_type = other DNA
tttcagattcggtttcgggg

SEQ ID NO: 168362 - DNA, 20 bp, synthetic construct
  source 1..20: mol_type = other DNA
atttcagattcggtttcggg

SEQ ID NO: 168363 - DNA, 20 bp, synthetic construct
  source 1..20: mol_type = other DNA
gatttcagattcggtttcgg

SEQ ID NO: 168364 - DNA, 20 bp, synthetic construct
  source 1..20: mol_type = other DNA
ggatttcagattcggtttcg

SEQ ID NO: 168365 - DNA, 20 bp, synthetic construct
  source 1..20: mol_type = other DNA
cggatttcagattcggtttc

SEQ ID NO: 168366 - DNA, 20 bp, synthetic construct
  source 1..20: mol_type = other DNA
gcggatttcagattcggttt

SEQ ID NO: 168367 - DNA, 20 bp, synthetic construct
  source 1..20: mol_type = other DNA
agcggatttcagattcggtt

SEQ ID NO: 168368 - DNA, 20 bp, synthetic construct
  source 1..20: mol_type = other DNA
cagcggatttcagattcggt

SEQ ID NO: 168369 - DNA, 20 bp, synthetic construct
  source 1..20: mol_type = other DNA
acagcggatttcagattcgg

SEQ ID NO: 168370 - DNA, 20 bp, synthetic construct
  source 1..20: mol_type = other DNA
gacagcggatttcagattcg

SEQ ID NO: 168371 - DNA, 20 bp, synthetic construct
  source 1..20: mol_type = other DNA
ggacagcggatttcagattc

SEQ ID NO: 168372 - DNA, 20 bp, synthetic construct
  source 1..20: mol_type = other DNA
gggacagcggatttcagatt

SEQ ID NO: 168373 - DNA, 20 bp, synthetic construct
  source 1..20: mol_type = other DNA
agggacagcggatttcagat

SEQ ID NO: 168374 - DNA, 20 bp, synthetic construct
  source 1..20: mol_type = other DNA
cagggacagcggatttcaga

SEQ ID NO: 168375 - DNA, 20 bp, synthetic construct
  source 1..20: mol_type = other DNA
gcagggacagcggatttcag

SEQ ID NO: 168376 - DNA, 20 bp, synthetic construct
  source 1..20: mol_type = other DNA
ggcagggacagcggatttca

SEQ ID NO: 168377 - DNA, 20 bp, synthetic construct
  source 1..20: mol_type = other DNA
cggcagggacagcggatttc

SEQ ID NO: 168378 - DNA, 20 bp, synthetic construct
  source 1..20: mol_type = other DNA
gcggcagggacagcggattt

SEQ ID NO: 168379 - DNA, 20 bp, synthetic construct
  source 1..20: mol_type = other DNA
agcggcagggacagcggatt

SEQ ID NO: 168380 - DNA, 20 bp, synthetic construct
  source 1..20: mol_type = other DNA
cagcggcagggacagcggat

SEQ ID NO: 168381 - DNA, 20 bp, synthetic construct
  source 1..20: mol_type = other DNA
acagcggcagggacagcgga

SEQ ID NO: 168382 - DNA, 20 bp, synthetic construct
  source 1..20: mol_type = other DNA
aacagcggcagggacagcgg

SEQ ID NO: 168383 - DNA, 20 bp, synthetic construct
  source 1..20: mol_type = other DNA
gaacagcggcagggacagcg

SEQ ID NO: 168384 - DNA, 20 bp, synthetic construct
  source 1..20: mol_type = other DNA
cgaacagcggcagggacagc

SEQ ID NO: 168385 - DNA, 20 bp, synthetic construct
  source 1..20: mol_type = other DNA
gcgaacagcggcagggacag

SEQ ID NO: 168386 - DNA, 20 bp, synthetic construct
  source 1..20: mol_type = other DNA
ggcgaacagcggcagggaca

SEQ ID NO: 168387 - DNA, 20 bp, synthetic construct
  source 1..20: mol_type = other DNA
tggcgaacagcggcagggac

SEQ ID NO: 168388 - DNA, 20 bp, synthetic construct
  source 1..20: mol_type = other DNA
atggcgaacagcggcaggga

SEQ ID NO: 168389 - DNA, 20 bp, synthetic construct
  source 1..20: mol_type = other DNA
gatggcgaacagcggcaggg

SEQ ID NO: 168390 - DNA, 20 bp, synthetic construct
  source 1..20: mol_type = other DNA
tgatggcgaacagcggcagg

SEQ ID NO: 168391 - DNA, 20 bp, synthetic construct
  source 1..20: mol_type = other DNA
ctgatggcgaacagcggcag

SEQ ID NO: 168392 - DNA, 20 bp, synthetic construct
  source 1..20: mol_type = other DNA
gctgatggcgaacagcggca

SEQ ID NO: 168393 - DNA, 20 bp, synthetic construct
  source 1..20: mol_type = other DNA
agctgatggcgaacagcggc

SEQ ID NO: 168394 - DNA, 20 bp, synthetic construct
  source 1..20: mol_type = other DNA
gagctgatggcgaacagcgg

SEQ ID NO: 168395 - DNA, 20 bp, synthetic construct
  source 1..20: mol_type = other DNA
agagctgatggcgaacagcg

SEQ ID NO: 168396 - DNA, 20 bp, synthetic construct
  source 1..20: mol_type = other DNA
tagagctgatggcgaacagc

SEQ ID NO: 168397 - DNA, 20 bp, synthetic construct
  source 1..20: mol_type = other DNA
ttagagctgatggcgaacag

SEQ ID NO: 168398 - DNA, 20 bp, synthetic construct
  source 1..20: mol_type = other DNA
cttagagctgatggcgaaca

SEQ ID NO: 168399 - DNA, 20 bp, synthetic construct
  source 1..20: mol_type = other DNA
tcttagagctgatggcgaac

SEQ ID NO: 168400 - DNA, 20 bp, synthetic construct
  source 1..20: mol_type = other DNA
ttcttagagctgatggcgaa

SEQ ID NO: 168401 - DNA, 20 bp, synthetic construct
  source 1..20: mol_type = other DNA
tttcttagagctgatggcga

SEQ ID NO: 168402 - DNA, 20 bp, synthetic construct
  source 1..20: mol_type = other DNA
ctttcttagagctgatggcg

SEQ ID NO: 168403 - DNA, 20 bp, synthetic construct
  source 1..20: mol_type = other DNA
tctttcttagagctgatggc

SEQ ID NO: 168404 - DNA, 20 bp, synthetic construct
  source 1..20: mol_type = other DNA
gtctttcttagagctgatgg

SEQ ID NO: 168405 - DNA, 20 bp, synthetic construct
  source 1..20: mol_type = other DNA
cgtctttcttagagctgatg

SEQ ID NO: 168406 - DNA, 20 bp, synthetic construct
  source 1..20: mol_type = other DNA
acgtctttcttagagctgat

SEQ ID NO: 168407 - DNA, 20 bp, synthetic construct
  source 1..20: mol_type = other DNA
cacgtctttcttagagctga

SEQ ID NO: 168408 - DNA, 20 bp, synthetic construct
  source 1..20: mol_type = other DNA
ccacgtctttcttagagctg

SEQ ID NO: 168409 - DNA, 20 bp, synthetic construct
  source 1..20: mol_type = other DNA
tccacgtctttcttagagct

SEQ ID NO: 168410 - DNA, 20 bp, synthetic construct
  source 1..20: mol_type = other DNA
atccacgtctttcttagagc

SEQ ID NO: 168411 - DNA, 20 bp, synthetic construct
  source 1..20: mol_type = other DNA
gatccacgtctttcttagag

SEQ ID NO: 168412 - DNA, 20 bp, synthetic construct
  source 1..20: mol_type = other DNA
cgatccacgtctttcttaga

SEQ ID NO: 168413 - DNA, 20 bp, synthetic construct
  source 1..20: mol_type = other DNA
ccgatccacgtctttcttag

SEQ ID NO: 168414 - DNA, 20 bp, synthetic construct
  source 1..20: mol_type = other DNA
cccgatccacgtctttctta

SEQ ID NO: 168415 - DNA, 20 bp, synthetic construct
  source 1..20: mol_type = other DNA
acccgatccacgtctttctt

SEQ ID NO: 168416 - DNA, 20 bp, synthetic construct
  source 1..20: mol_type = other DNA
aacccgatccacgtctttct

SEQ ID NO: 168417 - DNA, 20 bp, synthetic construct
  source 1..20: mol_type = other DNA
gaacccgatccacgtctttc

SEQ ID NO: 168418 - DNA, 20 bp, synthetic construct
  source 1..20: mol_type = other DNA
agaacccgatccacgtcttt

SEQ ID NO: 168419 - DNA, 20 bp, synthetic construct
  source 1..20: mol_type = other DNA
tagaacccgatccacgtctt

SEQ ID NO: 168420 - DNA, 20 bp, synthetic construct
  source 1..20: mol_type = other DNA
ctagaacccgatccacgtct

SEQ ID NO: 168421 - DNA, 20 bp, synthetic construct
  source 1..20: mol_type = other DNA
tctagaacccgatccacgtc

SEQ ID NO: 168422 - DNA, 20 bp, synthetic construct
  source 1..20: mol_type = other DNA
ttctagaacccgatccacgt

SEQ ID NO: 168423 - DNA, 20 bp, synthetic construct
  source 1..20: mol_type = other DNA
tttctagaacccgatccacg

SEQ ID NO: 168424 - DNA, 20 bp, synthetic construct
  source 1..20: mol_type = other DNA
ttttctagaacccgatccac

SEQ ID NO: 168425 - DNA, 20 bp, synthetic construct
  source 1..20: mol_type = other DNA
cttttctagaacccgatcca

SEQ ID NO: 168426 - DNA, 20 bp, synthetic construct
  source 1..20: mol_type = other DNA
tcttttctagaacccgatcc

SEQ ID NO: 168427 - DNA, 20 bp, synthetic construct
  source 1..20: mol_type = other DNA
atcttttctagaacccgatc

SEQ ID NO: 168428 - DNA, 20 bp, synthetic construct
  source 1..20: mol_type = other DNA
catcttttctagaacccgat

SEQ ID NO: 168429 - DNA, 20 bp, synthetic construct
  source 1..20: mol_type = other DNA
tcatcttttctagaacccga

SEQ ID NO: 168430 - DNA, 20 bp, synthetic construct
  source 1..20: mol_type = other DNA
gtcatcttttctagaacccg

SEQ ID NO: 168431 - DNA, 20 bp, synthetic construct
  source 1..20: mol_type = other DNA
agtcatcttttctagaaccc

SEQ ID NO: 168432 - DNA, 20 bp, synthetic construct
  source 1..20: mol_type = other DNA
gagtcatcttttctagaacc

SEQ ID NO: 168433 - DNA, 20 bp, synthetic construct
  source 1..20: mol_type = other DNA
ggagtcatcttttctagaac

SEQ ID NO: 168434 - DNA, 20 bp, synthetic construct
  source 1..20: mol_type = other DNA
gggagtcatcttttctagaa

SEQ ID NO: 168435 - DNA, 20 bp, synthetic construct
  source 1..20: mol_type = other DNA
agggagtcatcttttctaga

SEQ ID NO: 168436 - DNA, 20 bp, synthetic construct
  source 1..20: mol_type = other DNA
cagggagtcatcttttctag

SEQ ID NO: 168437 - DNA, 20 bp, synthetic construct
  source 1..20: mol_type = other DNA
gcagggagtcatcttttcta

SEQ ID NO: 168438 - DNA, 20 bp, synthetic construct
  source 1..20: mol_type = other DNA
tgcagggagtcatcttttct

SEQ ID NO: 168439 - DNA, 20 bp, synthetic construct
  source 1..20: mol_type = other DNA
gtgcagggagtcatcttttc

SEQ ID NO: 168440 - DNA, 20 bp, synthetic construct
  source 1..20: mol_type = other DNA
cgtgcagggagtcatctttt

SEQ ID NO: 168441 - DNA, 20 bp, synthetic construct
  source 1..20: mol_type = other DNA
gcgtgcagggagtcatcttt

SEQ ID NO: 168442 - DNA, 20 bp, synthetic construct
  source 1..20: mol_type = other DNA
ggcgtgcagggagtcatctt

SEQ ID NO: 168443 - DNA, 20 bp, synthetic construct
  source 1..20: mol_type = other DNA
gggcgtgcagggagtcatct

SEQ ID NO: 168444 - DNA, 20 bp, synthetic construct
  source 1..20: mol_type = other DNA
ggggcgtgcagggagtcatc

SEQ ID NO: 168445 - DNA, 20 bp, synthetic construct
  source 1..20: mol_type = other DNA
aggggcgtgcagggagtcat

SEQ ID NO: 168446 - DNA, 20 bp, synthetic construct
  source 1..20: mol_type = other DNA
gaggggcgtgcagggagtca

SEQ ID NO: 168447 - DNA, 20 bp, synthetic construct
  source 1..20: mol_type = other DNA
ggaggggcgtgcagggagtc

SEQ ID NO: 168448 - DNA, 20 bp, synthetic construct
  source 1..20: mol_type = other DNA
gggaggggcgtgcagggagt

SEQ ID NO: 168449 - DNA, 20 bp, synthetic construct
  source 1..20: mol_type = other DNA
agggaggggcgtgcagggag

SEQ ID NO: 168450 - DNA, 20 bp, synthetic construct
  source 1..20: mol_type = other DNA
cagggaggggcgtgcaggga

SEQ ID NO: 168451 - DNA, 20 bp, synthetic construct
  source 1..20: mol_type = other DNA
gcagggaggggcgtgcaggg

SEQ ID NO: 168452 - DNA, 20 bp, synthetic construct
  source 1..20: mol_type = other DNA
tgcagggaggggcgtgcagg

SEQ ID NO: 168453 - DNA, 20 bp, synthetic construct
  source 1..20: mol_type = other DNA
gtgcagggaggggcgtgcag

SEQ ID NO: 168454 - DNA, 20 bp, synthetic construct
  source 1..20: mol_type = other DNA
ggtgcagggaggggcgtgca

SEQ ID NO: 168455 - DNA, 20 bp, synthetic construct
  source 1..20: mol_type = other DNA
aggtgcagggaggggcgtgc

SEQ ID NO: 168456 - DNA, 20 bp, synthetic construct
  source 1..20: mol_type = other DNA
gaggtgcagggaggggcgtg

SEQ ID NO: 168457 - DNA, 20 bp, synthetic construct
  source 1..20: mol_type = other DNA
ggaggtgcagggaggggcgt

SEQ ID NO: 168458 - DNA, 20 bp, synthetic construct
  source 1..20: mol_type = other DNA
gggaggtgcagggaggggcg

SEQ ID NO: 168459 - DNA, 20 bp, synthetic construct
  source 1..20: mol_type = other DNA
cgggaggtgcagggaggggc

SEQ ID NO: 168460 - DNA, 20 bp, synthetic construct
  source 1..20: mol_type = other DNA
tcgggaggtgcagggagggg

SEQ ID NO: 168461 - DNA, 20 bp, synthetic construct
  source 1..20: mol_type = other DNA
ctcgggaggtgcagggaggg

SEQ ID NO: 168462 - DNA, 20 bp, synthetic construct
  source 1..20: mol_type = other DNA
gctcgggaggtgcagggagg

SEQ ID NO: 168463 - DNA, 20 bp, synthetic construct
  source 1..20: mol_type = other DNA
tgctcgggaggtgcagggag

SEQ ID NO: 168464 - DNA, 20 bp, synthetic construct
  source 1..20: mol_type = other DNA
ctgctcgggaggtgcaggga

SEQ ID NO: 168465 - DNA, 20 bp, synthetic construct
  source 1..20: mol_type = other DNA
actgctcgggaggtgcaggg

SEQ ID NO: 168466 - DNA, 20 bp, synthetic construct
  source 1..20: mol_type = other DNA
cactgctcgggaggtgcagg

SEQ ID NO: 168467 - DNA, 20 bp, synthetic construct
  source 1..20: mol_type = other DNA
tcactgctcgggaggtgcag

SEQ ID NO: 168468 - DNA, 20 bp, synthetic construct
  source 1..20: mol_type = other DNA
atcactgctcgggaggtgca

SEQ ID NO: 168469 - DNA, 20 bp, synthetic construct
  source 1..20: mol_type = other DNA
aatcactgctcgggaggtgc

SEQ ID NO: 168470 - DNA, 20 bp, synthetic construct
  source 1..20: mol_type = other DNA
gaatcactgctcgggaggtg

SEQ ID NO: 168471 - DNA, 20 bp, synthetic construct
  source 1..20: mol_type = other DNA
ggaatcactgctcgggaggt

SEQ ID NO: 168472 - DNA, 20 bp, synthetic construct
  source 1..20: mol_type = other DNA
cggaatcactgctcgggagg

SEQ ID NO: 168473 - DNA, 20 bp, synthetic construct
  source 1..20: mol_type = other DNA
tcggaatcactgctcgggag

SEQ ID NO: 168474 - DNA, 20 bp, synthetic construct
  source 1..20: mol_type = other DNA
gtcggaatcactgctcggga

SEQ ID NO: 168475 - DNA, 20 bp, synthetic construct
  source 1..20: mol_type = other DNA
tgtcggaatcactgctcggg

SEQ ID NO: 168476 - DNA, 20 bp, synthetic construct
  source 1..20: mol_type = other DNA
ctgtcggaatcactgctcgg

SEQ ID NO: 168477 - DNA, 20 bp, synthetic construct
  source 1..20: mol_type = other DNA
cctgtcggaatcactgctcg

SEQ ID NO: 168478 - DNA, 20 bp, synthetic construct
  source 1..20: mol_type = other DNA
ccctgtcggaatcactgctc

SEQ ID NO: 168479 - DNA, 20 bp, synthetic construct
  source 1..20: mol_type = other DNA
gccctgtcggaatcactgct

SEQ ID NO: 168480 - DNA, 20 bp, synthetic construct
  source 1..20: mol_type = other DNA
ggccctgtcggaatcactgc

SEQ ID NO: 168481 - DNA, 20 bp, synthetic construct
  source 1..20: mol_type = other DNA
aggccctgtcggaatcactg

SEQ ID NO: 168482 - DNA, 20 bp, synthetic construct
  source 1..20: mol_type = other DNA
aaggccctgtcggaatcact

SEQ ID NO: 168483 - DNA, 20 bp, synthetic construct
  source 1..20: mol_type = other DNA
gaaggccctgtcggaatcac

SEQ ID NO: 168484 - DNA, 20 bp, synthetic construct
  source 1..20: mol_type = other DNA
tgaaggccctgtcggaatca

SEQ ID NO: 168485 - DNA, 20 bp, synthetic construct
  source 1..20: mol_type = other DNA
gtgaaggccctgtcggaatc

SEQ ID NO: 168486 - DNA, 20 bp, synthetic construct
  source 1..20: mol_type = other DNA
agtgaaggccctgtcggaat

SEQ ID NO: 168487 - DNA, 20 bp, synthetic construct
  source 1..20: mol_type = other DNA
cagtgaaggccctgtcggaa

SEQ ID NO: 168488 - DNA, 20 bp, synthetic construct
  source 1..20: mol_type = other DNA
gcagtgaaggccctgtcgga

SEQ ID NO: 168489 - DNA, 20 bp, synthetic construct
  source 1..20: mol_type = other DNA
ggcagtgaaggccctgtcgg

SEQ ID NO: 168490 - DNA, 20 bp, synthetic construct
  source 1..20: mol_type = other DNA
gggcagtgaaggccctgtcg

SEQ ID NO: 168491 - DNA, 20 bp, synthetic construct
  source 1..20: mol_type = other DNA
ggggcagtgaaggccctgtc

SEQ ID NO: 168492 - DNA, 20 bp, synthetic construct
  source 1..20: mol_type = other DNA
aggggcagtgaaggccctgt

SEQ ID NO: 168493 - DNA, 20 bp, synthetic construct
  source 1..20: mol_type = other DNA
caggggcagtgaaggccctg

SEQ ID NO: 168494 - DNA, 20 bp, synthetic construct
  source 1..20: mol_type = other DNA
tcaggggcagtgaaggccct

SEQ ID NO: 168495 - DNA, 20 bp, synthetic construct
  source 1..20: mol_type = other DNA
atcaggggcagtgaaggccc

SEQ ID NO: 168496 - DNA, 20 bp, synthetic construct
  source 1..20: mol_type = other DNA
aatcaggggcagtgaaggcc

SEQ ID NO: 168497 - DNA, 20 bp, synthetic construct
  source 1..20: mol_type = other DNA
aaatcaggggcagtgaaggc

SEQ ID NO: 168498 - DNA, 20 bp, synthetic construct
  source 1..20: mol_type = other DNA
aaaatcaggggcagtgaagg

SEQ ID NO: 168499 - DNA, 20 bp, synthetic construct
  source 1..20: mol_type = other DNA
taaaatcaggggcagtgaag

SEQ ID NO: 168500 - DNA, 20 bp, synthetic construct
  source 1..20: mol_type = other DNA
ctaaaatcaggggcagtgaa

SEQ ID NO: 168501 - DNA, 20 bp, synthetic construct
  source 1..20: mol_type = other DNA
cctaaaatcaggggcagtga

SEQ ID NO: 168502 - DNA, 20 bp, synthetic construct
  source 1..20: mol_type = other DNA
gcctaaaatcaggggcagtg

SEQ ID NO: 168503 - DNA, 20 bp, synthetic construct
  source 1..20: mol_type = other DNA
cgcctaaaatcaggggcagt

SEQ ID NO: 168504 - DNA, 20 bp, synthetic construct
  source 1..20: mol_type = other DNA
ccgcctaaaatcaggggcag

SEQ ID NO: 168505 - DNA, 20 bp, synthetic construct
  source 1..20: mol_type = other DNA
cccgcctaaaatcaggggca

SEQ ID NO: 168506 - DNA, 20 bp, synthetic construct
  source 1..20: mol_type = other DNA
ccccgcctaaaatcaggggc

SEQ ID NO: 168507 - DNA, 20 bp, synthetic construct
  source 1..20: mol_type = other DNA
cccccgcctaaaatcagggg

SEQ ID NO: 168508 - DNA, 20 bp, synthetic construct
  source 1..20: mol_type = other DNA
gcccccgcctaaaatcaggg

SEQ ID NO: 168509 - DNA, 20 bp, synthetic construct
  source 1..20: mol_type = other DNA
ggcccccgcctaaaatcagg

SEQ ID NO: 168510 - DNA, 20 bp, synthetic construct
  source 1..20: mol_type = other DNA
cggcccccgcctaaaatcag

SEQ ID NO: 168511 - DNA, 20 bp, synthetic construct
  source 1..20: mol_type = other DNA
ccggcccccgcctaaaatca

SEQ ID NO: 168512 - DNA, 20 bp, synthetic construct
  source 1..20: mol_type = other DNA
gccggcccccgcctaaaatc

SEQ ID NO: 168513 - DNA, 20 bp, synthetic construct
  source 1..20: mol_type = other DNA
ggccggcccccgcctaaaat

SEQ ID NO: 168514 - DNA, 20 bp, synthetic construct
  source 1..20: mol_type = other DNA
gggccggcccccgcctaaaa

SEQ ID NO: 168515 - DNA, 20 bp, synthetic construct
  source 1..20: mol_type = other DNA
ggggccggcccccgcctaaa

SEQ ID NO: 168516 - DNA, 20 bp, synthetic construct
  source 1..20: mol_type = other DNA
gggggccggcccccgcctaa

SEQ ID NO: 168517 - DNA, 20 bp, synthetic construct
  source 1..20: mol_type = other DNA
agggggccggcccccgccta

SEQ ID NO: 168518 - DNA, 20 bp, synthetic construct
  source 1..20: mol_type = other DNA
gagggggccggcccccgcct

SEQ ID NO: 168519 - DNA, 20 bp, synthetic construct
  source 1..20: mol_type = other DNA
ggagggggccggcccccgcc

SEQ ID NO: 168520 - DNA, 20 bp, synthetic construct
  source 1..20: mol_type = other DNA
gggagggggccggcccccgc

SEQ ID NO: 168521 - DNA, 20 bp, synthetic construct
  source 1..20: mol_type = other DNA
ggggagggggccggcccccg

SEQ ID NO: 168522 - DNA, 20 bp, synthetic construct
  source 1..20: mol_type = other DNA
aggggagggggccggccccc

SEQ ID NO: 168523 - DNA, 20 bp, synthetic construct
  source 1..20: mol_type = other DNA
aaggggagggggccggcccc

SEQ ID NO: 168524 - DNA, 20 bp, synthetic construct
  source 1..20: mol_type = other DNA
aaaggggagggggccggccc

SEQ ID NO: 168525 - DNA, 20 bp, synthetic construct
  source 1..20: mol_type = other DNA
aaaaggggagggggccggcc

SEQ ID NO: 168526 - DNA, 20 bp, synthetic construct
  source 1..20: mol_type = other DNA
gaaaaggggagggggccggc

SEQ ID NO: 168527 - DNA, 20 bp, synthetic construct
  source 1..20: mol_type = other DNA
ggaaaaggggagggggccgg

SEQ ID NO: 168528 - DNA, 20 bp, synthetic construct
  source 1..20: mol_type = other DNA
aggaaaaggggagggggccg

SEQ ID NO: 168529 - DNA, 20 bp, synthetic construct
  source 1..20: mol_type = other DNA
gaggaaaaggggagggggcc

SEQ ID NO: 168530 - DNA, 20 bp, synthetic construct
  source 1..20: mol_type = other DNA
ggaggaaaaggggagggggc

SEQ ID NO: 168531 - DNA, 20 bp, synthetic construct
  source 1..20: mol_type = other DNA
aggaggaaaaggggaggggg

SEQ ID NO: 168532 - DNA, 20 bp, synthetic construct
  source 1..20: mol_type = other DNA
aaggaggaaaaggggagggg

SEQ ID NO: 168533 - DNA, 20 bp, synthetic construct
  source 1..20: mol_type = other DNA
gaaggaggaaaaggggaggg

SEQ ID NO: 168534 - DNA, 20 bp, synthetic construct
  source 1..20: mol_type = other DNA
tgaaggaggaaaaggggagg

SEQ ID NO: 168535 - DNA, 20 bp, synthetic construct
  source 1..20: mol_type = other DNA
ctgaaggaggaaaaggggag

SEQ ID NO: 168536 - DNA, 20 bp, synthetic construct
  source 1..20: mol_type = other DNA
tctgaaggaggaaaagggga

SEQ ID NO: 168537 - DNA, 20 bp, synthetic construct
  source 1..20: mol_type = other DNA
ttctgaaggaggaaaagggg

SEQ ID NO: 168538 - DNA, 20 bp, synthetic construct
  source 1..20: mol_type = other DNA
tttctgaaggaggaaaaggg

SEQ ID NO: 168539 - DNA, 20 bp, synthetic construct
  source 1..20: mol_type = other DNA
gtttctgaaggaggaaaagg

SEQ ID NO: 168540 - DNA, 20 bp, synthetic construct
  source 1..20: mol_type = other DNA
ggtttctgaaggaggaaaag

SEQ ID NO: 168541 - DNA, 20 bp, synthetic construct
  source 1..20: mol_type = other DNA
gggtttctgaaggaggaaaa

SEQ ID NO: 168542 - DNA, 20 bp, synthetic construct
  source 1..20: mol_type = other DNA
cgggtttctgaaggaggaaa

SEQ ID NO: 168543 - DNA, 20 bp, synthetic construct
  source 1..20: mol_type = other DNA
acgggtttctgaaggaggaa

SEQ ID NO: 168544 - DNA, 20 bp, synthetic construct
  source 1..20: mol_type = other DNA
tacgggtttctgaaggagga

SEQ ID NO: 168545 - DNA, 20 bp, synthetic construct
  source 1..20: mol_type = other DNA
ctacgggtttctgaaggagg

SEQ ID NO: 168546 - DNA, 20 bp, synthetic construct
  source 1..20: mol_type = other DNA
cctacgggtttctgaaggag

SEQ ID NO: 168547 - DNA, 20 bp, synthetic construct
  source 1..20: mol_type = other DNA
ccctacgggtttctgaagga

SEQ ID NO: 168548 - DNA, 20 bp, synthetic construct
  source 1..20: mol_type = other DNA
cccctacgggtttctgaagg

SEQ ID NO: 168549 - DNA, 20 bp, synthetic construct
  source 1..20: mol_type = other DNA
tcccctacgggtttctgaag

SEQ ID NO: 168550 - DNA, 20 bp, synthetic construct
  source 1..20: mol_type = other DNA
gtcccctacgggtttctgaa

SEQ ID NO: 168551 - DNA, 20 bp, synthetic construct
  source 1..20: mol_type = other DNA
tgtcccctacgggtttctga

SEQ ID NO: 168552 - DNA, 20 bp, synthetic construct
  source 1..20: mol_type = other DNA
atgtcccctacgggtttctg

SEQ ID NO: 168553 - DNA, 20 bp, synthetic construct
  source 1..20: mol_type = other DNA
aatgtcccctacgggtttct

SEQ ID NO: 168554 - DNA, 20 bp, synthetic construct
  source 1..20: mol_type = other DNA
aaatgtcccctacgggtttc

SEQ ID NO: 168555 - DNA, 20 bp, synthetic construct
  source 1..20: mol_type = other DNA
caaatgtcccctacgggttt

SEQ ID NO: 168556 - DNA, 20 bp, synthetic construct
  source 1..20: mol_type = other DNA
ccaaatgtcccctacgggtt

SEQ ID NO: 168557 - DNA, 20 bp, synthetic construct
  source 1..20: mol_type = other DNA
cccaaatgtcccctacgggt

SEQ ID NO: 168558 - DNA, 20 bp, synthetic construct
  source 1..20: mol_type = other DNA
ccccaaatgtcccctacggg

SEQ ID NO: 168559 - DNA, 20 bp, synthetic construct
  source 1..20: mol_type = other DNA
cccccaaatgtcccctacgg

SEQ ID NO: 168560 - DNA, 20 bp, synthetic construct
  source 1..20: mol_type = other DNA
gcccccaaatgtcccctacg

SEQ ID NO: 168561 - DNA, 20 bp, synthetic construct
  source 1..20: mol_type = other DNA
agcccccaaatgtcccctac

SEQ ID NO: 168562 - DNA, 20 bp, synthetic construct
  source 1..20: mol_type = other DNA
cagcccccaaatgtccccta

SEQ ID NO: 168563 - DNA, 20 bp, synthetic construct
  source 1..20: mol_type = other DNA
ccagcccccaaatgtcccct

SEQ ID NO: 168564 - DNA, 20 bp, synthetic construct
  source 1..20: mol_type = other DNA
cccagcccccaaatgtcccc

SEQ ID NO: 168565 - DNA, 20 bp, synthetic construct
  source 1..20: mol_type = other DNA
tcccagcccccaaatgtccc

SEQ ID NO: 168566 - DNA, 20 bp, synthetic construct
  source 1..20: mol_type = other DNA
ctcccagcccccaaatgtcc

SEQ ID NO: 168567 - DNA, 20 bp, synthetic construct
  source 1..20: mol_type = other DNA
tctcccagcccccaaatgtc

SEQ ID NO: 168568 - DNA, 20 bp, synthetic construct
  source 1..20: mol_type = other DNA
ttctcccagcccccaaatgt

SEQ ID NO: 168569 - DNA, 20 bp, synthetic construct
  source 1..20: mol_type = other DNA
tttctcccagcccccaaatg

SEQ ID NO: 168570 - DNA, 20 bp, synthetic construct
  source 1..20: mol_type = other DNA
atttctcccagcccccaaat

SEQ ID NO: 168571 - DNA, 20 bp, synthetic construct
  source 1..20: mol_type = other DNA
gatttctcccagcccccaaa

SEQ ID NO: 168572 - DNA, 20 bp, synthetic construct
  source 1..20: mol_type = other DNA
cgatttctcccagcccccaa

SEQ ID NO: 168573 - DNA, 20 bp, synthetic construct
  source 1..20: mol_type = other DNA
tcgatttctcccagccccca

SEQ ID NO: 168574 - DNA, 20 bp, synthetic construct
  source 1..20: mol_type = other DNA
ctcgatttctcccagccccc

SEQ ID NO: 168575 - DNA, 20 bp, synthetic construct
  source 1..20: mol_type = other DNA
cctcgatttctcccagcccc

SEQ ID NO: 168576 - DNA, 20 bp, synthetic construct
  source 1..20: mol_type = other DNA
tcctcgatttctcccagccc

SEQ ID NO: 168577 - DNA, 20 bp, synthetic construct
  source 1..20: mol_type = other DNA
ctcctcgatttctcccagcc

SEQ ID NO: 168578 - DNA, 20 bp, synthetic construct
  source 1..20: mol_type = other DNA
tctcctcgatttctcccagc

SEQ ID NO: 168579 - DNA, 20 bp, synthetic construct
  source 1..20: mol_type = other DNA
atctcctcgatttctcccag

SEQ ID NO: 168580 - DNA, 20 bp, synthetic construct
  source 1..20: mol_type = other DNA
catctcctcgatttctccca

SEQ ID NO: 168581 - DNA, 20 bp, synthetic construct
  source 1..20: mol_type = other DNA
ccatctcctcgatttctccc

SEQ ID NO: 168582 - DNA, 20 bp, synthetic construct
  source 1..20: mol_type = other DNA
cccatctcctcgatttctcc

SEQ ID NO: 168583 - DNA, 20 bp, synthetic construct
  source 1..20: mol_type = other DNA
ccccatctcctcgatttctc

SEQ ID NO: 168584 - DNA, 20 bp, synthetic construct
  source 1..20: mol_type = other DNA
tccccatctcctcgatttct

SEQ ID NO: 168585 - DNA, 20 bp, synthetic construct
  source 1..20: mol_type = other DNA
ctccccatctcctcgatttc

SEQ ID NO: 168586 - DNA, 20 bp, synthetic construct
  source 1..20: mol_type = other DNA
cctccccatctcctcgattt

SEQ ID NO: 168587 - DNA, 20 bp, synthetic construct
  source 1..20: mol_type = other DNA
ccctccccatctcctcgatt

SEQ ID NO: 168588 - DNA, 20 bp, synthetic construct
  source 1..20: mol_type = other DNA
cccctccccatctcctcgat

SEQ ID NO: 168589 - DNA, 20 bp, synthetic construct
  source 1..20: mol_type = other DNA
acccctccccatctcctcga

SEQ ID NO: 168590 - DNA, 20 bp, synthetic construct
  source 1..20: mol_type = other DNA
gacccctccccatctcctcg

SEQ ID NO: 168591 - DNA, 20 bp, synthetic construct
  source 1..20: mol_type = other DNA
ggacccctccccatctcctc

SEQ ID NO: 168592 - DNA, 20 bp, synthetic construct
  source 1..20: mol_type = other DNA
tggacccctccccatctcct

SEQ ID NO: 168593 - DNA, 20 bp, synthetic construct
  source 1..20: mol_type = other DNA
gtggacccctccccatctcc

SEQ ID NO: 168594 - DNA, 20 bp, synthetic construct
  source 1..20: mol_type = other DNA
cgtggacccctccccatctc

SEQ ID NO: 168595 - DNA, 20 bp, synthetic construct
  source 1..20: mol_type = other DNA
gcgtggacccctccccatct

SEQ ID NO: 168596 - DNA, 20 bp, synthetic construct
  source 1..20: mol_type = other DNA
cgcgtggacccctccccatc

SEQ ID NO: 168597 - DNA, 20 bp, synthetic construct
  source 1..20: mol_type = other DNA
gcgcgtggacccctccccat

SEQ ID NO: 168598 - DNA, 20 bp, synthetic construct
  source 1..20: mol_type = other DNA
agcgcgtggacccctcccca

SEQ ID NO: 168599 - DNA, 20 bp, synthetic construct
  source 1..20: mol_type = other DNA
cagcgcgtggacccctcccc

SEQ ID NO: 168600 - DNA, 20 bp, synthetic construct
  source 1..20: mol_type = other DNA
acagcgcgtggacccctccc

SEQ ID NO: 168601 - DNA, 20 bp, synthetic construct
  source 1..20: mol_type = other DNA
gacagcgcgtggacccctcc

SEQ ID NO: 168602 - DNA, 20 bp, synthetic construct
  source 1..20: mol_type = other DNA
tgacagcgcgtggacccctc

SEQ ID NO: 168603 - DNA, 20 bp, synthetic construct
  source 1..20: mol_type = other DNA
gtgacagcgcgtggacccct

SEQ ID NO: 168604 - DNA, 20 bp, synthetic construct
  source 1..20: mol_type = other DNA
agtgacagcgcgtggacccc

SEQ ID NO: 168605 - DNA, 20 bp, synthetic construct
  source 1..20: mol_type = other DNA
aagtgacagcgcgtggaccc

SEQ ID NO: 168606 - DNA, 20 bp, synthetic construct
  source 1..20: mol_type = other DNA
aaagtgacagcgcgtggacc

SEQ ID NO: 168607 - DNA, 20 bp, synthetic construct
  source 1..20: mol_type = other DNA
taaagtgacagcgcgtggac

SEQ ID NO: 168608 - DNA, 20 bp, synthetic construct
  source 1..20: mol_type = other DNA
ctaaagtgacagcgcgtgga

SEQ ID NO: 168609 - DNA, 20 bp, synthetic construct
  source 1..20: mol_type = other DNA
actaaagtgacagcgcgtgg

SEQ ID NO: 168610 - DNA, 20 bp, synthetic construct
  source 1..20: mol_type = other DNA
aactaaagtgacagcgcgtg

SEQ ID NO: 168611 - DNA, 20 bp, synthetic construct
  source 1..20: mol_type = other DNA
caactaaagtgacagcgcgt

SEQ ID NO: 168612 - DNA, 20 bp, synthetic construct
  source 1..20: mol_type = other DNA
gcaactaaagtgacagcgcg

SEQ ID NO: 168613 - DNA, 20 bp, synthetic construct
  source 1..20: mol_type = other DNA
ggcaactaaagtgacagcgc

SEQ ID NO: 168614 - DNA, 20 bp, synthetic construct
  source 1..20: mol_type = other DNA
gggcaactaaagtgacagcg

SEQ ID NO: 168615 - DNA, 20 bp, synthetic construct
  source 1..20: mol_type = other DNA
agggcaactaaagtgacagc

SEQ ID NO: 168616 - DNA, 20 bp, synthetic construct
  source 1..20: mol_type = other DNA
aagggcaactaaagtgacag

SEQ ID NO: 168617 - DNA, 20 bp, synthetic construct
  source 1..20: mol_type = other DNA
gaagggcaactaaagtgaca

SEQ ID NO: 168618 - DNA, 20 bp, synthetic construct
  source 1..20: mol_type = other DNA
ggaagggcaactaaagtgac

SEQ ID NO: 168619 - DNA, 20 bp, synthetic construct
  source 1..20: mol_type = other DNA
gggaagggcaactaaagtga

SEQ ID NO: 168620 - DNA, 20 bp, synthetic construct
  source 1..20: mol_type = other DNA
ggggaagggcaactaaagtg

SEQ ID NO: 168621 - DNA, 20 bp, synthetic construct
  source 1..20: mol_type = other DNA
gggggaagggcaactaaagt

SEQ ID NO: 168622 - DNA, 20 bp, synthetic construct
  source 1..20: mol_type = other DNA
agggggaagggcaactaaag

SEQ ID NO: 168623 - DNA, 20 bp, synthetic construct
  source 1..20: mol_type = other DNA
cagggggaagggcaactaaa

SEQ ID NO: 168624 - DNA, 20 bp, synthetic construct
  source 1..20: mol_type = other DNA
gcagggggaagggcaactaa

SEQ ID NO: 168625 - DNA, 20 bp, synthetic construct
  source 1..20: mol_type = other DNA
cgcagggggaagggcaacta

SEQ ID NO: 168626 - DNA, 20 bp, synthetic construct
  source 1..20: mol_type = other DNA
gcgcagggggaagggcaact

SEQ ID NO: 168627 - DNA, 20 bp, synthetic construct
  source 1..20: mol_type = other DNA
tgcgcagggggaagggcaac

SEQ ID NO: 168628 - DNA, 20 bp, synthetic construct
  source 1..20: mol_type = other DNA
gtgcgcagggggaagggcaa

SEQ ID NO: 168629 - DNA, 20 bp, synthetic construct
  source 1..20: mol_type = other DNA
cgtgcgcagggggaagggca

SEQ ID NO: 168630 - DNA, 20 bp, synthetic construct
  source 1..20: mol_type = other DNA
gcgtgcgcagggggaagggc

SEQ ID NO: 168631 - DNA, 20 bp, synthetic construct
  source 1..20: mol_type = other DNA
ggcgtgcgcagggggaaggg

SEQ ID NO: 168632 - DNA, 20 bp, synthetic construct
  source 1..20: mol_type = other DNA
aggcgtgcgcagggggaagg

SEQ ID NO: 168633 - DNA, 20 bp, synthetic construct
  source 1..20: mol_type = other DNA
caggcgtgcgcagggggaag

SEQ ID NO: 168634 - DNA, 20 bp, synthetic construct
  source 1..20: mol_type = other DNA
ccaggcgtgcgcagggggaa

SEQ ID NO: 168635 - DNA, 20 bp, synthetic construct
  source 1..20: mol_type = other DNA
gccaggcgtgcgcaggggga

SEQ ID NO: 168636 - DNA, 20 bp, synthetic construct
  source 1..20: mol_type = other DNA
tgccaggcgtgcgcaggggg

SEQ ID NO: 168637 - DNA, 20 bp, synthetic construct
  source 1..20: mol_type = other DNA
gtgccaggcgtgcgcagggg

SEQ ID NO: 168638 - DNA, 20 bp, synthetic construct
  source 1..20: mol_type = other DNA
tgtgccaggcgtgcgcaggg

SEQ ID NO: 168639 - DNA, 20 bp, synthetic construct
  source 1..20: mol_type = other DNA
ctgtgccaggcgtgcgcagg

SEQ ID NO: 168640 - DNA, 20 bp, synthetic construct
  source 1..20: mol_type = other DNA
tctgtgccaggcgtgcgcag

SEQ ID NO: 168641 - DNA, 20 bp, synthetic construct
  source 1..20: mol_type = other DNA
ctctgtgccaggcgtgcgca

SEQ ID NO: 168642 - DNA, 20 bp, synthetic construct
  source 1..20: mol_type = other DNA
tctctgtgccaggcgtgcgc

SEQ ID NO: 168643 - DNA, 20 bp, synthetic construct
  source 1..20: mol_type = other DNA
gtctctgtgccaggcgtgcg

SEQ ID NO: 168644 - DNA, 20 bp, synthetic construct
  source 1..20: mol_type = other DNA
cgtctctgtgccaggcgtgc

SEQ ID NO: 168645 - DNA, 20 bp, synthetic construct
  source 1..20: mol_type = other DNA
gcgtctctgtgccaggcgtg

SEQ ID NO: 168646 - DNA, 20 bp, synthetic construct
  source 1..20: mol_type = other DNA
cgcgtctctgtgccaggcgt

SEQ ID NO: 168647 - DNA, 20 bp, synthetic construct
  source 1..20: mol_type = other DNA
tcgcgtctctgtgccaggcg

SEQ ID NO: 168648 - DNA, 20 bp, synthetic construct
  source 1..20: mol_type = other DNA
ctcgcgtctctgtgccaggc

SEQ ID NO: 168649 - DNA, 20 bp, synthetic construct
  source 1..20: mol_type = other DNA
gctcgcgtctctgtgccagg

SEQ ID NO: 168650 - DNA, 20 bp, synthetic construct
  source 1..20: mol_type = other DNA
tgctcgcgtctctgtgccag

SEQ ID NO: 168651 - DNA, 20 bp, synthetic construct
  source 1..20: mol_type = other DNA
ctgctcgcgtctctgtgcca

SEQ ID NO: 168652 - DNA, 20 bp, synthetic construct
  source 1..20: mol_type = other DNA
gctgctcgcgtctctgtgcc

SEQ ID NO: 168653 - DNA, 20 bp, synthetic construct
  source 1..20: mol_type = other DNA
cgctgctcgcgtctctgtgc

SEQ ID NO: 168654 - DNA, 20 bp, synthetic construct
  source 1..20: mol_type = other DNA
gcgctgctcgcgtctctgtg

SEQ ID NO: 168655 - DNA, 20 bp, synthetic construct
  source 1..20: mol_type = other DNA
ggcgctgctcgcgtctctgt

SEQ ID NO: 168656 - DNA, 20 bp, synthetic construct
  source 1..20: mol_type = other DNA
cggcgctgctcgcgtctctg

SEQ ID NO: 168657 - DNA, 20 bp, synthetic construct
  source 1..20: mol_type = other DNA
acggcgctgctcgcgtctct

SEQ ID NO: 168658 - DNA, 20 bp, synthetic construct
  source 1..20: mol_type = other DNA
cacggcgctgctcgcgtctc

SEQ ID NO: 168659 - DNA, 20 bp, synthetic construct
  source 1..20: mol_type = other DNA
gcacggcgctgctcgcgtct

SEQ ID NO: 168660 - DNA, 20 bp, synthetic construct
  source 1..20: mol_type = other DNA
ggcacggcgctgctcgcgtc

SEQ ID NO: 168661 - DNA, 20 bp, synthetic construct
  source 1..20: mol_type = other DNA
aggcacggcgctgctcgcgt

SEQ ID NO: 168662 - DNA, 20 bp, synthetic construct
  source 1..20: mol_type = other DNA
caggcacggcgctgctcgcg

SEQ ID NO: 168663 - DNA, 20 bp, synthetic construct
  source 1..20: mol_type = other DNA
tcaggcacggcgctgctcgc

SEQ ID NO: 168664 - DNA, 20 bp, synthetic construct
  source 1..20: mol_type = other DNA
ctcaggcacggcgctgctcg

SEQ ID NO: 168665 - DNA, 20 bp, synthetic construct
  source 1..20: mol_type = other DNA
tctcaggcacggcgctgctc

SEQ ID NO: 168666 - DNA, 20 bp, synthetic construct
  source 1..20: mol_type = other DNA
ttctcaggcacggcgctgct

SEQ ID NO: 168667 - DNA, 20 bp, synthetic construct
  source 1..20: mol_type = other DNA
gttctcaggcacggcgctgc

SEQ ID NO: 168668 - DNA, 20 bp, synthetic construct
  source 1..20: mol_type = other DNA
tgttctcaggcacggcgctg

SEQ ID NO: 168669 - DNA, 20 bp, synthetic construct
  source 1..20: mol_type = other DNA
ctgttctcaggcacggcgct

SEQ ID NO: 168670 - DNA, 20 bp, synthetic construct
  source 1..20: mol_type = other DNA
actgttctcaggcacggcgc

SEQ ID NO: 168671 - DNA, 20 bp, synthetic construct
  source 1..20: mol_type = other DNA
cactgttctcaggcacggcg

SEQ ID NO: 168672 - DNA, 20 bp, synthetic construct
  source 1..20: mol_type = other DNA
gcactgttctcaggcacggc

SEQ ID NO: 168673 - DNA, 20 bp, synthetic construct
  source 1..20: mol_type = other DNA
cgcactgttctcaggcacgg

SEQ ID NO: 168674 - DNA, 20 bp, synthetic construct
  source 1..20: mol_type = other DNA
gcgcactgttctcaggcacg

SEQ ID NO: 168675 - DNA, 20 bp, synthetic construct
  source 1..20: mol_type = other DNA
cgcgcactgttctcaggcac

SEQ ID NO: 168676 - DNA, 20 bp, synthetic construct
  source 1..20: mol_type = other DNA
ccgcgcactgttctcaggca

SEQ ID NO: 168677 - DNA, 20 bp, synthetic construct
  source 1..20: mol_type = other DNA
tccgcgcactgttctcaggc

SEQ ID NO: 168678 - DNA, 20 bp, synthetic construct
  source 1..20: mol_type = other DNA
atccgcgcactgttctcagg

SEQ ID NO: 168679 - DNA, 20 bp, synthetic construct
  source 1..20: mol_type = other DNA
gatccgcgcactgttctcag

SEQ ID NO: 168680 - DNA, 20 bp, synthetic construct
  source 1..20: mol_type = other DNA
ggatccgcgcactgttctca

SEQ ID NO: 168681 - DNA, 20 bp, synthetic construct
  source 1..20: mol_type = other DNA
gggatccgcgcactgttctc

SEQ ID NO: 168682 - DNA, 20 bp, synthetic construct
  source 1..20: mol_type = other DNA
tgggatccgcgcactgttct

SEQ ID NO: 168683 - DNA, 20 bp, synthetic construct
  source 1..20: mol_type = other DNA
gtgggatccgcgcactgttc

SEQ ID NO: 168684 - DNA, 20 bp, synthetic construct
  source 1..20: mol_type = other DNA
agtgggatccgcgcactgtt

SEQ ID NO: 168685 - DNA, 20 bp, synthetic construct
  source 1..20: mol_type = other DNA
cagtgggatccgcgcactgt

SEQ ID NO: 168686 - DNA, 20 bp, synthetic construct
  source 1..20: mol_type = other DNA
acagtgggatccgcgcactg

SEQ ID NO: 168687 - DNA, 20 bp, synthetic construct
  source 1..20: mol_type = other DNA
cacagtgggatccgcgcact

SEQ ID NO: 168688 - DNA, 20 bp, synthetic construct
  source 1..20: mol_type = other DNA
gcacagtgggatccgcgcac

SEQ ID NO: 168689 - DNA, 20 bp, synthetic construct
  source 1..20: mol_type = other DNA
tgcacagtgggatccgcgca

SEQ ID NO: 168690 - DNA, 20 bp, synthetic construct
  source 1..20: mol_type = other DNA
gtgcacagtgggatccgcgc

SEQ ID NO: 168691 - DNA, 20 bp, synthetic construct
  source 1..20: mol_type = other DNA
cgtgcacagtgggatccgcg

SEQ ID NO: 168692 - DNA, 20 bp, synthetic construct
  source 1..20: mol_type = other DNA
gcgtgcacagtgggatccgc

SEQ ID NO: 168693 - DNA, 20 bp, synthetic construct
  source 1..20: mol_type = other DNA
agcgtgcacagtgggatccg

SEQ ID NO: 168694 - DNA, 20 bp, synthetic construct
  source 1..20: mol_type = other DNA
gagcgtgcacagtgggatcc

SEQ ID NO: 168695 - DNA, 20 bp, synthetic construct
  source 1..20: mol_type = other DNA
cgagcgtgcacagtgggatc

SEQ ID NO: 168696 - DNA, 20 bp, synthetic construct
  source 1..20: mol_type = other DNA
gcgagcgtgcacagtgggat

SEQ ID NO: 168697 - DNA, 20 bp, synthetic construct
  source 1..20: mol_type = other DNA
tgcgagcgtgcacagtggga

SEQ ID NO: 168698 - DNA, 20 bp, synthetic construct
  source 1..20: mol_type = other DNA
ttgcgagcgtgcacagtggg

SEQ ID NO: 168699 - DNA, 20 bp, synthetic construct
  source 1..20: mol_type = other DNA
tttgcgagcgtgcacagtgg

SEQ ID NO: 168700 - DNA, 20 bp, synthetic construct
  source 1..20: mol_type = other DNA
ctttgcgagcgtgcacagtg

SEQ ID NO: 168701 - DNA, 20 bp, synthetic construct
  source 1..20: mol_type = other DNA
cctttgcgagcgtgcacagt

SEQ ID NO: 168702 - DNA, 20 bp, synthetic construct
  source 1..20: mol_type = other DNA
gcctttgcgagcgtgcacag

SEQ ID NO: 168703 - DNA, 20 bp, synthetic construct
  source 1..20: mol_type = other DNA
tgcctttgcgagcgtgcaca

SEQ ID NO: 168704 - DNA, 20 bp, synthetic construct
  source 1..20: mol_type = other DNA
ctgcctttgcgagcgtgcac

SEQ ID NO: 168705 - DNA, 20 bp, synthetic construct
  source 1..20: mol_type = other DNA
cctgcctttgcgagcgtgca

SEQ ID NO: 168706 - DNA, 20 bp, synthetic construct
  source 1..20: mol_type = other DNA
ccctgcctttgcgagcgtgc

SEQ ID NO: 168707 - DNA, 20 bp, synthetic construct
  source 1..20: mol_type = other DNA
accctgcctttgcgagcgtg

SEQ ID NO: 168708 - DNA, 20 bp, synthetic construct
  source 1..20: mol_type = other DNA
aaccctgcctttgcgagcgt

SEQ ID NO: 168709 - DNA, 20 bp, synthetic construct
  source 1..20: mol_type = other DNA
gaaccctgcctttgcgagcg

SEQ ID NO: 168710 - DNA, 20 bp, synthetic construct
  source 1..20: mol_type = other DNA
tgaaccctgcctttgcgagc

SEQ ID NO: 168711 - DNA, 20 bp, synthetic construct
  source 1..20: mol_type = other DNA
gtgaaccctgcctttgcgag

SEQ ID NO: 168712 - DNA, 20 bp, synthetic construct
  source 1..20: mol_type = other DNA
ggtgaaccctgcctttgcga

SEQ ID NO: 168713 - DNA, 20 bp, synthetic construct
  source 1..20: mol_type = other DNA
aggtgaaccctgcctttgcg

SEQ ID NO: 168714 - DNA, 20 bp, synthetic construct
  source 1..20: mol_type = other DNA
caggtgaaccctgcctttgc

SEQ ID NO: 168715 - DNA, 20 bp, synthetic construct
  source 1..20: mol_type = other DNA
ccaggtgaaccctgcctttg

SEQ ID NO: 168716 - DNA, 20 bp, synthetic construct
  source 1..20: mol_type = other DNA
gccaggtgaaccctgccttt

SEQ ID NO: 168717 - DNA, 20 bp, synthetic construct
  source 1..20: mol_type = other DNA
ggccaggtgaaccctgcctt

SEQ ID NO: 168718 - DNA, 20 bp, synthetic construct
  source 1..20: mol_type = other DNA
aggccaggtgaaccctgcct

SEQ ID NO: 168719 - DNA, 20 bp, synthetic construct
  source 1..20: mol_type = other DNA
caggccaggtgaaccctgcc

SEQ ID NO: 168720 - DNA, 20 bp, synthetic construct
  source 1..20: mol_type = other DNA
ccaggccaggtgaaccctgc

SEQ ID NO: 168721 - DNA, 20 bp, synthetic construct
  source 1..20: mol_type = other DNA
gccaggccaggtgaaccctg

SEQ ID NO: 168722 - DNA, 20 bp, synthetic construct
  source 1..20: mol_type = other DNA
cgccaggccaggtgaaccct

SEQ ID NO: 168723 - DNA, 20 bp, synthetic construct
  source 1..20: mol_type = other DNA
tcgccaggccaggtgaaccc

SEQ ID NO: 168724 - DNA, 20 bp, synthetic construct
  source 1..20: mol_type = other DNA
atcgccaggccaggtgaacc

SEQ ID NO: 168725 - DNA, 20 bp, synthetic construct
  source 1..20: mol_type = other DNA
catcgccaggccaggtgaac

SEQ ID NO: 168726 - DNA, 20 bp, synthetic construct
  source 1..20: mol_type = other DNA
acatcgccaggccaggtgaa

SEQ ID NO: 168727 - DNA, 20 bp, synthetic construct
  source 1..20: mol_type = other DNA
cacatcgccaggccaggtga

SEQ ID NO: 168728 - DNA, 20 bp, synthetic construct
  source 1..20: mol_type = other DNA
ccacatcgccaggccaggtg

SEQ ID NO: 168729 - DNA, 20 bp, synthetic construct
  source 1..20: mol_type = other DNA
tccacatcgccaggccaggt

SEQ ID NO: 168730 - DNA, 20 bp, synthetic construct
  source 1..20: mol_type = other DNA
gtccacatcgccaggccagg

SEQ ID NO: 168731 - DNA, 20 bp, synthetic construct
  source 1..20: mol_type = other DNA
cgtccacatcgccaggccag

SEQ ID NO: 168732 - DNA, 20 bp, synthetic construct
  source 1..20: mol_type = other DNA
ccgtccacatcgccaggcca

SEQ ID NO: 168733 - DNA, 20 bp, synthetic construct
  source 1..20: mol_type = other DNA
tccgtccacatcgccaggcc

SEQ ID NO: 168734 - DNA, 20 bp, synthetic construct
  source 1..20: mol_type = other DNA
gtccgtccacatcgccaggc

SEQ ID NO: 168735 - DNA, 20 bp, synthetic construct
  source 1..20: mol_type = other DNA
agtccgtccacatcgccagg

SEQ ID NO: 168736 - DNA, 20 bp, synthetic construct
  source 1..20: mol_type = other DNA
gagtccgtccacatcgccag

SEQ ID NO: 168737 - DNA, 20 bp, synthetic construct
  source 1..20: mol_type = other DNA
cgagtccgtccacatcgcca

SEQ ID NO: 168738 - DNA, 20 bp, synthetic construct
  source 1..20: mol_type = other DNA
ccgagtccgtccacatcgcc

SEQ ID NO: 168739 - DNA, 20 bp, synthetic construct
  source 1..20: mol_type = other DNA
gccgagtccgtccacatcgc

SEQ ID NO: 168740 - DNA, 20 bp, synthetic construct
  source 1..20: mol_type = other DNA
cgccgagtccgtccacatcg

SEQ ID NO: 168741 - DNA, 20 bp, synthetic construct
  source 1..20: mol_type = other DNA
ccgccgagtccgtccacatc

SEQ ID NO: 168742 - DNA, 20 bp, synthetic construct
  source 1..20: mol_type = other DNA
gccgccgagtccgtccacat

SEQ ID NO: 168743 - DNA, 20 bp, synthetic construct
  source 1..20: mol_type = other DNA
ggccgccgagtccgtccaca

SEQ ID NO: 168744 - DNA, 20 bp, synthetic construct
  source 1..20: mol_type = other DNA
cggccgccgagtccgtccac

SEQ ID NO: 168745 - DNA, 20 bp, synthetic construct
  source 1..20: mol_type = other DNA
gcggccgccgagtccgtcca

SEQ ID NO: 168746 - DNA, 20 bp, synthetic construct
  source 1..20: mol_type = other DNA
agcggccgccgagtccgtcc

SEQ ID NO: 168747 - DNA, 20 bp, synthetic construct
  source 1..20: mol_type = other DNA
cagcggccgccgagtccgtc

SEQ ID NO: 168748 - DNA, 20 bp, synthetic construct
  source 1..20: mol_type = other DNA
ccagcggccgccgagtccgt

SEQ ID NO: 168749 - DNA, 20 bp, synthetic construct
  source 1..20: mol_type = other DNA
accagcggccgccgagtccg

SEQ ID NO: 168750 - DNA, 20 bp, synthetic construct
  source 1..20: mol_type = other DNA
gaccagcggccgccgagtcc

SEQ ID NO: 168751 - DNA, 20 bp, synthetic construct
  source 1..20: mol_type = other DNA
ggaccagcggccgccgagtc

SEQ ID NO: 168752 - DNA, 20 bp, synthetic construct
  source 1..20: mol_type = other DNA
gggaccagcggccgccgagt

SEQ ID NO: 168753 - DNA, 20 bp, synthetic construct
  source 1..20: mol_type = other DNA
ggggaccagcggccgccgag

SEQ ID NO: 168754 - DNA, 20 bp, synthetic construct
  source 1..20: mol_type = other DNA
cggggaccagcggccgccga

SEQ ID NO: 168755 - DNA, 20 bp, synthetic construct
  source 1..20: mol_type = other DNA
acggggaccagcggccgccg

SEQ ID NO: 168756 - DNA, 20 bp, synthetic construct
  source 1..20: mol_type = other DNA
aacggggaccagcggccgcc

SEQ ID NO: 168757 - DNA, 20 bp, synthetic construct
  source 1..20: mol_type = other DNA
gaacggggaccagcggccgc

SEQ ID NO: 168758 - DNA, 20 bp, synthetic construct
  source 1..20: mol_type = other DNA
cgaacggggaccagcggccg

SEQ ID NO: 168759 - DNA, 20 bp, synthetic construct
  source 1..20: mol_type = other DNA
gcgaacggggaccagcggcc

SEQ ID NO: 168760 - DNA, 20 bp, synthetic construct
  source 1..20: mol_type = other DNA
cgcgaacggggaccagcggc

SEQ ID NO: 168761 - DNA, 20 bp, synthetic construct
  source 1..20: mol_type = other DNA
ccgcgaacggggaccagcgg

SEQ ID NO: 168762 - DNA, 20 bp, synthetic construct
  source 1..20: mol_type = other DNA
cccgcgaacggggaccagcg

SEQ ID NO: 168763 - DNA, 20 bp, synthetic construct
  source 1..20: mol_type = other DNA
gcccgcgaacggggaccagc

SEQ ID NO: 168764 - DNA, 20 bp, synthetic construct
  source 1..20: mol_type = other DNA
tgcccgcgaacggggaccag

SEQ ID NO: 168765 - DNA, 20 bp, synthetic construct
  source 1..20: mol_type = other DNA
gtgcccgcgaacggggacca

SEQ ID NO: 168766 - DNA, 20 bp, synthetic construct
  source 1..20: mol_type = other DNA
cgtgcccgcgaacggggacc

SEQ ID NO: 168767 - DNA, 20 bp, synthetic construct
  source 1..20: mol_type = other DNA
gcgtgcccgcgaacggggac

SEQ ID NO: 168768 - DNA, 20 bp, synthetic construct
  source 1..20: mol_type = other DNA
tgcgtgcccgcgaacgggga

SEQ ID NO: 168769 - DNA, 20 bp, synthetic construct
  source 1..20: mol_type = other DNA
gtgcgtgcccgcgaacgggg

SEQ ID NO: 168770 - DNA, 20 bp, synthetic construct
  source 1..20: mol_type = other DNA
tgtgcgtgcccgcgaacggg

SEQ ID NO: 168771 - DNA, 20 bp, synthetic construct
  source 1..20: mol_type = other DNA
ctgtgcgtgcccgcgaacgg

SEQ ID NO: 168772 - DNA, 20 bp, synthetic construct
  source 1..20: mol_type = other DNA
gctgtgcgtgcccgcgaacg

SEQ ID NO: 168773 - DNA, 20 bp, synthetic construct
  source 1..20: mol_type = other DNA
ggctgtgcgtgcccgcgaac

SEQ ID NO: 168774 - DNA, 20 bp, synthetic construct
  source 1..20: mol_type = other DNA
cggctgtgcgtgcccgcgaa

SEQ ID NO: 168775 - DNA, 20 bp, synthetic construct
  source 1..20: mol_type = other DNA
gcggctgtgcgtgcccgcga

SEQ ID NO: 168776 - DNA, 20 bp, synthetic construct
  source 1..20: mol_type = other DNA
tgcggctgtgcgtgcccgcg

SEQ ID NO: 168777 - DNA, 20 bp, synthetic construct
  source 1..20: mol_type = other DNA
ctgcggctgtgcgtgcccgc

SEQ ID NO: 168778 - DNA, 20 bp, synthetic construct
  source 1..20: mol_type = other DNA
gctgcggctgtgcgtgcccg

SEQ ID NO: 168779 - DNA, 20 bp, synthetic construct
  source 1..20: mol_type = other DNA
ggctgcggctgtgcgtgccc

SEQ ID NO: 168780 - DNA, 20 bp, synthetic construct
  source 1..20: mol_type = other DNA
tggctgcggctgtgcgtgcc

SEQ ID NO: 168781 - DNA, 20 bp, synthetic construct
  source 1..20: mol_type = other DNA
gtggctgcggctgtgcgtgc

SEQ ID NO: 168782 - DNA, 20 bp, synthetic construct
  source 1..20: mol_type = other DNA
cgtggctgcggctgtgcgtg

SEQ ID NO: 168783 - DNA, 20 bp, synthetic construct
  source 1..20: mol_type = other DNA
gcgtggctgcggctgtgcgt

SEQ ID NO: 168784 - DNA, 20 bp, synthetic construct
  source 1..20: mol_type = other DNA
tgcgtggctgcggctgtgcg

SEQ ID NO: 168785 - DNA, 20 bp, synthetic construct
  source 1..20: mol_type = other DNA
gtgcgtggctgcggctgtgc

SEQ ID NO: 168786 - DNA, 20 bp, synthetic construct
  source 1..20: mol_type = other DNA
cgtgcgtggctgcggctgtg

SEQ ID NO: 168787 - DNA, 20 bp, synthetic construct
  source 1..20: mol_type = other DNA
ccgtgcgtggctgcggctgt

SEQ ID NO: 168788 - DNA, 20 bp, synthetic construct
  source 1..20: mol_type = other DNA
tccgtgcgtggctgcggctg

SEQ ID NO: 168789 - DNA, 20 bp, synthetic construct
  source 1..20: mol_type = other DNA
atccgtgcgtggctgcggct

SEQ ID NO: 168790 - DNA, 20 bp, synthetic construct
  source 1..20: mol_type = other DNA
catccgtgcgtggctgcggc

SEQ ID NO: 168791 - DNA, 20 bp, synthetic construct
  source 1..20: mol_type = other DNA
ccatccgtgcgtggctgcgg

SEQ ID NO: 168792 - DNA, 20 bp, synthetic construct
  source 1..20: mol_type = other DNA
cccatccgtgcgtggctgcg

SEQ ID NO: 168793 - DNA, 20 bp, synthetic construct
  source 1..20: mol_type = other DNA
gcccatccgtgcgtggctgc

SEQ ID NO: 168794 - DNA, 20 bp, synthetic construct
  source 1..20: mol_type = other DNA
cgcccatccgtgcgtggctg

SEQ ID NO: 168795 - DNA, 20 bp, synthetic construct
  source 1..20: mol_type = other DNA
gcgcccatccgtgcgtggct

SEQ ID NO: 168796 - DNA, 20 bp, synthetic construct
  source 1..20: mol_type = other DNA
cgcgcccatccgtgcgtggc

SEQ ID NO: 168797 - DNA, 20 bp, synthetic construct
  source 1..20: mol_type = other DNA
ccgcgcccatccgtgcgtgg

SEQ ID NO: 168798 - DNA, 20 bp, synthetic construct
  source 1..20: mol_type = other DNA
cccgcgcccatccgtgcgtg

SEQ ID NO: 168799 - DNA, 20 bp, synthetic construct
  source 1..20: mol_type = other DNA
ccccgcgcccatccgtgcgt

SEQ ID NO: 168800 - DNA, 20 bp, synthetic construct
  source 1..20: mol_type = other DNA
gccccgcgcccatccgtgcg

SEQ ID NO: 168801 - DNA, 20 bp, synthetic construct
  source 1..20: mol_type = other DNA
agccccgcgcccatccgtgc

SEQ ID NO: 168802 - DNA, 20 bp, synthetic construct
  source 1..20: mol_type = other DNA
cagccccgcgcccatccgtg

SEQ ID NO: 168803 - DNA, 20 bp, synthetic construct
  source 1..20: mol_type = other DNA
gcagccccgcgcccatccgt

SEQ ID NO: 168804 - DNA, 20 bp, synthetic construct
  source 1..20: mol_type = other DNA
tgcagccccgcgcccatccg

SEQ ID NO: 168805 - DNA, 20 bp, synthetic construct
  source 1..20: mol_type = other DNA
ctgcagccccgcgcccatcc

SEQ ID NO: 168806 - DNA, 20 bp, synthetic construct
  source 1..20: mol_type = other DNA
cctgcagccccgcgcccatc

SEQ ID NO: 168807 - DNA, 20 bp, synthetic construct
  source 1..20: mol_type = other DNA
acctgcagccccgcgcccat

SEQ ID NO: 168808 - DNA, 20 bp, synthetic construct
  source 1..20: mol_type = other DNA
cacctgcagccccgcgccca

SEQ ID NO: 168809 - DNA, 20 bp, synthetic construct
  source 1..20: mol_type = other DNA
gcacctgcagccccgcgccc

SEQ ID NO: 168810 - DNA, 20 bp, synthetic construct
  source 1..20: mol_type = other DNA
tgcacctgcagccccgcgcc

SEQ ID NO: 168811 - DNA, 20 bp, synthetic construct
  source 1..20: mol_type = other DNA
atgcacctgcagccccgcgc

SEQ ID NO: 168812 - DNA, 20 bp, synthetic construct
  source 1..20: mol_type = other DNA
gatgcacctgcagccccgcg

SEQ ID NO: 168813 - DNA, 20 bp, synthetic construct
  source 1..20: mol_type = other DNA
agatgcacctgcagccccgc

SEQ ID NO: 168814 - DNA, 20 bp, synthetic construct
  source 1..20: mol_type = other DNA
gagatgcacctgcagccccg

SEQ ID NO: 168815 - DNA, 20 bp, synthetic construct
  source 1..20: mol_type = other DNA
cgagatgcacctgcagcccc

SEQ ID NO: 168816 - DNA, 20 bp, synthetic construct
  source 1..20: mol_type = other DNA
ccgagatgcacctgcagccc

SEQ ID NO: 168817 - DNA, 20 bp, synthetic construct
  source 1..20: mol_type = other DNA
cccgagatgcacctgcagcc

SEQ ID NO: 168818 - DNA, 20 bp, synthetic construct
  source 1..20: mol_type = other DNA
ccccgagatgcacctgcagc

SEQ ID NO: 168819 - DNA, 20 bp, synthetic construct
  source 1..20: mol_type = other DNA
gccccgagatgcacctgcag

SEQ ID NO: 168820 - DNA, 20 bp, synthetic construct
  source 1..20: mol_type = other DNA
cgccccgagatgcacctgca

SEQ ID NO: 168821 - DNA, 20 bp, synthetic construct
  source 1..20: mol_type = other DNA
ccgccccgagatgcacctgc

SEQ ID NO: 168822 - DNA, 20 bp, synthetic construct
  source 1..20: mol_type = other DNA
tccgccccgagatgcacctg

SEQ ID NO: 168823 - DNA, 20 bp, synthetic construct
  source 1..20: mol_type = other DNA
atccgccccgagatgcacct

SEQ ID NO: 168824 - DNA, 20 bp, synthetic construct
  source 1..20: mol_type = other DNA
aatccgccccgagatgcacc

SEQ ID NO: 168825 - DNA, 20 bp, synthetic construct
  source 1..20: mol_type = other DNA
aaatccgccccgagatgcac

SEQ ID NO: 168826 - DNA, 20 bp, synthetic construct
  source 1..20: mol_type = other DNA
gaaatccgccccgagatgca

SEQ ID NO: 168827 - DNA, 20 bp, synthetic construct
  source 1..20: mol_type = other DNA
agaaatccgccccgagatgc

SEQ ID NO: 168828 - DNA, 20 bp, synthetic construct
  source 1..20: mol_type = other DNA
aagaaatccgccccgagatg

SEQ ID NO: 168829 - DNA, 20 bp, synthetic construct
  source 1..20: mol_type = other DNA
aaagaaatccgccccgagat

SEQ ID NO: 168830 - DNA, 20 bp, synthetic construct
  source 1..20: mol_type = other DNA
gaaagaaatccgccccgaga

SEQ ID NO: 168831 - DNA, 20 bp, synthetic construct
  source 1..20: mol_type = other DNA
agaaagaaatccgccccgag

SEQ ID NO: 168832 - DNA, 20 bp, synthetic construct
  source 1..20: mol_type = other DNA
gagaaagaaatccgccccga

SEQ ID NO: 168833 - DNA, 20 bp, synthetic construct
  source 1..20: mol_type = other DNA
tgagaaagaaatccgccccg

SEQ ID NO: 168834 - DNA, 20 bp, synthetic construct
  source 1..20: mol_type = other DNA
ctgagaaagaaatccgcccc

SEQ ID NO: 168835 - DNA, 20 bp, synthetic construct
  source 1..20: mol_type = other DNA
gctgagaaagaaatccgccc

SEQ ID NO: 168836 - DNA, 20 bp, synthetic construct
  source 1..20: mol_type = other DNA
cgctgagaaagaaatccgcc

SEQ ID NO: 168837 - DNA, 20 bp, synthetic construct
  source 1..20: mol_type = other DNA
gcgctgagaaagaaatccgc

SEQ ID NO: 168838 - DNA, 20 bp, synthetic construct
  source 1..20: mol_type = other DNA
agcgctgagaaagaaatccg

SEQ ID NO: 168839 - DNA, 20 bp, synthetic construct
  source 1..20: mol_type = other DNA
gagcgctgagaaagaaatcc

SEQ ID NO: 168840 - DNA, 20 bp, synthetic construct
  source 1..20: mol_type = other DNA
cgagcgctgagaaagaaatc

SEQ ID NO: 168841 - DNA, 20 bp, synthetic construct
  source 1..20: mol_type = other DNA
ccgagcgctgagaaagaaat

SEQ ID NO: 168842 - DNA, 20 bp, synthetic construct
  source 1..20: mol_type = other DNA
tccgagcgctgagaaagaaa

SEQ ID NO: 168843 - DNA, 20 bp, synthetic construct
  source 1..20: mol_type = other DNA
ctccgagcgctgagaaagaa

SEQ ID NO: 168844 - DNA, 20 bp, synthetic construct
  source 1..20: mol_type = other DNA
gctccgagcgctgagaaaga

SEQ ID NO: 168845 - DNA, 20 bp, synthetic construct
  source 1..20: mol_type = other DNA
cgctccgagcgctgagaaag

SEQ ID NO: 168846 - DNA, 20 bp, synthetic construct
  source 1..20: mol_type = other DNA
gcgctccgagcgctgagaaa

SEQ ID NO: 168847 - DNA, 20 bp, synthetic construct
  source 1..20: mol_type = other DNA
tgcgctccgagcgctgagaa

SEQ ID NO: 168848 - DNA, 20 bp, synthetic construct
  source 1..20: mol_type = other DNA
ctgcgctccgagcgctgaga

SEQ ID NO: 168849 - DNA, 20 bp, synthetic construct
  source 1..20: mol_type = other DNA
cctgcgctccgagcgctgag

SEQ ID NO: 168850 - DNA, 20 bp, synthetic construct
  source 1..20: mol_type = other DNA
ccctgcgctccgagcgctga

SEQ ID NO: 168851 - DNA, 20 bp, synthetic construct
  source 1..20: mol_type = other DNA
gccctgcgctccgagcgctg

SEQ ID NO: 168852 - DNA, 20 bp, synthetic construct
  source 1..20: mol_type = other DNA
cgccctgcgctccgagcgct

SEQ ID NO: 168853 - DNA, 20 bp, synthetic construct
  source 1..20: mol_type = other DNA
gcgccctgcgctccgagcgc

SEQ ID NO: 168854 - DNA, 20 bp, synthetic construct
  source 1..20: mol_type = other DNA
ggcgccctgcgctccgagcg

SEQ ID NO: 168855 - DNA, 20 bp, synthetic construct
  source 1..20: mol_type = other DNA
gggcgccctgcgctccgagc

SEQ ID NO: 168856 - DNA, 20 bp, synthetic construct
  source 1..20: mol_type = other DNA
cgggcgccctgcgctccgag

SEQ ID NO: 168857 - DNA, 20 bp, synthetic construct
  source 1..20: mol_type = other DNA
ccgggcgccctgcgctccga

SEQ ID NO: 168858 - DNA, 20 bp, synthetic construct
  source 1..20: mol_type = other DNA
gccgggcgccctgcgctccg

SEQ ID NO: 168859 - DNA, 20 bp, synthetic construct
  source 1..20: mol_type = other DNA
cgccgggcgccctgcgctcc

SEQ ID NO: 168860 - DNA, 20 bp, synthetic construct
  source 1..20: mol_type = other DNA
acgccgggcgccctgcgctc

SEQ ID NO: 168861 - DNA, 20 bp, synthetic construct
  source 1..20: mol_type = other DNA
cacgccgggcgccctgcgct

SEQ ID NO: 168862 - DNA, 20 bp, synthetic construct
  source 1..20: mol_type = other DNA
acacgccgggcgccctgcgc

SEQ ID NO: 168863 - DNA, 20 bp, synthetic construct
  source 1..20: mol_type = other DNA
cacacgccgggcgccctgcg

SEQ ID NO: 168864 - DNA, 20 bp, synthetic construct
  source 1..20: mol_type = other DNA
gcacacgccgggcgccctgc

SEQ ID NO: 168865 - DNA, 20 bp, synthetic construct
  source 1..20: mol_type = other DNA
cgcacacgccgggcgccctg

SEQ ID NO: 168866 - DNA, 20 bp, synthetic construct
  source 1..20: mol_type = other DNA
gcgcacacgccgggcgccct

SEQ ID NO: 168867 - DNA, 20 bp, synthetic construct
  source 1..20: mol_type = other DNA
agcgcacacgccgggcgccc

SEQ ID NO: 168868 - DNA, 20 bp, synthetic construct
  source 1..20: mol_type = other DNA
gagcgcacacgccgggcgcc

SEQ ID NO: 168869 - DNA, 20 bp, synthetic construct
  source 1..20: mol_type = other DNA
ggagcgcacacgccgggcgc

SEQ ID NO: 168870 - DNA, 20 bp, synthetic construct
  source 1..20: mol_type = other DNA
gggagcgcacacgccgggcg

SEQ ID NO: 168871 - DNA, 20 bp, synthetic construct
  source 1..20: mol_type = other DNA
agggagcgcacacgccgggc

SEQ ID NO: 168872 - DNA, 20 bp, synthetic construct
  source 1..20: mol_type = other DNA
cagggagcgcacacgccggg

SEQ ID NO: 168873 - DNA, 20 bp, synthetic construct
  source 1..20: mol_type = other DNA
gcagggagcgcacacgccgg

SEQ ID NO: 168874 - DNA, 20 bp, synthetic construct
  source 1..20: mol_type = other DNA
ggcagggagcgcacacgccg

SEQ ID NO: 168875 - DNA, 20 bp, synthetic construct
  source 1..20: mol_type = other DNA
cggcagggagcgcacacgcc

SEQ ID NO: 168876 - DNA, 20 bp, synthetic construct
  source 1..20: mol_type = other DNA
ccggcagggagcgcacacgc

SEQ ID NO: 168877 - DNA, 20 bp, synthetic construct
  source 1..20: mol_type = other DNA
tccggcagggagcgcacacg

SEQ ID NO: 168878 - DNA, 20 bp, synthetic construct
  source 1..20: mol_type = other DNA
ctccggcagggagcgcacac

SEQ ID NO: 168879 - DNA, 20 bp, synthetic construct
  source 1..20: mol_type = other DNA
cctccggcagggagcgcaca

SEQ ID NO: 168880 - DNA, 20 bp, synthetic construct
  source 1..20: mol_type = other DNA
gcctccggcagggagcgcac

SEQ ID NO: 168881 - DNA, 20 bp, synthetic construct
  source 1..20: mol_type = other DNA
cgcctccggcagggagcgca

SEQ ID NO: 168882 - DNA, 20 bp, synthetic construct
  source 1..20: mol_type = other DNA
gcgcctccggcagggagcgc

SEQ ID NO: 168883 - DNA, 20 bp, synthetic construct
  source 1..20: mol_type = other DNA
cgcgcctccggcagggagcg

SEQ ID NO: 168884 - DNA, 20 bp, synthetic construct
  source 1..20: mol_type = other DNA
ccgcgcctccggcagggagc

SEQ ID NO: 168885 - DNA, 20 bp, synthetic construct
  source 1..20: mol_type = other DNA
cccgcgcctccggcagggag

SEQ ID NO: 168886 - DNA, 20 bp, synthetic construct
  source 1..20: mol_type = other DNA
ccccgcgcctccggcaggga

SEQ ID NO: 168887 - DNA, 20 bp, synthetic construct
  source 1..20: mol_type = other DNA
gccccgcgcctccggcaggg

SEQ ID NO: 168888 - DNA, 20 bp, synthetic construct
  source 1..20: mol_type = other DNA
agccccgcgcctccggcagg

SEQ ID NO: 168889 - DNA, 20 bp, synthetic construct
  source 1..20: mol_type = other DNA
cagccccgcgcctccggcag

SEQ ID NO: 168890 - DNA, 20 bp, synthetic construct
  source 1..20: mol_type = other DNA
ccagccccgcgcctccggca

SEQ ID NO: 168891 - DNA, 20 bp, synthetic construct
  source 1..20: mol_type = other DNA
gccagccccgcgcctccggc

SEQ ID NO: 168892 - DNA, 20 bp, synthetic construct
  source 1..20: mol_type = other DNA
cgccagccccgcgcctccgg

SEQ ID NO: 168893 - DNA, 20 bp, synthetic construct
  source 1..20: mol_type = other DNA
gcgccagccccgcgcctccg

SEQ ID NO: 168894 - DNA, 20 bp, synthetic construct
  source 1..20: mol_type = other DNA
cgcgccagccccgcgcctcc

SEQ ID NO: 168895 - DNA, 20 bp, synthetic construct
  source 1..20: mol_type = other DNA
gcgcgccagccccgcgcctc

SEQ ID NO: 168896 - DNA, 20 bp, synthetic construct
  source 1..20: mol_type = other DNA
tgcgcgccagccccgcgcct

SEQ ID NO: 168897 - DNA, 20 bp, synthetic construct
  source 1..20: mol_type = other DNA
ctgcgcgccagccccgcgcc

SEQ ID NO: 168898 - DNA, 20 bp, synthetic construct
  source 1..20: mol_type = other DNA
cctgcgcgccagccccgcgc

SEQ ID NO: 168899 - DNA, 20 bp, synthetic construct
  source 1..20: mol_type = other DNA
ccctgcgcgccagccccgcg

SEQ ID NO: 168900 - DNA, 20 bp, synthetic construct
  source 1..20: mol_type = other DNA
gccctgcgcgccagccccgc

SEQ ID NO: 168901 - DNA, 20 bp, synthetic construct
  source 1..20: mol_type = other DNA
agccctgcgcgccagccccg

SEQ ID NO: 168902 - DNA, 20 bp, synthetic construct
  source 1..20: mol_type = other DNA
gagccctgcgcgccagcccc

SEQ ID NO: 168903 - DNA, 20 bp, synthetic construct
  source 1..20: mol_type = other DNA
cgagccctgcgcgccagccc

SEQ ID NO: 168904 - DNA, 20 bp, synthetic construct
  source 1..20: mol_type = other DNA
gcgagccctgcgcgccagcc

SEQ ID NO: 168905 - DNA, 20 bp, synthetic construct
  source 1..20: mol_type = other DNA
ggcgagccctgcgcgccagc

SEQ ID NO: 168906 - DNA, 20 bp, synthetic construct
  source 1..20: mol_type = other DNA
gggcgagccctgcgcgccag

SEQ ID NO: 168907 - DNA, 20 bp, synthetic construct
  source 1..20: mol_type = other DNA
ggggcgagccctgcgcgcca

SEQ ID NO: 168908 - DNA, 20 bp, synthetic construct
  source 1..20: mol_type = other DNA
aggggcgagccctgcgcgcc

SEQ ID NO: 168909 - DNA, 20 bp, synthetic construct
  source 1..20: mol_type = other DNA
gaggggcgagccctgcgcgc

SEQ ID NO: 168910 - DNA, 20 bp, synthetic construct
  source 1..20: mol_type = other DNA
tgaggggcgagccctgcgcg

SEQ ID NO: 168911 - DNA, 20 bp, synthetic construct
  source 1..20: mol_type = other DNA
gtgaggggcgagccctgcgc

SEQ ID NO: 168912 - DNA, 20 bp, synthetic construct
  source 1..20: mol_type = other DNA
agtgaggggcgagccctgcg

SEQ ID NO: 168913 - DNA, 20 bp, synthetic construct
  source 1..20: mol_type = other DNA
cagtgaggggcgagccctgc

SEQ ID NO: 168914 - DNA, 20 bp, synthetic construct
  source 1..20: mol_type = other DNA
gcagtgaggggcgagccctg

SEQ ID NO: 168915 - DNA, 20 bp, synthetic construct
  source 1..20: mol_type = other DNA
cgcagtgaggggcgagccct

SEQ ID NO: 168916 - DNA, 20 bp, synthetic construct
  source 1..20: mol_type = other DNA
ccgcagtgaggggcgagccc

SEQ ID NO: 168917 - DNA, 20 bp, synthetic construct
  source 1..20: mol_type = other DNA
gccgcagtgaggggcgagcc

SEQ ID NO: 168918 - DNA, 20 bp, synthetic construct
  source 1..20: mol_type = other DNA
tgccgcagtgaggggcgagc

SEQ ID NO: 168919 - DNA, 20 bp, synthetic construct
  source 1..20: mol_type = other DNA
ctgccgcagtgaggggcgag

SEQ ID NO: 168920 - DNA, 20 bp, synthetic construct
  source 1..20: mol_type = other DNA
actgccgcagtgaggggcga

SEQ ID NO: 168921 - DNA, 20 bp, synthetic construct
  source 1..20: mol_type = other DNA
cactgccgcagtgaggggcg

SEQ ID NO: 168922 - DNA, 20 bp, synthetic construct
  source 1..20: mol_type = other DNA
ccactgccgcagtgaggggc

SEQ ID NO: 168923 - DNA, 20 bp, synthetic construct
  source 1..20: mol_type = other DNA
cccactgccgcagtgagggg

SEQ ID NO: 168924 - DNA, 20 bp, synthetic construct
  source 1..20: mol_type = other DNA
acccactgccgcagtgaggg

SEQ ID NO: 168925 - DNA, 20 bp, synthetic construct
  source 1..20: mol_type = other DNA
cacccactgccgcagtgagg

SEQ ID NO: 168926 - DNA, 20 bp, synthetic construct
  source 1..20: mol_type = other DNA
acacccactgccgcagtgag

SEQ ID NO: 168927 - DNA, 20 bp, synthetic construct
  source 1..20: mol_type = other DNA
cacacccactgccgcagtga

SEQ ID NO: 168928 - DNA, 20 bp, synthetic construct
  source 1..20: mol_type = other DNA
ccacacccactgccgcagtg

SEQ ID NO: 168929 - DNA, 20 bp, synthetic construct
  source 1..20: mol_type = other DNA
tccacacccactgccgcagt

SEQ ID NO: 168930 - DNA, 20 bp, synthetic construct
  source 1..20: mol_type = other DNA
gtccacacccactgccgcag

SEQ ID NO: 168931 - DNA, 20 bp, synthetic construct
  source 1..20: mol_type = other DNA
ggtccacacccactgccgca

SEQ ID NO: 168932 - DNA, 20 bp, synthetic construct
  source 1..20: mol_type = other DNA
gggtccacacccactgccgc

SEQ ID NO: 168933 - DNA, 20 bp, synthetic construct
  source 1..20: mol_type = other DNA
agggtccacacccactgccg

SEQ ID NO: 168934 - DNA, 20 bp, synthetic construct
  source 1..20: mol_type = other DNA
cagggtccacacccactgcc

SEQ ID NO: 168935 - DNA, 20 bp, synthetic construct
  source 1..20: mol_type = other DNA
ccagggtccacacccactgc

SEQ ID NO: 168936 - DNA, 20 bp, synthetic construct
  source 1..20: mol_type = other DNA
accagggtccacacccactg

SEQ ID NO: 168937 - DNA, 20 bp, synthetic construct
  source 1..20: mol_type = other DNA
caccagggtccacacccact

SEQ ID NO: 168938 - DNA, 20 bp, synthetic construct
  source 1..20: mol_type = other DNA
ccaccagggtccacacccac

SEQ ID NO: 168939 - DNA, 20 bp, synthetic construct
  source 1..20: mol_type = other DNA
cccaccagggtccacaccca

SEQ ID NO: 168940 - DNA, 20 bp, synthetic construct
  source 1..20: mol_type = other DNA
gcccaccagggtccacaccc

SEQ ID NO: 168941 - DNA, 20 bp, synthetic construct
  source 1..20: mol_type = other DNA
cgcccaccagggtccacacc

SEQ ID NO: 168942 - DNA, 20 bp, synthetic construct
  source 1..20: mol_type = other DNA
tcgcccaccagggtccacac

SEQ ID NO: 168943 - DNA, 20 bp, synthetic construct
  source 1..20: mol_type = other DNA
ctcgcccaccagggtccaca

SEQ ID NO: 168944 - DNA, 20 bp, synthetic construct
  source 1..20: mol_type = other DNA
cctcgcccaccagggtccac

SEQ ID NO: 168945 - DNA, 20 bp, synthetic construct
  source 1..20: mol_type = other DNA
tcctcgcccaccagggtcca

SEQ ID NO: 168946 - DNA, 20 bp, synthetic construct
  source 1..20: mol_type = other DNA
ttcctcgcccaccagggtcc

SEQ ID NO: 168947 - DNA, 20 bp, synthetic construct
  source 1..20: mol_type = other DNA
cttcctcgcccaccagggtc

SEQ ID NO: 168948 - DNA, 20 bp, synthetic construct
  source 1..20: mol_type = other DNA
ccttcctcgcccaccagggt

SEQ ID NO: 168949 - DNA, 20 bp, synthetic construct
  source 1..20: mol_type = other DNA
cccttcctcgcccaccaggg

SEQ ID NO: 168950 - DNA, 20 bp, synthetic construct
  source 1..20: mol_type = other DNA
ccccttcctcgcccaccagg

SEQ ID NO: 168951 - DNA, 20 bp, synthetic construct
  source 1..20: mol_type = other DNA
cccccttcctcgcccaccag

SEQ ID NO: 168952 - DNA, 20 bp, synthetic construct
  source 1..20: mol_type = other DNA
tcccccttcctcgcccacca

SEQ ID NO: 168953 - DNA, 20 bp, synthetic construct
  source 1..20: mol_type = other DNA
ctcccccttcctcgcccacc

SEQ ID NO: 168954 - DNA, 20 bp, synthetic construct
  source 1..20: mol_type = other DNA
cctcccccttcctcgcccac

SEQ ID NO: 168955 - DNA, 20 bp, synthetic construct
  source 1..20: mol_type = other DNA
tcctcccccttcctcgccca

SEQ ID NO: 168956 - DNA, 20 bp, synthetic construct
  source 1..20: mol_type = other DNA
atcctcccccttcctcgccc

SEQ ID NO: 168957 - DNA, 20 bp, synthetic construct
  source 1..20: mol_type = other DNA
tatcctcccccttcctcgcc

SEQ ID NO: 168958 - DNA, 20 bp, synthetic construct
  source 1..20: mol_type = other DNA
ctatcctcccccttcctcgc

SEQ ID NO: 168959 - DNA, 20 bp, synthetic construct
  source 1..20: mol_type = other DNA
cctatcctcccccttcctcg

SEQ ID NO: 168960 - DNA, 20 bp, synthetic construct
  source 1..20: mol_type = other DNA
gcctatcctcccccttcctc

SEQ ID NO: 168961 - DNA, 20 bp, synthetic construct
  source 1..20: mol_type = other DNA
agcctatcctcccccttcct

SEQ ID NO: 168962 - DNA, 20 bp, synthetic construct
  source 1..20: mol_type = other DNA
cagcctatcctcccccttcc

SEQ ID NO: 168963 - DNA, 20 bp, synthetic construct
  source 1..20: mol_type = other DNA
acagcctatcctcccccttc

SEQ ID NO: 168964 - DNA, 20 bp, synthetic construct
  source 1..20: mol_type = other DNA
cacagcctatcctccccctt

SEQ ID NO: 168965 - DNA, 20 bp, synthetic construct
  source 1..20: mol_type = other DNA
gcacagcctatcctccccct

SEQ ID NO: 168966 - DNA, 20 bp, synthetic construct
  source 1..20: mol_type = other DNA
ggcacagcctatcctccccc

SEQ ID NO: 168967 - DNA, 20 bp, synthetic construct
  source 1..20: mol_type = other DNA
aggcacagcctatcctcccc

SEQ ID NO: 168968 - DNA, 20 bp, synthetic construct
  source 1..20: mol_type = other DNA
gaggcacagcctatcctccc

SEQ ID NO: 168969 - DNA, 20 bp, synthetic construct
  source 1..20: mol_type = other DNA
ggaggcacagcctatcctcc

SEQ ID NO: 168970 - DNA, 20 bp, synthetic construct
  source 1..20: mol_type = other DNA
aggaggcacagcctatcctc

SEQ ID NO: 168971 - DNA, 20 bp, synthetic construct
  source 1..20: mol_type = other DNA
gaggaggcacagcctatcct

SEQ ID NO: 168972 - DNA, 20 bp, synthetic construct
  source 1..20: mol_type = other DNA
ggaggaggcacagcctatcc

SEQ ID NO: 168973 - DNA, 20 bp, synthetic construct
  source 1..20: mol_type = other DNA
gggaggaggcacagcctatc

SEQ ID NO: 168974 - DNA, 20 bp, synthetic construct
  source 1..20: mol_type = other DNA
tgggaggaggcacagcctat

SEQ ID NO: 168975 - DNA, 20 bp, synthetic construct
  source 1..20: mol_type = other DNA
gtgggaggaggcacagccta

SEQ ID NO: 168976 - DNA, 20 bp, synthetic construct
  source 1..20: mol_type = other DNA
agtgggaggaggcacagcct

SEQ ID NO: 168977 - DNA, 20 bp, synthetic construct
  source 1..20: mol_type = other DNA
gagtgggaggaggcacagcc

SEQ ID NO: 168978 - DNA, 20 bp, synthetic construct
  source 1..20: mol_type = other DNA
ggagtgggaggaggcacagc

SEQ ID NO: 168979 - DNA, 20 bp, synthetic construct
  source 1..20: mol_type = other DNA
gggagtgggaggaggcacag

SEQ ID NO: 168980 - DNA, 20 bp, synthetic construct
  source 1..20: mol_type = other DNA
cgggagtgggaggaggcaca

SEQ ID NO: 168981 - DNA, 20 bp, synthetic construct
  source 1..20: mol_type = other DNA
gcgggagtgggaggaggcac

SEQ ID NO: 168982 - DNA, 20 bp, synthetic construct
  source 1..20: mol_type = other DNA
ggcgggagtgggaggaggca

SEQ ID NO: 168983 - DNA, 20 bp, synthetic construct
  source 1..20: mol_type = other DNA
gggcgggagtgggaggaggc

SEQ ID NO: 168984 - DNA, 20 bp, synthetic construct
  source 1..20: mol_type = other DNA
ggggcgggagtgggaggagg

SEQ ID NO: 168985 - DNA, 20 bp, synthetic construct
  source 1..20: mol_type = other DNA
gggggcgggagtgggaggag

SEQ ID NO: 168986 - DNA, 20 bp, synthetic construct
  source 1..20: mol_type = other DNA
tgggggcgggagtgggagga

SEQ ID NO: 168987 - DNA, 20 bp, synthetic construct
  source 1..20: mol_type = other DNA
ctgggggcgggagtgggagg

SEQ ID NO: 168988 - DNA, 20 bp, synthetic construct
  source 1..20: mol_type = other DNA
gctgggggcgggagtgggag

SEQ ID NO: 168989 - DNA, 20 bp, synthetic construct
  source 1..20: mol_type = other DNA
ggctgggggcgggagtggga

SEQ ID NO: 168990 - DNA, 20 bp, synthetic construct
  source 1..20: mol_type = other DNA
gggctgggggcgggagtggg

SEQ ID NO: 168991 - DNA, 20 bp, synthetic construct
  source 1..20: mol_type = other DNA
ggggctgggggcgggagtgg

SEQ ID NO: 168992 - DNA, 20 bp, synthetic construct
  source 1..20: mol_type = other DNA
gggggctgggggcgggagtg

SEQ ID NO: 168993 - DNA, 20 bp, synthetic construct
  source 1..20: mol_type = other DNA
ggggggctgggggcgggagt

SEQ ID NO: 168994 - DNA, 20 bp, synthetic construct
  source 1..20: mol_type = other DNA
aggggggctgggggcgggag

SEQ ID NO: 168995 - DNA, 20 bp, synthetic construct
  source 1..20: mol_type = other DNA
aaggggggctgggggcggga

SEQ ID NO: 168996 - DNA, 20 bp, synthetic construct
  source 1..20: mol_type = other DNA
aaaggggggctgggggcggg

SEQ ID NO: 168997 - DNA, 20 bp, synthetic construct
  source 1..20: mol_type = other DNA
aaaaggggggctgggggcgg

SEQ ID NO: 168998 - DNA, 20 bp, synthetic construct
  source 1..20: mol_type = other DNA
aaaaaggggggctgggggcg

SEQ ID NO: 168999 - DNA, 20 bp, synthetic construct
  source 1..20: mol_type = other DNA
aaaaaaggggggctgggggc

SEQ ID NO: 169000 - DNA, 20 bp, synthetic construct
  source 1..20: mol_type = other DNA
aaaaaaaggggggctggggg

SEQ ID NO: 169001 - DNA, 20 bp, synthetic construct
  source 1..20: mol_type = other DNA
gaaaaaaaggggggctgggg

SEQ ID NO: 169002 - DNA, 20 bp, synthetic construct
  source 1..20: mol_type = other DNA
ggaaaaaaaggggggctggg

SEQ ID NO: 169003 - DNA, 20 bp, synthetic construct
  source 1..20: mol_type = other DNA
gggaaaaaaaggggggctgg

SEQ ID NO: 169004 - DNA, 20 bp, synthetic construct
  source 1..20: mol_type = other DNA
ggggaaaaaaaggggggctg

SEQ ID NO: 169005 - DNA, 20 bp, synthetic construct
  source 1..20: mol_type = other DNA
gggggaaaaaaaggggggct

SEQ ID NO: 169006 - DNA, 20 bp, synthetic construct
  source 1..20: mol_type = other DNA
agggggaaaaaaaggggggc

SEQ ID NO: 169007 - DNA, 20 bp, synthetic construct
  source 1..20: mol_type = other DNA
gagggggaaaaaaagggggg

SEQ ID NO: 169008 - DNA, 20 bp, synthetic construct
  source 1..20: mol_type = other DNA
cgagggggaaaaaaaggggg

SEQ ID NO: 169009 - DNA, 20 bp, synthetic construct
  source 1..20: mol_type = other DNA
ccgagggggaaaaaaagggg

SEQ ID NO: 169010 - DNA, 20 bp, synthetic construct
  source 1..20: mol_type = other DNA
tccgagggggaaaaaaaggg

SEQ ID NO: 169011 - DNA, 20 bp, synthetic construct
  source 1..20: mol_type = other DNA
ttccgagggggaaaaaaagg

SEQ ID NO: 169012 - DNA, 20 bp, synthetic construct
  source 1..20: mol_type = other DNA
gttccgagggggaaaaaaag

SEQ ID NO: 169013 - DNA, 20 bp, synthetic construct
  source 1..20: mol_type = other DNA
cgttccgagggggaaaaaaa

SEQ ID NO: 169014 - DNA, 20 bp, synthetic construct
  source 1..20: mol_type = other DNA
gcgttccgagggggaaaaaa

SEQ ID NO: 169015 - DNA, 20 bp, synthetic construct
  source 1..20: mol_type = other DNA
cgcgttccgagggggaaaaa

SEQ ID NO: 169016 - DNA, 20 bp, synthetic construct
  source 1..20: mol_type = other DNA
tcgcgttccgagggggaaaa

SEQ ID NO: 169017 - DNA, 20 bp, synthetic construct
  source 1..20: mol_type = other DNA
ctcgcgttccgagggggaaa

SEQ ID NO: 169018 - DNA, 20 bp, synthetic construct
  source 1..20: mol_type = other DNA
cctcgcgttccgagggggaa

SEQ ID NO: 169019 - DNA, 20 bp, synthetic construct
  source 1..20: mol_type = other DNA
acctcgcgttccgaggggga

SEQ ID NO: 169020 - DNA, 20 bp, synthetic construct
  source 1..20: mol_type = other DNA
cacctcgcgttccgaggggg

SEQ ID NO: 169021 - DNA, 20 bp, synthetic construct
  source 1..20: mol_type = other DNA
gcacctcgcgttccgagggg

SEQ ID NO: 169022 - DNA, 20 bp, synthetic construct
  source 1..20: mol_type = other DNA
ggcacctcgcgttccgaggg

SEQ ID NO: 169023 - DNA, 20 bp, synthetic construct
  source 1..20: mol_type = other DNA
tggcacctcgcgttccgagg

SEQ ID NO: 169024 - DNA, 20 bp, synthetic construct
  source 1..20: mol_type = other DNA
atggcacctcgcgttccgag

SEQ ID NO: 169025 - DNA, 20 bp, synthetic construct
  source 1..20: mol_type = other DNA
gatggcacctcgcgttccga

SEQ ID NO: 169026 - DNA, 20 bp, synthetic construct
  source 1..20: mol_type = other DNA
agatggcacctcgcgttccg

SEQ ID NO: 169027 - DNA, 20 bp, synthetic construct
  source 1..20: mol_type = other DNA
aagatggcacctcgcgttcc

SEQ ID NO: 169028 - DNA, 20 bp, synthetic construct
  source 1..20: mol_type = other DNA
aaagatggcacctcgcgttc

SEQ ID NO: 169029 - DNA, 20 bp, synthetic construct
  source 1..20: mol_type = other DNA
aaaagatggcacctcgcgtt

SEQ ID NO: 169030 - DNA, 20 bp, synthetic construct
  source 1..20: mol_type = other DNA
aaaaagatggcacctcgcgt

SEQ ID NO: 169031 - DNA, 20 bp, synthetic construct
  source 1..20: mol_type = other DNA
aaaaaagatggcacctcgcg

SEQ ID NO: 169032 - DNA, 20 bp, synthetic construct
  source 1..20: mol_type = other DNA
gaaaaaagatggcacctcgc

SEQ ID NO: 169033 - DNA, 20 bp, synthetic construct
  source 1..20: mol_type = other DNA
cgaaaaaagatggcacctcg

SEQ ID NO: 169034 - DNA, 20 bp, synthetic construct
  source 1..20: mol_type = other DNA
ccgaaaaaagatggcacctc

SEQ ID NO: 169035 - DNA, 20 bp, synthetic construct
  source 1..20: mol_type = other DNA
gccgaaaaaagatggcacct

SEQ ID NO: 169036 - DNA, 20 bp, synthetic construct
  source 1..20: mol_type = other DNA
cgccgaaaaaagatggcacc

SEQ ID NO: 169037 - DNA, 20 bp, synthetic construct
  source 1..20: mol_type = other DNA
acgccgaaaaaagatggcac

SEQ ID NO: 169038 - DNA, 20 bp, synthetic construct
  source 1..20: mol_type = other DNA
cacgccgaaaaaagatggca

SEQ ID NO: 169039 - DNA, 20 bp, synthetic construct
  source 1..20: mol_type = other DNA
acacgccgaaaaaagatggc

SEQ ID NO: 169040 - DNA, 20 bp, synthetic construct
  source 1..20: mol_type = other DNA
gacacgccgaaaaaagatgg

SEQ ID NO: 169041 - DNA, 20 bp, synthetic construct
  source 1..20: mol_type = other DNA
tgacacgccgaaaaaagatg

SEQ ID NO: 169042 - DNA, 20 bp, synthetic construct
  source 1..20: mol_type = other DNA
gtgacacgccgaaaaaagat

SEQ ID NO: 169043 - DNA, 20 bp, synthetic construct
  source 1..20: mol_type = other DNA
cgtgacacgccgaaaaaaga

SEQ ID NO: 169044 - DNA, 20 bp, synthetic construct
  source 1..20: mol_type = other DNA
acgtgacacgccgaaaaaag

SEQ ID NO: 169045 - DNA, 20 bp, synthetic construct
  source 1..20: mol_type = other DNA
gacgtgacacgccgaaaaaa

SEQ ID NO: 169046 - DNA, 20 bp, synthetic construct
  source 1..20: mol_type = other DNA
agacgtgacacgccgaaaaa

SEQ ID NO: 169047 - DNA, 20 bp, synthetic construct
  source 1..20: mol_type = other DNA
aagacgtgacacgccgaaaa

SEQ ID NO: 169048 - DNA, 20 bp, synthetic construct
  source 1..20: mol_type = other DNA
aaagacgtgacacgccgaaa

SEQ ID NO: 169049 - DNA, 20 bp, synthetic construct
  source 1..20: mol_type = other DNA
taaagacgtgacacgccgaa

SEQ ID NO: 169050 - DNA, 20 bp, synthetic construct
  source 1..20: mol_type = other DNA
gtaaagacgtgacacgccga

SEQ ID NO: 169051 - DNA, 20 bp, synthetic construct
  source 1..20: mol_type = other DNA
cgtaaagacgtgacacgccg

SEQ ID NO: 169052 - DNA, 20 bp, synthetic construct
  source 1..20: mol_type = other DNA
ccgtaaagacgtgacacgcc

SEQ ID NO: 169053 - DNA, 20 bp, synthetic construct
  source 1..20: mol_type = other DNA
accgtaaagacgtgacacgc

SEQ ID NO: 169054 - DNA, 20 bp, synthetic construct
  source 1..20: mol_type = other DNA
caccgtaaagacgtgacacg

SEQ ID NO: 169055 - DNA, 20 bp, synthetic construct
  source 1..20: mol_type = other DNA
gcaccgtaaagacgtgacac

SEQ ID NO: 169056 - DNA, 20 bp, synthetic construct
  source 1..20: mol_type = other DNA
ggcaccgtaaagacgtgaca

SEQ ID NO: 169057 - DNA, 20 bp, synthetic construct
  source 1..20: mol_type = other DNA
tggcaccgtaaagacgtgac

SEQ ID NO: 169058 - DNA, 20 bp, synthetic construct
  source 1..20: mol_type = other DNA
atggcaccgtaaagacgtga

SEQ ID NO: 169059 - DNA, 20 bp, synthetic construct
  source 1..20: mol_type = other DNA
catggcaccgtaaagacgtg

SEQ ID NO: 169060 - DNA, 20 bp, synthetic construct
  source 1..20: mol_type = other DNA
gcatggcaccgtaaagacgt

SEQ ID NO: 169061 - DNA, 20 bp, synthetic construct
  source 1..20: mol_type = other DNA
ggcatggcaccgtaaagacg

SEQ ID NO: 169062 - DNA, 20 bp, synthetic construct
  source 1..20: mol_type = other DNA
tggcatggcaccgtaaagac

SEQ ID NO: 169063 - DNA, 20 bp, synthetic construct
  source 1..20: mol_type = other DNA
ttggcatggcaccgtaaaga

SEQ ID NO: 169064 - DNA, 20 bp, synthetic construct
  source 1..20: mol_type = other DNA
tttggcatggcaccgtaaag

SEQ ID NO: 169065 - DNA, 20 bp, synthetic construct
  source 1..20: mol_type = other DNA
gtttggcatggcaccgtaaa

SEQ ID NO: 169066 - DNA, 20 bp, synthetic construct
  source 1..20: mol_type = other DNA
ggtttggcatggcaccgtaa

SEQ ID NO: 169067 - DNA, 20 bp, synthetic construct
  source 1..20: mol_type = other DNA
cggtttggcatggcaccgta

SEQ ID NO: 169068 - DNA, 20 bp, synthetic construct
  source 1..20: mol_type = other DNA
ccggtttggcatggcaccgt

SEQ ID NO: 169069 - DNA, 20 bp, synthetic construct
  source 1..20: mol_type = other DNA
cccggtttggcatggcaccg

SEQ ID NO: 169070 - DNA, 20 bp, synthetic construct
  source 1..20: mol_type = other DNA
acccggtttggcatggcacc

SEQ ID NO: 169071 - DNA, 20 bp, synthetic construct
  source 1..20: mol_type = other DNA
cacccggtttggcatggcac

SEQ ID NO: 169072 - DNA, 20 bp, synthetic construct
  source 1..20: mol_type = other DNA
ccacccggtttggcatggca

SEQ ID NO: 169073 - DNA, 20 bp, synthetic construct
  source 1..20: mol_type = other DNA
gccacccggtttggcatggc

SEQ ID NO: 169074 - DNA, 20 bp, synthetic construct
  source 1..20: mol_type = other DNA
ggccacccggtttggcatgg

SEQ ID NO: 169075 - DNA, 20 bp, synthetic construct
  source 1..20: mol_type = other DNA
cggccacccggtttggcatg

SEQ ID NO: 169076 - DNA, 20 bp, synthetic construct
  source 1..20: mol_type = other DNA
ccggccacccggtttggcat

SEQ ID NO: 169077 - DNA, 20 bp, synthetic construct
  source 1..20: mol_type = other DNA
cccggccacccggtttggca

SEQ ID NO: 169078 - DNA, 20 bp, synthetic construct
  source 1..20: mol_type = other DNA
gcccggccacccggtttggc

SEQ ID NO: 169079 - DNA, 20 bp, synthetic construct
  source 1..20: mol_type = other DNA
agcccggccacccggtttgg

SEQ ID NO: 169080 - DNA, 20 bp, synthetic construct
  source 1..20: mol_type = other DNA
aagcccggccacccggtttg

SEQ ID NO: 169081 - DNA, 20 bp, synthetic construct
  source 1..20: mol_type = other DNA
gaagcccggccacccggttt

SEQ ID NO: 169082 - DNA, 20 bp, synthetic construct
  source 1..20: mol_type = other DNA
tgaagcccggccacccggtt

SEQ ID NO: 169083 - DNA, 20 bp, synthetic construct
  source 1..20: mol_type = other DNA
atgaagcccggccacccggt

SEQ ID NO: 169084 - DNA, 20 bp, synthetic construct
  source 1..20: mol_type = other DNA
tatgaagcccggccacccgg

SEQ ID NO: 169085 - DNA, 20 bp, synthetic construct
  source 1..20: mol_type = other DNA
ctatgaagcccggccacccg

SEQ ID NO: 169086 - DNA, 20 bp, synthetic construct
  source 1..20: mol_type = other DNA
cctatgaagcccggccaccc

SEQ ID NO: 169087 - DNA, 20 bp, synthetic construct
  source 1..20: mol_type = other DNA
tcctatgaagcccggccacc

SEQ ID NO: 169088 - DNA, 20 bp, synthetic construct
  source 1..20: mol_type = other DNA
gtcctatgaagcccggccac

SEQ ID NO: 169089 - DNA, 20 bp, synthetic construct
  source 1..20: mol_type = other DNA
tgtcctatgaagcccggcca

SEQ ID NO: 169090 - DNA, 20 bp, synthetic construct
  source 1..20: mol_type = other DNA
ctgtcctatgaagcccggcc

SEQ ID NO: 169091 - DNA, 20 bp, synthetic construct
  source 1..20: mol_type = other DNA
cctgtcctatgaagcccggc

SEQ ID NO: 169092 - DNA, 20 bp, synthetic construct
  source 1..20: mol_type = other DNA
ccctgtcctatgaagcccgg

SEQ ID NO: 169093 - DNA, 20 bp, synthetic construct
  source 1..20: mol_type = other DNA
gccctgtcctatgaagcccg

SEQ ID NO: 169094 - DNA, 20 bp, synthetic construct
  source 1..20: mol_type = other DNA
cgccctgtcctatgaagccc

SEQ ID NO: 169095 - DNA, 20 bp, synthetic construct
  source 1..20: mol_type = other DNA
ccgccctgtcctatgaagcc

SEQ ID NO: 169096 - DNA, 20 bp, synthetic construct
  source 1..20: mol_type = other DNA
cccgccctgtcctatgaagc

SEQ ID NO: 169097 - DNA, 20 bp, synthetic construct
  source 1..20: mol_type = other DNA
ccccgccctgtcctatgaag

SEQ ID NO: 169098 - DNA, 20 bp, synthetic construct
  source 1..20: mol_type = other DNA
gccccgccctgtcctatgaa

SEQ ID NO: 169099 - DNA, 20 bp, synthetic construct
  source 1..20: mol_type = other DNA
ggccccgccctgtcctatga

SEQ ID NO: 169100 - DNA, 20 bp, synthetic construct
  source 1..20: mol_type = other DNA
aggccccgccctgtcctatg

SEQ ID NO: 169101 - DNA, 20 bp, synthetic construct
  source 1..20: mol_type = other DNA
caggccccgccctgtcctat

SEQ ID NO: 169102 - DNA, 20 bp, synthetic construct
  source 1..20: mol_type = other DNA
ccaggccccgccctgtccta

SEQ ID NO: 169103 - DNA, 20 bp, synthetic construct
  source 1..20: mol_type = other DNA
gccaggccccgccctgtcct

SEQ ID NO: 169104 - DNA, 20 bp, synthetic construct
  source 1..20: mol_type = other DNA
tgccaggccccgccctgtcc

SEQ ID NO: 169105 - DNA, 20 bp, synthetic construct
  source 1..20: mol_type = other DNA
atgccaggccccgccctgtc

SEQ ID NO: 169106 - DNA, 20 bp, synthetic construct
  source 1..20: mol_type = other DNA
aatgccaggccccgccctgt

SEQ ID NO: 169107 - DNA, 20 bp, synthetic construct
  source 1..20: mol_type = other DNA
taatgccaggccccgccctg

SEQ ID NO: 169108 - DNA, 20 bp, synthetic construct
  source 1..20: mol_type = other DNA
ttaatgccaggccccgccct

SEQ ID NO: 169109 - DNA, 20 bp, synthetic construct
  source 1..20: mol_type = other DNA
tttaatgccaggccccgccc

SEQ ID NO: 169110 - DNA, 20 bp, synthetic construct
  source 1..20: mol_type = other DNA
ctttaatgccaggccccgcc

SEQ ID NO: 169111 - DNA, 20 bp, synthetic construct
  source 1..20: mol_type = other DNA
cctttaatgccaggccccgc

SEQ ID NO: 169112 - DNA, 20 bp, synthetic construct
  source 1..20: mol_type = other DNA
ccctttaatgccaggccccg

SEQ ID NO: 169113 - DNA, 20 bp, synthetic construct
  source 1..20: mol_type = other DNA
tccctttaatgccaggcccc

SEQ ID NO: 169114 - DNA, 20 bp, synthetic construct
  source 1..20: mol_type = other DNA
ctccctttaatgccaggccc

SEQ ID NO: 169115 - DNA, 20 bp, synthetic construct
  source 1..20: mol_type = other DNA
cctccctttaatgccaggcc

SEQ ID NO: 169116 - DNA, 20 bp, synthetic construct
  source 1..20: mol_type = other DNA
ccctccctttaatgccaggc

SEQ ID NO: 169117 - DNA, 20 bp, synthetic construct
  source 1..20: mol_type = other DNA
cccctccctttaatgccagg

SEQ ID NO: 169118 - DNA, 20 bp, synthetic construct
  source 1..20: mol_type = other DNA
ccccctccctttaatgccag

SEQ ID NO: 169119 - DNA, 20 bp, synthetic construct
  source 1..20: mol_type = other DNA
tccccctccctttaatgcca

SEQ ID NO: 169120 - DNA, 20 bp, synthetic construct
  source 1..20: mol_type = other DNA
gtccccctccctttaatgcc

SEQ ID NO: 169121 - DNA, 20 bp, synthetic construct
  source 1..20: mol_type = other DNA
tgtccccctccctttaatgc

SEQ ID NO: 169122 - DNA, 20 bp, synthetic construct
  source 1..20: mol_type = other DNA
ttgtccccctccctttaatg

SEQ ID NO: 169123 - DNA, 20 bp, synthetic construct
  source 1..20: mol_type = other DNA
attgtccccctccctttaat

SEQ ID NO: 169124 - DNA, 20 bp, synthetic construct
  source 1..20: mol_type = other DNA
gattgtccccctccctttaa

SEQ ID NO: 169125 - DNA, 20 bp, synthetic construct
  source 1..20: mol_type = other DNA
tgattgtccccctcccttta

SEQ ID NO: 169126 - DNA, 20 bp, synthetic construct
  source 1..20: mol_type = other DNA
ctgattgtccccctcccttt

SEQ ID NO: 169127 - DNA, 20 bp, synthetic construct
  source 1..20: mol_type = other DNA
gctgattgtccccctccctt

SEQ ID NO: 169128 - DNA, 20 bp, synthetic construct
  source 1..20: mol_type = other DNA
cgctgattgtccccctccct

SEQ ID NO: 169129 - DNA, 20 bp, synthetic construct
  source 1..20: mol_type = other DNA
gcgctgattgtccccctccc

SEQ ID NO: 169130 - DNA, 20 bp, synthetic construct
  source 1..20: mol_type = other DNA
agcgctgattgtccccctcc

SEQ ID NO: 169131 - DNA, 20 bp, synthetic construct
  source 1..20: mol_type = other DNA
cagcgctgattgtccccctc

SEQ ID NO: 169132 - DNA, 20 bp, synthetic construct
  source 1..20: mol_type = other DNA
tcagcgctgattgtccccct

SEQ ID NO: 169133 - DNA, 20 bp, synthetic construct
  source 1..20: mol_type = other DNA
ttcagcgctgattgtccccc

SEQ ID NO: 169134 - DNA, 20 bp, synthetic construct
  source 1..20: mol_type = other DNA
tttcagcgctgattgtcccc

SEQ ID NO: 169135 - DNA, 20 bp, synthetic construct
  source 1..20: mol_type = other DNA
atttcagcgctgattgtccc

SEQ ID NO: 169136 - DNA, 20 bp, synthetic construct
  source 1..20: mol_type = other DNA
gatttcagcgctgattgtcc

SEQ ID NO: 169137 - DNA, 20 bp, synthetic construct
  source 1..20: mol_type = other DNA
agatttcagcgctgattgtc

SEQ ID NO: 169138 - DNA, 20 bp, synthetic construct
  source 1..20: mol_type = other DNA
aagatttcagcgctgattgt

SEQ ID NO: 169139 - DNA, 20 bp, synthetic construct
  source 1..20: mol_type = other DNA
caagatttcagcgctgattg

SEQ ID NO: 169140 - DNA, 20 bp, synthetic construct
  source 1..20: mol_type = other DNA
ccaagatttcagcgctgatt

SEQ ID NO: 169141 - DNA, 20 bp, synthetic construct
  source 1..20: mol_type = other DNA
gccaagatttcagcgctgat

SEQ ID NO: 169142 - DNA, 20 bp, synthetic construct
  source 1..20: mol_type = other DNA
cgccaagatttcagcgctga

SEQ ID NO: 169143 - DNA, 20 bp, synthetic construct
  source 1..20: mol_type = other DNA
acgccaagatttcagcgctg

SEQ ID NO: 169144 - DNA, 20 bp, synthetic construct
  source 1..20: mol_type = other DNA
aacgccaagatttcagcgct

SEQ ID NO: 169145 - DNA, 20 bp, synthetic construct
  source 1..20: mol_type = other DNA
aaacgccaagatttcagcgc

SEQ ID NO: 169146 - DNA, 20 bp, synthetic construct
  source 1..20: mol_type = other DNA
aaaacgccaagatttcagcg

SEQ ID NO: 169147 - DNA, 20 bp, synthetic construct
  source 1..20: mol_type = other DNA
caaaacgccaagatttcagc

SEQ ID NO: 169148 - DNA, 20 bp, synthetic construct
  source 1..20: mol_type = other DNA
gcaaaacgccaagatttcag

SEQ ID NO: 169149 - DNA, 20 bp, synthetic construct
  source 1..20: mol_type = other DNA
agcaaaacgccaagatttca

SEQ ID NO: 169150 - DNA, 20 bp, synthetic construct
  source 1..20: mol_type = other DNA
cagcaaaacgccaagatttc

SEQ ID NO: 169151 - DNA, 20 bp, synthetic construct
  source 1..20: mol_type = other DNA
gcagcaaaacgccaagattt

SEQ ID NO: 169152 - DNA, 20 bp, synthetic construct
  source 1..20: mol_type = other DNA
agcagcaaaacgccaagatt

SEQ ID NO: 169153 - DNA, 20 bp, synthetic construct
  source 1..20: mol_type = other DNA
cagcagcaaaacgccaagat

SEQ ID NO: 169154 - DNA, 20 bp, synthetic construct
  source 1..20: mol_type = other DNA
gcagcagcaaaacgccaaga

SEQ ID NO: 169155 - DNA, 20 bp, synthetic construct
  source 1..20: mol_type = other DNA
cgcagcagcaaaacgccaag

SEQ ID NO: 169156 - DNA, 20 bp, synthetic construct
  source 1..20: mol_type = other DNA
ccgcagcagcaaaacgccaa

SEQ ID NO: 169157 - DNA, 20 bp, synthetic construct
  source 1..20: mol_type = other DNA
cccgcagcagcaaaacgcca

SEQ ID NO: 169158 - DNA, 20 bp, synthetic construct
  source 1..20: mol_type = other DNA
gcccgcagcagcaaaacgcc

SEQ ID NO: 169159 - DNA, 20 bp, synthetic construct
  source 1..20: mol_type = other DNA
cgcccgcagcagcaaaacgc

SEQ ID NO: 169160 - DNA, 20 bp, synthetic construct
  source 1..20: mol_type = other DNA
acgcccgcagcagcaaaacg

SEQ ID NO: 169161 - DNA, 20 bp, synthetic construct
  source 1..20: mol_type = other DNA
cacgcccgcagcagcaaaac

SEQ ID NO: 169162 - DNA, 20 bp, synthetic construct
  source 1..20: mol_type = other DNA
tcacgcccgcagcagcaaaa

SEQ ID NO: 169163 - DNA, 20 bp, synthetic construct
  source 1..20: mol_type = other DNA
ctcacgcccgcagcagcaaa

SEQ ID NO: 169164 - DNA, 20 bp, synthetic construct
  source 1..20: mol_type = other DNA
gctcacgcccgcagcagcaa

SEQ ID NO: 169165 - DNA, 20 bp, synthetic construct
  source 1..20: mol_type = other DNA
tgctcacgcccgcagcagca

SEQ ID NO: 169166 - DNA, 20 bp, synthetic construct
  source 1..20: mol_type = other DNA
gtgctcacgcccgcagcagc

SEQ ID NO: 169167 - DNA, 20 bp, synthetic construct
  source 1..20: mol_type = other DNA
agtgctcacgcccgcagcag

SEQ ID NO: 169168 - DNA, 20 bp, synthetic construct
  source 1..20: mol_type = other DNA
cagtgctcacgcccgcagca

SEQ ID NO: 169169 - DNA, 20 bp, synthetic construct
  source 1..20: mol_type = other DNA
ccagtgctcacgcccgcagc

SEQ ID NO: 169170 - DNA, 20 bp, synthetic construct
  source 1..20: mol_type = other DNA
cccagtgctcacgcccgcag

SEQ ID NO: 169171 - DNA, 20 bp, synthetic construct
  source 1..20: mol_type = other DNA
ccccagtgctcacgcccgca

SEQ ID NO: 169172 - DNA, 20 bp, synthetic construct
  source 1..20: mol_type = other DNA
cccccagtgctcacgcccgc

SEQ ID NO: 169173 - DNA, 20 bp, synthetic construct
  source 1..20: mol_type = other DNA
gcccccagtgctcacgcccg

SEQ ID NO: 169174 - DNA, 20 bp, synthetic construct
  source 1..20: mol_type = other DNA
cgcccccagtgctcacgccc

SEQ ID NO: 169175 - DNA, 20 bp, synthetic construct
  source 1..20: mol_type = other DNA
acgcccccagtgctcacgcc

SEQ ID NO: 169176 - DNA, 20 bp, synthetic construct
  source 1..20: mol_type = other DNA
aacgcccccagtgctcacgc

SEQ ID NO: 169177 - DNA, 20 bp, synthetic construct
  source 1..20: mol_type = other DNA
gaacgcccccagtgctcacg

SEQ ID NO: 169178 - DNA, 20 bp, synthetic construct
  source 1..20: mol_type = other DNA
cgaacgcccccagtgctcac

SEQ ID NO: 169179 - DNA, 20 bp, synthetic construct
  source 1..20: mol_type = other DNA
gcgaacgcccccagtgctca

SEQ ID NO: 169180 - DNA, 20 bp, synthetic construct
  source 1..20: mol_type = other DNA
ggcgaacgcccccagtgctc

SEQ ID NO: 169181 - DNA, 20 bp, synthetic construct
  source 1..20: mol_type = other DNA
gggcgaacgcccccagtgct

SEQ ID NO: 169182 - DNA, 20 bp, synthetic construct
  source 1..20: mol_type = other DNA
tgggcgaacgcccccagtgc

SEQ ID NO: 169183 - DNA, 20 bp, synthetic construct
  source 1..20: mol_type = other DNA
ctgggcgaacgcccccagtg

SEQ ID NO: 169184 - DNA, 20 bp, synthetic construct
  source 1..20: mol_type = other DNA
gctgggcgaacgcccccagt

SEQ ID NO: 169185 - DNA, 20 bp, synthetic construct
  source 1..20: mol_type = other DNA
tgctgggcgaacgcccccag

SEQ ID NO: 169186 - DNA, 20 bp, synthetic construct
  source 1..20: mol_type = other DNA
gtgctgggcgaacgccccca

SEQ ID NO: 169187 - DNA, 20 bp, synthetic construct
  source 1..20: mol_type = other DNA
ggtgctgggcgaacgccccc

SEQ ID NO: 169188 - DNA, 20 bp, synthetic construct
  source 1..20: mol_type = other DNA
aggtgctgggcgaacgcccc

SEQ ID NO: 169189 - DNA, 20 bp, synthetic construct
  source 1..20: mol_type = other DNA
aaggtgctgggcgaacgccc

SEQ ID NO: 169190 - DNA, 20 bp, synthetic construct
  source 1..20: mol_type = other DNA
gaaggtgctgggcgaacgcc

SEQ ID NO: 169191 - DNA, 20 bp, synthetic construct
  source 1..20: mol_type = other DNA
agaaggtgctgggcgaacgc

SEQ ID NO: 169192 - DNA, 20 bp, synthetic construct
  source 1..20: mol_type = other DNA
aagaaggtgctgggcgaacg

SEQ ID NO: 169193 - DNA, 20 bp, synthetic construct
  source 1..20: mol_type = other DNA
gaagaaggtgctgggcgaac

SEQ ID NO: 169194 - DNA, 20 bp, synthetic construct
  source 1..20: mol_type = other DNA
cgaagaaggtgctgggcgaa

SEQ ID NO: 169195 - DNA, 20 bp, synthetic construct
  source 1..20: mol_type = other DNA
ccgaagaaggtgctgggcga

SEQ ID NO: 169196 - DNA, 20 bp, synthetic construct
  source 1..20: mol_type = other DNA
cccgaagaaggtgctgggcg

SEQ ID NO: 169197 - DNA, 20 bp, synthetic construct
  source 1..20: mol_type = other DNA
ccccgaagaaggtgctgggc

SEQ ID NO: 169198 - DNA, 20 bp, synthetic construct
  source 1..20: mol_type = other DNA
cccccgaagaaggtgctggg

SEQ ID NO: 169199 - DNA, 20 bp, synthetic construct
  source 1..20: mol_type = other DNA
gcccccgaagaaggtgctgg

SEQ ID NO: 169200 - DNA, 20 bp, synthetic construct
  source 1..20: mol_type = other DNA
agcccccgaagaaggtgctg

SEQ ID NO: 169201 - DNA, 20 bp, synthetic construct
  source 1..20: mol_type = other DNA
gagcccccgaagaaggtgct

SEQ ID NO: 169202 - DNA, 20 bp, synthetic construct
  source 1..20: mol_type = other DNA
agagcccccgaagaaggtgc

SEQ ID NO: 169203 - DNA, 20 bp, synthetic construct
  source 1..20: mol_type = other DNA
aagagcccccgaagaaggtg

SEQ ID NO: 169204 - DNA, 20 bp, synthetic construct
  source 1..20: mol_type = other DNA
aaagagcccccgaagaaggt

SEQ ID NO: 169205 - DNA, 20 bp, synthetic construct
  source 1..20: mol_type = other DNA
caaagagcccccgaagaagg

SEQ ID NO: 169206 - DNA, 20 bp, synthetic construct
  source 1..20: mol_type = other DNA
gcaaagagcccccgaagaag

SEQ ID NO: 169207 - DNA, 20 bp, synthetic construct
  source 1..20: mol_type = other DNA
agcaaagagcccccgaagaa

SEQ ID NO: 169208 - DNA, 20 bp, synthetic construct
  source 1..20: mol_type = other DNA
aagcaaagagcccccgaaga

SEQ ID NO: 169209 - DNA, 20 bp, synthetic construct
  source 1..20: mol_type = other DNA
aaagcaaagagcccccgaag

SEQ ID NO: 169210 - DNA, 20 bp, synthetic construct
  source 1..20: mol_type = other DNA
caaagcaaagagcccccgaa

SEQ ID NO: 169211 - DNA, 20 bp, synthetic construct
  source 1..20: mol_type = other DNA
acaaagcaaagagcccccga

SEQ ID NO: 169212 - DNA, 20 bp, synthetic construct
  source 1..20: mol_type = other DNA
gacaaagcaaagagcccccg

SEQ ID NO: 169213 - DNA, 20 bp, synthetic construct
  source 1..20: mol_type = other DNA
agacaaagcaaagagccccc

SEQ ID NO: 169214 - DNA, 20 bp, synthetic construct
  source 1..20: mol_type = other DNA
cagacaaagcaaagagcccc

SEQ ID NO: 169215 - DNA, 20 bp, synthetic construct
  source 1..20: mol_type = other DNA
acagacaaagcaaagagccc

SEQ ID NO: 169216 - DNA, 20 bp, synthetic construct
  source 1..20: mol_type = other DNA
tacagacaaagcaaagagcc

SEQ ID NO: 169217 - DNA, 20 bp, synthetic construct
  source 1..20: mol_type = other DNA
ctacagacaaagcaaagagc

SEQ ID NO: 169218 - DNA, 20 bp, synthetic construct
  source 1..20: mol_type = other DNA
tctacagacaaagcaaagag

SEQ ID NO: 169219 - DNA, 20 bp, synthetic construct
  source 1..20: mol_type = other DNA
ctctacagacaaagcaaaga

SEQ ID NO: 169220 - DNA, 20 bp, synthetic construct
  source 1..20: mol_type = other DNA
cctctacagacaaagcaaag

SEQ ID NO: 169221 - DNA, 20 bp, synthetic construct
  source 1..20: mol_type = other DNA
acctctacagacaaagcaaa

SEQ ID NO: 169222 - DNA, 20 bp, synthetic construct
  source 1..20: mol_type = other DNA
aacctctacagacaaagcaa

SEQ ID NO: 169223 - DNA, 20 bp, synthetic construct
  source 1..20: mol_type = other DNA
taacctctacagacaaagca

SEQ ID NO: 169224 - DNA, 20 bp, synthetic construct
  source 1..20: mol_type = other DNA
gtaacctctacagacaaagc

SEQ ID NO: 169225 - DNA, 20 bp, synthetic construct
  source 1..20: mol_type = other DNA
cgtaacctctacagacaaag

SEQ ID NO: 169226 - DNA, 20 bp, synthetic construct
  source 1..20: mol_type = other DNA
acgtaacctctacagacaaa

SEQ ID NO: 169227 - DNA, 20 bp, synthetic construct
  source 1..20: mol_type = other DNA
cacgtaacctctacagacaa

SEQ ID NO: 169228 - DNA, 20 bp, synthetic construct
  source 1..20: mol_type = other DNA
tcacgtaacctctacagaca

SEQ ID NO: 169229 - DNA, 20 bp, synthetic construct
  source 1..20: mol_type = other DNA
atcacgtaacctctacagac

SEQ ID NO: 169230 - DNA, 20 bp, synthetic construct
  source 1..20: mol_type = other DNA
gatcacgtaacctctacaga

SEQ ID NO: 169231 - DNA, 20 bp, synthetic construct
  source 1..20: mol_type = other DNA
agatcacgtaacctctacag

SEQ ID NO: 169232 - DNA, 20 bp, synthetic construct
  source 1..20: mol_type = other DNA
cagatcacgtaacctctaca

SEQ ID NO: 169233 - DNA, 20 bp, synthetic construct
  source 1..20: mol_type = other DNA
gcagatcacgtaacctctac

SEQ ID NO: 169234 - DNA, 20 bp, synthetic construct
  source 1..20: mol_type = other DNA
cgcagatcacgtaacctcta

SEQ ID NO: 169235 - DNA, 20 bp, synthetic construct
  source 1..20: mol_type = other DNA
gcgcagatcacgtaacctct

SEQ ID NO: 169236 - DNA, 20 bp, synthetic construct
  source 1..20: mol_type = other DNA
agcgcagatcacgtaacctc

SEQ ID NO: 169237 - DNA, 20 bp, synthetic construct
  source 1..20: mol_type = other DNA
gagcgcagatcacgtaacct

SEQ ID NO: 169238 - DNA, 20 bp, synthetic construct
  source 1..20: mol_type = other DNA
ggagcgcagatcacgtaacc

SEQ ID NO: 169239 - DNA, 20 bp, synthetic construct
  source 1..20: mol_type = other DNA
gggagcgcagatcacgtaac

SEQ ID NO: 169240 - DNA, 20 bp, synthetic construct
  source 1..20: mol_type = other DNA
tgggagcgcagatcacgtaa

SEQ ID NO: 169241 - DNA, 20 bp, synthetic construct
  source 1..20: mol_type = other DNA
ctgggagcgcagatcacgta

SEQ ID NO: 169242 - DNA, 20 bp, synthetic construct
  source 1..20: mol_type = other DNA
gctgggagcgcagatcacgt

SEQ ID NO: 169243 - DNA, 20 bp, synthetic construct
  source 1..20: mol_type = other DNA
ggctgggagcgcagatcacg

SEQ ID NO: 169244 - DNA, 20 bp, synthetic construct
  source 1..20: mol_type = other DNA
gggctgggagcgcagatcac

SEQ ID NO: 169245 - DNA, 20 bp, synthetic construct
  source 1..20: mol_type = other DNA
agggctgggagcgcagatca

SEQ ID NO: 169246 - DNA, 20 bp, synthetic construct
  source 1..20: mol_type = other DNA
cagggctgggagcgcagatc

SEQ ID NO: 169247 - DNA, 20 bp, synthetic construct
  source 1..20: mol_type = other DNA
ccagggctgggagcgcagat

SEQ ID NO: 169248 - DNA, 20 bp, synthetic construct
  source 1..20: mol_type = other DNA
accagggctgggagcgcaga

SEQ ID NO: 169249 - DNA, 20 bp, synthetic construct
  source 1..20: mol_type = other DNA
aaccagggctgggagcgcag

SEQ ID NO: 169250 - DNA, 20 bp, synthetic construct
  source 1..20: mol_type = other DNA
aaaccagggctgggagcgca

SEQ ID NO: 169251 - DNA, 20 bp, synthetic construct
  source 1..20: mol_type = other DNA
gaaaccagggctgggagcgc

SEQ ID NO: 169252 - DNA, 20 bp, synthetic construct
  source 1..20: mol_type = other DNA
agaaaccagggctgggagcg

SEQ ID NO: 169253 - DNA, 20 bp, synthetic construct
  source 1..20: mol_type = other DNA
cagaaaccagggctgggagc

SEQ ID NO: 169254 - DNA, 20 bp, synthetic construct
  source 1..20: mol_type = other DNA
ccagaaaccagggctgggag

SEQ ID NO: 169255 - DNA, 20 bp, synthetic construct
  source 1..20: mol_type = other DNA
gccagaaaccagggctggga

SEQ ID NO: 169256 - DNA, 20 bp, synthetic construct
  source 1..20: mol_type = other DNA
agccagaaaccagggctggg

SEQ ID NO: 169257 - DNA, 20 bp, synthetic construct
  source 1..20: mol_type = other DNA
aagccagaaaccagggctgg

SEQ ID NO: 169258 - DNA, 20 bp, synthetic construct
  source 1..20: mol_type = other DNA
aaagccagaaaccagggctg

SEQ ID NO: 169259 - DNA, 20 bp, synthetic construct
  source 1..20: mol_type = other DNA
aaaagccagaaaccagggct

SEQ ID NO: 169260 - DNA, 20 bp, synthetic construct
  source 1..20: mol_type = other DNA
taaaagccagaaaccagggc

SEQ ID NO: 169261 - DNA, 20 bp, synthetic construct
  source 1..20: mol_type = other DNA
ataaaagccagaaaccaggg

SEQ ID NO: 169262 - DNA, 20 bp, synthetic construct
  source 1..20: mol_type = other DNA
aataaaagccagaaaccagg

SEQ ID NO: 169263 - DNA, 20 bp, synthetic construct
  source 1..20: mol_type = other DNA
gaataaaagccagaaaccag

SEQ ID NO: 169264 - DNA, 20 bp, synthetic construct
  source 1..20: mol_type = other DNA
agaataaaagccagaaacca

SEQ ID NO: 169265 - DNA, 20 bp, synthetic construct
  source 1..20: mol_type = other DNA
cagaataaaagccagaaacc

SEQ ID NO: 169266 - DNA, 20 bp, synthetic construct
  source 1..20: mol_type = other DNA
tcagaataaaagccagaaac

SEQ ID NO: 169267 - DNA, 20 bp, synthetic construct
  source 1..20: mol_type = other DNA
ctcagaataaaagccagaaa

SEQ ID NO: 169268 - DNA, 20 bp, synthetic construct
  source 1..20: mol_type = other DNA
cctcagaataaaagccagaa

SEQ ID NO: 169269 - DNA, 20 bp, synthetic construct
  source 1..20: mol_type = other DNA
ccctcagaataaaagccaga

SEQ ID NO: 169270 - DNA, 20 bp, synthetic construct
  source 1..20: mol_type = other DNA
accctcagaataaaagccag

SEQ ID NO: 169271 - DNA, 20 bp, synthetic construct
  source 1..20: mol_type = other DNA
caccctcagaataaaagcca

SEQ ID NO: 169272 - DNA, 20 bp, synthetic construct
  source 1..20: mol_type = other DNA
acaccctcagaataaaagcc

SEQ ID NO: 169273 - DNA, 20 bp, synthetic construct
  source 1..20: mol_type = other DNA
aacaccctcagaataaaagc

SEQ ID NO: 169274 - DNA, 20 bp, synthetic construct
  source 1..20: mol_type = other DNA
gaacaccctcagaataaaag

SEQ ID NO: 169275 - DNA, 20 bp, synthetic construct
  source 1..20: mol_type = other DNA
tgaacaccctcagaataaaa

SEQ ID NO: 169276 - DNA, 20 bp, synthetic construct
  source 1..20: mol_type = other DNA
ctgaacaccctcagaataaa

SEQ ID NO: 169277 - DNA, 20 bp, synthetic construct
  source 1..20: mol_type = other DNA
actgaacaccctcagaataa

SEQ ID NO: 169278 - DNA, 20 bp, synthetic construct
  source 1..20: mol_type = other DNA
gactgaacaccctcagaata

SEQ ID NO: 169279 - DNA, 20 bp, synthetic construct
  source 1..20: mol_type = other DNA
tgactgaacaccctcagaat

SEQ ID NO: 169280 - DNA, 20 bp, synthetic construct
  source 1..20: mol_type = other DNA
ttgactgaacaccctcagaa

SEQ ID NO: 169281 - DNA, 20 bp, synthetic construct
  source 1..20: mol_type = other DNA
gttgactgaacaccctcaga

SEQ ID NO: 169282 - DNA, 20 bp, synthetic construct
  source 1..20: mol_type = other DNA
ggttgactgaacaccctcag

SEQ ID NO: 169283 - DNA, 20 bp, synthetic construct
  source 1..20: mol_type = other DNA
aggttgactgaacaccctca

SEQ ID NO: 169284 - DNA, 20 bp, synthetic construct
  source 1..20: mol_type = other DNA
gaggttgactgaacaccctc

SEQ ID NO: 169285 - DNA, 20 bp, synthetic construct
  source 1..20: mol_type = other DNA
ggaggttgactgaacaccct

SEQ ID NO: 169286 - DNA, 20 bp, synthetic construct
  source 1..20: mol_type = other DNA
gggaggttgactgaacaccc

SEQ ID NO: 169287 - DNA, 20 bp, synthetic construct
  source 1..20: mol_type = other DNA
ggggaggttgactgaacacc

SEQ ID NO: 169288 - DNA, 20 bp, synthetic construct
  source 1..20: mol_type = other DNA
gggggaggttgactgaacac

SEQ ID NO: 169289 - DNA, 20 bp, synthetic construct
  source 1..20: mol_type = other DNA
ggggggaggttgactgaaca

SEQ ID NO: 169290 - DNA, 20 bp, synthetic construct
  source 1..20: mol_type = other DNA
aggggggaggttgactgaac

SEQ ID NO: 169291 - DNA, 20 bp, synthetic construct
  source 1..20: mol_type = other DNA
taggggggaggttgactgaa

SEQ ID NO: 169292 - DNA, 20 bp, synthetic construct
  source 1..20: mol_type = other DNA
gtaggggggaggttgactga

SEQ ID NO: 169293 - DNA, 20 bp, synthetic construct
  source 1..20: mol_type = other DNA
cgtaggggggaggttgactg

SEQ ID NO: 169294 - DNA, 20 bp, synthetic construct
  source 1..20: mol_type = other DNA
gcgtaggggggaggttgact

SEQ ID NO: 169295 - DNA, 20 bp, synthetic construct
  source 1..20: mol_type = other DNA
ggcgtaggggggaggttgac

SEQ ID NO: 169296 - DNA, 20 bp, synthetic construct
  source 1..20: mol_type = other DNA
gggcgtaggggggaggttga

SEQ ID NO: 169297 - DNA, 20 bp, synthetic construct
  source 1..20: mol_type = other DNA
tgggcgtaggggggaggttg

SEQ ID NO: 169298 - DNA, 20 bp, synthetic construct
  source 1..20: mol_type = other DNA
atgggcgtaggggggaggtt

SEQ ID NO: 169299 - DNA, 20 bp, synthetic construct
  source 1..20: mol_type = other DNA
catgggcgtaggggggaggt

SEQ ID NO: 169300 - DNA, 20 bp, synthetic construct
  source 1..20: mol_type = other DNA
gcatgggcgtaggggggagg

SEQ ID NO: 169301 - DNA, 20 bp, synthetic construct
  source 1..20: mol_type = other DNA
cgcatgggcgtaggggggag

SEQ ID NO: 169302 - DNA, 20 bp, synthetic construct
  source 1..20: mol_type = other DNA
gcgcatgggcgtagggggga

SEQ ID NO: 169303 - DNA, 20 bp, synthetic construct
  source 1..20: mol_type = other DNA
ggcgcatgggcgtagggggg

SEQ ID NO: 169304 - DNA, 20 bp, synthetic construct
  source 1..20: mol_type = other DNA
aggcgcatgggcgtaggggg

SEQ ID NO: 169305 - DNA, 20 bp, synthetic construct
  source 1..20: mol_type = other DNA
gaggcgcatgggcgtagggg

SEQ ID NO: 169306 - DNA, 20 bp, synthetic construct
  source 1..20: mol_type = other DNA
agaggcgcatgggcgtaggg

SEQ ID NO: 169307 - DNA, 20 bp, synthetic construct
  source 1..20: mol_type = other DNA
gagaggcgcatgggcgtagg

SEQ ID NO: 169308 - DNA, 20 bp, synthetic construct
  source 1..20: mol_type = other DNA
agagaggcgcatgggcgtag

SEQ ID NO: 169309 - DNA, 20 bp, synthetic construct
  source 1..20: mol_type = other DNA
aagagaggcgcatgggcgta

SEQ ID NO: 169310 - DNA, 20 bp, synthetic construct
  source 1..20: mol_type = other DNA
aaagagaggcgcatgggcgt

SEQ ID NO: 169311 - DNA, 20 bp, synthetic construct
  source 1..20: mol_type = other DNA
gaaagagaggcgcatgggcg

SEQ ID NO: 169312 - DNA, 20 bp, synthetic construct
  source 1..20: mol_type = other DNA
ggaaagagaggcgcatgggc

SEQ ID NO: 169313 - DNA, 20 bp, synthetic construct
  source 1..20: mol_type = other DNA
aggaaagagaggcgcatggg

SEQ ID NO: 169314 - DNA, 20 bp, synthetic construct
  source 1..20: mol_type = other DNA
aaggaaagagaggcgcatgg

SEQ ID NO: 169315 - DNA, 20 bp, synthetic construct
  source 1..20: mol_type = other DNA
aaaggaaagagaggcgcatg

SEQ ID NO: 169316 - DNA, 20 bp, synthetic construct
  source 1..20: mol_type = other DNA
aaaaggaaagagaggcgcat

SEQ ID NO: 169317 - DNA, 20 bp, synthetic construct
  source 1..20: mol_type = other DNA
aaaaaggaaagagaggcgca

SEQ ID NO: 169318 - DNA, 20 bp, synthetic construct
  source 1..20: mol_type = other DNA
gaaaaaggaaagagaggcgc

SEQ ID NO: 169319 - DNA, 20 bp, synthetic construct
  source 1..20: mol_type = other DNA
cgaaaaaggaaagagaggcg

SEQ ID NO: 169320 - DNA, 20 bp, synthetic construct
  source 1..20: mol_type = other DNA
gcgaaaaaggaaagagaggc

SEQ ID NO: 169321 - DNA, 20 bp, synthetic construct
  source 1..20: mol_type = other DNA
agcgaaaaaggaaagagagg

SEQ ID NO: 169322 - DNA, 20 bp, synthetic construct
  source 1..20: mol_type = other DNA
gagcgaaaaaggaaagagag

SEQ ID NO: 169323 - DNA, 20 bp, synthetic construct
  source 1..20: mol_type = other DNA
ggagcgaaaaaggaaagaga

SEQ ID NO: 169324 - DNA, 20 bp, synthetic construct
  source 1..20: mol_type = other DNA
aggagcgaaaaaggaaagag

SEQ ID NO: 169325 - DNA, 20 bp, synthetic construct
  source 1..20: mol_type = other DNA
gaggagcgaaaaaggaaaga

SEQ ID NO: 169326 - DNA, 20 bp, synthetic construct
  source 1..20: mol_type = other DNA
tgaggagcgaaaaaggaaag

SEQ ID NO: 169327 - DNA, 20 bp, synthetic construct
  source 1..20: mol_type = other DNA
atgaggagcgaaaaaggaaa

SEQ ID NO: 169328 - DNA, 20 bp, synthetic construct
  source 1..20: mol_type = other DNA
aatgaggagcgaaaaaggaa

SEQ ID NO: 169329 - DNA, 20 bp, synthetic construct
  source 1..20: mol_type = other DNA
aaatgaggagcgaaaaagga

SEQ ID NO: 169330 - DNA, 20 bp, synthetic construct
  source 1..20: mol_type = other DNA
gaaatgaggagcgaaaaagg

SEQ ID NO: 169331 - DNA, 20 bp, synthetic construct
  source 1..20: mol_type = other DNA
ggaaatgaggagcgaaaaag

SEQ ID NO: 169332 - DNA, 20 bp, synthetic construct
  source 1..20: mol_type = other DNA
cggaaatgaggagcgaaaaa

SEQ ID NO: 169333 - DNA, 20 bp, synthetic construct
  source 1..20: mol_type = other DNA
tcggaaatgaggagcgaaaa

SEQ ID NO: 169334 - DNA, 20 bp, synthetic construct
  source 1..20: mol_type = other DNA
ctcggaaatgaggagcgaaa

SEQ ID NO: 169335 - DNA, 20 bp, synthetic construct
  source 1..20: mol_type = other DNA
gctcggaaatgaggagcgaa

SEQ ID NO: 169336 - DNA, 20 bp, synthetic construct
  source 1..20: mol_type = other DNA
ggctcggaaatgaggagcga

SEQ ID NO: 169337 - DNA, 20 bp, synthetic construct
  source 1..20: mol_type = other DNA
gggctcggaaatgaggagcg

SEQ ID NO: 169338 - DNA, 20 bp, synthetic construct
  source 1..20: mol_type = other DNA
tgggctcggaaatgaggagc

SEQ ID NO: 169339 - DNA, 20 bp, synthetic construct
  source 1..20: mol_type = other DNA
atgggctcggaaatgaggag

SEQ ID NO: 169340 - DNA, 20 bp, synthetic construct
  source 1..20: mol_type = other DNA
aatgggctcggaaatgagga

SEQ ID NO: 169341 - DNA, 20 bp, synthetic construct
  source 1..20: mol_type = other DNA
caatgggctcggaaatgagg

SEQ ID NO: 169342 - DNA, 20 bp, synthetic construct
  source 1..20: mol_type = other DNA
acaatgggctcggaaatgag

SEQ ID NO: 169343 - DNA, 20 bp, synthetic construct
  source 1..20: mol_type = other DNA
aacaatgggctcggaaatga

SEQ ID NO: 169344 - DNA, 20 bp, synthetic construct
  source 1..20: mol_type = other DNA
caacaatgggctcggaaatg

SEQ ID NO: 169345 - DNA, 20 bp, synthetic construct
  source 1..20: mol_type = other DNA
ccaacaatgggctcggaaat

SEQ ID NO: 169346 - DNA, 20 bp, synthetic construct
  source 1..20: mol_type = other DNA
tccaacaatgggctcggaaa

SEQ ID NO: 169347 - DNA, 20 bp, synthetic construct
  source 1..20: mol_type = other DNA
atccaacaatgggctcggaa

SEQ ID NO: 169348 - DNA, 20 bp, synthetic construct
  source 1..20: mol_type = other DNA
gatccaacaatgggctcgga

SEQ ID NO: 169349 - DNA, 20 bp, synthetic construct
  source 1..20: mol_type = other DNA
agatccaacaatgggctcgg

SEQ ID NO: 169350 - DNA, 20 bp, synthetic construct
  source 1..20: mol_type = other DNA
gagatccaacaatgggctcg

SEQ ID NO: 169351 - DNA, 20 bp, synthetic construct
  source 1..20: mol_type = other DNA
cgagatccaacaatgggctc

SEQ ID NO: 169352 - DNA, 20 bp, synthetic construct
  source 1..20: mol_type = other DNA
tcgagatccaacaatgggct

SEQ ID NO: 169353 - DNA, 20 bp, synthetic construct
  source 1..20: mol_type = other DNA
ctcgagatccaacaatgggc

SEQ ID NO: 169354 - DNA, 20 bp, synthetic construct
  source 1..20: mol_type = other DNA
cctcgagatccaacaatggg

SEQ ID NO: 169355 - DNA, 20 bp, synthetic construct
  source 1..20: mol_type = other DNA
gcctcgagatccaacaatgg

SEQ ID NO: 169356 - DNA, 20 bp, synthetic construct
  source 1..20: mol_type = other DNA
agcctcgagatccaacaatg

SEQ ID NO: 169357 - DNA, 20 bp, synthetic construct
  source 1..20: mol_type = other DNA
aagcctcgagatccaacaat

SEQ ID NO: 169358 - DNA, 20 bp, synthetic construct
  source 1..20: mol_type = other DNA
caagcctcgagatccaacaa

SEQ ID NO: 169359 - DNA, 20 bp, synthetic construct
  source 1..20: mol_type = other DNA
gcaagcctcgagatccaaca

SEQ ID NO: 169360 - DNA, 20 bp, synthetic construct
  source 1..20: mol_type = other DNA
agcaagcctcgagatccaac

SEQ ID NO: 169361 - DNA, 20 bp, synthetic construct
  source 1..20: mol_type = other DNA
cagcaagcctcgagatccaa

SEQ ID NO: 169362 - DNA, 20 bp, synthetic construct
  source 1..20: mol_type = other DNA
ccagcaagcctcgagatcca

SEQ ID NO: 169363 - DNA, 20 bp, synthetic construct
  source 1..20: mol_type = other DNA
cccagcaagcctcgagatcc

SEQ ID NO: 169364 - DNA, 20 bp, synthetic construct
  source 1..20: mol_type = other DNA
acccagcaagcctcgagatc

SEQ ID NO: 169365 - DNA, 20 bp, synthetic construct
  source 1..20: mol_type = other DNA
aacccagcaagcctcgagat

SEQ ID NO: 169366 - DNA, 20 bp, synthetic construct
  source 1..20: mol_type = other DNA
gaacccagcaagcctcgaga

SEQ ID NO: 169367 - DNA, 20 bp, synthetic construct
  source 1..20: mol_type = other DNA
cgaacccagcaagcctcgag

SEQ ID NO: 169368 - DNA, 20 bp, synthetic construct
  source 1..20: mol_type = other DNA
tcgaacccagcaagcctcga

SEQ ID NO: 169369 - DNA, 20 bp, synthetic construct
  source 1..20: mol_type = other DNA
atcgaacccagcaagcctcg

SEQ ID NO: 169370 - DNA, 20 bp, synthetic construct
  source 1..20: mol_type = other DNA
catcgaacccagcaagcctc

SEQ ID NO: 169371 - DNA, 20 bp, synthetic construct
  source 1..20: mol_type = other DNA
tcatcgaacccagcaagcct

SEQ ID NO: 169372 - DNA, 20 bp, synthetic construct
  source 1..20: mol_type = other DNA
ttcatcgaacccagcaagcc

SEQ ID NO: 169373 - DNA, 20 bp, synthetic construct
  source 1..20: mol_type = other DNA
gttcatcgaacccagcaagc

SEQ ID NO: 169374 - DNA, 20 bp, synthetic construct
  source 1..20: mol_type = other DNA
agttcatcgaacccagcaag

SEQ ID NO: 169375 - DNA, 20 bp, synthetic construct
  source 1..20: mol_type = other DNA
gagttcatcgaacccagcaa

SEQ ID NO: 169376 - DNA, 20 bp, synthetic construct
  source 1..20: mol_type = other DNA
cgagttcatcgaacccagca

SEQ ID NO: 169377 - DNA, 20 bp, synthetic construct
  source 1..20: mol_type = other DNA
tcgagttcatcgaacccagc

SEQ ID NO: 169378 - DNA, 20 bp, synthetic construct
  source 1..20: mol_type = other DNA
ctcgagttcatcgaacccag

SEQ ID NO: 169379 - DNA, 20 bp, synthetic construct
  source 1..20: mol_type = other DNA
actcgagttcatcgaaccca

SEQ ID NO: 169380 - DNA, 20 bp, synthetic construct
  source 1..20: mol_type = other DNA
gactcgagttcatcgaaccc

SEQ ID NO: 169381 - DNA, 20 bp, synthetic construct
  source 1..20: mol_type = other DNA
tgactcgagttcatcgaacc

SEQ ID NO: 169382 - DNA, 20 bp, synthetic construct
  source 1..20: mol_type = other DNA
ttgactcgagttcatcgaac

SEQ ID NO: 169383 - DNA, 20 bp, synthetic construct
  source 1..20: mol_type = other DNA
gttgactcgagttcatcgaa

SEQ ID NO: 169384 - DNA, 20 bp, synthetic construct
  source 1..20: mol_type = other DNA
ggttgactcgagttcatcga

SEQ ID NO: 169385 - DNA, 20 bp, synthetic construct
  source 1..20: mol_type = other DNA
gggttgactcgagttcatcg

SEQ ID NO: 169386 - DNA, 20 bp, synthetic construct
  source 1..20: mol_type = other DNA
ggggttgactcgagttcatc

SEQ ID NO: 169387 - DNA, 20 bp, synthetic construct
  source 1..20: mol_type = other DNA
gggggttgactcgagttcat

SEQ ID NO: 169388 - DNA, 20 bp, synthetic construct
  source 1..20: mol_type = other DNA
ggggggttgactcgagttca

SEQ ID NO: 169389 - DNA, 20 bp, synthetic construct
  source 1..20: mol_type = other DNA
cggggggttgactcgagttc

SEQ ID NO: 169390 - DNA, 20 bp, synthetic construct
  source 1..20: mol_type = other DNA
tcggggggttgactcgagtt

SEQ ID NO: 169391 - DNA, 20 bp, synthetic construct
  source 1..20: mol_type = other DNA
gtcggggggttgactcgagt

SEQ ID NO: 169392 - DNA, 20 bp, synthetic construct
  source 1..20: mol_type = other DNA
ggtcggggggttgactcgag

SEQ ID NO: 169393 - DNA, 20 bp, synthetic construct
  source 1..20: mol_type = other DNA
gggtcggggggttgactcga

SEQ ID NO: 169394 - DNA, 20 bp, synthetic construct
  source 1..20: mol_type = other DNA
ggggtcggggggttgactcg

SEQ ID NO: 169395 - DNA, 20 bp, synthetic construct
  source 1..20: mol_type = other DNA
gggggtcggggggttgactc

SEQ ID NO: 169396 - DNA, 20 bp, synthetic construct
  source 1..20: mol_type = other DNA
cgggggtcggggggttgact

SEQ ID NO: 169397 - DNA, 20 bp, synthetic construct
  source 1..20: mol_type = other DNA
ccgggggtcggggggttgac

SEQ ID NO: 169398 - DNA, 20 bp, synthetic construct
  source 1..20: mol_type = other DNA
gccgggggtcggggggttga

SEQ ID NO: 169399 - DNA, 20 bp, synthetic construct
  source 1..20: mol_type = other DNA
tgccgggggtcggggggttg

SEQ ID NO: 169400 - DNA, 20 bp, synthetic construct
  source 1..20: mol_type = other DNA
gtgccgggggtcggggggtt

SEQ ID NO: 169401 - DNA, 20 bp, synthetic construct
  source 1..20: mol_type = other DNA
cgtgccgggggtcggggggt

SEQ ID NO: 169402 - DNA, 20 bp, synthetic construct
  source 1..20: mol_type = other DNA
gcgtgccgggggtcgggggg

SEQ ID NO: 169403 - DNA, 20 bp, synthetic construct
  source 1..20: mol_type = other DNA
tgcgtgccgggggtcggggg

SEQ ID NO: 169404 - DNA, 20 bp, synthetic construct
  source 1..20: mol_type = other DNA
atgcgtgccgggggtcgggg

SEQ ID NO: 169405 - DNA, 20 bp, synthetic construct
  source 1..20: mol_type = other DNA
catgcgtgccgggggtcggg

SEQ ID NO: 169406 - DNA, 20 bp, synthetic construct
  source 1..20: mol_type = other DNA
ccatgcgtgccgggggtcgg

SEQ ID NO: 169407 - DNA, 20 bp, synthetic construct
  source 1..20: mol_type = other DNA
tccatgcgtgccgggggtcg

SEQ ID NO: 169408 - DNA, 20 bp, synthetic construct
  source 1..20: mol_type = other DNA
ttccatgcgtgccgggggtc

SEQ ID NO: 169409 - DNA, 20 bp, synthetic construct
  source 1..20: mol_type = other DNA
gttccatgcgtgccgggggt

SEQ ID NO: 169410 - DNA, 20 bp, synthetic construct
  source 1..20: mol_type = other DNA
cgttccatgcgtgccggggg

SEQ ID NO: 169411 - DNA, 20 bp, synthetic construct
  source 1..20: mol_type = other DNA
ccgttccatgcgtgccgggg

SEQ ID NO: 169412 - DNA, 20 bp, synthetic construct
  source 1..20: mol_type = other DNA
cccgttccatgcgtgccggg

SEQ ID NO: 169413 - DNA, 20 bp, synthetic construct
  source 1..20: mol_type = other DNA
gcccgttccatgcgtgccgg

SEQ ID NO: 169414 - DNA, 20 bp, synthetic construct
  source 1..20: mol_type = other DNA
cgcccgttccatgcgtgccg

SEQ ID NO: 169415 - DNA, 20 bp, synthetic construct
  source 1..20: mol_type = other DNA
acgcccgttccatgcgtgcc

SEQ ID NO: 169416 - DNA, 20 bp, synthetic construct
  source 1..20: mol_type = other DNA
cacgcccgttccatgcgtgc

SEQ ID NO: 169417 - DNA, 20 bp, synthetic construct
  source 1..20: mol_type = other DNA
tcacgcccgttccatgcgtg

SEQ ID NO: 169418 - DNA, 20 bp, synthetic construct
  source 1..20: mol_type = other DNA
gtcacgcccgttccatgcgt

SEQ ID NO: 169419 - DNA, 20 bp, synthetic construct
  source 1..20: mol_type = other DNA
ggtcacgcccgttccatgcg

SEQ ID NO: 169420 - DNA, 20 bp, synthetic construct
  source 1..20: mol_type = other DNA
cggtcacgcccgttccatgc

SEQ ID NO: 169421 - DNA, 20 bp, synthetic construct
  source 1..20: mol_type = other DNA
gcggtcacgcccgttccatg

SEQ ID NO: 169422 - DNA, 20 bp, synthetic construct
  source 1..20: mol_type = other DNA
cgcggtcacgcccgttccat

SEQ ID NO: 169423 - DNA, 20 bp, synthetic construct
  source 1..20: mol_type = other DNA
gcgcggtcacgcccgttcca

SEQ ID NO: 169424 - DNA, 20 bp, synthetic construct
  source 1..20: mol_type = other DNA
cgcgcggtcacgcccgttcc

SEQ ID NO: 169425 - DNA, 20 bp, synthetic construct
  source 1..20: mol_type = other DNA
gcgcgcggtcacgcccgttc

SEQ ID NO: 169426 - DNA, 20 bp, synthetic construct
  source 1..20: mol_type = other DNA
tgcgcgcggtcacgcccgtt

SEQ ID NO: 169427 - DNA, 20 bp, synthetic construct
  source 1..20: mol_type = other DNA
ctgcgcgcggtcacgcccgt

SEQ ID NO: 169428 - DNA, 20 bp, synthetic construct
  source 1..20: mol_type = other DNA
gctgcgcgcggtcacgcccg

SEQ ID NO: 169429 - DNA, 20 bp, synthetic construct
  source 1..20: mol_type = other DNA
ggctgcgcgcggtcacgccc

SEQ ID NO: 169430 - DNA, 20 bp, synthetic construct
  source 1..20: mol_type = other DNA
aggctgcgcgcggtcacgcc

SEQ ID NO: 169431 - DNA, 20 bp, synthetic construct
  source 1..20: mol_type = other DNA
gaggctgcgcgcggtcacgc

SEQ ID NO: 169432 - DNA, 20 bp, synthetic construct
  source 1..20: mol_type = other DNA
cgaggctgcgcgcggtcacg

SEQ ID NO: 169433 - DNA, 20 bp, synthetic construct
  source 1..20: mol_type = other DNA
acgaggctgcgcgcggtcac

SEQ ID NO: 169434 - DNA, 20 bp, synthetic construct
  source 1..20: mol_type = other DNA
gacgaggctgcgcgcggtca

SEQ ID NO: 169435 - DNA, 20 bp, synthetic construct
  source 1..20: mol_type = other DNA
agacgaggctgcgcgcggtc

SEQ ID NO: 169436 - DNA, 20 bp, synthetic construct
  source 1..20: mol_type = other DNA
gagacgaggctgcgcgcggt

SEQ ID NO: 169437 - DNA, 20 bp, synthetic construct
  source 1..20: mol_type = other DNA
cgagacgaggctgcgcgcgg

SEQ ID NO: 169438 - DNA, 20 bp, synthetic construct
  source 1..20: mol_type = other DNA
ccgagacgaggctgcgcgcg

SEQ ID NO: 169439 - DNA, 20 bp, synthetic construct
  source 1..20: mol_type = other DNA
tccgagacgaggctgcgcgc

SEQ ID NO: 169440 - DNA, 20 bp, synthetic construct
  source 1..20: mol_type = other DNA
ctccgagacgaggctgcgcg

SEQ ID NO: 169441 - DNA, 20 bp, synthetic construct
  source 1..20: mol_type = other DNA
actccgagacgaggctgcgc

SEQ ID NO: 169442 - DNA, 20 bp, synthetic construct
  source 1..20: mol_type = other DNA
gactccgagacgaggctgcg

SEQ ID NO: 169443 - DNA, 20 bp, synthetic construct
  source 1..20: mol_type = other DNA
agactccgagacgaggctgc

SEQ ID NO: 169444 - DNA, 20 bp, synthetic construct
  source 1..20: mol_type = other DNA
cagactccgagacgaggctg

SEQ ID NO: 169445 - DNA, 20 bp, synthetic construct
  source 1..20: mol_type = other DNA
gcagactccgagacgaggct

SEQ ID NO: 169446 - DNA, 20 bp, synthetic construct
  source 1..20: mol_type = other DNA
ggcagactccgagacgaggc

SEQ ID NO: 169447 - DNA, 20 bp, synthetic construct
  source 1..20: mol_type = other DNA
cggcagactccgagacgagg

SEQ ID NO: 169448 - DNA, 20 bp, synthetic construct
  source 1..20: mol_type = other DNA
ccggcagactccgagacgag

SEQ ID NO: 169449 - DNA, 20 bp, synthetic construct
  source 1..20: mol_type = other DNA
gccggcagactccgagacga

SEQ ID NO: 169450 - DNA, 20 bp, synthetic construct
  source 1..20: mol_type = other DNA
cgccggcagactccgagacg

SEQ ID NO: 169451 - DNA, 20 bp, synthetic construct
  source 1..20: mol_type = other DNA
gcgccggcagactccgagac

SEQ ID NO: 169452 - DNA, 20 bp, synthetic construct
  source 1..20: mol_type = other DNA
ggcgccggcagactccgaga

SEQ ID NO: 169453 - DNA, 20 bp, synthetic construct
  source 1..20: mol_type = other DNA
cggcgccggcagactccgag

SEQ ID NO: 169454 - DNA, 20 bp, synthetic construct
  source 1..20: mol_type = other DNA
ccggcgccggcagactccga

SEQ ID NO: 169455 - DNA, 20 bp, synthetic construct
  source 1..20: mol_type = other DNA
cccggcgccggcagactccg

SEQ ID NO: 169456 - DNA, 20 bp, synthetic construct
  source 1..20: mol_type = other DNA
tcccggcgccggcagactcc

SEQ ID NO: 169457 - DNA, 20 bp, synthetic construct
  source 1..20: mol_type = other DNA
ttcccggcgccggcagactc

SEQ ID NO: 169458 - DNA, 20 bp, synthetic construct
  source 1..20: mol_type = other DNA
cttcccggcgccggcagact

SEQ ID NO: 169459 - DNA, 20 bp, synthetic construct
  source 1..20: mol_type = other DNA
gcttcccggcgccggcagac

SEQ ID NO: 169460 - DNA, 20 bp, synthetic construct
  source 1..20: mol_type = other DNA
agcttcccggcgccggcaga

SEQ ID NO: 169461 - DNA, 20 bp, synthetic construct
  source 1..20: mol_type = other DNA
aagcttcccggcgccggcag

SEQ ID NO: 169462 - DNA, 20 bp, synthetic construct
  source 1..20: mol_type = other DNA
gaagcttcccggcgccggca

SEQ ID NO: 169463 - DNA, 20 bp, synthetic construct
  source 1..20: mol_type = other DNA
agaagcttcccggcgccggc

SEQ ID NO: 169464 - DNA, 20 bp, synthetic construct
  source 1..20: mol_type = other DNA
cagaagcttcccggcgccgg

SEQ ID NO: 169465 - DNA, 20 bp, synthetic construct
  source 1..20: mol_type = other DNA
tcagaagcttcccggcgccg

SEQ ID NO: 169466 - DNA, 20 bp, synthetic construct
  source 1..20: mol_type = other DNA
ttcagaagcttcccggcgcc

SEQ ID NO: 169467 - DNA, 20 bp, synthetic construct
  source 1..20: mol_type = other DNA
cttcagaagcttcccggcgc

SEQ ID NO: 169468 - DNA, 20 bp, synthetic construct
  source 1..20: mol_type = other DNA
ccttcagaagcttcccggcg

SEQ ID NO: 169469 - DNA, 20 bp, synthetic construct
  source 1..20: mol_type = other DNA
cccttcagaagcttcccggc

SEQ ID NO: 169470 - DNA, 20 bp, synthetic construct
  source 1..20: mol_type = other DNA
tcccttcagaagcttcccgg

SEQ ID NO: 169471 - DNA, 20 bp, synthetic construct
  source 1..20: mol_type = other DNA
atcccttcagaagcttcccg

SEQ ID NO: 169472 - DNA, 20 bp, synthetic construct
  source 1..20: mol_type = other DNA
catcccttcagaagcttccc

SEQ ID NO: 169473 - DNA, 20 bp, synthetic construct
  source 1..20: mol_type = other DNA
ccatcccttcagaagcttcc

SEQ ID NO: 169474 - DNA, 20 bp, synthetic construct
  source 1..20: mol_type = other DNA
cccatcccttcagaagcttc

SEQ ID NO: 169475 - DNA, 20 bp, synthetic construct
  source 1..20: mol_type = other DNA
tcccatcccttcagaagctt

SEQ ID NO: 169476 - DNA, 20 bp, synthetic construct
  source 1..20: mol_type = other DNA
atcccatcccttcagaagct

SEQ ID NO: 169477 - DNA, 20 bp, synthetic construct
  source 1..20: mol_type = other DNA
aatcccatcccttcagaagc

SEQ ID NO: 169478 - DNA, 20 bp, synthetic construct
  source 1..20: mol_type = other DNA
gaatcccatcccttcagaag

SEQ ID NO: 169479 - DNA, 20 bp, synthetic construct
  source 1..20: mol_type = other DNA
cgaatcccatcccttcagaa

SEQ ID NO: 169480 - DNA, 20 bp, synthetic construct
  source 1..20: mol_type = other DNA
tcgaatcccatcccttcaga

SEQ ID NO: 169481 - DNA, 20 bp, synthetic construct
  source 1..20: mol_type = other DNA
ctcgaatcccatcccttcag

SEQ ID NO: 169482 - DNA, 20 bp, synthetic construct
  source 1..20: mol_type = other DNA
actcgaatcccatcccttca

SEQ ID NO: 169483 - DNA, 20 bp, synthetic construct
  source 1..20: mol_type = other DNA
gactcgaatcccatcccttc

SEQ ID NO: 169484 - DNA, 20 bp, synthetic construct
  source 1..20: mol_type = other DNA
agactcgaatcccatccctt

SEQ ID NO: 169485 - DNA, 20 bp, synthetic construct
  source 1..20: mol_type = other DNA
gagactcgaatcccatccct

SEQ ID NO: 169486 - DNA, 20 bp, synthetic construct
  source 1..20: mol_type = other DNA
ggagactcgaatcccatccc

SEQ ID NO: 169487 - DNA, 20 bp, synthetic construct
  source 1..20: mol_type = other DNA
cggagactcgaatcccatcc

SEQ ID NO: 169488 - DNA, 20 bp, synthetic construct
  source 1..20: mol_type = other DNA
acggagactcgaatcccatc

SEQ ID NO: 169489 - DNA, 20 bp, synthetic construct
  source 1..20: mol_type = other DNA
cacggagactcgaatcccat

SEQ ID NO: 169490 - DNA, 20 bp, synthetic construct
  source 1..20: mol_type = other DNA
gcacggagactcgaatccca

SEQ ID NO: 169491 - DNA, 20 bp, synthetic construct
  source 1..20: mol_type = other DNA
cgcacggagactcgaatccc

SEQ ID NO: 169492 - DNA, 20 bp, synthetic construct
  source 1..20: mol_type = other DNA
gcgcacggagactcgaatcc

SEQ ID NO: 169493 - DNA, 20 bp, synthetic construct
  source 1..20: mol_type = other DNA
cgcgcacggagactcgaatc

SEQ ID NO: 169494 - DNA, 20 bp, synthetic construct
  source 1..20: mol_type = other DNA
gcgcgcacggagactcgaat

SEQ ID NO: 169495 - DNA, 20 bp, synthetic construct
  source 1..20: mol_type = other DNA
agcgcgcacggagactcgaa

SEQ ID NO: 169496 - DNA, 20 bp, synthetic construct
  source 1..20: mol_type = other DNA
cagcgcgcacggagactcga

SEQ ID NO: 169497 - DNA, 20 bp, synthetic construct
  source 1..20: mol_type = other DNA
gcagcgcgcacggagactcg

SEQ ID NO: 169498 - DNA, 20 bp, synthetic construct
  source 1..20: mol_type = other DNA
cgcagcgcgcacggagactc

SEQ ID NO: 169499 - DNA, 20 bp, synthetic construct
  source 1..20: mol_type = other DNA
ccgcagcgcgcacggagact

SEQ ID NO: 169500 - DNA, 20 bp, synthetic construct
  source 1..20: mol_type = other DNA
cccgcagcgcgcacggagac

SEQ ID NO: 169501 - DNA, 20 bp, synthetic construct
  source 1..20: mol_type = other DNA
gcccgcagcgcgcacggaga

SEQ ID NO: 169502 - DNA, 20 bp, synthetic construct
  source 1..20: mol_type = other DNA
cgcccgcagcgcgcacggag

SEQ ID NO: 169503 - DNA, 20 bp, synthetic construct
  source 1..20: mol_type = other DNA
ccgcccgcagcgcgcacgga

SEQ ID NO: 169504 - DNA, 20 bp, synthetic construct
  source 1..20: mol_type = other DNA
gccgcccgcagcgcgcacgg

SEQ ID NO: 169505 - DNA, 20 bp, synthetic construct
  source 1..20: mol_type = other DNA
cgccgcccgcagcgcgcacg

SEQ ID NO: 169506 - DNA, 20 bp, synthetic construct
  source 1..20: mol_type = other DNA
ccgccgcccgcagcgcgcac

SEQ ID NO: 169507 - DNA, 20 bp, synthetic construct
  source 1..20: mol_type = other DNA
gccgccgcccgcagcgcgca

SEQ ID NO: 169508 - DNA, 20 bp, synthetic construct
  source 1..20: mol_type = other DNA
tgccgccgcccgcagcgcgc

SEQ ID NO: 169509 - DNA, 20 bp, synthetic construct
  source 1..20: mol_type = other DNA
ctgccgccgcccgcagcgcg

SEQ ID NO: 169510 - DNA, 20 bp, synthetic construct
  source 1..20: mol_type = other DNA
tctgccgccgcccgcagcgc

SEQ ID NO: 169511 - DNA, 20 bp, synthetic construct
  source 1..20: mol_type = other DNA
ctctgccgccgcccgcagcg

SEQ ID NO: 169512 - DNA, 20 bp, synthetic construct
  source 1..20: mol_type = other DNA
cctctgccgccgcccgcagc

SEQ ID NO: 169513 - DNA, 20 bp, synthetic construct
  source 1..20: mol_type = other DNA
ccctctgccgccgcccgcag

SEQ ID NO: 169514 - DNA, 20 bp, synthetic construct
  source 1..20: mol_type = other DNA
tccctctgccgccgcccgca

SEQ ID NO: 169515 - DNA, 20 bp, synthetic construct
  source 1..20: mol_type = other DNA
atccctctgccgccgcccgc

SEQ ID NO: 169516 - DNA, 20 bp, synthetic construct
  source 1..20: mol_type = other DNA
gatccctctgccgccgcccg

SEQ ID NO: 169517 - DNA, 20 bp, synthetic construct
  source 1..20: mol_type = other DNA
agatccctctgccgccgccc

SEQ ID NO: 169518 - DNA, 20 bp, synthetic construct
  source 1..20: mol_type = other DNA
gagatccctctgccgccgcc

SEQ ID NO: 169519 - DNA, 20 bp, synthetic construct
  source 1..20: mol_type = other DNA
cgagatccctctgccgccgc

SEQ ID NO: 169520 - DNA, 20 bp, synthetic construct
  source 1..20: mol_type = other DNA
gcgagatccctctgccgccg

SEQ ID NO: 169521 - DNA, 20 bp, synthetic construct
  source 1..20: mol_type = other DNA
ggcgagatccctctgccgcc

SEQ ID NO: 169522 - DNA, 20 bp, synthetic construct
  source 1..20: mol_type = other DNA
gggcgagatccctctgccgc

SEQ ID NO: 169523 - DNA, 20 bp, synthetic construct
  source 1..20: mol_type = other DNA
ggggcgagatccctctgccg

SEQ ID NO: 169524 - DNA, 20 bp, synthetic construct
  source 1..20: mol_type = other DNA
aggggcgagatccctctgcc

SEQ ID NO: 169525 - DNA, 20 bp, synthetic construct
  source 1..20: mol_type = other DNA
gaggggcgagatccctctgc

SEQ ID NO: 169526 - DNA, 20 bp, synthetic construct
  source 1..20: mol_type = other DNA
ggaggggcgagatccctctg

SEQ ID NO: 169527 - DNA, 20 bp, synthetic construct
  source 1..20: mol_type = other DNA
gggaggggcgagatccctct

SEQ ID NO: 169528 - DNA, 20 bp, synthetic construct
  source 1..20: mol_type = other DNA
agggaggggcgagatccctc

SEQ ID NO: 169529 - DNA, 20 bp, synthetic construct
  source 1..20: mol_type = other DNA
tagggaggggcgagatccct

SEQ ID NO: 169530 - DNA, 20 bp, synthetic construct
  source 1..20: mol_type = other DNA
gtagggaggggcgagatccc

SEQ ID NO: 169531 - DNA, 20 bp, synthetic construct
  source 1..20: mol_type = other DNA
tgtagggaggggcgagatcc

SEQ ID NO: 169532 - DNA, 20 bp, synthetic construct
  source 1..20: mol_type = other DNA
gtgtagggaggggcgagatc

SEQ ID NO: 169533 - DNA, 20 bp, synthetic construct
  source 1..20: mol_type = other DNA
ggtgtagggaggggcgagat

SEQ ID NO: 169534 - DNA, 20 bp, synthetic construct
  source 1..20: mol_type = other DNA
gggtgtagggaggggcgaga

SEQ ID NO: 169535 - DNA, 20 bp, synthetic construct
  source 1..20: mol_type = other DNA
ggggtgtagggaggggcgag

SEQ ID NO: 169536 - DNA, 20 bp, synthetic construct
  source 1..20: mol_type = other DNA
tggggtgtagggaggggcga

SEQ ID NO: 169537 - DNA, 20 bp, synthetic construct
  source 1..20: mol_type = other DNA
ttggggtgtagggaggggcg

SEQ ID NO: 169538 - DNA, 20 bp, synthetic construct
  source 1..20: mol_type = other DNA
cttggggtgtagggaggggc

SEQ ID NO: 169539 - DNA, 20 bp, synthetic construct
  source 1..20: mol_type = other DNA
acttggggtgtagggagggg

SEQ ID NO: 169540 - DNA, 20 bp, synthetic construct
  source 1..20: mol_type = other DNA
cacttggggtgtagggaggg

SEQ ID NO: 169541 - DNA, 20 bp, synthetic construct
  source 1..20: mol_type = other DNA
acacttggggtgtagggagg

SEQ ID NO: 169542 - DNA, 20 bp, synthetic construct
  source 1..20: mol_type = other DNA
gacacttggggtgtagggag

SEQ ID NO: 169543 - DNA, 20 bp, synthetic construct
  source 1..20: mol_type = other DNA
ggacacttggggtgtaggga

SEQ ID NO: 169544 - DNA, 20 bp, synthetic construct
  source 1..20: mol_type = other DNA
aggacacttggggtgtaggg

SEQ ID NO: 169545 - DNA, 20 bp, synthetic construct
  source 1..20: mol_type = other DNA
caggacacttggggtgtagg

SEQ ID NO: 169546 - DNA, 20 bp, synthetic construct
  source 1..20: mol_type = other DNA
tcaggacacttggggtgtag

SEQ ID NO: 169547 - DNA, 20 bp, synthetic construct
  source 1..20: mol_type = other DNA
ctcaggacacttggggtgta

SEQ ID NO: 169548 - DNA, 20 bp, synthetic construct
  source 1..20: mol_type = other DNA
cctcaggacacttggggtgt

SEQ ID NO: 169549 - DNA, 20 bp, synthetic construct
  source 1..20: mol_type = other DNA
ccctcaggacacttggggtg

SEQ ID NO: 169550 - DNA, 20 bp, synthetic construct
  source 1..20: mol_type = other DNA
gccctcaggacacttggggt

SEQ ID NO: 169551 - DNA, 20 bp, synthetic construct
  source 1..20: mol_type = other DNA
ggccctcaggacacttgggg

SEQ ID NO: 169552 - DNA, 20 bp, synthetic construct
  source 1..20: mol_type = other DNA
tggccctcaggacacttggg

SEQ ID NO: 169553 - DNA, 20 bp, synthetic construct
  source 1..20: mol_type = other DNA
gtggccctcaggacacttgg

SEQ ID NO: 169554 - DNA, 20 bp, synthetic construct
  source 1..20: mol_type = other DNA
cgtggccctcaggacacttg

SEQ ID NO: 169555 - DNA, 20 bp, synthetic construct
  source 1..20: mol_type = other DNA
gcgtggccctcaggacactt

SEQ ID NO: 169556 - DNA, 20 bp, synthetic construct
  source 1..20: mol_type = other DNA
ggcgtggccctcaggacact

SEQ ID NO: 169557 - DNA, 20 bp, synthetic construct
  source 1..20: mol_type = other DNA
tggcgtggccctcaggacac

SEQ ID NO: 169558 - DNA, 20 bp, synthetic construct
  source 1..20: mol_type = other DNA
gtggcgtggccctcaggaca

SEQ ID NO: 169559 - DNA, 20 bp, synthetic construct
  source 1..20: mol_type = other DNA
tgtggcgtggccctcaggac

SEQ ID NO: 169560 - DNA, 20 bp, synthetic construct
  source 1..20: mol_type = other DNA
gtgtggcgtggccctcagga

SEQ ID NO: 169561 - DNA, 20 bp, synthetic construct
  source 1..20: mol_type = other DNA
ggtgtggcgtggccctcagg

SEQ ID NO: 169562 - DNA, 20 bp, synthetic construct
  source 1..20: mol_type = other DNA
tggtgtggcgtggccctcag

SEQ ID NO: 169563 - DNA, 20 bp, synthetic construct
  source 1..20: mol_type = other DNA
ctggtgtggcgtggccctca

SEQ ID NO: 169564 - DNA, 20 bp, synthetic construct
  source 1..20: mol_type = other DNA
cctggtgtggcgtggccctc

SEQ ID NO: 169565 - DNA, 20 bp, synthetic construct
  source 1..20: mol_type = other DNA
acctggtgtggcgtggccct

SEQ ID NO: 169566 - DNA, 20 bp, synthetic construct
  source 1..20: mol_type = other DNA
aacctggtgtggcgtggccc

SEQ ID NO: 169567 - DNA, 20 bp, synthetic construct
  source 1..20: mol_type = other DNA
caacctggtgtggcgtggcc

SEQ ID NO: 169568 - DNA, 20 bp, synthetic construct
  source 1..20: mol_type = other DNA
gcaacctggtgtggcgtggc

SEQ ID NO: 169569 - DNA, 20 bp, synthetic construct
  source 1..20: mol_type = other DNA
ggcaacctggtgtggcgtgg

SEQ ID NO: 169570 - DNA, 20 bp, synthetic construct
  source 1..20: mol_type = other DNA
gggcaacctggtgtggcgtg

SEQ ID NO: 169571 - DNA, 20 bp, synthetic construct
  source 1..20: mol_type = other DNA
tgggcaacctggtgtggcgt

SEQ ID NO: 169572 - DNA, 20 bp, synthetic construct
  source 1..20: mol_type = other DNA
ctgggcaacctggtgtggcg

SEQ ID NO: 169573 - DNA, 20 bp, synthetic construct
  source 1..20: mol_type = other DNA
gctgggcaacctggtgtggc

SEQ ID NO: 169574 - DNA, 20 bp, synthetic construct
  source 1..20: mol_type = other DNA
cgctgggcaacctggtgtgg

SEQ ID NO: 169575 - DNA, 20 bp, synthetic construct
  source 1..20: mol_type = other DNA
tcgctgggcaacctggtgtg

SEQ ID NO: 169576 - DNA, 20 bp, synthetic construct
  source 1..20: mol_type = other DNA
ctcgctgggcaacctggtgt

SEQ ID NO: 169577 - DNA, 20 bp, synthetic construct
  source 1..20: mol_type = other DNA
cctcgctgggcaacctggtg

SEQ ID NO: 169578 - DNA, 20 bp, synthetic construct
  source 1..20: mol_type = other DNA
ccctcgctgggcaacctggt

SEQ ID NO: 169579 - DNA, 20 bp, synthetic construct
  source 1..20: mol_type = other DNA
tccctcgctgggcaacctgg

SEQ ID NO: 169580 - DNA, 20 bp, synthetic construct
  source 1..20: mol_type = other DNA
gtccctcgctgggcaacctg

SEQ ID NO: 169581 - DNA, 20 bp, synthetic construct
  source 1..20: mol_type = other DNA
cgtccctcgctgggcaacct

SEQ ID NO: 169582 - DNA, 20 bp, synthetic construct
  source 1..20: mol_type = other DNA
gcgtccctcgctgggcaacc

SEQ ID NO: 169583 - DNA, 20 bp, synthetic construct
  source 1..20: mol_type = other DNA
agcgtccctcgctgggcaac

SEQ ID NO: 169584 - DNA, 20 bp, synthetic construct
  source 1..20: mol_type = other DNA
cagcgtccctcgctgggcaa

SEQ ID NO: 169585 - DNA, 20 bp, synthetic construct
  source 1..20: mol_type = other DNA
ccagcgtccctcgctgggca

SEQ ID NO: 169586 - DNA, 20 bp, synthetic construct
  source 1..20: mol_type = other DNA
gccagcgtccctcgctgggc

SEQ ID NO: 169587 - DNA, 20 bp, synthetic construct
  source 1..20: mol_type = other DNA
agccagcgtccctcgctggg

SEQ ID NO: 169588 - DNA, 20 bp, synthetic construct
  source 1..20: mol_type = other DNA
tagccagcgtccctcgctgg

SEQ ID NO: 169589 - DNA, 20 bp, synthetic construct
  source 1..20: mol_type = other DNA
gtagccagcgtccctcgctg

SEQ ID NO: 169590 - DNA, 20 bp, synthetic construct
  source 1..20: mol_type = other DNA
ggtagccagcgtccctcgct

SEQ ID NO: 169591 - DNA, 20 bp, synthetic construct
  source 1..20: mol_type = other DNA
gggtagccagcgtccctcgc

SEQ ID NO: 169592 - DNA, 20 bp, synthetic construct
  source 1..20: mol_type = other DNA
tgggtagccagcgtccctcg

SEQ ID NO: 169593 - DNA, 20 bp, synthetic construct
  source 1..20: mol_type = other DNA
atgggtagccagcgtccctc

SEQ ID NO: 169594 - DNA, 20 bp, synthetic construct
  source 1..20: mol_type = other DNA
gatgggtagccagcgtccct

SEQ ID NO: 169595 - DNA, 20 bp, synthetic construct
  source 1..20: mol_type = other DNA
ggatgggtagccagcgtccc

SEQ ID NO: 169596 - DNA, 20 bp, synthetic construct
  source 1..20: mol_type = other DNA
cggatgggtagccagcgtcc

SEQ ID NO: 169597 - DNA, 20 bp, synthetic construct
  source 1..20: mol_type = other DNA
ccggatgggtagccagcgtc

SEQ ID NO: 169598 - DNA, 20 bp, synthetic construct
  source 1..20: mol_type = other DNA
cccggatgggtagccagcgt

SEQ ID NO: 169599 - DNA, 20 bp, synthetic construct
  source 1..20: mol_type = other DNA
ccccggatgggtagccagcg

SEQ ID NO: 169600 - DNA, 20 bp, synthetic construct
  source 1..20: mol_type = other DNA
tccccggatgggtagccagc

SEQ ID NO: 169601 - DNA, 20 bp, synthetic construct
  source 1..20: mol_type = other DNA
atccccggatgggtagccag

SEQ ID NO: 169602 - DNA, 20 bp, synthetic construct
  source 1..20: mol_type = other DNA
catccccggatgggtagcca

SEQ ID NO: 169603 - DNA, 20 bp, synthetic construct
  source 1..20: mol_type = other DNA
ccatccccggatgggtagcc

SEQ ID NO: 169604 - DNA, 20 bp, synthetic construct
  source 1..20: mol_type = other DNA
cccatccccggatgggtagc

SEQ ID NO: 169605 - DNA, 20 bp, synthetic construct
  source 1..20: mol_type = other DNA
acccatccccggatgggtag

SEQ ID NO: 169606 - DNA, 20 bp, synthetic construct
  source 1..20: mol_type = other DNA
cacccatccccggatgggta

SEQ ID NO: 169607 - DNA, 20 bp, synthetic construct
  source 1..20: mol_type = other DNA
ccacccatccccggatgggt

SEQ ID NO: 169608 - DNA, 20 bp, synthetic construct
  source 1..20: mol_type = other DNA
cccacccatccccggatggg

SEQ ID NO: 169609 - DNA, 20 bp, synthetic construct
  source 1..20: mol_type = other DNA
ccccacccatccccggatgg

SEQ ID NO: 169610 - DNA, 20 bp, synthetic construct
  source 1..20: mol_type = other DNA
tccccacccatccccggatg

SEQ ID NO: 169611 - DNA, 20 bp, synthetic construct
  source 1..20: mol_type = other DNA
ctccccacccatccccggat

SEQ ID NO: 169612 - DNA, 20 bp, synthetic construct
  source 1..20: mol_type = other DNA
gctccccacccatccccgga

SEQ ID NO: 169613 - DNA, 20 bp, synthetic construct
  source 1..20: mol_type = other DNA
ggctccccacccatccccgg

SEQ ID NO: 169614 - DNA, 20 bp, synthetic construct
  source 1..20: mol_type = other DNA
gggctccccacccatccccg

SEQ ID NO: 169615 - DNA, 20 bp, synthetic construct
  source 1..20: mol_type = other DNA
agggctccccacccatcccc

SEQ ID NO: 169616 - DNA, 20 bp, synthetic construct
  source 1..20: mol_type = other DNA
cagggctccccacccatccc

SEQ ID NO: 169617 - DNA, 20 bp, synthetic construct
  source 1..20: mol_type = other DNA
ccagggctccccacccatcc

SEQ ID NO: 169618 - DNA, 20 bp, synthetic construct
  source 1..20: mol_type = other DNA
gccagggctccccacccatc

SEQ ID NO: 169619 - DNA, 20 bp, synthetic construct
  source 1..20: mol_type = other DNA
cgccagggctccccacccat

SEQ ID NO: 169620 - DNA, 20 bp, synthetic construct
  source 1..20: mol_type = other DNA
ccgccagggctccccaccca

SEQ ID NO: 169621 - DNA, 20 bp, synthetic construct
  source 1..20: mol_type = other DNA
cccgccagggctccccaccc

SEQ ID NO: 169622 - DNA, 20 bp, synthetic construct
  source 1..20: mol_type = other DNA
ccccgccagggctccccacc

SEQ ID NO: 169623 - DNA, 20 bp, synthetic construct
  source 1..20: mol_type = other DNA
gccccgccagggctccccac

SEQ ID NO: 169624 - DNA, 20 bp, synthetic construct
  source 1..20: mol_type = other DNA
ggccccgccagggctcccca

SEQ ID NO: 169625 - DNA, 20 bp, synthetic construct
  source 1..20: mol_type = other DNA
aggccccgccagggctcccc

SEQ ID NO: 169626 - DNA, 20 bp, synthetic construct
  source 1..20: mol_type = other DNA
gaggccccgccagggctccc

SEQ ID NO: 169627 - DNA, 20 bp, synthetic construct
  source 1..20: mol_type = other DNA
agaggccccgccagggctcc

SEQ ID NO: 169628 - DNA, 20 bp, synthetic construct
  source 1..20: mol_type = other DNA
gagaggccccgccagggctc

SEQ ID NO: 169629 - DNA, 20 bp, synthetic construct
  source 1..20: mol_type = other DNA
ggagaggccccgccagggct

SEQ ID NO: 169630 - DNA, 20 bp, synthetic construct
  source 1..20: mol_type = other DNA
cggagaggccccgccagggc

SEQ ID NO: 169631 - DNA, 20 bp, synthetic construct
  source 1..20: mol_type = other DNA
ccggagaggccccgccaggg

SEQ ID NO: 169632 - DNA, 20 bp, synthetic construct
  source 1..20: mol_type = other DNA
gccggagaggccccgccagg

SEQ ID NO: 169633 - DNA, 20 bp, synthetic construct
  source 1..20: mol_type = other DNA
agccggagaggccccgccag

SEQ ID NO: 169634 - DNA, 20 bp, synthetic construct
  source 1..20: mol_type = other DNA
aagccggagaggccccgcca

SEQ ID NO: 169635 - DNA, 20 bp, synthetic construct
  source 1..20: mol_type = other DNA
aaagccggagaggccccgcc

SEQ ID NO: 169636 - DNA, 20 bp, synthetic construct
  source 1..20: mol_type = other DNA
taaagccggagaggccccgc

SEQ ID NO: 169637 - DNA, 20 bp, synthetic construct
  source 1..20: mol_type = other DNA
gtaaagccggagaggccccg

SEQ ID NO: 169638 - DNA, 20 bp, synthetic construct
  source 1..20: mol_type = other DNA
cgtaaagccggagaggcccc

SEQ ID NO: 169639 - DNA, 20 bp, synthetic construct
  source 1..20: mol_type = other DNA
gcgtaaagccggagaggccc

SEQ ID NO: 169640 - DNA, 20 bp, synthetic construct
  source 1..20: mol_type = other DNA
ggcgtaaagccggagaggcc

SEQ ID NO: 169641 - DNA, 20 bp, synthetic construct
  source 1..20: mol_type = other DNA
gggcgtaaagccggagaggc

SEQ ID NO: 169642 - DNA, 20 bp, synthetic construct
  source 1..20: mol_type = other DNA
agggcgtaaagccggagagg

SEQ ID NO: 169643 - DNA, 20 bp, synthetic construct
  source 1..20: mol_type = other DNA
cagggcgtaaagccggagag

SEQ ID NO: 169644 - DNA, 20 bp, synthetic construct
  source 1..20: mol_type = other DNA
acagggcgtaaagccggaga

SEQ ID NO: 169645 - DNA, 20 bp, synthetic construct
  source 1..20: mol_type = other DNA
aacagggcgtaaagccggag

SEQ ID NO: 169646 - DNA, 20 bp, synthetic construct
  source 1..20: mol_type = other DNA
caacagggcgtaaagccgga

SEQ ID NO: 169647 - DNA, 20 bp, synthetic construct
  source 1..20: mol_type = other DNA
gcaacagggcgtaaagccgg

SEQ ID NO: 169648 - DNA, 20 bp, synthetic construct
  source 1..20: mol_type = other DNA
agcaacagggcgtaaagccg

SEQ ID NO: 169649 - DNA, 20 bp, synthetic construct
  source 1..20: mol_type = other DNA
aagcaacagggcgtaaagcc

SEQ ID NO: 169650 - DNA, 20 bp, synthetic construct
  source 1..20: mol_type = other DNA
gaagcaacagggcgtaaagc

SEQ ID NO: 169651 - DNA, 20 bp, synthetic construct
  source 1..20: mol_type = other DNA
cgaagcaacagggcgtaaag

SEQ ID NO: 169652 - DNA, 20 bp, synthetic construct
  source 1..20: mol_type = other DNA
gcgaagcaacagggcgtaaa

SEQ ID NO: 169653 - DNA, 20 bp, synthetic construct
  source 1..20: mol_type = other DNA
ggcgaagcaacagggcgtaa

SEQ ID NO: 169654 - DNA, 20 bp, synthetic construct
  source 1..20: mol_type = other DNA
aggcgaagcaacagggcgta

SEQ ID NO: 169655 - DNA, 20 bp, synthetic construct
  source 1..20: mol_type = other DNA
caggcgaagcaacagggcgt

SEQ ID NO: 169656 - DNA, 20 bp, synthetic construct
  source 1..20: mol_type = other DNA
ccaggcgaagcaacagggcg

SEQ ID NO: 169657 - DNA, 20 bp, synthetic construct
  source 1..20: mol_type = other DNA
gccaggcgaagcaacagggc

SEQ ID NO: 169658 - DNA, 20 bp, synthetic construct
  source 1..20: mol_type = other DNA
ggccaggcgaagcaacaggg

SEQ ID NO: 169659 - DNA, 20 bp, synthetic construct
  source 1..20: mol_type = other DNA
cggccaggcgaagcaacagg

SEQ ID NO: 169660 - DNA, 20 bp, synthetic construct
  source 1..20: mol_type = other DNA
ccggccaggcgaagcaacag

SEQ ID NO: 169661 - DNA, 20 bp, synthetic construct
  source 1..20: mol_type = other DNA
tccggccaggcgaagcaaca

SEQ ID NO: 169662 - DNA, 20 bp, synthetic construct
  source 1..20: mol_type = other DNA
ctccggccaggcgaagcaac

SEQ ID NO: 169663 - DNA, 20 bp, synthetic construct
  source 1..20: mol_type = other DNA
tctccggccaggcgaagcaa

SEQ ID NO: 169664 - DNA, 20 bp, synthetic construct
  source 1..20: mol_type = other DNA
ttctccggccaggcgaagca

SEQ ID NO: 169665 - DNA, 20 bp, synthetic construct
  source 1..20: mol_type = other DNA
attctccggccaggcgaagc

SEQ ID NO: 169666 - DNA, 20 bp, synthetic construct
  source 1..20: mol_type = other DNA
cattctccggccaggcgaag

SEQ ID NO: 169667 - DNA, 20 bp, synthetic construct
  source 1..20: mol_type = other DNA
acattctccggccaggcgaa

SEQ ID NO: 169668 - DNA, 20 bp, synthetic construct
  source 1..20: mol_type = other DNA
cacattctccggccaggcga

SEQ ID NO: 169669 - DNA, 20 bp, synthetic construct
  source 1..20: mol_type = other DNA
tcacattctccggccaggcg

SEQ ID NO: 169670 - DNA, 20 bp, synthetic construct
  source 1..20: mol_type = other DNA
ctcacattctccggccaggc

SEQ ID NO: 169671 - DNA, 20 bp, synthetic construct
  source 1..20: mol_type = other DNA
cctcacattctccggccagg

SEQ ID NO: 169672 - DNA, 20 bp, synthetic construct
  source 1..20: mol_type = other DNA
tcctcacattctccggccag

SEQ ID NO: 169673 - DNA, 20 bp, synthetic construct
  source 1..20: mol_type = other DNA
ttcctcacattctccggcca

SEQ ID NO: 169674 - DNA, 20 bp, synthetic construct
  source 1..20: mol_type = other DNA
cttcctcacattctccggcc

SEQ ID NO: 169675 - DNA, 20 bp, synthetic construct
  source 1..20: mol_type = other DNA
ccttcctcacattctccggc

SEQ ID NO: 169676 - DNA, 20 bp, synthetic construct
  source 1..20: mol_type = other DNA
cccttcctcacattctccgg

SEQ ID NO: 169677 - DNA, 20 bp, synthetic construct
  source 1..20: mol_type = other DNA
ccccttcctcacattctccg

SEQ ID NO: 169678 - DNA, 20 bp, synthetic construct
  source 1..20: mol_type = other DNA
gccccttcctcacattctcc

SEQ ID NO: 169679 - DNA, 20 bp, synthetic construct
  source 1..20: mol_type = other DNA
tgccccttcctcacattctc

SEQ ID NO: 169680 - DNA, 20 bp, synthetic construct
  source 1..20: mol_type = other DNA
atgccccttcctcacattct

SEQ ID NO: 169681 - DNA, 20 bp, synthetic construct
  source 1..20: mol_type = other DNA
tatgccccttcctcacattc

SEQ ID NO: 169682 - DNA, 20 bp, synthetic construct
  source 1..20: mol_type = other DNA
ttatgccccttcctcacatt

SEQ ID NO: 169683 - DNA, 20 bp, synthetic construct
  source 1..20: mol_type = other DNA
cttatgccccttcctcacat

SEQ ID NO: 169684 - DNA, 20 bp, synthetic construct
  source 1..20: mol_type = other DNA
ccttatgccccttcctcaca

SEQ ID NO: 169685 - DNA, 20 bp, synthetic construct
  source 1..20: mol_type = other DNA
accttatgccccttcctcac

SEQ ID NO: 169686 - DNA, 20 bp, synthetic construct
  source 1..20: mol_type = other DNA
aaccttatgccccttcctca

SEQ ID NO: 169687 - DNA, 20 bp, synthetic construct
  source 1..20: mol_type = other DNA
taaccttatgccccttcctc

SEQ ID NO: 169688 - DNA, 20 bp, synthetic construct
  source 1..20: mol_type = other DNA
gtaaccttatgccccttcct

SEQ ID NO: 169689 - DNA, 20 bp, synthetic construct
  source 1..20: mol_type = other DNA
agtaaccttatgccccttcc

SEQ ID NO: 169690 - DNA, 20 bp, synthetic construct
  source 1..20: mol_type = other DNA
cagtaaccttatgccccttc

SEQ ID NO: 169691 - DNA, 20 bp, synthetic construct
  source 1..20: mol_type = other DNA
ccagtaaccttatgcccctt

SEQ ID NO: 169692 - DNA, 20 bp, synthetic construct
  source 1..20: mol_type = other DNA
accagtaaccttatgcccct

SEQ ID NO: 169693 - DNA, 20 bp, synthetic construct
  source 1..20: mol_type = other DNA
caccagtaaccttatgcccc

SEQ ID NO: 169694 - DNA, 20 bp, synthetic construct
  source 1..20: mol_type = other DNA
gcaccagtaaccttatgccc

SEQ ID NO: 169695 - DNA, 20 bp, synthetic construct
  source 1..20: mol_type = other DNA
agcaccagtaaccttatgcc

SEQ ID NO: 169696 - DNA, 20 bp, synthetic construct
  source 1..20: mol_type = other DNA
aagcaccagtaaccttatgc

SEQ ID NO: 169697 - DNA, 20 bp, synthetic construct
  source 1..20: mol_type = other DNA
gaagcaccagtaaccttatg

SEQ ID NO: 169698 - DNA, 20 bp, synthetic construct
  source 1..20: mol_type = other DNA
cgaagcaccagtaaccttat

SEQ ID NO: 169699 - DNA, 20 bp, synthetic construct
  source 1..20: mol_type = other DNA
ccgaagcaccagtaacctta

SEQ ID NO: 169700 - DNA, 20 bp, synthetic construct
  source 1..20: mol_type = other DNA
gccgaagcaccagtaacctt

SEQ ID NO: 169701 - DNA, 20 bp, synthetic construct
  source 1..20: mol_type = other DNA
ggccgaagcaccagtaacct

SEQ ID NO: 169702 - DNA, 20 bp, synthetic construct
  source 1..20: mol_type = other DNA
tggccgaagcaccagtaacc

SEQ ID NO: 169703 - DNA, 20 bp, synthetic construct
  source 1..20: mol_type = other DNA
gtggccgaagcaccagtaac

SEQ ID NO: 169704 - DNA, 20 bp, synthetic construct
  source 1..20: mol_type = other DNA
tgtggccgaagcaccagtaa

SEQ ID NO: 169705 - DNA, 20 bp, synthetic construct
  source 1..20: mol_type = other DNA
gtgtggccgaagcaccagta

SEQ ID NO: 169706 - DNA, 20 bp, synthetic construct
  source 1..20: mol_type = other DNA
ggtgtggccgaagcaccagt

SEQ ID NO: 169707 - DNA, 20 bp, synthetic construct
  source 1..20: mol_type = other DNA
gggtgtggccgaagcaccag

SEQ ID NO: 169708 - DNA, 20 bp, synthetic construct
  source 1..20: mol_type = other DNA
tgggtgtggccgaagcacca

SEQ ID NO: 169709 - DNA, 20 bp, synthetic construct
  source 1..20: mol_type = other DNA
atgggtgtggccgaagcacc

SEQ ID NO: 169710 - DNA, 20 bp, synthetic construct
  source 1..20: mol_type = other DNA
gatgggtgtggccgaagcac

SEQ ID NO: 169711 - DNA, 20 bp, synthetic construct
  source 1..20: mol_type = other DNA
agatgggtgtggccgaagca

SEQ ID NO: 169712 - DNA, 20 bp, synthetic construct
  source 1..20: mol_type = other DNA
aagatgggtgtggccgaagc

SEQ ID NO: 169713 - DNA, 20 bp, synthetic construct
  source 1..20: mol_type = other DNA
aaagatgggtgtggccgaag

SEQ ID NO: 169714 - DNA, 20 bp, synthetic construct
  source 1..20: mol_type = other DNA
gaaagatgggtgtggccgaa

SEQ ID NO: 169715 - DNA, 20 bp, synthetic construct
  source 1..20: mol_type = other DNA
agaaagatgggtgtggccga

SEQ ID NO: 169716 - DNA, 20 bp, synthetic construct
  source 1..20: mol_type = other DNA
cagaaagatgggtgtggccg

SEQ ID NO: 169717 - DNA, 20 bp, synthetic construct
  source 1..20: mol_type = other DNA
tcagaaagatgggtgtggcc

SEQ ID NO: 169718 - DNA, 20 bp, synthetic construct
  source 1..20: mol_type = other DNA
ctcagaaagatgggtgtggc

SEQ ID NO: 169719 - DNA, 20 bp, synthetic construct
  source 1..20: mol_type = other DNA
gctcagaaagatgggtgtgg

SEQ ID NO: 169720 - DNA, 20 bp, synthetic construct
  source 1..20: mol_type = other DNA
ggctcagaaagatgggtgtg

SEQ ID NO: 169721 - DNA, 20 bp, synthetic construct
  source 1..20: mol_type = other DNA
gggctcagaaagatgggtgt

SEQ ID NO: 169722 - DNA, 20 bp, synthetic construct
  source 1..20: mol_type = other DNA
tgggctcagaaagatgggtg

SEQ ID NO: 169723 - DNA, 20 bp, synthetic construct
  source 1..20: mol_type = other DNA
gtgggctcagaaagatgggt

SEQ ID NO: 169724 - DNA, 20 bp, synthetic construct
  source 1..20: mol_type = other DNA
agtgggctcagaaagatggg

SEQ ID NO: 169725 - DNA, 20 bp, synthetic construct
  source 1..20: mol_type = other DNA
cagtgggctcagaaagatgg

SEQ ID NO: 169726 - DNA, 20 bp, synthetic construct
  source 1..20: mol_type = other DNA
ccagtgggctcagaaagatg

SEQ ID NO: 169727 - DNA, 20 bp, synthetic construct
  source 1..20: mol_type = other DNA
tccagtgggctcagaaagat

SEQ ID NO: 169728 - DNA, 20 bp, synthetic construct
  source 1..20: mol_type = other DNA
gtccagtgggctcagaaaga

SEQ ID NO: 169729 - DNA, 20 bp, synthetic construct
  source 1..20: mol_type = other DNA
agtccagtgggctcagaaag

SEQ ID NO: 169730 - DNA, 20 bp, synthetic construct
  source 1..20: mol_type = other DNA
cagtccagtgggctcagaaa

SEQ ID NO: 169731 - DNA, 20 bp, synthetic construct
  source 1..20: mol_type = other DNA
ccagtccagtgggctcagaa

SEQ ID NO: 169732 - DNA, 20 bp, synthetic construct
  source 1..20: mol_type = other DNA
cccagtccagtgggctcaga

SEQ ID NO: 169733 - DNA, 20 bp, synthetic construct
  source 1..20: mol_type = other DNA
gcccagtccagtgggctcag

SEQ ID NO: 169734 - DNA, 20 bp, synthetic construct
  source 1..20: mol_type = other DNA
cgcccagtccagtgggctca

SEQ ID NO: 169735 - DNA, 20 bp, synthetic construct
  source 1..20: mol_type = other DNA
gcgcccagtccagtgggctc

SEQ ID NO: 169736 - DNA, 20 bp, synthetic construct
  source 1..20: mol_type = other DNA
tgcgcccagtccagtgggct

SEQ ID NO: 169737 - DNA, 20 bp, synthetic construct
  source 1..20: mol_type = other DNA
ctgcgcccagtccagtgggc

SEQ ID NO: 169738 - DNA, 20 bp, synthetic construct
  source 1..20: mol_type = other DNA
tctgcgcccagtccagtggg

SEQ ID NO: 169739 - DNA, 20 bp, synthetic construct
  source 1..20: mol_type = other DNA
ctctgcgcccagtccagtgg

SEQ ID NO: 169740 - DNA, 20 bp, synthetic construct
  source 1..20: mol_type = other DNA
cctctgcgcccagtccagtg

SEQ ID NO: 169741 - DNA, 20 bp, synthetic construct
  source 1..20: mol_type = other DNA
ccctctgcgcccagtccagt

SEQ ID NO: 169742 - DNA, 20 bp, synthetic construct
  source 1..20: mol_type = other DNA
cccctctgcgcccagtccag

SEQ ID NO: 169743 - DNA, 20 bp, synthetic construct
  source 1..20: mol_type = other DNA
ccccctctgcgcccagtcca

SEQ ID NO: 169744 - DNA, 20 bp, synthetic construct
  source 1..20: mol_type = other DNA
cccccctctgcgcccagtcc

SEQ ID NO: 169745 - DNA, 20 bp, synthetic construct
  source 1..20: mol_type = other DNA
tcccccctctgcgcccagtc

SEQ ID NO: 169746 - DNA, 20 bp, synthetic construct
  source 1..20: mol_type = other DNA
atcccccctctgcgcccagt

SEQ ID NO: 169747 - DNA, 20 bp, synthetic construct
  source 1..20: mol_type = other DNA
aatcccccctctgcgcccag

SEQ ID NO: 169748 - DNA, 20 bp, synthetic construct
  source 1..20: mol_type = other DNA
caatcccccctctgcgccca

SEQ ID NO: 169749 - DNA, 20 bp, synthetic construct
  source 1..20: mol_type = other DNA
gcaatcccccctctgcgccc

SEQ ID NO: 169750 - DNA, 20 bp, synthetic construct
  source 1..20: mol_type = other DNA
ggcaatcccccctctgcgcc

SEQ ID NO: 169751 - DNA, 20 bp, synthetic construct
  source 1..20: mol_type = other DNA
tggcaatcccccctctgcgc

SEQ ID NO: 169752 - DNA, 20 bp, synthetic construct
  source 1..20: mol_type = other DNA
atggcaatcccccctctgcg

SEQ ID NO: 169753 - DNA, 20 bp, synthetic construct
  source 1..20: mol_type = other DNA
catggcaatcccccctctgc

SEQ ID NO: 169754 - DNA, 20 bp, synthetic construct
  source 1..20: mol_type = other DNA
ccatggcaatcccccctctg

SEQ ID NO: 169755 - DNA, 20 bp, synthetic construct
  source 1..20: mol_type = other DNA
tccatggcaatcccccctct

SEQ ID NO: 169756 - DNA, 20 bp, synthetic construct
  source 1..20: mol_type = other DNA
ttccatggcaatcccccctc

SEQ ID NO: 169757 - DNA, 20 bp, synthetic construct
  source 1..20: mol_type = other DNA
tttccatggcaatcccccct

SEQ ID NO: 169758 - DNA, 20 bp, synthetic construct
  source 1..20: mol_type = other DNA
gtttccatggcaatcccccc

SEQ ID NO: 169759 - DNA, 20 bp, synthetic construct
  source 1..20: mol_type = other DNA
ggtttccatggcaatccccc

SEQ ID NO: 169760 - DNA, 20 bp, synthetic construct
  source 1..20: mol_type = other DNA
tggtttccatggcaatcccc

SEQ ID NO: 169761 - DNA, 20 bp, synthetic construct
  source 1..20: mol_type = other DNA
gtggtttccatggcaatccc

SEQ ID NO: 169762 - DNA, 20 bp, synthetic construct
  source 1..20: mol_type = other DNA
tgtggtttccatggcaatcc

SEQ ID NO: 169763 - DNA, 20 bp, synthetic construct
  source 1..20: mol_type = other DNA
ctgtggtttccatggcaatc

SEQ ID NO: 169764 - DNA, 20 bp, synthetic construct
  source 1..20: mol_type = other DNA
cctgtggtttccatggcaat

SEQ ID NO: 169765 - DNA, 20 bp, synthetic construct
  source 1..20: mol_type = other DNA
acctgtggtttccatggcaa

SEQ ID NO: 169766 - DNA, 20 bp, synthetic construct
  source 1..20: mol_type = other DNA
cacctgtggtttccatggca

SEQ ID NO: 169767 - DNA, 20 bp, synthetic construct
  source 1..20: mol_type = other DNA
acacctgtggtttccatggc

SEQ ID NO: 169768 - DNA, 20 bp, synthetic construct
  source 1..20: mol_type = other DNA
gacacctgtggtttccatgg

SEQ ID NO: 169769 - DNA, 20 bp, synthetic construct
  source 1..20: mol_type = other DNA
ggacacctgtggtttccatg

SEQ ID NO: 169770 - DNA, 20 bp, synthetic construct
  source 1..20: mol_type = other DNA
cggacacctgtggtttccat

SEQ ID NO: 169771 - DNA, 20 bp, synthetic construct
  source 1..20: mol_type = other DNA
ccggacacctgtggtttcca

SEQ ID NO: 169772 - DNA, 20 bp, synthetic construct
  source 1..20: mol_type = other DNA
tccggacacctgtggtttcc

SEQ ID NO: 169773 - DNA, 20 bp, synthetic construct
  source 1..20: mol_type = other DNA
ctccggacacctgtggtttc

SEQ ID NO: 169774 - DNA, 20 bp, synthetic construct
  source 1..20: mol_type = other DNA
tctccggacacctgtggttt

SEQ ID NO: 169775 - DNA, 20 bp, synthetic construct
  source 1..20: mol_type = other DNA
ctctccggacacctgtggtt

SEQ ID NO: 169776 - DNA, 20 bp, synthetic construct
  source 1..20: mol_type = other DNA
cctctccggacacctgtggt

SEQ ID NO: 169777 - DNA, 20 bp, synthetic construct
  source 1..20: mol_type = other DNA
ccctctccggacacctgtgg

SEQ ID NO: 169778 - DNA, 20 bp, synthetic construct
  source 1..20: mol_type = other DNA
cccctctccggacacctgtg

SEQ ID NO: 169779 - DNA, 20 bp, synthetic construct
  source 1..20: mol_type = other DNA
tcccctctccggacacctgt

SEQ ID NO: 169780 - DNA, 20 bp, synthetic construct
  source 1..20: mol_type = other DNA
atcccctctccggacacctg

SEQ ID NO: 169781 - DNA, 20 bp, synthetic construct
  source 1..20: mol_type = other DNA
gatcccctctccggacacct

SEQ ID NO: 169782 - DNA, 20 bp, synthetic construct
  source 1..20: mol_type = other DNA
agatcccctctccggacacc

SEQ ID NO: 169783 - DNA, 20 bp, synthetic construct
  source 1..20: mol_type = other DNA
aagatcccctctccggacac

SEQ ID NO: 169784 - DNA, 20 bp, synthetic construct
  source 1..20: mol_type = other DNA
caagatcccctctccggaca

SEQ ID NO: 169785 - DNA, 20 bp, synthetic construct
  source 1..20: mol_type = other DNA
ccaagatcccctctccggac

SEQ ID NO: 169786 - DNA, 20 bp, synthetic construct
  source 1..20: mol_type = other DNA
cccaagatcccctctccgga

SEQ ID NO: 169787 - DNA, 20 bp, synthetic construct
  source 1..20: mol_type = other DNA
ccccaagatcccctctccgg

SEQ ID NO: 169788 - DNA, 20 bp, synthetic construct
  source 1..20: mol_type = other DNA
gccccaagatcccctctccg

SEQ ID NO: 169789 - DNA, 20 bp, synthetic construct
  source 1..20: mol_type = other DNA
agccccaagatcccctctcc

SEQ ID NO: 169790 - DNA, 20 bp, synthetic construct
  source 1..20: mol_type = other DNA
cagccccaagatcccctctc

SEQ ID NO: 169791 - DNA, 20 bp, synthetic construct
  source 1..20: mol_type = other DNA
ccagccccaagatcccctct

SEQ ID NO: 169792 - DNA, 20 bp, synthetic construct
  source 1..20: mol_type = other DNA
gccagccccaagatcccctc

SEQ ID NO: 169793 - DNA, 20 bp, synthetic construct
  source 1..20: mol_type = other DNA
ggccagccccaagatcccct

SEQ ID NO: 169794 - DNA, 20 bp, synthetic construct
  source 1..20: mol_type = other DNA
aggccagccccaagatcccc

SEQ ID NO: 169795 - DNA, 20 bp, synthetic construct
  source 1..20: mol_type = other DNA
gaggccagccccaagatccc

SEQ ID NO: 169796 - DNA, 20 bp, synthetic construct
  source 1..20: mol_type = other DNA
tgaggccagccccaagatcc

SEQ ID NO: 169797 - DNA, 20 bp, synthetic construct
  source 1..20: mol_type = other DNA
gtgaggccagccccaagatc

SEQ ID NO: 169798 - DNA, 20 bp, synthetic construct
  source 1..20: mol_type = other DNA
ggtgaggccagccccaagat

SEQ ID NO: 169799 - DNA, 20 bp, synthetic construct
  source 1..20: mol_type = other DNA
gggtgaggccagccccaaga

SEQ ID NO: 169800 - DNA, 20 bp, synthetic construct
  source 1..20: mol_type = other DNA
ggggtgaggccagccccaag

SEQ ID NO: 169801 - DNA, 20 bp, synthetic construct
  source 1..20: mol_type = other DNA
aggggtgaggccagccccaa

SEQ ID NO: 169802 - DNA, 20 bp, synthetic construct
  source 1..20: mol_type = other DNA
aaggggtgaggccagcccca

SEQ ID NO: 169803 - DNA, 20 bp, synthetic construct
  source 1..20: mol_type = other DNA
gaaggggtgaggccagcccc

SEQ ID NO: 169804 - DNA, 20 bp, synthetic construct
  source 1..20: mol_type = other DNA
ggaaggggtgaggccagccc

SEQ ID NO: 169805 - DNA, 20 bp, synthetic construct
  source 1..20: mol_type = other DNA
gggaaggggtgaggccagcc

SEQ ID NO: 169806 - DNA, 20 bp, synthetic construct
  source 1..20: mol_type = other DNA
agggaaggggtgaggccagc

SEQ ID NO: 169807 - DNA, 20 bp, synthetic construct
  source 1..20: mol_type = other DNA
cagggaaggggtgaggccag

SEQ ID NO: 169808 - DNA, 20 bp, synthetic construct
  source 1..20: mol_type = other DNA
gcagggaaggggtgaggcca

SEQ ID NO: 169809 - DNA, 20 bp, synthetic construct
  source 1..20: mol_type = other DNA
cgcagggaaggggtgaggcc

SEQ ID NO: 169810 - DNA, 20 bp, synthetic construct
  source 1..20: mol_type = other DNA
ccgcagggaaggggtgaggc

SEQ ID NO: 169811 - DNA, 20 bp, synthetic construct
  source 1..20: mol_type = other DNA
tccgcagggaaggggtgagg

SEQ ID NO: 169812 - DNA, 20 bp, synthetic construct
  source 1..20: mol_type = other DNA
ctccgcagggaaggggtgag

SEQ ID NO: 169813 - DNA, 20 bp, synthetic construct
  source 1..20: mol_type = other DNA
tctccgcagggaaggggtga

SEQ ID NO: 169814 - DNA, 20 bp, synthetic construct
  source 1..20: mol_type = other DNA
atctccgcagggaaggggtg

SEQ ID NO: 169815 - DNA, 20 bp, synthetic construct
  source 1..20: mol_type = other DNA
aatctccgcagggaaggggt

SEQ ID NO: 169816 - DNA, 20 bp, synthetic construct
  source 1..20: mol_type = other DNA
caatctccgcagggaagggg

SEQ ID NO: 169817 - DNA, 20 bp, synthetic construct
  source 1..20: mol_type = other DNA
ccaatctccgcagggaaggg

SEQ ID NO: 169818 - DNA, 20 bp, synthetic construct
  source 1..20: mol_type = other DNA
cccaatctccgcagggaagg

SEQ ID NO: 169819 - DNA, 20 bp, synthetic construct
  source 1..20: mol_type = other DNA
ccccaatctccgcagggaag

SEQ ID NO: 169820 - DNA, 20 bp, synthetic construct
  source 1..20: mol_type = other DNA
tccccaatctccgcagggaa

SEQ ID NO: 169821 - DNA, 20 bp, synthetic construct
  source 1..20: mol_type = other DNA
gtccccaatctccgcaggga

SEQ ID NO: 169822 - DNA, 20 bp, synthetic construct
  source 1..20: mol_type = other DNA
ggtccccaatctccgcaggg

SEQ ID NO: 169823 - DNA, 20 bp, synthetic construct
  source 1..20: mol_type = other DNA
gggtccccaatctccgcagg

SEQ ID NO: 169824 - DNA, 20 bp, synthetic construct
  source 1..20: mol_type = other DNA
agggtccccaatctccgcag

SEQ ID NO: 169825 - DNA, 20 bp, synthetic construct
  source 1..20: mol_type = other DNA
cagggtccccaatctccgca

SEQ ID NO: 169826 - DNA, 20 bp, synthetic construct
  source 1..20: mol_type = other DNA
ccagggtccccaatctccgc

SEQ ID NO: 169827 - DNA, 20 bp, synthetic construct
  source 1..20: mol_type = other DNA
cccagggtccccaatctccg

SEQ ID NO: 169828 - DNA, 20 bp, synthetic construct
  source 1..20: mol_type = other DNA
ccccagggtccccaatctcc

SEQ ID NO: 169829 - DNA, 20 bp, synthetic construct
  source 1..20: mol_type = other DNA
accccagggtccccaatctc

SEQ ID NO: 169830 - DNA, 20 bp, synthetic construct
  source 1..20: mol_type = other DNA
taccccagggtccccaatct

SEQ ID NO: 169831 - DNA, 20 bp, synthetic construct
  source 1..20: mol_type = other DNA
ctaccccagggtccccaatc

SEQ ID NO: 169832 - DNA, 20 bp, synthetic construct
  source 1..20: mol_type = other DNA
cctaccccagggtccccaat

SEQ ID NO: 169833 - DNA, 20 bp, synthetic construct
  source 1..20: mol_type = other DNA
ccctaccccagggtccccaa

SEQ ID NO: 169834 - DNA, 20 bp, synthetic construct
  source 1..20: mol_type = other DNA
cccctaccccagggtcccca

SEQ ID NO: 169835 - DNA, 20 bp, synthetic construct
  source 1..20: mol_type = other DNA
ccccctaccccagggtcccc

SEQ ID NO: 169836 - DNA, 20 bp, synthetic construct
  source 1..20: mol_type = other DNA
tccccctaccccagggtccc

SEQ ID NO: 169837 - DNA, 20 bp, synthetic construct
  source 1..20: mol_type = other DNA
ctccccctaccccagggtcc

SEQ ID NO: 169838 - DNA, 20 bp, synthetic construct
  source 1..20: mol_type = other DNA
gctccccctaccccagggtc

SEQ ID NO: 169839 - DNA, 20 bp, synthetic construct
  source 1..20: mol_type = other DNA
ggctccccctaccccagggt

SEQ ID NO: 169840 - DNA, 20 bp, synthetic construct
  source 1..20: mol_type = other DNA
cggctccccctaccccaggg

SEQ ID NO: 169841 - DNA, 20 bp, synthetic construct
  source 1..20: mol_type = other DNA
gcggctccccctaccccagg

SEQ ID NO: 169842 - DNA, 20 bp, synthetic construct
  source 1..20: mol_type = other DNA
cgcggctccccctaccccag

SEQ ID NO: 169843 - DNA, 20 bp, synthetic construct
  source 1..20: mol_type = other DNA
gcgcggctccccctacccca

SEQ ID NO: 169844 - DNA, 20 bp, synthetic construct
  source 1..20: mol_type = other DNA
ggcgcggctccccctacccc

SEQ ID NO: 169845 - DNA, 20 bp, synthetic construct
  source 1..20: mol_type = other DNA
gggcgcggctccccctaccc

SEQ ID NO: 169846 - DNA, 20 bp, synthetic construct
  source 1..20: mol_type = other DNA
tgggcgcggctccccctacc

SEQ ID NO: 169847 - DNA, 20 bp, synthetic construct
  source 1..20: mol_type = other DNA
ctgggcgcggctccccctac

SEQ ID NO: 169848 - DNA, 20 bp, synthetic construct
  source 1..20: mol_type = other DNA
actgggcgcggctcccccta

SEQ ID NO: 169849 - DNA, 20 bp, synthetic construct
  source 1..20: mol_type = other DNA
gactgggcgcggctccccct

SEQ ID NO: 169850 - DNA, 20 bp, synthetic construct
  source 1..20: mol_type = other DNA
cgactgggcgcggctccccc

SEQ ID NO: 169851 - DNA, 20 bp, synthetic construct
  source 1..20: mol_type = other DNA
ccgactgggcgcggctcccc

SEQ ID NO: 169852 - DNA, 20 bp, synthetic construct
  source 1..20: mol_type = other DNA
gccgactgggcgcggctccc

SEQ ID NO: 169853 - DNA, 20 bp, synthetic construct
  source 1..20: mol_type = other DNA
ggccgactgggcgcggctcc

SEQ ID NO: 169854 - DNA, 20 bp, synthetic construct
  source 1..20: mol_type = other DNA
aggccgactgggcgcggctc

SEQ ID NO: 169855 - DNA, 20 bp, synthetic construct
  source 1..20: mol_type = other DNA
gaggccgactgggcgcggct

SEQ ID NO: 169856 - DNA, 20 bp, synthetic construct
  source 1..20: mol_type = other DNA
ggaggccgactgggcgcggc

SEQ ID NO: 169857 - DNA, 20 bp, synthetic construct
  source 1..20: mol_type = other DNA
aggaggccgactgggcgcgg

SEQ ID NO: 169858 - DNA, 20 bp, synthetic construct
  source 1..20: mol_type = other DNA
caggaggccgactgggcgcg

SEQ ID NO: 169859 - DNA, 20 bp, synthetic construct
  source 1..20: mol_type = other DNA
ccaggaggccgactgggcgc

SEQ ID NO: 169860 - DNA, 20 bp, synthetic construct
  source 1..20: mol_type = other DNA
tccaggaggccgactgggcg

SEQ ID NO: 169861 - DNA, 20 bp, synthetic construct
  source 1..20: mol_type = other DNA
ctccaggaggccgactgggc

SEQ ID NO: 169862 - DNA, 20 bp, synthetic construct
  source 1..20: mol_type = other DNA
cctccaggaggccgactggg

SEQ ID NO: 169863 - DNA, 20 bp, synthetic construct
  source 1..20: mol_type = other DNA
tcctccaggaggccgactgg

SEQ ID NO: 169864 - DNA, 20 bp, synthetic construct
  source 1..20: mol_type = other DNA
gtcctccaggaggccgactg

SEQ ID NO: 169865 - DNA, 20 bp, synthetic construct
  source 1..20: mol_type = other DNA
tgtcctccaggaggccgact

SEQ ID NO: 169866 - DNA, 20 bp, synthetic construct
  source 1..20: mol_type = other DNA
gtgtcctccaggaggccgac

SEQ ID NO: 169867 - DNA, 20 bp, synthetic construct
  source 1..20: mol_type = other DNA
cgtgtcctccaggaggccga

SEQ ID NO: 169868 - DNA, 20 bp, synthetic construct
  source 1..20: mol_type = other DNA
ccgtgtcctccaggaggccg

SEQ ID NO: 169869 - DNA, 20 bp, synthetic construct
  source 1..20: mol_type = other DNA
cccgtgtcctccaggaggcc

SEQ ID NO: 169870 - DNA, 20 bp, synthetic construct
  source 1..20: mol_type = other DNA
tcccgtgtcctccaggaggc

SEQ ID NO: 169871 - DNA, 20 bp, synthetic construct
  source 1..20: mol_type = other DNA
ctcccgtgtcctccaggagg

SEQ ID NO: 169872 - DNA, 20 bp, synthetic construct
  source 1..20: mol_type = other DNA
cctcccgtgtcctccaggag

SEQ ID NO: 169873 - DNA, 20 bp, synthetic construct
  source 1..20: mol_type = other DNA
tcctcccgtgtcctccagga

SEQ ID NO: 169874 - DNA, 20 bp, synthetic construct
  source 1..20: mol_type = other DNA
ttcctcccgtgtcctccagg

SEQ ID NO: 169875 - DNA, 20 bp, synthetic construct
  source 1..20: mol_type = other DNA
cttcctcccgtgtcctccag

SEQ ID NO: 169876 - DNA, 20 bp, synthetic construct
  source 1..20: mol_type = other DNA
gcttcctcccgtgtcctcca

SEQ ID NO: 169877 - DNA, 20 bp, synthetic construct
  source 1..20: mol_type = other DNA
ggcttcctcccgtgtcctcc

SEQ ID NO: 169878 - DNA, 20 bp, synthetic construct
  source 1..20: mol_type = other DNA
gggcttcctcccgtgtcctc

SEQ ID NO: 169879 - DNA, 20 bp, synthetic construct
  source 1..20: mol_type = other DNA
ggggcttcctcccgtgtcct

SEQ ID NO: 169880 - DNA, 20 bp, synthetic construct
  source 1..20: mol_type = other DNA
cggggcttcctcccgtgtcc

SEQ ID NO: 169881 - DNA, 20 bp, synthetic construct
  source 1..20: mol_type = other DNA
tcggggcttcctcccgtgtc

SEQ ID NO: 169882 - DNA, 20 bp, synthetic construct
  source 1..20: mol_type = other DNA
ttcggggcttcctcccgtgt

SEQ ID NO: 169883 - DNA, 20 bp, synthetic construct
  source 1..20: mol_type = other DNA
gttcggggcttcctcccgtg

SEQ ID NO: 169884 - DNA, 20 bp, synthetic construct
  source 1..20: mol_type = other DNA
ggttcggggcttcctcccgt

SEQ ID NO: 169885 - DNA, 20 bp, synthetic construct
  source 1..20: mol_type = other DNA
gggttcggggcttcctcccg

SEQ ID NO: 169886 - DNA, 20 bp, synthetic construct
  source 1..20: mol_type = other DNA
ggggttcggggcttcctccc

SEQ ID NO: 169887 - DNA, 20 bp, synthetic construct
  source 1..20: mol_type = other DNA
gggggttcggggcttcctcc

SEQ ID NO: 169888 - DNA, 20 bp, synthetic construct
  source 1..20: mol_type = other DNA
cgggggttcggggcttcctc

SEQ ID NO: 169889 - DNA, 20 bp, synthetic construct
  source 1..20: mol_type = other DNA
gcgggggttcggggcttcct

SEQ ID NO: 169890 - DNA, 20 bp, synthetic construct
  source 1..20: mol_type = other DNA
cgcgggggttcggggcttcc

SEQ ID NO: 169891 - DNA, 20 bp, synthetic construct
  source 1..20: mol_type = other DNA
gcgcgggggttcggggcttc

SEQ ID NO: 169892 - DNA, 20 bp, synthetic construct
  source 1..20: mol_type = other DNA
ggcgcgggggttcggggctt

SEQ ID NO: 169893 - DNA, 20 bp, synthetic construct
  source 1..20: mol_type = other DNA
aggcgcgggggttcggggct

SEQ ID NO: 169894 - DNA, 20 bp, synthetic construct
  source 1..20: mol_type = other DNA
caggcgcgggggttcggggc

SEQ ID NO: 169895 - DNA, 20 bp, synthetic construct
  source 1..20: mol_type = other DNA
tcaggcgcgggggttcgggg

SEQ ID NO: 169896 - DNA, 20 bp, synthetic construct
  source 1..20: mol_type = other DNA
ctcaggcgcgggggttcggg

SEQ ID NO: 169897 - DNA, 20 bp, synthetic construct
  source 1..20: mol_type = other DNA
cctcaggcgcgggggttcgg

SEQ ID NO: 169898 - DNA, 20 bp, synthetic construct
  source 1..20: mol_type = other DNA
gcctcaggcgcgggggttcg

SEQ ID NO: 169899 - DNA, 20 bp, synthetic construct
  source 1..20: mol_type = other DNA
agcctcaggcgcgggggttc

SEQ ID NO: 169900 - DNA, 20 bp, synthetic construct
  source 1..20: mol_type = other DNA
cagcctcaggcgcgggggtt

SEQ ID NO: 169901 - DNA, 20 bp, synthetic construct
  source 1..20: mol_type = other DNA
acagcctcaggcgcgggggt

SEQ ID NO: 169902 - DNA, 20 bp, synthetic construct
  source 1..20: mol_type = other DNA
aacagcctcaggcgcggggg

SEQ ID NO: 169903 - DNA, 20 bp, synthetic construct
  source 1..20: mol_type = other DNA
aaacagcctcaggcgcgggg

SEQ ID NO: 169904 - DNA, 20 bp, synthetic construct
  source 1..20: mol_type = other DNA
gaaacagcctcaggcgcggg

SEQ ID NO: 169905 - DNA, 20 bp, synthetic construct
  source 1..20: mol_type = other DNA
agaaacagcctcaggcgcgg

SEQ ID NO: 169906 - DNA, 20 bp, synthetic construct
  source 1..20: mol_type = other DNA
cagaaacagcctcaggcgcg

SEQ ID NO: 169907 - DNA, 20 bp, synthetic construct
  source 1..20: mol_type = other DNA
tcagaaacagcctcaggcgc

SEQ ID NO: 169908 - DNA, 20 bp, synthetic construct
  source 1..20: mol_type = other DNA
atcagaaacagcctcaggcg

SEQ ID NO: 169909 - DNA, 20 bp, synthetic construct
  source 1..20: mol_type = other DNA
aatcagaaacagcctcaggc

SEQ ID NO: 169910 - DNA, 20 bp, synthetic construct
  source 1..20: mol_type = other DNA
caatcagaaacagcctcagg

SEQ ID NO: 169911 - DNA, 20 bp, synthetic construct
  source 1..20: mol_type = other DNA
ccaatcagaaacagcctcag

SEQ ID NO: 169912 - DNA, 20 bp, synthetic construct
  source 1..20: mol_type = other DNA
gccaatcagaaacagcctca

SEQ ID NO: 169913 - DNA, 20 bp, synthetic construct
  source 1..20: mol_type = other DNA
ggccaatcagaaacagcctc

SEQ ID NO: 169914 - DNA, 20 bp, synthetic construct
  source 1..20: mol_type = other DNA
gggccaatcagaaacagcct

SEQ ID NO: 169915 - DNA, 20 bp, synthetic construct
  source 1..20: mol_type = other DNA
ggggccaatcagaaacagcc

SEQ ID NO: 169916 - DNA, 20 bp, synthetic construct
  source 1..20: mol_type = other DNA
aggggccaatcagaaacagc

SEQ ID NO: 169917 - DNA, 20 bp, synthetic construct
  source 1..20: mol_type = other DNA
caggggccaatcagaaacag

SEQ ID NO: 169918 - DNA, 20 bp, synthetic construct
  source 1..20: mol_type = other DNA
ccaggggccaatcagaaaca

SEQ ID NO: 169919 - DNA, 20 bp, synthetic construct
  source 1..20: mol_type = other DNA
tccaggggccaatcagaaac

SEQ ID NO: 169920 - DNA, 20 bp, synthetic construct
  source 1..20: mol_type = other DNA
ctccaggggccaatcagaaa

SEQ ID NO: 169921 - DNA, 20 bp, synthetic construct
  source 1..20: mol_type = other DNA
cctccaggggccaatcagaa

SEQ ID NO: 169922 - DNA, 20 bp, synthetic construct
  source 1..20: mol_type = other DNA
gcctccaggggccaatcaga

SEQ ID NO: 169923 - DNA, 20 bp, synthetic construct
  source 1..20: mol_type = other DNA
ggcctccaggggccaatcag

SEQ ID NO: 169924 - DNA, 20 bp, synthetic construct
  source 1..20: mol_type = other DNA
cggcctccaggggccaatca

SEQ ID NO: 169925 - DNA, 20 bp, synthetic construct
  source 1..20: mol_type = other DNA
gcggcctccaggggccaatc

SEQ ID NO: 169926 - DNA, 20 bp, synthetic construct
  source 1..20: mol_type = other DNA
tgcggcctccaggggccaat

SEQ ID NO: 169927 - DNA, 20 bp, synthetic construct
  source 1..20: mol_type = other DNA
ctgcggcctccaggggccaa

SEQ ID NO: 169928 - DNA, 20 bp, synthetic construct
  source 1..20: mol_type = other DNA
tctgcggcctccaggggcca

SEQ ID NO: 169929 - DNA, 20 bp, synthetic construct
  source 1..20: mol_type = other DNA
gtctgcggcctccaggggcc

SEQ ID NO: 169930 - DNA, 20 bp, synthetic construct
  source 1..20: mol_type = other DNA
tgtctgcggcctccaggggc

SEQ ID NO: 169931 - DNA, 20 bp, synthetic construct
  source 1..20: mol_type = other DNA
gtgtctgcggcctccagggg

SEQ ID NO: 169932 - DNA, 20 bp, synthetic construct
  source 1..20: mol_type = other DNA
cgtgtctgcggcctccaggg

SEQ ID NO: 169933 - DNA, 20 bp, synthetic construct
  source 1..20: mol_type = other DNA
gcgtgtctgcggcctccagg

SEQ ID NO: 169934 - DNA, 20 bp, synthetic construct
  source 1..20: mol_type = other DNA
tgcgtgtctgcggcctccag

SEQ ID NO: 169935 - DNA, 20 bp, synthetic construct
  source 1..20: mol_type = other DNA
ctgcgtgtctgcggcctcca

SEQ ID NO: 169936 - DNA, 20 bp, synthetic construct
  source 1..20: mol_type = other DNA
tctgcgtgtctgcggcctcc

SEQ ID NO: 169937 - DNA, 20 bp, synthetic construct
  source 1..20: mol_type = other DNA
atctgcgtgtctgcggcctc

SEQ ID NO: 169938 - DNA, 20 bp, synthetic construct
  source 1..20: mol_type = other DNA
tatctgcgtgtctgcggcct

SEQ ID NO: 169939 - DNA, 20 bp, synthetic construct
  source 1..20: mol_type = other DNA
ctatctgcgtgtctgcggcc

SEQ ID NO: 169940 - DNA, 20 bp, synthetic construct
  source 1..20: mol_type = other DNA
cctatctgcgtgtctgcggc

SEQ ID NO: 169941 - DNA, 20 bp, synthetic construct
  source 1..20: mol_type = other DNA
gcctatctgcgtgtctgcgg

SEQ ID NO: 169942 - DNA, 20 bp, synthetic construct
  source 1..20: mol_type = other DNA
cgcctatctgcgtgtctgcg

SEQ ID NO: 169943 - DNA, 20 bp, synthetic construct
  source 1..20: mol_type = other DNA
ccgcctatctgcgtgtctgc

SEQ ID NO: 169944 - DNA, 20 bp, synthetic construct
  source 1..20: mol_type = other DNA
gccgcctatctgcgtgtctg

SEQ ID NO: 169945 - DNA, 20 bp, synthetic construct
  source 1..20: mol_type = other DNA
ggccgcctatctgcgtgtct

SEQ ID NO: 169946 - DNA, 20 bp, synthetic construct
  source 1..20: mol_type = other DNA
gggccgcctatctgcgtgtc

SEQ ID NO: 169947 - DNA, 20 bp, synthetic construct
  source 1..20: mol_type = other DNA
agggccgcctatctgcgtgt

SEQ ID NO: 169948 - DNA, 20 bp, synthetic construct
  source 1..20: mol_type = other DNA
cagggccgcctatctgcgtg

SEQ ID NO: 169949 - DNA, 20 bp, synthetic construct
  source 1..20: mol_type = other DNA
ccagggccgcctatctgcgt

SEQ ID NO: 169950 - DNA, 20 bp, synthetic construct
  source 1..20: mol_type = other DNA
cccagggccgcctatctgcg

SEQ ID NO: 169951 - DNA, 20 bp, synthetic construct
  source 1..20: mol_type = other DNA
acccagggccgcctatctgc

SEQ ID NO: 169952 - DNA, 20 bp, synthetic construct
  source 1..20: mol_type = other DNA
cacccagggccgcctatctg

SEQ ID NO: 169953 - DNA, 20 bp, synthetic construct
  source 1..20: mol_type = other DNA
acacccagggccgcctatct

SEQ ID NO: 169954 - DNA, 20 bp, synthetic construct
  source 1..20: mol_type = other DNA
tacacccagggccgcctatc

SEQ ID NO: 169955 - DNA, 20 bp, synthetic construct
  source 1..20: mol_type = other DNA
atacacccagggccgcctat

SEQ ID NO: 169956 - DNA, 20 bp, synthetic construct
  source 1..20: mol_type = other DNA
aatacacccagggccgccta

SEQ ID NO: 169957 - DNA, 20 bp, synthetic construct
  source 1..20: mol_type = other DNA
aaatacacccagggccgcct

SEQ ID NO: 169958 - DNA, 20 bp, synthetic construct
  source 1..20: mol_type = other DNA
aaaatacacccagggccgcc

SEQ ID NO: 169959 - DNA, 20 bp, synthetic construct
  source 1..20: mol_type = other DNA
aaaaatacacccagggccgc

SEQ ID NO: 169960 - DNA, 20 bp, synthetic construct
  source 1..20: mol_type = other DNA
taaaaatacacccagggccg

SEQ ID NO: 169961 - DNA, 20 bp, synthetic construct
  source 1..20: mol_type = other DNA
ataaaaatacacccagggcc

SEQ ID NO: 169962 - DNA, 20 bp, synthetic construct
  source 1..20: mol_type = other DNA
aataaaaatacacccagggc

SEQ ID NO: 169963 - DNA, 20 bp, synthetic construct
  source 1..20: mol_type = other DNA
taataaaaatacacccaggg

SEQ ID NO: 169964 - DNA, 20 bp, synthetic construct
  source 1..20: mol_type = other DNA
ttaataaaaatacacccagg

SEQ ID NO: 169965 - DNA, 20 bp, synthetic construct
  source 1..20: mol_type = other DNA
attaataaaaatacacccag

SEQ ID NO: 169966 - DNA, 20 bp, synthetic construct
  source 1..20: mol_type = other DNA
tattaataaaaatacaccca

SEQ ID NO: 169967 - DNA, 20 bp, synthetic construct
  source 1..20: mol_type = other DNA
atattaataaaaatacaccc

SEQ ID NO: 169968 - DNA, 20 bp, synthetic construct
  source 1..20: mol_type = other DNA
aatattaataaaaatacacc

SEQ ID NO: 169969 - DNA, 20 bp, synthetic construct
  source 1..20: mol_type = other DNA
taatattaataaaaatacac

SEQ ID NO: 169970 - DNA, 20 bp, synthetic construct
  source 1..20: mol_type = other DNA
ataatattaataaaaataca

SEQ ID NO: 169971 - DNA, 20 bp, synthetic construct
  source 1..20: mol_type = other DNA
cataatattaataaaaatac

SEQ ID NO: 169972 - DNA, 20 bp, synthetic construct
  source 1..20: mol_type = other DNA
acataatattaataaaaata

SEQ ID NO: 169973 - DNA, 20 bp, synthetic construct
  source 1..20: mol_type = other DNA
gacataatattaataaaaat

SEQ ID NO: 169974 - DNA, 20 bp, synthetic construct
  source 1..20: mol_type = other DNA
ggacataatattaataaaaa

SEQ ID NO: 169975 - DNA, 20 bp, synthetic construct
  source 1..20: mol_type = other DNA
cggacataatattaataaaa

SEQ ID NO: 169976 - DNA, 20 bp, synthetic construct
  source 1..20: mol_type = other DNA
acggacataatattaataaa

SEQ ID NO: 169977 - DNA, 20 bp, synthetic construct
  source 1..20: mol_type = other DNA
tacggacataatattaataa

SEQ ID NO: 169978 - DNA, 20 bp, synthetic construct
  source 1..20: mol_type = other DNA
gtacggacataatattaata

SEQ ID NO: 169979 - DNA, 20 bp, synthetic construct
  source 1..20: mol_type = other DNA
agtacggacataatattaat

SEQ ID NO: 169980 - DNA, 20 bp, synthetic construct
  source 1..20: mol_type = other DNA
cagtacggacataatattaa

SEQ ID NO: 169981 - DNA, 20 bp, synthetic construct
  source 1..20: mol_type = other DNA
tcagtacggacataatatta

SEQ ID NO: 169982 - DNA, 20 bp, synthetic construct
  source 1..20: mol_type = other DNA
atcagtacggacataatatt

SEQ ID NO: 169983 - DNA, 20 bp, synthetic construct
  source 1..20: mol_type = other DNA
aatcagtacggacataatat

SEQ ID NO: 169984 - DNA, 20 bp, synthetic construct
  source 1..20: mol_type = other DNA
taatcagtacggacataata

SEQ ID NO: 169985 - DNA, 20 bp, synthetic construct
  source 1..20: mol_type = other DNA
ttaatcagtacggacataat

SEQ ID NO: 169986 - DNA, 20 bp, synthetic construct
  source 1..20: mol_type = other DNA
attaatcagtacggacataa

SEQ ID NO: 169987 - DNA, 20 bp, synthetic construct
  source 1..20: mol_type = other DNA
tattaatcagtacggacata

SEQ ID NO: 169988 - DNA, 20 bp, synthetic construct
  source 1..20: mol_type = other DNA
atattaatcagtacggacat

SEQ ID NO: 169989 - DNA, 20 bp, synthetic construct
  source 1..20: mol_type = other DNA
aatattaatcagtacggaca

SEQ ID NO: 169990 - DNA, 20 bp, synthetic construct
  source 1..20: mol_type = other DNA
taatattaatcagtacggac

SEQ ID NO: 169991 - DNA, 20 bp, synthetic construct
  source 1..20: mol_type = other DNA
ataatattaatcagtacgga

SEQ ID NO: 169992 - DNA, 20 bp, synthetic construct
  source 1..20: mol_type = other DNA
aataatattaatcagtacgg

SEQ ID NO: 169993 - DNA, 20 bp, synthetic construct
  source 1..20: mol_type = other DNA
aaataatattaatcagtacg

SEQ ID NO: 169994 - DNA, 20 bp, synthetic construct
  source 1..20: mol_type = other DNA
taaataatattaatcagtac

SEQ ID NO: 169995 - DNA, 20 bp, synthetic construct
  source 1..20: mol_type = other DNA
ataaataatattaatcagta

SEQ ID NO: 169996 - DNA, 20 bp, synthetic construct
  source 1..20: mol_type = other DNA
gataaataatattaatcagt

SEQ ID NO: 169997 - DNA, 20 bp, synthetic construct
  source 1..20: mol_type = other DNA
agataaataatattaatcag

SEQ ID NO: 169998 - DNA, 20 bp, synthetic construct
  source 1..20: mol_type = other DNA
aagataaataatattaatca

SEQ ID NO: 169999 - DNA, 20 bp, synthetic construct
  source 1..20: mol_type = other DNA
taagataaataatattaatc

SEQ ID NO: 170000 - DNA, 20 bp, synthetic construct
  source 1..20: mol_type = other DNA
ttaagataaataatattaat

SEQ ID NO: 170001 - DNA, 20 bp, synthetic construct
  source 1..20: mol_type = other DNA
tttaagataaataatattaa

SEQ ID NO: 170002 - DNA, 20 bp, synthetic construct
  source 1..20: mol_type = other DNA
atttaagataaataatatta

SEQ ID NO: 170003 - DNA, 20 bp, synthetic construct
  source 1..20: mol_type = other DNA
tatttaagataaataatatt

SEQ ID NO: 170004 - DNA, 20 bp, synthetic construct
  source 1..20: mol_type = other DNA
ttatttaagataaataatat

SEQ ID NO: 170005 - DNA, 20 bp, synthetic construct
  source 1..20: mol_type = other DNA
tttatttaagataaataata

SEQ ID NO: 170006 - DNA, 20 bp, synthetic construct
  source 1..20: mol_type = other DNA
atttatttaagataaataat

SEQ ID NO: 170007 - DNA, 20 bp, synthetic construct
  source 1..20: mol_type = other DNA
aatttatttaagataaataa

SEQ ID NO: 170008 - DNA, 20 bp, synthetic construct
  source 1..20: mol_type = other DNA
aaatttatttaagataaata

SEQ ID NO: 170009 - DNA, 20 bp, synthetic construct
  source 1..20: mol_type = other DNA
gaaatttatttaagataaat

SEQ ID NO: 170010 - DNA, 20 bp, synthetic construct
  source 1..20: mol_type = other DNA
tgaaatttatttaagataaa

SEQ ID NO: 170011 - DNA, 20 bp, synthetic construct
  source 1..20: mol_type = other DNA
gtgaaatttatttaagataa

SEQ ID NO: 170012 - DNA, 20 bp, synthetic construct
  source 1..20: mol_type = other DNA
ggtgaaatttatttaagata

SEQ ID NO: 170013 - DNA, 20 bp, synthetic construct
  source 1..20: mol_type = other DNA
gggtgaaatttatttaagat

SEQ ID NO: 170014 - DNA, 20 bp, synthetic construct
  source 1..20: mol_type = other DNA
cgggtgaaatttatttaaga

SEQ ID NO: 170015 - DNA, 20 bp, synthetic construct
  source 1..20: mol_type = other DNA
acgggtgaaatttatttaag

SEQ ID NO: 170016 - DNA, 20 bp, synthetic construct
  source 1..20: mol_type = other DNA
cacgggtgaaatttatttaa

SEQ ID NO: 170017 - DNA, 20 bp, synthetic construct
  source 1..20: mol_type = other DNA
acacgggtgaaatttattta

SEQ ID NO: 170018 - DNA, 20 bp, synthetic construct
  source 1..20: mol_type = other DNA
gacacgggtgaaatttattt

SEQ ID NO: 170019 - DNA, 20 bp, synthetic construct
  source 1..20: mol_type = other DNA
ggacacgggtgaaatttatt

SEQ ID NO: 170020 - DNA, 20 bp, synthetic construct
  source 1..20: mol_type = other DNA
tggacacgggtgaaatttat

SEQ ID NO: 170021 - DNA, 20 bp, synthetic construct
  source 1..20: mol_type = other DNA
ttggacacgggtgaaattta

SEQ ID NO: 170022 - DNA, 20 bp, synthetic construct
  source 1..20: mol_type = other DNA
cttggacacgggtgaaattt

SEQ ID NO: 170023 - DNA, 20 bp, synthetic construct
  source 1..20: mol_type = other DNA
acttggacacgggtgaaatt

SEQ ID NO: 170024 - DNA, 20 bp, synthetic construct
  source 1..20: mol_type = other DNA
aacttggacacgggtgaaat

SEQ ID NO: 170025 - DNA, 20 bp, synthetic construct
  source 1..20: mol_type = other DNA
gaacttggacacgggtgaaa

SEQ ID NO: 170026 - DNA, 20 bp, synthetic construct
  source 1..20: mol_type = other DNA
tgaacttggacacgggtgaa

SEQ ID NO: 170027 - DNA, 20 bp, synthetic construct
  source 1..20: mol_type = other DNA
gtgaacttggacacgggtga

SEQ ID NO: 170028 - DNA, 20 bp, synthetic construct
  source 1..20: mol_type = other DNA
ggtgaacttggacacgggtg

SEQ ID NO: 170029 - DNA, 20 bp, synthetic construct
  source 1..20: mol_type = other DNA
cggtgaacttggacacgggt

SEQ ID NO: 170030 - DNA, 20 bp, synthetic construct
  source 1..20: mol_type = other DNA
gcggtgaacttggacacggg

SEQ ID NO: 170031 - DNA, 20 bp, synthetic construct
  source 1..20: mol_type = other DNA
cgcggtgaacttggacacgg

SEQ ID NO: 170032 - DNA, 20 bp, synthetic construct
  source 1..20: mol_type = other DNA
gcgcggtgaacttggacacg

SEQ ID NO: 170033 - DNA, 20 bp, synthetic construct
  source 1..20: mol_type = other DNA
ggcgcggtgaacttggacac

SEQ ID NO: 170034 - DNA, 20 bp, synthetic construct
  source 1..20: mol_type = other DNA
gggcgcggtgaacttggaca

SEQ ID NO: 170035 - DNA, 20 bp, synthetic construct
  source 1..20: mol_type = other DNA
ggggcgcggtgaacttggac

SEQ ID NO: 170036 - DNA, 20 bp, synthetic construct
  source 1..20: mol_type = other DNA
gggggcgcggtgaacttgga

SEQ ID NO: 170037 - DNA, 20 bp, synthetic construct
  source 1..20: mol_type = other DNA
tgggggcgcggtgaacttgg

SEQ ID NO: 170038 - DNA, 20 bp, synthetic construct
  source 1..20: mol_type = other DNA
ttgggggcgcggtgaacttg

SEQ ID NO: 170039 - DNA, 20 bp, synthetic construct
  source 1..20: mol_type = other DNA
tttgggggcgcggtgaactt

SEQ ID NO: 170040 - DNA, 20 bp, synthetic construct
  source 1..20: mol_type = other DNA
ttttgggggcgcggtgaact

SEQ ID NO: 170041 - DNA, 20 bp, synthetic construct
  source 1..20: mol_type = other DNA
gttttgggggcgcggtgaac

SEQ ID NO: 170042 - DNA, 20 bp, synthetic construct
  source 1..20: mol_type = other DNA
ggttttgggggcgcggtgaa

SEQ ID NO: 170043 - DNA, 20 bp, synthetic construct
  source 1..20: mol_type = other DNA
cggttttgggggcgcggtga

SEQ ID NO: 170044 - DNA, 20 bp, synthetic construct
  source 1..20: mol_type = other DNA
tcggttttgggggcgcggtg

SEQ ID NO: 170045 - DNA, 20 bp, synthetic construct
  source 1..20: mol_type = other DNA
ctcggttttgggggcgcggt

SEQ ID NO: 170046 - DNA, 20 bp, synthetic construct
  source 1..20: mol_type = other DNA
actcggttttgggggcgcgg

SEQ ID NO: 170047 - DNA, 20 bp, synthetic construct
  source 1..20: mol_type = other DNA
gactcggttttgggggcgcg

SEQ ID NO: 170048 - DNA, 20 bp, synthetic construct
  source 1..20: mol_type = other DNA
agactcggttttgggggcgc

SEQ ID NO: 170049 - DNA, 20 bp, synthetic construct
  source 1..20: mol_type = other DNA
cagactcggttttgggggcg

SEQ ID NO: 170050 - DNA, 20 bp, synthetic construct
  source 1..20: mol_type = other DNA
ccagactcggttttgggggc

SEQ ID NO: 170051 - DNA, 20 bp, synthetic construct
  source 1..20: mol_type = other DNA
cccagactcggttttggggg

SEQ ID NO: 170052 - DNA, 20 bp, synthetic construct
  source 1..20: mol_type = other DNA
ccccagactcggttttgggg

SEQ ID NO: 170053 - DNA, 20 bp, synthetic construct
  source 1..20: mol_type = other DNA
gccccagactcggttttggg

SEQ ID NO: 170054 - DNA, 20 bp, synthetic construct
  source 1..20: mol_type = other DNA
cgccccagactcggttttgg

SEQ ID NO: 170055 - DNA, 20 bp, synthetic construct
  source 1..20: mol_type = other DNA
ccgccccagactcggttttg

SEQ ID NO: 170056 - DNA, 20 bp, synthetic construct
  source 1..20: mol_type = other DNA
gccgccccagactcggtttt

SEQ ID NO: 170057 - DNA, 20 bp, synthetic construct
  source 1..20: mol_type = other DNA
tgccgccccagactcggttt

SEQ ID NO: 170058 - DNA, 20 bp, synthetic construct
  source 1..20: mol_type = other DNA
ctgccgccccagactcggtt

SEQ ID NO: 170059 - DNA, 20 bp, synthetic construct
  source 1..20: mol_type = other DNA
cctgccgccccagactcggt

SEQ ID NO: 170060 - DNA, 20 bp, synthetic construct
  source 1..20: mol_type = other DNA
ccctgccgccccagactcgg

SEQ ID NO: 170061 - DNA, 20 bp, synthetic construct
  source 1..20: mol_type = other DNA
cccctgccgccccagactcg

SEQ ID NO: 170062 - DNA, 20 bp, synthetic construct
  source 1..20: mol_type = other DNA
ccccctgccgccccagactc

SEQ ID NO: 170063 - DNA, 20 bp, synthetic construct
  source 1..20: mol_type = other DNA
tccccctgccgccccagact

SEQ ID NO: 170064 - DNA, 20 bp, synthetic construct
  source 1..20: mol_type = other DNA
ttccccctgccgccccagac

SEQ ID NO: 170065 - DNA, 20 bp, synthetic construct
  source 1..20: mol_type = other DNA
gttccccctgccgccccaga

SEQ ID NO: 170066 - DNA, 20 bp, synthetic construct
  source 1..20: mol_type = other DNA
agttccccctgccgccccag

SEQ ID NO: 170067 - DNA, 20 bp, synthetic construct
  source 1..20: mol_type = other DNA
gagttccccctgccgcccca

SEQ ID NO: 170068 - DNA, 20 bp, synthetic construct
  source 1..20: mol_type = other DNA
ggagttccccctgccgcccc

SEQ ID NO: 170069 - DNA, 20 bp, synthetic construct
  source 1..20: mol_type = other DNA
aggagttccccctgccgccc

SEQ ID NO: 170070 - DNA, 20 bp, synthetic construct
  source 1..20: mol_type = other DNA
caggagttccccctgccgcc

SEQ ID NO: 170071 - DNA, 20 bp, synthetic construct
  source 1..20: mol_type = other DNA
ccaggagttccccctgccgc

SEQ ID NO: 170072 - DNA, 20 bp, synthetic construct
  source 1..20: mol_type = other DNA
gccaggagttccccctgccg

SEQ ID NO: 170073 - DNA, 20 bp, synthetic construct
  source 1..20: mol_type = other DNA
ggccaggagttccccctgcc

SEQ ID NO: 170074 - DNA, 20 bp, synthetic construct
  source 1..20: mol_type = other DNA
tggccaggagttccccctgc

SEQ ID NO: 170075 - DNA, 20 bp, synthetic construct
  source 1..20: mol_type = other DNA
ttggccaggagttccccctg

SEQ ID NO: 170076 - DNA, 20 bp, synthetic construct
  source 1..20: mol_type = other DNA
gttggccaggagttccccct

SEQ ID NO: 170077 - DNA, 20 bp, synthetic construct
  source 1..20: mol_type = other DNA
cgttggccaggagttccccc

SEQ ID NO: 170078 - DNA, 20 bp, synthetic construct
  source 1..20: mol_type = other DNA
tcgttggccaggagttcccc

SEQ ID NO: 170079 - DNA, 20 bp, synthetic construct
  source 1..20: mol_type = other DNA
ttcgttggccaggagttccc

SEQ ID NO: 170080 - DNA, 20 bp, synthetic construct
  source 1..20: mol_type = other DNA
attcgttggccaggagttcc

SEQ ID NO: 170081 - DNA, 20 bp, synthetic construct
  source 1..20: mol_type = other DNA
gattcgttggccaggagttc

SEQ ID NO: 170082 - DNA, 20 bp, synthetic construct
  source 1..20: mol_type = other DNA
ggattcgttggccaggagtt

SEQ ID NO: 170083 - DNA, 20 bp, synthetic construct
  source 1..20: mol_type = other DNA
tggattcgttggccaggagt

SEQ ID NO: 170084 - DNA, 20 bp, synthetic construct
  source 1..20: mol_type = other DNA
atggattcgttggccaggag

SEQ ID NO: 170085 - DNA, 20 bp, synthetic construct
  source 1..20: mol_type = other DNA
catggattcgttggccagga

SEQ ID NO: 170086 - DNA, 20 bp, synthetic construct
  source 1..20: mol_type = other DNA
gcatggattcgttggccagg

SEQ ID NO: 170087 - DNA, 20 bp, synthetic construct
  source 1..20: mol_type = other DNA
ggcatggattcgttggccag

SEQ ID NO: 170088 - DNA, 20 bp, synthetic construct
  source 1..20: mol_type = other DNA
aggcatggattcgttggcca

SEQ ID NO: 170089 - DNA, 20 bp, synthetic construct
  source 1..20: mol_type = other DNA
gaggcatggattcgttggcc

SEQ ID NO: 170090 - DNA, 20 bp, synthetic construct
  source 1..20: mol_type = other DNA
cgaggcatggattcgttggc

SEQ ID NO: 170091 - DNA, 20 bp, synthetic construct
  source 1..20: mol_type = other DNA
gcgaggcatggattcgttgg

SEQ ID NO: 170092 - DNA, 20 bp, synthetic construct
  source 1..20: mol_type = other DNA
ggcgaggcatggattcgttg

SEQ ID NO: 170093 - DNA, 20 bp, synthetic construct
  source 1..20: mol_type = other DNA
gggcgaggcatggattcgtt

SEQ ID NO: 170094 - DNA, 20 bp, synthetic construct
  source 1..20: mol_type = other DNA
agggcgaggcatggattcgt

SEQ ID NO: 170095 - DNA, 20 bp, synthetic construct
  source 1..20: mol_type = other DNA
gagggcgaggcatggattcg

SEQ ID NO: 170096 - DNA, 20 bp, synthetic construct
  source 1..20: mol_type = other DNA
ggagggcgaggcatggattc

SEQ ID NO: 170097 - DNA, 20 bp, synthetic construct
  source 1..20: mol_type = other DNA
aggagggcgaggcatggatt

SEQ ID NO: 170098 - DNA, 20 bp, synthetic construct
  source 1..20: mol_type = other DNA
caggagggcgaggcatggat

SEQ ID NO: 170099 - DNA, 20 bp, synthetic construct
  source 1..20: mol_type = other DNA
acaggagggcgaggcatgga

SEQ ID NO: 170100 - DNA, 20 bp, synthetic construct
  source 1..20: mol_type = other DNA
cacaggagggcgaggcatgg

SEQ ID NO: 170101 - DNA, 20 bp, synthetic construct
  source 1..20: mol_type = other DNA
tcacaggagggcgaggcatg

SEQ ID NO: 170102 - DNA, 20 bp, synthetic construct
  source 1..20: mol_type = other DNA
atcacaggagggcgaggcat

SEQ ID NO: 170103 - DNA, 20 bp, synthetic construct
  source 1..20: mol_type = other DNA
catcacaggagggcgaggca

SEQ ID NO: 170104 - DNA, 20 bp, synthetic construct
  source 1..20: mol_type = other DNA
tcatcacaggagggcgaggc

SEQ ID NO: 170105 - DNA, 20 bp, synthetic construct
  source 1..20: mol_type = other DNA
ttcatcacaggagggcgagg

SEQ ID NO: 170106 - DNA, 20 bp, synthetic construct
  source 1..20: mol_type = other DNA
gttcatcacaggagggcgag

SEQ ID NO: 170107 - DNA, 20 bp, synthetic construct
  source 1..20: mol_type = other DNA
ggttcatcacaggagggcga

SEQ ID NO: 170108 - DNA, 20 bp, synthetic construct
  source 1..20: mol_type = other DNA
aggttcatcacaggagggcg

SEQ ID NO: 170109 - DNA, 20 bp, synthetic construct
  source 1..20: mol_type = other DNA
caggttcatcacaggagggc

SEQ ID NO: 170110 - DNA, 20 bp, synthetic construct
  source 1..20: mol_type = other DNA
ccaggttcatcacaggaggg

SEQ ID NO: 170111 - DNA, 20 bp, synthetic construct
  source 1..20: mol_type = other DNA
accaggttcatcacaggagg

SEQ ID NO: 170112 - DNA, 20 bp, synthetic construct
  source 1..20: mol_type = other DNA
taccaggttcatcacaggag

SEQ ID NO: 170113 - DNA, 20 bp, synthetic construct
  source 1..20: mol_type = other DNA
gtaccaggttcatcacagga

SEQ ID NO: 170114 - DNA, 20 bp, synthetic construct
  source 1..20: mol_type = other DNA
cgtaccaggttcatcacagg

SEQ ID NO: 170115 - DNA, 20 bp, synthetic construct
  source 1..20: mol_type = other DNA
gcgtaccaggttcatcacag

SEQ ID NO: 170116 - DNA, 20 bp, synthetic construct
  source 1..20: mol_type = other DNA
tgcgtaccaggttcatcaca

SEQ ID NO: 170117 - DNA, 20 bp, synthetic construct
  source 1..20: mol_type = other DNA
gtgcgtaccaggttcatcac

SEQ ID NO: 170118 - DNA, 20 bp, synthetic construct
  source 1..20: mol_type = other DNA
cgtgcgtaccaggttcatca

SEQ ID NO: 170119 - DNA, 20 bp, synthetic construct
  source 1..20: mol_type = other DNA
ccgtgcgtaccaggttcatc

SEQ ID NO: 170120 - DNA, 20 bp, synthetic construct
  source 1..20: mol_type = other DNA
accgtgcgtaccaggttcat

SEQ ID NO: 170121 - DNA, 20 bp, synthetic construct
  source 1..20: mol_type = other DNA
aaccgtgcgtaccaggttca

SEQ ID NO: 170122 - DNA, 20 bp, synthetic construct
  source 1..20: mol_type = other DNA
aaaccgtgcgtaccaggttc

SEQ ID NO: 170123 - DNA, 20 bp, synthetic construct
  source 1..20: mol_type = other DNA
aaaaccgtgcgtaccaggtt

SEQ ID NO: 170124 - DNA, 20 bp, synthetic construct
  source 1..20: mol_type = other DNA
gaaaaccgtgcgtaccaggt

SEQ ID NO: 170125 - DNA, 20 bp, synthetic construct
  source 1..20: mol_type = other DNA
agaaaaccgtgcgtaccagg

SEQ ID NO: 170126 - DNA, 20 bp, synthetic construct
  source 1..20: mol_type = other DNA
cagaaaaccgtgcgtaccag

SEQ ID NO: 170127 - DNA, 20 bp, synthetic construct
  source 1..20: mol_type = other DNA
ccagaaaaccgtgcgtacca

SEQ ID NO: 170128 - DNA, 20 bp, synthetic construct
  source 1..20: mol_type = other DNA
accagaaaaccgtgcgtacc

SEQ ID NO: 170129 - DNA, 20 bp, synthetic construct
  source 1..20: mol_type = other DNA
aaccagaaaaccgtgcgtac

SEQ ID NO: 170130 - DNA, 20 bp, synthetic construct
  source 1..20: mol_type = other DNA
taaccagaaaaccgtgcgta

SEQ ID NO: 170131 - DNA, 20 bp, synthetic construct
  source 1..20: mol_type = other DNA
ttaaccagaaaaccgtgcgt

SEQ ID NO: 170132 - DNA, 20 bp, synthetic construct
  source 1..20: mol_type = other DNA
attaaccagaaaaccgtgcg

SEQ ID NO: 170133 - DNA, 20 bp, synthetic construct
  source 1..20: mol_type = other DNA
aattaaccagaaaaccgtgc

SEQ ID NO: 170134 - DNA, 20 bp, synthetic construct
  source 1..20: mol_type = other DNA
gaattaaccagaaaaccgtg

SEQ ID NO: 170135 - DNA, 20 bp, synthetic construct
  source 1..20: mol_type = other DNA
agaattaaccagaaaaccgt

SEQ ID NO: 170136 - DNA, 20 bp, synthetic construct
  source 1..20: mol_type = other DNA
tagaattaaccagaaaaccg

SEQ ID NO: 170137 - DNA, 20 bp, synthetic construct
  source 1..20: mol_type = other DNA
atagaattaaccagaaaacc

SEQ ID NO: 170138 - DNA, 20 bp, synthetic construct
  source 1..20: mol_type = other DNA
gatagaattaaccagaaaac

SEQ ID NO: 170139 - DNA, 20 bp, synthetic construct
  source 1..20: mol_type = other DNA
cgatagaattaaccagaaaa

SEQ ID NO: 170140 - DNA, 20 bp, synthetic construct
  source 1..20: mol_type = other DNA
gcgatagaattaaccagaaa

SEQ ID NO: 170141 - DNA, 20 bp, synthetic construct
  source 1..20: mol_type = other DNA
agcgatagaattaaccagaa

SEQ ID NO: 170142 - DNA, 20 bp, synthetic construct
  source 1..20: mol_type = other DNA
cagcgatagaattaaccaga

SEQ ID NO: 170143 - DNA, 20 bp, synthetic construct
  source 1..20: mol_type = other DNA
tcagcgatagaattaaccag

SEQ ID NO: 170144 - DNA, 20 bp, synthetic construct
  source 1..20: mol_type = other DNA
ttcagcgatagaattaacca

SEQ ID NO: 170145 - DNA, 20 bp, synthetic construct
  source 1..20: mol_type = other DNA
tttcagcgatagaattaacc

SEQ ID NO: 170146 - DNA, 20 bp, synthetic construct
  source 1..20: mol_type = other DNA
ttttcagcgatagaattaac

SEQ ID NO: 170147 - DNA, 20 bp, synthetic construct
  source 1..20: mol_type = other DNA
gttttcagcgatagaattaa

SEQ ID NO: 170148 - DNA, 20 bp, synthetic construct
  source 1..20: mol_type = other DNA
agttttcagcgatagaatta

SEQ ID NO: 170149 - DNA, 20 bp, synthetic construct
  source 1..20: mol_type = other DNA
cagttttcagcgatagaatt

SEQ ID NO: 170150 - DNA, 20 bp, synthetic construct
  source 1..20: mol_type = other DNA
ccagttttcagcgatagaat

SEQ ID NO: 170151 - DNA, 20 bp, synthetic construct
  source 1..20: mol_type = other DNA
accagttttcagcgatagaa

SEQ ID NO: 170152 - DNA, 20 bp, synthetic construct
  source 1..20: mol_type = other DNA
caccagttttcagcgataga

SEQ ID NO: 170153 - DNA, 20 bp, synthetic construct
  source 1..20: mol_type = other DNA
gcaccagttttcagcgatag

SEQ ID NO: 170154 - DNA, 20 bp, synthetic construct
  source 1..20: mol_type = other DNA
cgcaccagttttcagcgata

SEQ ID NO: 170155 - DNA, 20 bp, synthetic construct
  source 1..20: mol_type = other DNA
ccgcaccagttttcagcgat

SEQ ID NO: 170156 - DNA, 20 bp, synthetic construct
  source 1..20: mol_type = other DNA
cccgcaccagttttcagcga

SEQ ID NO: 170157 - DNA, 20 bp, synthetic construct
  source 1..20: mol_type = other DNA
ccccgcaccagttttcagcg

SEQ ID NO: 170158 - DNA, 20 bp, synthetic construct
  source 1..20: mol_type = other DNA
cccccgcaccagttttcagc

SEQ ID NO: 170159 - DNA, 20 bp, synthetic construct
  source 1..20: mol_type = other DNA
ccccccgcaccagttttcag

SEQ ID NO: 170160 - DNA, 20 bp, synthetic construct
  source 1..20: mol_type = other DNA
gccccccgcaccagttttca

SEQ ID NO: 170161 - DNA, 20 bp, synthetic construct
  source 1..20: mol_type = other DNA
cgccccccgcaccagttttc

SEQ ID NO: 170162 - DNA, 20 bp, synthetic construct
  source 1..20: mol_type = other DNA
gcgccccccgcaccagtttt

SEQ ID NO: 170163 - DNA, 20 bp, synthetic construct
  source 1..20: mol_type = other DNA
tgcgccccccgcaccagttt

SEQ ID NO: 170164 - DNA, 20 bp, synthetic construct
  source 1..20: mol_type = other DNA
gtgcgccccccgcaccagtt

SEQ ID NO: 170165 - DNA, 20 bp, synthetic construct
  source 1..20: mol_type = other DNA
agtgcgccccccgcaccagt

SEQ ID NO: 170166 - DNA, 20 bp, synthetic construct
  source 1..20: mol_type = other DNA
aagtgcgccccccgcaccag

SEQ ID NO: 170167 - DNA, 20 bp, synthetic construct
  source 1..20: mol_type = other DNA
gaagtgcgccccccgcacca

SEQ ID NO: 170168 - DNA, 20 bp, synthetic construct
  source 1..20: mol_type = other DNA
agaagtgcgccccccgcacc

SEQ ID NO: 170169 - DNA, 20 bp, synthetic construct
  source 1..20: mol_type = other DNA
cagaagtgcgccccccgcac

SEQ ID NO: 170170 - DNA, 20 bp, synthetic construct
  source 1..20: mol_type = other DNA
tcagaagtgcgccccccgca

SEQ ID NO: 170171 - DNA, 20 bp, synthetic construct
  source 1..20: mol_type = other DNA
ctcagaagtgcgccccccgc

SEQ ID NO: 170172 - DNA, 20 bp, synthetic construct
  source 1..20: mol_type = other DNA
tctcagaagtgcgccccccg

SEQ ID NO: 170173 - DNA, 20 bp, synthetic construct
  source 1..20: mol_type = other DNA
gtctcagaagtgcgcccccc

SEQ ID NO: 170174 - DNA, 20 bp, synthetic construct
  source 1..20: mol_type = other DNA
cgtctcagaagtgcgccccc

SEQ ID NO: 170175 - DNA, 20 bp, synthetic construct
  source 1..20: mol_type = other DNA
ccgtctcagaagtgcgcccc

SEQ ID NO: 170176 - DNA, 20 bp, synthetic construct
  source 1..20: mol_type = other DNA
tccgtctcagaagtgcgccc

SEQ ID NO: 170177 - DNA, 20 bp, synthetic construct
  source 1..20: mol_type = other DNA
ttccgtctcagaagtgcgcc

SEQ ID NO: 170178 - DNA, 20 bp, synthetic construct
  source 1..20: mol_type = other DNA
cttccgtctcagaagtgcgc

SEQ ID NO: 170179 - DNA, 20 bp, synthetic construct
  source 1..20: mol_type = other DNA
tcttccgtctcagaagtgcg

SEQ ID NO: 170180 - DNA, 20 bp, synthetic construct
  source 1..20: mol_type = other DNA
ctcttccgtctcagaagtgc

SEQ ID NO: 170181 - DNA, 20 bp, synthetic construct
  source 1..20: mol_type = other DNA
gctcttccgtctcagaagtg

SEQ ID NO: 170182 - DNA, 20 bp, synthetic construct
  source 1..20: mol_type = other DNA
tgctcttccgtctcagaagt

SEQ ID NO: 170183 - DNA, 20 bp, synthetic construct
  source 1..20: mol_type = other DNA
atgctcttccgtctcagaag

SEQ ID NO: 170184 - DNA, 20 bp, synthetic construct
  source 1..20: mol_type = other DNA
gatgctcttccgtctcagaa

SEQ ID NO: 170185 - DNA, 20 bp, synthetic construct
  source 1..20: mol_type = other DNA
agatgctcttccgtctcaga

SEQ ID NO: 170186 - DNA, 20 bp, synthetic construct
  source 1..20: mol_type = other DNA
tagatgctcttccgtctcag

SEQ ID NO: 170187 - DNA, 20 bp, synthetic construct
  source 1..20: mol_type = other DNA
ctagatgctcttccgtctca

SEQ ID NO: 170188 - DNA, 20 bp, synthetic construct
  source 1..20: mol_type = other DNA
cctagatgctcttccgtctc

SEQ ID NO: 170189 - DNA, 20 bp, synthetic construct
  source 1..20: mol_type = other DNA
tcctagatgctcttccgtct

SEQ ID NO: 170190 - DNA, 20 bp, synthetic construct
  source 1..20: mol_type = other DNA
ctcctagatgctcttccgtc

SEQ ID NO: 170191 - DNA, 20 bp, synthetic construct
  source 1..20: mol_type = other DNA
gctcctagatgctcttccgt

SEQ ID NO: 170192 - DNA, 20 bp, synthetic construct
  source 1..20: mol_type = other DNA
agctcctagatgctcttccg

SEQ ID NO: 170193 - DNA, 20 bp, synthetic construct
  source 1..20: mol_type = other DNA
cagctcctagatgctcttcc

SEQ ID NO: 170194 - DNA, 20 bp, synthetic construct
  source 1..20: mol_type = other DNA
tcagctcctagatgctcttc

SEQ ID NO: 170195 - DNA, 20 bp, synthetic construct
  source 1..20: mol_type = other DNA
ttcagctcctagatgctctt

SEQ ID NO: 170196 - DNA, 20 bp, synthetic construct
  source 1..20: mol_type = other DNA
attcagctcctagatgctct

SEQ ID NO: 170197 - DNA, 20 bp, synthetic construct
  source 1..20: mol_type = other DNA
gattcagctcctagatgctc

SEQ ID NO: 170198 - DNA, 20 bp, synthetic construct
  source 1..20: mol_type = other DNA
ggattcagctcctagatgct

SEQ ID NO: 170199 - DNA, 20 bp, synthetic construct
  source 1..20: mol_type = other DNA
aggattcagctcctagatgc

SEQ ID NO: 170200 - DNA, 20 bp, synthetic construct
  source 1..20: mol_type = other DNA
gaggattcagctcctagatg

SEQ ID NO: 170201 - DNA, 20 bp, synthetic construct
  source 1..20: mol_type = other DNA
ggaggattcagctcctagat

SEQ ID NO: 170202 - DNA, 20 bp, synthetic construct
  source 1..20: mol_type = other DNA
tggaggattcagctcctaga

SEQ ID NO: 170203 - DNA, 20 bp, synthetic construct
  source 1..20: mol_type = other DNA
gtggaggattcagctcctag

SEQ ID NO: 170204 - DNA, 20 bp, synthetic construct
  source 1..20: mol_type = other DNA
cgtggaggattcagctccta

SEQ ID NO: 170205 - DNA, 20 bp, synthetic construct
  source 1..20: mol_type = other DNA
gcgtggaggattcagctcct

SEQ ID NO: 170206 - DNA, 20 bp, synthetic construct
  source 1..20: mol_type = other DNA
cgcgtggaggattcagctcc

SEQ ID NO: 170207 - DNA, 20 bp, synthetic construct
  source 1..20: mol_type = other DNA
ccgcgtggaggattcagctc

SEQ ID NO: 170208 - DNA, 20 bp, synthetic construct
  source 1..20: mol_type = other DNA
cccgcgtggaggattcagct

SEQ ID NO: 170209 - DNA, 20 bp, synthetic construct
  source 1..20: mol_type = other DNA
acccgcgtggaggattcagc

SEQ ID NO: 170210 - DNA, 20 bp, synthetic construct
  source 1..20: mol_type = other DNA
gacccgcgtggaggattcag

SEQ ID NO: 170211 - DNA, 20 bp, synthetic construct
  source 1..20: mol_type = other DNA
cgacccgcgtggaggattca

SEQ ID NO: 170212 - DNA, 20 bp, synthetic construct
  source 1..20: mol_type = other DNA
gcgacccgcgtggaggattc

SEQ ID NO: 170213 - DNA, 20 bp, synthetic construct
  source 1..20: mol_type = other DNA
ggcgacccgcgtggaggatt

SEQ ID NO: 170214 - DNA, 20 bp, synthetic construct
  source 1..20: mol_type = other DNA
gggcgacccgcgtggaggat

SEQ ID NO: 170215 - DNA, 20 bp, synthetic construct
  source 1..20: mol_type = other DNA
tgggcgacccgcgtggagga

SEQ ID NO: 170216 - DNA, 20 bp, synthetic construct
  source 1..20: mol_type = other DNA
ctgggcgacccgcgtggagg

SEQ ID NO: 170217 - DNA, 20 bp, synthetic construct
  source 1..20: mol_type = other DNA
cctgggcgacccgcgtggag

SEQ ID NO: 170218 - DNA, 20 bp, synthetic construct
  source 1..20: mol_type = other DNA
acctgggcgacccgcgtgga

SEQ ID NO: 170219 - DNA, 20 bp, synthetic construct
  source 1..20: mol_type = other DNA
aacctgggcgacccgcgtgg

SEQ ID NO: 170220 - DNA, 20 bp, synthetic construct
  source 1..20: mol_type = other DNA
caacctgggcgacccgcgtg

SEQ ID NO: 170221 - DNA, 20 bp, synthetic construct
  source 1..20: mol_type = other DNA
tcaacctgggcgacccgcgt

SEQ ID NO: 170222 - DNA, 20 bp, synthetic construct
  source 1..20: mol_type = other DNA
atcaacctgggcgacccgcg

SEQ ID NO: 170223 - DNA, 20 bp, synthetic construct
  source 1..20: mol_type = other DNA
gatcaacctgggcgacccgc

SEQ ID NO: 170224 - DNA, 20 bp, synthetic construct
  source 1..20: mol_type = other DNA
agatcaacctgggcgacccg

SEQ ID NO: 170225 - DNA, 20 bp, synthetic construct
  source 1..20: mol_type = other DNA
cagatcaacctgggcgaccc

SEQ ID NO: 170226 - DNA, 20 bp, synthetic construct
  source 1..20: mol_type = other DNA
tcagatcaacctgggcgacc

SEQ ID NO: 170227 - DNA, 20 bp, synthetic construct
  source 1..20: mol_type = other DNA
ttcagatcaacctgggcgac

SEQ ID NO: 170228 - DNA, 20 bp, synthetic construct
  source 1..20: mol_type = other DNA
attcagatcaacctgggcga

SEQ ID NO: 170229 - DNA, 20 bp, synthetic construct
  source 1..20: mol_type = other DNA
aattcagatcaacctgggcg

SEQ ID NO: 170230 - DNA, 20 bp, synthetic construct
  source 1..20: mol_type = other DNA
aaattcagatcaacctgggc

SEQ ID NO: 170231 - DNA, 20 bp, synthetic construct
  source 1..20: mol_type = other DNA
gaaattcagatcaacctggg

SEQ ID NO: 170232 - DNA, 20 bp, synthetic construct
  source 1..20: mol_type = other DNA
agaaattcagatcaacctgg

SEQ ID NO: 170233 - DNA, 20 bp, synthetic construct
  source 1..20: mol_type = other DNA
cagaaattcagatcaacctg

SEQ ID NO: 170234 - DNA, 20 bp, synthetic construct
  source 1..20: mol_type = other DNA
ccagaaattcagatcaacct

SEQ ID NO: 170235 - DNA, 20 bp, synthetic construct
  source 1..20: mol_type = other DNA
cccagaaattcagatcaacc

SEQ ID NO: 170236 - DNA, 20 bp, synthetic construct
  source 1..20: mol_type = other DNA
ccccagaaattcagatcaac

SEQ ID NO: 170237 - DNA, 20 bp, synthetic construct
  source 1..20: mol_type = other DNA
tccccagaaattcagatcaa

SEQ ID NO: 170238 - DNA, 20 bp, synthetic construct
  source 1..20: mol_type = other DNA
ttccccagaaattcagatca

SEQ ID NO: 170239 - DNA, 20 bp, synthetic construct
  source 1..20: mol_type = other DNA
attccccagaaattcagatc

SEQ ID NO: 170240 - DNA, 20 bp, synthetic construct
  source 1..20: mol_type = other DNA
cattccccagaaattcagat

SEQ ID NO: 170241 - DNA, 20 bp, synthetic construct
  source 1..20: mol_type = other DNA
ccattccccagaaattcaga

SEQ ID NO: 170242 - DNA, 20 bp, synthetic construct
  source 1..20: mol_type = other DNA
gccattccccagaaattcag

SEQ ID NO: 170243 - DNA, 20 bp, synthetic construct
  source 1..20: mol_type = other DNA
agccattccccagaaattca

SEQ ID NO: 170244 - DNA, 20 bp, synthetic construct
  source 1..20: mol_type = other DNA
aagccattccccagaaattc

SEQ ID NO: 170245 - DNA, 20 bp, synthetic construct
  source 1..20: mol_type = other DNA
caagccattccccagaaatt

SEQ ID NO: 170246 - DNA, 20 bp, synthetic construct
  source 1..20: mol_type = other DNA
ccaagccattccccagaaat

SEQ ID NO: 170247 - DNA, 20 bp, synthetic construct
  source 1..20: mol_type = other DNA
gccaagccattccccagaaa

SEQ ID NO: 170248 - DNA, 20 bp, synthetic construct
  source 1..20: mol_type = other DNA
agccaagccattccccagaa

SEQ ID NO: 170249 - DNA, 20 bp, synthetic construct
  source 1..20: mol_type = other DNA
cagccaagccattccccaga

SEQ ID NO: 170250 - DNA, 20 bp, synthetic construct
  source 1..20: mol_type = other DNA
gcagccaagccattccccag

SEQ ID NO: 170251 - DNA, 20 bp, synthetic construct
  source 1..20: mol_type = other DNA
ggcagccaagccattcccca

SEQ ID NO: 170252 - DNA, 20 bp, synthetic construct
  source 1..20: mol_type = other DNA
gggcagccaagccattcccc

SEQ ID NO: 170253 - DNA, 20 bp, synthetic construct
  source 1..20: mol_type = other DNA
cgggcagccaagccattccc

SEQ ID NO: 170254 - DNA, 20 bp, synthetic construct
  source 1..20: mol_type = other DNA
gcgggcagccaagccattcc

SEQ ID NO: 170255 - DNA, 20 bp, synthetic construct
  source 1..20: mol_type = other DNA
ggcgggcagccaagccattc

SEQ ID NO: 170256 - DNA, 20 bp, synthetic construct
  source 1..20: mol_type = other DNA
gggcgggcagccaagccatt

SEQ ID NO: 170257 - DNA, 20 bp, synthetic construct
  source 1..20: mol_type = other DNA
cgggcgggcagccaagccat

SEQ ID NO: 170258 - DNA, 20 bp, synthetic construct
  source 1..20: mol_type = other DNA
ccgggcgggcagccaagcca

SEQ ID NO: 170259 - DNA, 20 bp, synthetic construct
  source 1..20: mol_type = other DNA
cccgggcgggcagccaagcc

SEQ ID NO: 170260 - DNA, 20 bp, synthetic construct
  source 1..20: mol_type = other DNA
tcccgggcgggcagccaagc

SEQ ID NO: 170261 - DNA, 20 bp, synthetic construct
  source 1..20: mol_type = other DNA
gtcccgggcgggcagccaag

SEQ ID NO: 170262 - DNA, 20 bp, synthetic construct
  source 1..20: mol_type = other DNA
ggtcccgggcgggcagccaa

SEQ ID NO: 170263 - DNA, 20 bp, synthetic construct
  source 1..20: mol_type = other DNA
tggtcccgggcgggcagcca

SEQ ID NO: 170264 - DNA, 20 bp, synthetic construct
  source 1..20: mol_type = other DNA
ctggtcccgggcgggcagcc

SEQ ID NO: 170265 - DNA, 20 bp, synthetic construct
  source 1..20: mol_type = other DNA
cctggtcccgggcgggcagc

SEQ ID NO: 170266 - DNA, 20 bp, synthetic construct
  source 1..20: mol_type = other DNA
gcctggtcccgggcgggcag

SEQ ID NO: 170267 - DNA, 20 bp, synthetic construct
  source 1..20: mol_type = other DNA
ggcctggtcccgggcgggca

SEQ ID NO: 170268 - DNA, 20 bp, synthetic construct
  source 1..20: mol_type = other DNA
cggcctggtcccgggcgggc

SEQ ID NO: 170269 - DNA, 20 bp, synthetic construct
  source 1..20: mol_type = other DNA
tcggcctggtcccgggcggg

SEQ ID NO: 170270 - DNA, 20 bp, synthetic construct
  source 1..20: mol_type = other DNA
gtcggcctggtcccgggcgg

SEQ ID NO: 170271 - DNA, 20 bp, synthetic construct
  source 1..20: mol_type = other DNA
ggtcggcctggtcccgggcg

SEQ ID NO: 170272 - DNA, 20 bp, synthetic construct
  source 1..20: mol_type = other DNA
gggtcggcctggtcccgggc

SEQ ID NO: 170273 - DNA, 20 bp, synthetic construct
  source 1..20: mol_type = other DNA
agggtcggcctggtcccggg

SEQ ID NO: 170274 - DNA, 20 bp, synthetic construct
  source 1..20: mol_type = other DNA
gagggtcggcctggtcccgg

SEQ ID NO: 170275 - DNA, 20 bp, synthetic construct
  source 1..20: mol_type = other DNA
ggagggtcggcctggtcccg

SEQ ID NO: 170276 - DNA, 20 bp, synthetic construct
  source 1..20: mol_type = other DNA
aggagggtcggcctggtccc

SEQ ID NO: 170277 - DNA, 20 bp, synthetic construct
  source 1..20: mol_type = other DNA
aaggagggtcggcctggtcc

SEQ ID NO: 170278 - DNA, 20 bp, synthetic construct
  source 1..20: mol_type = other DNA
caaggagggtcggcctggtc

SEQ ID NO: 170279 - DNA, 20 bp, synthetic construct
  source 1..20: mol_type = other DNA
tcaaggagggtcggcctggt

SEQ ID NO: 170280 - DNA, 20 bp, synthetic construct
  source 1..20: mol_type = other DNA
gtcaaggagggtcggcctgg

SEQ ID NO: 170281 - DNA, 20 bp, synthetic construct
  source 1..20: mol_type = other DNA
cgtcaaggagggtcggcctg

SEQ ID NO: 170282 - DNA, 20 bp, synthetic construct
  source 1..20: mol_type = other DNA
ccgtcaaggagggtcggcct

SEQ ID NO: 170283 - DNA, 20 bp, synthetic construct
  source 1..20: mol_type = other DNA
accgtcaaggagggtcggcc

SEQ ID NO: 170284 - DNA, 20 bp, synthetic construct
  source 1..20: mol_type = other DNA
caccgtcaaggagggtcggc

SEQ ID NO: 170285 - DNA, 20 bp, synthetic construct
  source 1..20: mol_type = other DNA
ccaccgtcaaggagggtcgg

SEQ ID NO: 170286 - DNA, 20 bp, synthetic construct
  source 1..20: mol_type = other DNA
gccaccgtcaaggagggtcg

SEQ ID NO: 170287 - DNA, 20 bp, synthetic construct
  source 1..20: mol_type = other DNA
cgccaccgtcaaggagggtc

SEQ ID NO: 170288 - DNA, 20 bp, synthetic construct
  source 1..20: mol_type = other DNA
acgccaccgtcaaggagggt

SEQ ID NO: 170289 - DNA, 20 bp, synthetic construct
  source 1..20: mol_type = other DNA
tacgccaccgtcaaggaggg

SEQ ID NO: 170290 - DNA, 20 bp, synthetic construct
  source 1..20: mol_type = other DNA
ctacgccaccgtcaaggagg

SEQ ID NO: 170291 - DNA, 20 bp, synthetic construct
  source 1..20: mol_type = other DNA
tctacgccaccgtcaaggag

SEQ ID NO: 170292 - DNA, 20 bp, synthetic construct
  source 1..20: mol_type = other DNA
ctctacgccaccgtcaagga

SEQ ID NO: 170293 - DNA, 20 bp, synthetic construct
  source 1..20: mol_type = other DNA
cctctacgccaccgtcaagg

SEQ ID NO: 170294 - DNA, 20 bp, synthetic construct
  source 1..20: mol_type = other DNA
ccctctacgccaccgtcaag

SEQ ID NO: 170295 - DNA, 20 bp, synthetic construct
  source 1..20: mol_type = other DNA
gccctctacgccaccgtcaa

SEQ ID NO: 170296 - DNA, 20 bp, synthetic construct
  source 1..20: mol_type = other DNA
agccctctacgccaccgtca

SEQ ID NO: 170297 - DNA, 20 bp, synthetic construct
  source 1..20: mol_type = other DNA
cagccctctacgccaccgtc

SEQ ID NO: 170298 - DNA, 20 bp, synthetic construct
  source 1..20: mol_type = other DNA
ccagccctctacgccaccgt

SEQ ID NO: 170299 - DNA, 20 bp, synthetic construct
  source 1..20: mol_type = other DNA
tccagccctctacgccaccg

SEQ ID NO: 170300 - DNA, 20 bp, synthetic construct
  source 1..20: mol_type = other DNA
ctccagccctctacgccacc

SEQ ID NO: 170301 - DNA, 20 bp, synthetic construct
  source 1..20: mol_type = other DNA
gctccagccctctacgccac

SEQ ID NO: 170302 - DNA, 20 bp, synthetic construct
  source 1..20: mol_type = other DNA
ggctccagccctctacgcca

SEQ ID NO: 170303 - DNA, 20 bp, synthetic construct
  source 1..20: mol_type = other DNA
aggctccagccctctacgcc

SEQ ID NO: 170304 - DNA, 20 bp, synthetic construct
  source 1..20: mol_type = other DNA
caggctccagccctctacgc

SEQ ID NO: 170305 - DNA, 20 bp, synthetic construct
  source 1..20: mol_type = other DNA
ccaggctccagccctctacg

SEQ ID NO: 170306 - DNA, 20 bp, synthetic construct
  source 1..20: mol_type = other DNA
cccaggctccagccctctac

SEQ ID NO: 170307 - DNA, 20 bp, synthetic construct
  source 1..20: mol_type = other DNA
acccaggctccagccctcta

SEQ ID NO: 170308 - DNA, 20 bp, synthetic construct
  source 1..20: mol_type = other DNA
tacccaggctccagccctct

SEQ ID NO: 170309 - DNA, 20 bp, synthetic construct
  source 1..20: mol_type = other DNA
gtacccaggctccagccctc

SEQ ID NO: 170310 - DNA, 20 bp, synthetic construct
  source 1..20: mol_type = other DNA
agtacccaggctccagccct

SEQ ID NO: 170311 - DNA, 20 bp, synthetic construct
  source 1..20: mol_type = other DNA
cagtacccaggctccagccc

SEQ ID NO: 170312 - DNA, 20 bp, synthetic construct
  source 1..20: mol_type = other DNA
gcagtacccaggctccagcc

SEQ ID NO: 170313 - DNA, 20 bp, synthetic construct
  source 1..20: mol_type = other DNA
cgcagtacccaggctccagc

SEQ ID NO: 170314 - DNA, 20 bp, synthetic construct
  source 1..20: mol_type = other DNA
tcgcagtacccaggctccag

SEQ ID NO: 170315 - DNA, 20 bp, synthetic construct
  source 1..20: mol_type = other DNA
ctcgcagtacccaggctcca

SEQ ID NO: 170316 - DNA, 20 bp, synthetic construct
  source 1..20: mol_type = other DNA
cctcgcagtacccaggctcc

SEQ ID NO: 170317 - DNA, 20 bp, synthetic construct
  source 1..20: mol_type = other DNA
gcctcgcagtacccaggctc

SEQ ID NO: 170318 - DNA, 20 bp, synthetic construct
  source 1..20: mol_type = other DNA
agcctcgcagtacccaggct

SEQ ID NO: 170319 - DNA, 20 bp, synthetic construct
  source 1..20: mol_type = other DNA
gagcctcgcagtacccaggc

SEQ ID NO: 170320 - DNA, 20 bp, synthetic construct
  source 1..20: mol_type = other DNA
ggagcctcgcagtacccagg

SEQ ID NO: 170321 - DNA, 20 bp, synthetic construct
  source 1..20: mol_type = other DNA
aggagcctcgcagtacccag

SEQ ID NO: 170322 - DNA, 20 bp, synthetic construct
  source 1..20: mol_type = other DNA
gaggagcctcgcagtaccca

SEQ ID NO: 170323 - DNA, 20 bp, synthetic construct
  source 1..20: mol_type = other DNA
cgaggagcctcgcagtaccc

SEQ ID NO: 170324 - DNA, 20 bp, synthetic construct
  source 1..20: mol_type = other DNA
gcgaggagcctcgcagtacc

SEQ ID NO: 170325 - DNA, 20 bp, synthetic construct
  source 1..20: mol_type = other DNA
tgcgaggagcctcgcagtac

SEQ ID NO: 170326 - DNA, 20 bp, synthetic construct
  source 1..20: mol_type = other DNA
atgcgaggagcctcgcagta

SEQ ID NO: 170327 - DNA, 20 bp, synthetic construct
  source 1..20: mol_type = other DNA
catgcgaggagcctcgcagt

SEQ ID NO: 170328 - DNA, 20 bp, synthetic construct
  source 1..20: mol_type = other DNA
ccatgcgaggagcctcgcag

SEQ ID NO: 170329 - DNA, 20 bp, synthetic construct
  source 1..20: mol_type = other DNA
gccatgcgaggagcctcgca

SEQ ID NO: 170330 - DNA, 20 bp, synthetic construct
  source 1..20: mol_type = other DNA
agccatgcgaggagcctcgc

SEQ ID NO: 170331 - DNA, 20 bp, synthetic construct
  source 1..20: mol_type = other DNA
cagccatgcgaggagcctcg

SEQ ID NO: 170332 - DNA, 20 bp, synthetic construct
  source 1..20: mol_type = other DNA
ccagccatgcgaggagcctc

SEQ ID NO: 170333 - DNA, 20 bp, synthetic construct
  source 1..20: mol_type = other DNA
cccagccatgcgaggagcct

SEQ ID NO: 170334 - DNA, 20 bp, synthetic construct
  source 1..20: mol_type = other DNA
gcccagccatgcgaggagcc

SEQ ID NO: 170335 - DNA, 20 bp, synthetic construct
  source 1..20: mol_type = other DNA
ggcccagccatgcgaggagc

SEQ ID NO: 170336 - DNA, 20 bp, synthetic construct
  source 1..20: mol_type = other DNA
gggcccagccatgcgaggag

SEQ ID NO: 170337 - DNA, 20 bp, synthetic construct
  source 1..20: mol_type = other DNA
cgggcccagccatgcgagga

SEQ ID NO: 170338 - DNA, 20 bp, synthetic construct
  source 1..20: mol_type = other DNA
gcgggcccagccatgcgagg

SEQ ID NO: 170339 - DNA, 20 bp, synthetic construct
  source 1..20: mol_type = other DNA
ggcgggcccagccatgcgag

SEQ ID NO: 170340 - DNA, 20 bp, synthetic construct
  source 1..20: mol_type = other DNA
cggcgggcccagccatgcga

SEQ ID NO: 170341 - DNA, 20 bp, synthetic construct
  source 1..20: mol_type = other DNA
gcggcgggcccagccatgcg

SEQ ID NO: 170342 - DNA, 20 bp, synthetic construct
  source 1..20: mol_type = other DNA
cgcggcgggcccagccatgc

SEQ ID NO: 170343 - DNA, 20 bp, synthetic construct
  source 1..20: mol_type = other DNA
tcgcggcgggcccagccatg

SEQ ID NO: 170344 - DNA, 20 bp, synthetic construct
  source 1..20: mol_type = other DNA
ctcgcggcgggcccagccat

SEQ ID NO: 170345 - DNA, 20 bp, synthetic construct
  source 1..20: mol_type = other DNA
cctcgcggcgggcccagcca

SEQ ID NO: 170346 - DNA, 20 bp, synthetic construct
  source 1..20: mol_type = other DNA
ccctcgcggcgggcccagcc

SEQ ID NO: 170347 - DNA, 20 bp, synthetic construct
  source 1..20: mol_type = other DNA
cccctcgcggcgggcccagc

SEQ ID NO: 170348 - DNA, 20 bp, synthetic construct
  source 1..20: mol_type = other DNA
acccctcgcggcgggcccag

SEQ ID NO: 170349 - DNA, 20 bp, synthetic construct
  source 1..20: mol_type = other DNA
aacccctcgcggcgggccca

SEQ ID NO: 170350 - DNA, 20 bp, synthetic construct
  source 1..20: mol_type = other DNA
caacccctcgcggcgggccc

SEQ ID NO: 170351 - DNA, 20 bp, synthetic construct
  source 1..20: mol_type = other DNA
gcaacccctcgcggcgggcc

SEQ ID NO: 170352 - DNA, 20 bp, synthetic construct
  source 1..20: mol_type = other DNA
tgcaacccctcgcggcgggc

SEQ ID NO: 170353 - DNA, 20 bp, synthetic construct
  source 1..20: mol_type = other DNA
ctgcaacccctcgcggcggg

SEQ ID NO: 170354 - DNA, 20 bp, synthetic construct
  source 1..20: mol_type = other DNA
tctgcaacccctcgcggcgg

SEQ ID NO: 170355 - DNA, 20 bp, synthetic construct
  source 1..20: mol_type = other DNA
ctctgcaacccctcgcggcg

SEQ ID NO: 170356 - DNA, 20 bp, synthetic construct
  source 1..20: mol_type = other DNA
gctctgcaacccctcgcggc

SEQ ID NO: 170357 - DNA, 20 bp, synthetic construct
  source 1..20: mol_type = other DNA
cgctctgcaacccctcgcgg

SEQ ID NO: 170358 - DNA, 20 bp, synthetic construct
  source 1..20: mol_type = other DNA
ccgctctgcaacccctcgcg

SEQ ID NO: 170359 - DNA, 20 bp, synthetic construct
  source 1..20: mol_type = other DNA
gccgctctgcaacccctcgc

SEQ ID NO: 170360 - DNA, 20 bp, synthetic construct
  source 1..20: mol_type = other DNA
agccgctctgcaacccctcg

SEQ ID NO: 170361 - DNA, 20 bp, synthetic construct
  source 1..20: mol_type = other DNA
gagccgctctgcaacccctc

SEQ ID NO: 170362 - DNA, 20 bp, synthetic construct
  source 1..20: mol_type = other DNA
tgagccgctctgcaacccct

SEQ ID NO: 170363 - DNA, 20 bp, synthetic construct
  source 1..20: mol_type = other DNA
ctgagccgctctgcaacccc

SEQ ID NO: 170364 - DNA, 20 bp, synthetic construct
  source 1..20: mol_type = other DNA
cctgagccgctctgcaaccc

SEQ ID NO: 170365 - DNA, 20 bp, synthetic construct
  source 1..20: mol_type = other DNA
ccctgagccgctctgcaacc

SEQ ID NO: 170366 - DNA, 20 bp, synthetic construct
  source 1..20: mol_type = other DNA
tccctgagccgctctgcaac

SEQ ID NO: 170367 - DNA, 20 bp, synthetic construct
  source 1..20: mol_type = other DNA
atccctgagccgctctgcaa

SEQ ID NO: 170368 - DNA, 20 bp, synthetic construct
  source 1..20: mol_type = other DNA
gatccctgagccgctctgca

SEQ ID NO: 170369 - DNA, 20 bp, synthetic construct
  source 1..20: mol_type = other DNA
cgatccctgagccgctctgc

SEQ ID NO: 170370 - DNA, 20 bp, synthetic construct
  source 1..20: mol_type = other DNA
tcgatccctgagccgctctg

SEQ ID NO: 170371 - DNA, 20 bp, synthetic construct
  source 1..20: mol_type = other DNA
atcgatccctgagccgctct

SEQ ID NO: 170372 - DNA, 20 bp, synthetic construct
  source 1..20: mol_type = other DNA
aatcgatccctgagccgctc

SEQ ID NO: 170373 - DNA, 20 bp, synthetic construct
  source 1..20: mol_type = other DNA
gaatcgatccctgagccgct

SEQ ID NO: 170374 - DNA, 20 bp, synthetic construct
  source 1..20: mol_type = other DNA
tgaatcgatccctgagccgc

SEQ ID NO: 170375 - DNA, 20 bp, synthetic construct
  source 1..20: mol_type = other DNA
ttgaatcgatccctgagccg

SEQ ID NO: 170376 - DNA, 20 bp, synthetic construct
  source 1..20: mol_type = other DNA
cttgaatcgatccctgagcc

SEQ ID NO: 170377 - DNA, 20 bp, synthetic construct
  source 1..20: mol_type = other DNA
gcttgaatcgatccctgagc

SEQ ID NO: 170378 - DNA, 20 bp, synthetic construct
  source 1..20: mol_type = other DNA
tgcttgaatcgatccctgag

SEQ ID NO: 170379 - DNA, 20 bp, synthetic construct
  source 1..20: mol_type = other DNA
atgcttgaatcgatccctga

SEQ ID NO: 170380 - DNA, 20 bp, synthetic construct
  source 1..20: mol_type = other DNA
gatgcttgaatcgatccctg

SEQ ID NO: 170381 - DNA, 20 bp, synthetic construct
  source 1..20: mol_type = other DNA
cgatgcttgaatcgatccct

SEQ ID NO: 170382 - DNA, 20 bp, synthetic construct
  source 1..20: mol_type = other DNA
acgatgcttgaatcgatccc

SEQ ID NO: 170383 - DNA, 20 bp, synthetic construct
  source 1..20: mol_type = other DNA
gacgatgcttgaatcgatcc

SEQ ID NO: 170384 - DNA, 20 bp, synthetic construct
  source 1..20: mol_type = other DNA
agacgatgcttgaatcgatc

SEQ ID NO: 170385 - DNA, 20 bp, synthetic construct
  source 1..20: mol_type = other DNA
gagacgatgcttgaatcgat

SEQ ID NO: 170386 - DNA, 20 bp, synthetic construct
  source 1..20: mol_type = other DNA
agagacgatgcttgaatcga

SEQ ID NO: 170387 - DNA, 20 bp, synthetic construct
  source 1..20: mol_type = other DNA
gagagacgatgcttgaatcg

SEQ ID NO: 170388 - DNA, 20 bp, synthetic construct
  source 1..20: mol_type = other DNA
ggagagacgatgcttgaatc

SEQ ID NO: 170389 - DNA, 20 bp, synthetic construct
  source 1..20: mol_type = other DNA
aggagagacgatgcttgaat

SEQ ID NO: 170390 - DNA, 20 bp, synthetic construct
  source 1..20: mol_type = other DNA
gaggagagacgatgcttgaa

SEQ ID NO: 170391 - DNA, 20 bp, synthetic construct
  source 1..20: mol_type = other DNA
ggaggagagacgatgcttga

SEQ ID NO: 170392 - DNA, 20 bp, synthetic construct
  source 1..20: mol_type = other DNA
gggaggagagacgatgcttg

SEQ ID NO: 170393 - DNA, 20 bp, synthetic construct
  source 1..20: mol_type = other DNA
agggaggagagacgatgctt

SEQ ID NO: 170394 - DNA, 20 bp, synthetic construct
  source 1..20: mol_type = other DNA
gagggaggagagacgatgct

SEQ ID NO: 170395 - DNA, 20 bp, synthetic construct
  source 1..20: mol_type = other DNA
cgagggaggagagacgatgc

SEQ ID NO: 170396 - DNA, 20 bp, synthetic construct
  source 1..20: mol_type = other DNA
gcgagggaggagagacgatg

SEQ ID NO: 170397 - DNA, 20 bp, synthetic construct
  source 1..20: mol_type = other DNA
ggcgagggaggagagacgat

SEQ ID NO: 170398 - DNA, 20 bp, synthetic construct
  source 1..20: mol_type = other DNA
gggcgagggaggagagacga

SEQ ID NO: 170399 - DNA, 20 bp, synthetic construct
  source 1..20: mol_type = other DNA
ggggcgagggaggagagacg

SEQ ID NO: 170400 - DNA, 20 bp, synthetic construct
  source 1..20: mol_type = other DNA
gggggcgagggaggagagac

SEQ ID NO: 170401 - DNA, 20 bp, synthetic construct
  source 1..20: mol_type = other DNA
tgggggcgagggaggagaga

SEQ ID NO: 170402 - DNA, 20 bp, synthetic construct
  source 1..20: mol_type = other DNA
ctgggggcgagggaggagag

SEQ ID NO: 170403 - DNA, 20 bp, synthetic construct
  source 1..20: mol_type = other DNA
tctgggggcgagggaggaga

SEQ ID NO: 170404 - DNA, 20 bp, synthetic construct
  source 1..20: mol_type = other DNA
gtctgggggcgagggaggag

SEQ ID NO: 170405 - DNA, 20 bp, synthetic construct
  source 1..20: mol_type = other DNA
tgtctgggggcgagggagga

SEQ ID NO: 170406 - DNA, 20 bp, synthetic construct
  source 1..20: mol_type = other DNA
ctgtctgggggcgagggagg

SEQ ID NO: 170407 - DNA, 20 bp, synthetic construct
  source 1..20: mol_type = other DNA
tctgtctgggggcgagggag

SEQ ID NO: 170408 - DNA, 20 bp, synthetic construct
  source 1..20: mol_type = other DNA
ctctgtctgggggcgaggga

SEQ ID NO: 170409 - DNA, 20 bp, synthetic construct
  source 1..20: mol_type = other DNA
gctctgtctgggggcgaggg

SEQ ID NO: 170410 - DNA, 20 bp, synthetic construct
  source 1..20: mol_type = other DNA
agctctgtctgggggcgagg

SEQ ID NO: 170411 - DNA, 20 bp, synthetic construct
  source 1..20: mol_type = other DNA
cagctctgtctgggggcgag

SEQ ID NO: 170412 - DNA, 20 bp, synthetic construct
  source 1..20: mol_type = other DNA
ccagctctgtctgggggcga

SEQ ID NO: 170413 - DNA, 20 bp, synthetic construct
  source 1..20: mol_type = other DNA
cccagctctgtctgggggcg

SEQ ID NO: 170414 - DNA, 20 bp, synthetic construct
  source 1..20: mol_type = other DNA
gcccagctctgtctgggggc

SEQ ID NO: 170415 - DNA, 20 bp, synthetic construct
  source 1..20: mol_type = other DNA
cgcccagctctgtctggggg

SEQ ID NO: 170416 - DNA, 20 bp, synthetic construct
  source 1..20: mol_type = other DNA
gcgcccagctctgtctgggg

SEQ ID NO: 170417 - DNA, 20 bp, synthetic construct
  source 1..20: mol_type = other DNA
cgcgcccagctctgtctggg

SEQ ID NO: 170418 - DNA, 20 bp, synthetic construct
  source 1..20: mol_type = other DNA
ccgcgcccagctctgtctgg

SEQ ID NO: 170419 - DNA, 20 bp, synthetic construct
  source 1..20: mol_type = other DNA
cccgcgcccagctctgtctg

SEQ ID NO: 170420 - DNA, 20 bp, synthetic construct
  source 1..20: mol_type = other DNA
ccccgcgcccagctctgtct

SEQ ID NO: 170421 - DNA, 20 bp, synthetic construct
  source 1..20: mol_type = other DNA
accccgcgcccagctctgtc

SEQ ID NO: 170422 - DNA, 20 bp, synthetic construct
  source 1..20: mol_type = other DNA
aaccccgcgcccagctctgt

SEQ ID NO: 170423 - DNA, 20 bp, synthetic construct
  source 1..20: mol_type = other DNA
gaaccccgcgcccagctctg

SEQ ID NO: 170424 - DNA, 20 bp, synthetic construct
  source 1..20: mol_type = other DNA
ggaaccccgcgcccagctct

SEQ ID NO: 170425 - DNA, 20 bp, synthetic construct
  source 1..20: mol_type = other DNA
gggaaccccgcgcccagctc

SEQ ID NO: 170426 - DNA, 20 bp, synthetic construct
  source 1..20: mol_type = other DNA
ggggaaccccgcgcccagct

SEQ ID NO: 170427 - DNA, 20 bp, synthetic construct
  source 1..20: mol_type = other DNA
aggggaaccccgcgcccagc

SEQ ID NO: 170428 - DNA, 20 bp, synthetic construct
  source 1..20: mol_type = other DNA
aaggggaaccccgcgcccag

SEQ ID NO: 170429 - DNA, 20 bp, synthetic construct
  source 1..20: mol_type = other DNA
gaaggggaaccccgcgccca

SEQ ID NO: 170430 - DNA, 20 bp, synthetic construct
  source 1..20: mol_type = other DNA
ggaaggggaaccccgcgccc

SEQ ID NO: 170431 - DNA, 20 bp, synthetic construct
  source 1..20: mol_type = other DNA
tggaaggggaaccccgcgcc

SEQ ID NO: 170432 - DNA, 20 bp, synthetic construct
  source 1..20: mol_type = other DNA
ctggaaggggaaccccgcgc

SEQ ID NO: 170433 - DNA, 20 bp, synthetic construct
  source 1..20: mol_type = other DNA
tctggaaggggaaccccgcg

SEQ ID NO: 170434 - DNA, 20 bp, synthetic construct
  source 1..20: mol_type = other DNA
atctggaaggggaaccccgc

SEQ ID NO: 170435 - DNA, 20 bp, synthetic construct
  source 1..20: mol_type = other DNA
catctggaaggggaaccccg

SEQ ID NO: 170436 - DNA, 20 bp, synthetic construct
  source 1..20: mol_type = other DNA
ccatctggaaggggaacccc

SEQ ID NO: 170437 - DNA, 20 bp, synthetic construct
  source 1..20: mol_type = other DNA
tccatctggaaggggaaccc

SEQ ID NO: 170438 - DNA, 20 bp, synthetic construct
  source 1..20: mol_type = other DNA
ctccatctggaaggggaacc

SEQ ID NO: 170439 - DNA, 20 bp, synthetic construct
  source 1..20: mol_type = other DNA
gctccatctggaaggggaac

SEQ ID NO: 170440 - DNA, 20 bp, synthetic construct
  source 1..20: mol_type = other DNA
cgctccatctggaaggggaa

SEQ ID NO: 170441 - DNA, 20 bp, synthetic construct
  source 1..20: mol_type = other DNA
tcgctccatctggaagggga

SEQ ID NO: 170442 - DNA, 20 bp, synthetic construct
  source 1..20: mol_type = other DNA
ctcgctccatctggaagggg

SEQ ID NO: 170443 - DNA, 20 bp, synthetic construct
  source 1..20: mol_type = other DNA
cctcgctccatctggaaggg

SEQ ID NO: 170444 - DNA, 20 bp, synthetic construct
  source 1..20: mol_type = other DNA
ccctcgctccatctggaagg

SEQ ID NO: 170445 - DNA, 20 bp, synthetic construct
  source 1..20: mol_type = other DNA
accctcgctccatctggaag

SEQ ID NO: 170446 - DNA, 20 bp, synthetic construct
  source 1..20: mol_type = other DNA
gaccctcgctccatctggaa

SEQ ID NO: 170447 - DNA, 20 bp, synthetic construct
  source 1..20: mol_type = other DNA
agaccctcgctccatctgga

SEQ ID NO: 170448 - DNA, 20 bp, synthetic construct
  source 1..20: mol_type = other DNA
gagaccctcgctccatctgg

SEQ ID NO: 170449 - DNA, 20 bp, synthetic construct
  source 1..20: mol_type = other DNA
cgagaccctcgctccatctg

SEQ ID NO: 170450 - DNA, 20 bp, synthetic construct
  source 1..20: mol_type = other DNA
ccgagaccctcgctccatct

SEQ ID NO: 170451 - DNA, 20 bp, synthetic construct
  source 1..20: mol_type = other DNA
cccgagaccctcgctccatc

SEQ ID NO: 170452 - DNA, 20 bp, synthetic construct
  source 1..20: mol_type = other DNA
ccccgagaccctcgctccat

SEQ ID NO: 170453 - DNA, 20 bp, synthetic construct
  source 1..20: mol_type = other DNA
accccgagaccctcgctcca

SEQ ID NO: 170454 - DNA, 20 bp, synthetic construct
  source 1..20: mol_type = other DNA
caccccgagaccctcgctcc

SEQ ID NO: 170455 - DNA, 20 bp, synthetic construct
  source 1..20: mol_type = other DNA
ccaccccgagaccctcgctc

SEQ ID NO: 170456 - DNA, 20 bp, synthetic construct
  source 1..20: mol_type = other DNA
gccaccccgagaccctcgct

SEQ ID NO: 170457 - DNA, 20 bp, synthetic construct
  source 1..20: mol_type = other DNA
ggccaccccgagaccctcgc

SEQ ID NO: 170458 - DNA, 20 bp, synthetic construct
  source 1..20: mol_type = other DNA
gggccaccccgagaccctcg

SEQ ID NO: 170459 - DNA, 20 bp, synthetic construct
  source 1..20: mol_type = other DNA
ggggccaccccgagaccctc

SEQ ID NO: 170460 - DNA, 20 bp, synthetic construct
  source 1..20: mol_type = other DNA
cggggccaccccgagaccct

SEQ ID NO: 170461 - DNA, 20 bp, synthetic construct
  source 1..20: mol_type = other DNA
ccggggccaccccgagaccc

SEQ ID NO: 170462 - DNA, 20 bp, synthetic construct
  source 1..20: mol_type = other DNA
tccggggccaccccgagacc

SEQ ID NO: 170463 - DNA, 20 bp, synthetic construct
  source 1..20: mol_type = other DNA
ttccggggccaccccgagac

SEQ ID NO: 170464 - DNA, 20 bp, synthetic construct
  source 1..20: mol_type = other DNA
tttccggggccaccccgaga

SEQ ID NO: 170465 - DNA, 20 bp, synthetic construct
  source 1..20: mol_type = other DNA
ttttccggggccaccccgag

SEQ ID NO: 170466 - DNA, 20 bp, synthetic construct
  source 1..20: mol_type = other DNA
cttttccggggccaccccga

SEQ ID NO: 170467 - DNA, 20 bp, synthetic construct
  source 1..20: mol_type = other DNA
ccttttccggggccaccccg

SEQ ID NO: 170468 - DNA, 20 bp, synthetic construct
  source 1..20: mol_type = other DNA
cccttttccggggccacccc

SEQ ID NO: 170469 - DNA, 20 bp, synthetic construct
  source 1..20: mol_type = other DNA
ccccttttccggggccaccc

SEQ ID NO: 170470 - DNA, 20 bp, synthetic construct
  source 1..20: mol_type = other DNA
tccccttttccggggccacc

SEQ ID NO: 170471 - DNA, 20 bp, synthetic construct
  source 1..20: mol_type = other DNA
ctccccttttccggggccac

SEQ ID NO: 170472 - DNA, 20 bp, synthetic construct
  source 1..20: mol_type = other DNA
gctccccttttccggggcca

SEQ ID NO: 170473 - DNA, 20 bp, synthetic construct
  source 1..20: mol_type = other DNA
ggctccccttttccggggcc

SEQ ID NO: 170474 - DNA, 20 bp, synthetic construct
  source 1..20: mol_type = other DNA
gggctccccttttccggggc

SEQ ID NO: 170475 - DNA, 20 bp, synthetic construct
  source 1..20: mol_type = other DNA
cgggctccccttttccgggg

SEQ ID NO: 170476 - DNA, 20 bp, synthetic construct
  source 1..20: mol_type = other DNA
gcgggctccccttttccggg

SEQ ID NO: 170477 - DNA, 20 bp, synthetic construct
  source 1..20: mol_type = other DNA
cgcgggctccccttttccgg

SEQ ID NO: 170478 - DNA, 20 bp, synthetic construct
  source 1..20: mol_type = other DNA
ccgcgggctccccttttccg

SEQ ID NO: 170479 - DNA, 20 bp, synthetic construct
  source 1..20: mol_type = other DNA
gccgcgggctccccttttcc

SEQ ID NO: 170480 - DNA, 20 bp, synthetic construct
  source 1..20: mol_type = other DNA
ggccgcgggctccccttttc

SEQ ID NO: 170481 - DNA, 20 bp, synthetic construct
  source 1..20: mol_type = other DNA
tggccgcgggctcccctttt

SEQ ID NO: 170482 - DNA, 20 bp, synthetic construct
  source 1..20: mol_type = other DNA
gtggccgcgggctccccttt

SEQ ID NO: 170483 - DNA, 20 bp, synthetic construct
  source 1..20: mol_type = other DNA
cgtggccgcgggctcccctt

SEQ ID NO: 170484 - DNA, 20 bp, synthetic construct
  source 1..20: mol_type = other DNA
ccgtggccgcgggctcccct

SEQ ID NO: 170485 - DNA, 20 bp, synthetic construct
  source 1..20: mol_type = other DNA
gccgtggccgcgggctcccc

SEQ ID NO: 170486 - DNA, 20 bp, synthetic construct
  source 1..20: mol_type = other DNA
agccgtggccgcgggctccc

SEQ ID NO: 170487 - DNA, 20 bp, synthetic construct
  source 1..20: mol_type = other DNA
tagccgtggccgcgggctcc

SEQ ID NO: 170488 - DNA, 20 bp, synthetic construct
  source 1..20: mol_type = other DNA
gtagccgtggccgcgggctc

SEQ ID NO: 170489 - DNA, 20 bp, synthetic construct
  source 1..20: mol_type = other DNA
cgtagccgtggccgcgggct

SEQ ID NO: 170490 - DNA, 20 bp, synthetic construct
  source 1..20: mol_type = other DNA
acgtagccgtggccgcgggc

SEQ ID NO: 170491 - DNA, 20 bp, synthetic construct
  source 1..20: mol_type = other DNA
tacgtagccgtggccgcggg

SEQ ID NO: 170492 - DNA, 20 bp, synthetic construct
  source 1..20: mol_type = other DNA
atacgtagccgtggccgcgg

SEQ ID NO: 170493 - DNA, 20 bp, synthetic construct
  source 1..20: mol_type = other DNA
aatacgtagccgtggccgcg

SEQ ID NO: 170494 - DNA, 20 bp, synthetic construct
  source 1..20: mol_type = other DNA
caatacgtagccgtggccgc

SEQ ID NO: 170495 - DNA, 20 bp, synthetic construct
  source 1..20: mol_type = other DNA
gcaatacgtagccgtggccg

SEQ ID NO: 170496 - DNA, 20 bp, synthetic construct
  source 1..20: mol_type = other DNA
ggcaatacgtagccgtggcc

SEQ ID NO: 170497 - DNA, 20 bp, synthetic construct
  source 1..20: mol_type = other DNA
tggcaatacgtagccgtggc

SEQ ID NO: 170498 - DNA, 20 bp, synthetic construct
  source 1..20: mol_type = other DNA
atggcaatacgtagccgtgg

SEQ ID NO: 170499 - DNA, 20 bp, synthetic construct
  source 1..20: mol_type = other DNA
gatggcaatacgtagccgtg

SEQ ID NO: 170500 - DNA, 20 bp, synthetic construct
  source 1..20: mol_type = other DNA
agatggcaatacgtagccgt

SEQ ID NO: 170501 - DNA, 20 bp, synthetic construct
  source 1..20: mol_type = other DNA
gagatggcaatacgtagccg

SEQ ID NO: 170502 - DNA, 20 bp, synthetic construct
  source 1..20: mol_type = other DNA
cgagatggcaatacgtagcc

SEQ ID NO: 170503 - DNA, 20 bp, synthetic construct
  source 1..20: mol_type = other DNA
gcgagatggcaatacgtagc

SEQ ID NO: 170504 - DNA, 20 bp, synthetic construct
  source 1..20: mol_type = other DNA
cgcgagatggcaatacgtag

SEQ ID NO: 170505 - DNA, 20 bp, synthetic construct
  source 1..20: mol_type = other DNA
tcgcgagatggcaatacgta

SEQ ID NO: 170506 - DNA, 20 bp, synthetic construct
  source 1..20: mol_type = other DNA
ctcgcgagatggcaatacgt

SEQ ID NO: 170507 - DNA, 20 bp, synthetic construct
  source 1..20: mol_type = other DNA
gctcgcgagatggcaatacg

SEQ ID NO: 170508 - DNA, 20 bp, synthetic construct
  source 1..20: mol_type = other DNA
tgctcgcgagatggcaatac

SEQ ID NO: 170509 - DNA, 20 bp, synthetic construct
  source 1..20: mol_type = other DNA
ctgctcgcgagatggcaata

SEQ ID NO: 170510 - DNA, 20 bp, synthetic construct
  source 1..20: mol_type = other DNA
tctgctcgcgagatggcaat

SEQ ID NO: 170511 - DNA, 20 bp, synthetic construct
  source 1..20: mol_type = other DNA
ctctgctcgcgagatggcaa

SEQ ID NO: 170512 - DNA, 20 bp, synthetic construct
  source 1..20: mol_type = other DNA
tctctgctcgcgagatggca

SEQ ID NO: 170513 - DNA, 20 bp, synthetic construct
  source 1..20: mol_type = other DNA
atctctgctcgcgagatggc

SEQ ID NO: 170514 - DNA, 20 bp, synthetic construct
  source 1..20: mol_type = other DNA
catctctgctcgcgagatgg

SEQ ID NO: 170515 - DNA, 20 bp, synthetic construct
  source 1..20: mol_type = other DNA
acatctctgctcgcgagatg

SEQ ID NO: 170516 - DNA, 20 bp, synthetic construct
  source 1..20: mol_type = other DNA
gacatctctgctcgcgagat

SEQ ID NO: 170517 - DNA, 20 bp, synthetic construct
  source 1..20: mol_type = other DNA
tgacatctctgctcgcgaga

SEQ ID NO: 170518 - DNA, 20 bp, synthetic construct
  source 1..20: mol_type = other DNA
gtgacatctctgctcgcgag

SEQ ID NO: 170519 - DNA, 20 bp, synthetic construct
  source 1..20: mol_type = other DNA
ggtgacatctctgctcgcga

SEQ ID NO: 170520 - DNA, 20 bp, synthetic construct
  source 1..20: mol_type = other DNA
aggtgacatctctgctcgcg

SEQ ID NO: 170521 - DNA, 20 bp, synthetic construct
  source 1..20: mol_type = other DNA
gaggtgacatctctgctcgc

SEQ ID NO: 170522 - DNA, 20 bp, synthetic construct
  source 1..20: mol_type = other DNA
ggaggtgacatctctgctcg

SEQ ID NO: 170523 - DNA, 20 bp, synthetic construct
  source 1..20: mol_type = other DNA
aggaggtgacatctctgctc

SEQ ID NO: 170524 - DNA, 20 bp, synthetic construct
  source 1..20: mol_type = other DNA
caggaggtgacatctctgct

SEQ ID NO: 170525 - DNA, 20 bp, synthetic construct
  source 1..20: mol_type = other DNA
gcaggaggtgacatctctgc

SEQ ID NO: 170526 - DNA, 20 bp, synthetic construct
  source 1..20: mol_type = other DNA
ggcaggaggtgacatctctg

SEQ ID NO: 170527 - DNA, 20 bp, synthetic construct
  source 1..20: mol_type = other DNA
aggcaggaggtgacatctct

SEQ ID NO: 170528 - DNA, 20 bp, synthetic construct
  source 1..20: mol_type = other DNA
aaggcaggaggtgacatctc

SEQ ID NO: 170529 - DNA, 20 bp, synthetic construct
  source 1..20: mol_type = other DNA
aaaggcaggaggtgacatct

SEQ ID NO: 170530 - DNA, 20 bp, synthetic construct
  source 1..20: mol_type = other DNA
caaaggcaggaggtgacatc

SEQ ID NO: 170531 - DNA, 20 bp, synthetic construct
  source 1..20: mol_type = other DNA
ccaaaggcaggaggtgacat

SEQ ID NO: 170532 - DNA, 20 bp, synthetic construct
  source 1..20: mol_type = other DNA
tccaaaggcaggaggtgaca

SEQ ID NO: 170533 - DNA, 20 bp, synthetic construct
  source 1..20: mol_type = other DNA
ctccaaaggcaggaggtgac

SEQ ID NO: 170534 - DNA, 20 bp, synthetic construct
  source 1..20: mol_type = other DNA
cctccaaaggcaggaggtga

SEQ ID NO: 170535 - DNA, 20 bp, synthetic construct
  source 1..20: mol_type = other DNA
tcctccaaaggcaggaggtg

SEQ ID NO: 170536 - DNA, 20 bp, synthetic construct
  source 1..20: mol_type = other DNA
ttcctccaaaggcaggaggt

SEQ ID NO: 170537 - DNA, 20 bp, synthetic construct
  source 1..20: mol_type = other DNA
tttcctccaaaggcaggagg

SEQ ID NO: 170538 - DNA, 20 bp, synthetic construct
  source 1..20: mol_type = other DNA
ctttcctccaaaggcaggag

SEQ ID NO: 170539 - DNA, 20 bp, synthetic construct
  source 1..20: mol_type = other DNA
cctttcctccaaaggcagga

SEQ ID NO: 170540 - DNA, 20 bp, synthetic construct
  source 1..20: mol_type = other DNA
ccctttcctccaaaggcagg

SEQ ID NO: 170541 - DNA, 20 bp, synthetic construct
  source 1..20: mol_type = other DNA
tccctttcctccaaaggcag

SEQ ID NO: 170542 - DNA, 20 bp, synthetic construct
  source 1..20: mol_type = other DNA
ctccctttcctccaaaggca

SEQ ID NO: 170543 - DNA, 20 bp, synthetic construct
  source 1..20: mol_type = other DNA
gctccctttcctccaaaggc

SEQ ID NO: 170544 - DNA, 20 bp, synthetic construct
  source 1..20: mol_type = other DNA
ggctccctttcctccaaagg

SEQ ID NO: 170545 - DNA, 20 bp, synthetic construct
  source 1..20: mol_type = other DNA
gggctccctttcctccaaag

SEQ ID NO: 170546 - DNA, 20 bp, synthetic construct
  source 1..20: mol_type = other DNA
cgggctccctttcctccaaa

SEQ ID NO: 170547 - DNA, 20 bp, synthetic construct
  source 1..20: mol_type = other DNA
ccgggctccctttcctccaa

SEQ ID NO: 170548 - DNA, 20 bp, synthetic construct
  source 1..20: mol_type = other DNA
accgggctccctttcctcca

SEQ ID NO: 170549 - DNA, 20 bp, synthetic construct
  source 1..20: mol_type = other DNA
caccgggctccctttcctcc

SEQ ID NO: 170550 - DNA, 20 bp, synthetic construct
  source 1..20: mol_type = other DNA
ccaccgggctccctttcctc

SEQ ID NO: 170551 - DNA, 20 bp, synthetic construct
  source 1..20: mol_type = other DNA
cccaccgggctccctttcct

SEQ ID NO: 170552 - DNA, 20 bp, synthetic construct
  source 1..20: mol_type = other DNA
ccccaccgggctccctttcc

SEQ ID NO: 170553 - DNA, 20 bp, synthetic construct
  source 1..20: mol_type = other DNA
tccccaccgggctccctttc

SEQ ID NO: 170554 - DNA, 20 bp, synthetic construct
  source 1..20: mol_type = other DNA
atccccaccgggctcccttt

SEQ ID NO: 170555 - DNA, 20 bp, synthetic construct
  source 1..20: mol_type = other DNA
catccccaccgggctccctt

SEQ ID NO: 170556 - DNA, 20 bp, synthetic construct
  source 1..20: mol_type = other DNA
tcatccccaccgggctccct

SEQ ID NO: 170557 - DNA, 20 bp, synthetic construct
  source 1..20: mol_type = other DNA
ctcatccccaccgggctccc

SEQ ID NO: 170558 - DNA, 20 bp, synthetic construct
  source 1..20: mol_type = other DNA
gctcatccccaccgggctcc

SEQ ID NO: 170559 - DNA, 20 bp, synthetic construct
  source 1..20: mol_type = other DNA
cgctcatccccaccgggctc

SEQ ID NO: 170560 - DNA, 20 bp, synthetic construct
  source 1..20: mol_type = other DNA
gcgctcatccccaccgggct

SEQ ID NO: 170561 - DNA, 20 bp, synthetic construct
  source 1..20: mol_type = other DNA
tgcgctcatccccaccgggc

SEQ ID NO: 170562 - DNA, 20 bp, synthetic construct
  source 1..20: mol_type = other DNA
atgcgctcatccccaccggg

SEQ ID NO: 170563 - DNA, 20 bp, synthetic construct
  source 1..20: mol_type = other DNA
aatgcgctcatccccaccgg

SEQ ID NO: 170564 - DNA, 20 bp, synthetic construct
  source 1..20: mol_type = other DNA
aaatgcgctcatccccaccg

SEQ ID NO: 170565 - DNA, 20 bp, synthetic construct
  source 1..20: mol_type = other DNA
taaatgcgctcatccccacc

SEQ ID NO: 170566 - DNA, 20 bp, synthetic construct
  source 1..20: mol_type = other DNA
ctaaatgcgctcatccccac

SEQ ID NO: 170567 - DNA, 20 bp, synthetic construct
  source 1..20: mol_type = other DNA
gctaaatgcgctcatcccca

SEQ ID NO: 170568 - DNA, 20 bp, synthetic construct
  source 1..20: mol_type = other DNA
ggctaaatgcgctcatcccc

SEQ ID NO: 170569 - DNA, 20 bp, synthetic construct
  source 1..20: mol_type = other DNA
gggctaaatgcgctcatccc

SEQ ID NO: 170570 - DNA, 20 bp, synthetic construct
  source 1..20: mol_type = other DNA
tgggctaaatgcgctcatcc

SEQ ID NO: 170571 - DNA, 20 bp, synthetic construct
  source 1..20: mol_type = other DNA
ttgggctaaatgcgctcatc

SEQ ID NO: 170572 - DNA, 20 bp, synthetic construct
  source 1..20: mol_type = other DNA
attgggctaaatgcgctcat

SEQ ID NO: 170573 - DNA, 20 bp, synthetic construct
  source 1..20: mol_type = other DNA
cattgggctaaatgcgctca

SEQ ID NO: 170574 - DNA, 20 bp, synthetic construct
  source 1..20: mol_type = other DNA
gcattgggctaaatgcgctc

SEQ ID NO: 170575 - DNA, 20 bp, synthetic construct
  source 1..20: mol_type = other DNA
agcattgggctaaatgcgct

SEQ ID NO: 170576 - DNA, 20 bp, synthetic construct
  source 1..20: mol_type = other DNA
cagcattgggctaaatgcgc

SEQ ID NO: 170577 - DNA, 20 bp, synthetic construct
  source 1..20: mol_type = other DNA
ccagcattgggctaaatgcg

SEQ ID NO: 170578 - DNA, 20 bp, synthetic construct
  source 1..20: mol_type = other DNA
cccagcattgggctaaatgc

SEQ ID NO: 170579 - DNA, 20 bp, synthetic construct
  source 1..20: mol_type = other DNA
tcccagcattgggctaaatg

SEQ ID NO: 170580 - DNA, 20 bp, synthetic construct
  source 1..20: mol_type = other DNA
ttcccagcattgggctaaat

SEQ ID NO: 170581 - DNA, 20 bp, synthetic construct
  source 1..20: mol_type = other DNA
gttcccagcattgggctaaa

SEQ ID NO: 170582 - DNA, 20 bp, synthetic construct
  source 1..20: mol_type = other DNA
tgttcccagcattgggctaa

SEQ ID NO: 170583 - DNA, 20 bp, synthetic construct
  source 1..20: mol_type = other DNA
ttgttcccagcattgggcta

SEQ ID NO: 170584 - DNA, 20 bp, synthetic construct
  source 1..20: mol_type = other DNA
tttgttcccagcattgggct

SEQ ID NO: 170585 - DNA, 20 bp, synthetic construct
  source 1..20: mol_type = other DNA
ctttgttcccagcattgggc

SEQ ID NO: 170586 - DNA, 20 bp, synthetic construct
  source 1..20: mol_type = other DNA
gctttgttcccagcattggg

SEQ ID NO: 170587 - DNA, 20 bp, synthetic construct
  source 1..20: mol_type = other DNA
cgctttgttcccagcattgg

SEQ ID NO: 170588 - DNA, 20 bp, synthetic construct
  source 1..20: mol_type = other DNA
gcgctttgttcccagcattg

SEQ ID NO: 170589 - DNA, 20 bp, synthetic construct
  source 1..20: mol_type = other DNA
tgcgctttgttcccagcatt

SEQ ID NO: 170590 - DNA, 20 bp, synthetic construct
  source 1..20: mol_type = other DNA
gtgcgctttgttcccagcat

SEQ ID NO: 170591 - DNA, 20 bp, synthetic construct
  source 1..20: mol_type = other DNA
agtgcgctttgttcccagca

SEQ ID NO: 170592 - DNA, 20 bp, synthetic construct
  source 1..20: mol_type = other DNA
gagtgcgctttgttcccagc

SEQ ID NO: 170593 - DNA, 20 bp, synthetic construct
  source 1..20: mol_type = other DNA
ggagtgcgctttgttcccag

SEQ ID NO: 170594 - DNA, 20 bp, synthetic construct
  source 1..20: mol_type = other DNA
cggagtgcgctttgttccca

SEQ ID NO: 170595 - DNA, 20 bp, synthetic construct
  source 1..20: mol_type = other DNA
gcggagtgcgctttgttccc

SEQ ID NO: 170596 - DNA, 20 bp, synthetic construct
  source 1..20: mol_type = other DNA
cgcggagtgcgctttgttcc

SEQ ID NO: 170597 - DNA, 20 bp, synthetic construct
  source 1..20: mol_type = other DNA
gcgcggagtgcgctttgttc

SEQ ID NO: 170598 - DNA, 20 bp, synthetic construct
  source 1..20: mol_type = other DNA
agcgcggagtgcgctttgtt

SEQ ID NO: 170599 - DNA, 20 bp, synthetic construct
  source 1..20: mol_type = other DNA
aagcgcggagtgcgctttgt

SEQ ID NO: 170600 - DNA, 20 bp, synthetic construct
  source 1..20: mol_type = other DNA
gaagcgcggagtgcgctttg

SEQ ID NO: 170601 - DNA, 20 bp, synthetic construct
  source 1..20: mol_type = other DNA
agaagcgcggagtgcgcttt

SEQ ID NO: 170602 - DNA, 20 bp, synthetic construct
  source 1..20: mol_type = other DNA
cagaagcgcggagtgcgctt

SEQ ID NO: 170603 - DNA, 20 bp, synthetic construct
  source 1..20: mol_type = other DNA
gcagaagcgcggagtgcgct

SEQ ID NO: 170604 - DNA, 20 bp, synthetic construct
  source 1..20: mol_type = other DNA
cgcagaagcgcggagtgcgc

SEQ ID NO: 170605 - DNA, 20 bp, synthetic construct
  source 1..20: mol_type = other DNA
tcgcagaagcgcggagtgcg

SEQ ID NO: 170606 - DNA, 20 bp, synthetic construct
  source 1..20: mol_type = other DNA
atcgcagaagcgcggagtgc

SEQ ID NO: 170607 - DNA, 20 bp, synthetic construct
  source 1..20: mol_type = other DNA
aatcgcagaagcgcggagtg

SEQ ID NO: 170608 - DNA, 20 bp, synthetic construct
  source 1..20: mol_type = other DNA
aaatcgcagaagcgcggagt

SEQ ID NO: 170609 - DNA, 20 bp, synthetic construct
  source 1..20: mol_type = other DNA
gaaatcgcagaagcgcggag

SEQ ID NO: 170610 - DNA, 20 bp, synthetic construct
  source 1..20: mol_type = other DNA
cgaaatcgcagaagcgcgga

SEQ ID NO: 170611 - DNA, 20 bp, synthetic construct
  source 1..20: mol_type = other DNA
gcgaaatcgcagaagcgcgg

SEQ ID NO: 170612 - DNA, 20 bp, synthetic construct
  source 1..20: mol_type = other DNA
agcgaaatcgcagaagcgcg

SEQ ID NO: 170613 - DNA, 20 bp, synthetic construct
  source 1..20: mol_type = other DNA
gagcgaaatcgcagaagcgc

SEQ ID NO: 170614 - DNA, 20 bp, synthetic construct
  source 1..20: mol_type = other DNA
ggagcgaaatcgcagaagcg

SEQ ID NO: 170615 - DNA, 20 bp, synthetic construct
  source 1..20: mol_type = other DNA
tggagcgaaatcgcagaagc

SEQ ID NO: 170616 - DNA, 20 bp, synthetic construct
  source 1..20: mol_type = other DNA
atggagcgaaatcgcagaag

SEQ ID NO: 170617 - DNA, 20 bp, synthetic construct
  source 1..20: mol_type = other DNA
aatggagcgaaatcgcagaa

SEQ ID NO: 170618 - DNA, 20 bp, synthetic construct
  source 1..20: mol_type = other DNA
aaatggagcgaaatcgcaga

SEQ ID NO: 170619 - DNA, 20 bp, synthetic construct
  source 1..20: mol_type = other DNA
aaaatggagcgaaatcgcag

SEQ ID NO: 170620 - DNA, 20 bp, synthetic construct
  source 1..20: mol_type = other DNA
caaaatggagcgaaatcgca

SEQ ID NO: 170621 - DNA, 20 bp, synthetic construct
  source 1..20: mol_type = other DNA
tcaaaatggagcgaaatcgc

SEQ ID NO: 170622 - DNA, 20 bp, synthetic construct
  source 1..20: mol_type = other DNA
ttcaaaatggagcgaaatcg

SEQ ID NO: 170623 - DNA, 20 bp, synthetic construct
  source 1..20: mol_type = other DNA
tttcaaaatggagcgaaatc

SEQ ID NO: 170624 - DNA, 20 bp, synthetic construct
  source 1..20: mol_type = other DNA
atttcaaaatggagcgaaat

SEQ ID NO: 170625 - DNA, 20 bp, synthetic construct
  source 1..20: mol_type = other DNA
catttcaaaatggagcgaaa

SEQ ID NO: 170626 - DNA, 20 bp, synthetic construct
  source 1..20: mol_type = other DNA
acatttcaaaatggagcgaa

SEQ ID NO: 170627 - DNA, 20 bp, synthetic construct
  source 1..20: mol_type = other DNA
cacatttcaaaatggagcga

SEQ ID NO: 170628 - DNA, 20 bp, synthetic construct
  source 1..20: mol_type = other DNA
acacatttcaaaatggagcg

SEQ ID NO: 170629 - DNA, 20 bp, synthetic construct
  source 1..20: mol_type = other DNA
aacacatttcaaaatggagc

SEQ ID NO: 170630 - DNA, 20 bp, synthetic construct
  source 1..20: mol_type = other DNA
caacacatttcaaaatggag

SEQ ID NO: 170631 - DNA, 20 bp, synthetic construct
  source 1..20: mol_type = other DNA
ccaacacatttcaaaatgga

SEQ ID NO: 170632 - DNA, 20 bp, synthetic construct
  source 1..20: mol_type = other DNA
gccaacacatttcaaaatgg

SEQ ID NO: 170633 - DNA, 20 bp, synthetic construct
  source 1..20: mol_type = other DNA
cgccaacacatttcaaaatg

SEQ ID NO: 170634 - DNA, 20 bp, synthetic construct
  source 1..20: mol_type = other DNA
gcgccaacacatttcaaaat

SEQ ID NO: 170635 - DNA, 20 bp, synthetic construct
  source 1..20: mol_type = other DNA
agcgccaacacatttcaaaa

SEQ ID NO: 170636 - DNA, 20 bp, synthetic construct
  source 1..20: mol_type = other DNA
aagcgccaacacatttcaaa

SEQ ID NO: 170637 - DNA, 20 bp, synthetic construct
  source 1..20: mol_type = other DNA
aaagcgccaacacatttcaa

SEQ ID NO: 170638 - DNA, 20 bp, synthetic construct
  source 1..20: mol_type = other DNA
caaagcgccaacacatttca

SEQ ID NO: 170639 - DNA, 20 bp, synthetic construct
  source 1..20: mol_type = other DNA
ccaaagcgccaacacatttc

SEQ ID NO: 170640 - DNA, 20 bp, synthetic construct
  source 1..20: mol_type = other DNA
accaaagcgccaacacattt

SEQ ID NO: 170641 - DNA, 20 bp, synthetic construct
  source 1..20: mol_type = other DNA
caccaaagcgccaacacatt

SEQ ID NO: 170642 - DNA, 20 bp, synthetic construct
  source 1..20: mol_type = other DNA
ccaccaaagcgccaacacat

SEQ ID NO: 170643 - DNA, 20 bp, synthetic construct
  source 1..20: mol_type = other DNA
cccaccaaagcgccaacaca

SEQ ID NO: 170644 - DNA, 20 bp, synthetic construct
  source 1..20: mol_type = other DNA
ccccaccaaagcgccaacac

SEQ ID NO: 170645 - DNA, 20 bp, synthetic construct
  source 1..20: mol_type = other DNA
gccccaccaaagcgccaaca

SEQ ID NO: 170646 - DNA, 20 bp, synthetic construct
  source 1..20: mol_type = other DNA
ggccccaccaaagcgccaac

SEQ ID NO: 170647 - DNA, 20 bp, synthetic construct
  source 1..20: mol_type = other DNA
cggccccaccaaagcgccaa

SEQ ID NO: 170648 - DNA, 20 bp, synthetic construct
  source 1..20: mol_type = other DNA
gcggccccaccaaagcgcca

SEQ ID NO: 170649 - DNA, 20 bp, synthetic construct
  source 1..20: mol_type = other DNA
agcggccccaccaaagcgcc

SEQ ID NO: 170650 - DNA, 20 bp, synthetic construct
  source 1..20: mol_type = other DNA
cagcggccccaccaaagcgc

SEQ ID NO: 170651 - DNA, 20 bp, synthetic construct
  source 1..20: mol_type = other DNA
gcagcggccccaccaaagcg

SEQ ID NO: 170652 - DNA, 20 bp, synthetic construct
  source 1..20: mol_type = other DNA
cgcagcggccccaccaaagc

SEQ ID NO: 170653 - DNA, 20 bp, synthetic construct
  source 1..20: mol_type = other DNA
ccgcagcggccccaccaaag

SEQ ID NO: 170654 - DNA, 20 bp, synthetic construct
  source 1..20: mol_type = other DNA
accgcagcggccccaccaaa

SEQ ID NO: 170655 - DNA, 20 bp, synthetic construct
  source 1..20: mol_type = other DNA
caccgcagcggccccaccaa

SEQ ID NO: 170656 - DNA, 20 bp, synthetic construct
  source 1..20: mol_type = other DNA
ccaccgcagcggccccacca

SEQ ID NO: 170657 - DNA, 20 bp, synthetic construct
  source 1..20: mol_type = other DNA
cccaccgcagcggccccacc

SEQ ID NO: 170658 - DNA, 20 bp, synthetic construct
  source 1..20: mol_type = other DNA
gcccaccgcagcggccccac

SEQ ID NO: 170659 - DNA, 20 bp, synthetic construct
  source 1..20: mol_type = other DNA
tgcccaccgcagcggcccca

SEQ ID NO: 170660 - DNA, 20 bp, synthetic construct
  source 1..20: mol_type = other DNA
ttgcccaccgcagcggcccc

SEQ ID NO: 170661 - DNA, 20 bp, synthetic construct
  source 1..20: mol_type = other DNA
cttgcccaccgcagcggccc

SEQ ID NO: 170662 - DNA, 20 bp, synthetic construct
  source 1..20: mol_type = other DNA
ccttgcccaccgcagcggcc

SEQ ID NO: 170663 - DNA, 20 bp, synthetic construct
  source 1..20: mol_type = other DNA
gccttgcccaccgcagcggc

SEQ ID NO: 170664 - DNA, 20 bp, synthetic construct
  source 1..20: mol_type = other DNA
ggccttgcccaccgcagcgg

SEQ ID NO: 170665 - DNA, 20 bp, synthetic construct
  source 1..20: mol_type = other DNA
cggccttgcccaccgcagcg

SEQ ID NO: 170666 - DNA, 20 bp, synthetic construct
  source 1..20: mol_type = other DNA
ccggccttgcccaccgcagc

SEQ ID NO: 170667 - DNA, 20 bp, synthetic construct
  source 1..20: mol_type = other DNA
cccggccttgcccaccgcag

SEQ ID NO: 170668 - DNA, 20 bp, synthetic construct
  source 1..20: mol_type = other DNA
ccccggccttgcccaccgca

SEQ ID NO: 170669 - DNA, 20 bp, synthetic construct
  source 1..20: mol_type = other DNA
cccccggccttgcccaccgc

SEQ ID NO: 170670 - DNA, 20 bp, synthetic construct
  source 1..20: mol_type = other DNA
gcccccggccttgcccaccg

SEQ ID NO: 170671 - DNA, 20 bp, synthetic construct
  source 1..20: mol_type = other DNA
cgcccccggccttgcccacc

SEQ ID NO: 170672 - DNA, 20 bp, synthetic construct
  source 1..20: mol_type = other DNA
gcgcccccggccttgcccac

SEQ ID NO: 170673 - DNA, 20 bp, synthetic construct
  source 1..20: mol_type = other DNA
agcgcccccggccttgccca

SEQ ID NO: 170674 - DNA, 20 bp, synthetic construct
  source 1..20: mol_type = other DNA
cagcgcccccggccttgccc

SEQ ID NO: 170675 - DNA, 20 bp, synthetic construct
  source 1..20: mol_type = other DNA
acagcgcccccggccttgcc

SEQ ID NO: 170676 - DNA, 20 bp, synthetic construct
  source 1..20: mol_type = other DNA
aacagcgcccccggccttgc

SEQ ID NO: 170677 - DNA, 20 bp, synthetic construct
  source 1..20: mol_type = other DNA
taacagcgcccccggccttg

SEQ ID NO: 170678 - DNA, 20 bp, synthetic construct
  source 1..20: mol_type = other DNA
ttaacagcgcccccggcctt

SEQ ID NO: 170679 - DNA, 20 bp, synthetic construct
  source 1..20: mol_type = other DNA
attaacagcgcccccggcct

SEQ ID NO: 170680 - DNA, 20 bp, synthetic construct
  source 1..20: mol_type = other DNA
cattaacagcgcccccggcc

SEQ ID NO: 170681 - DNA, 20 bp, synthetic construct
  source 1..20: mol_type = other DNA
ccattaacagcgcccccggc

SEQ ID NO: 170682 - DNA, 20 bp, synthetic construct
  source 1..20: mol_type = other DNA
tccattaacagcgcccccgg

SEQ ID NO: 170683 - DNA, 20 bp, synthetic construct
  source 1..20: mol_type = other DNA
ctccattaacagcgcccccg

SEQ ID NO: 170684 - DNA, 20 bp, synthetic construct
  source 1..20: mol_type = other DNA
cctccattaacagcgccccc

SEQ ID NO: 170685 - DNA, 20 bp, synthetic construct
  source 1..20: mol_type = other DNA
tcctccattaacagcgcccc

SEQ ID NO: 170686 - DNA, 20 bp, synthetic construct
  source 1..20: mol_type = other DNA
ttcctccattaacagcgccc

SEQ ID NO: 170687 - DNA, 20 bp, synthetic construct
  source 1..20: mol_type = other DNA
gttcctccattaacagcgcc

SEQ ID NO: 170688 - DNA, 20 bp, synthetic construct
  source 1..20: mol_type = other DNA
ggttcctccattaacagcgc

SEQ ID NO: 170689 - DNA, 20 bp, synthetic construct
  source 1..20: mol_type = other DNA
aggttcctccattaacagcg

SEQ ID NO: 170690 - DNA, 20 bp, synthetic construct
  source 1..20: mol_type = other DNA
gaggttcctccattaacagc

SEQ ID NO: 170691 - DNA, 20 bp, synthetic construct
  source 1..20: mol_type = other DNA
tgaggttcctccattaacag

SEQ ID NO: 170692 - DNA, 20 bp, synthetic construct
  source 1..20: mol_type = other DNA
ctgaggttcctccattaaca

SEQ ID NO: 170693 - DNA, 20 bp, synthetic construct
  source 1..20: mol_type = other DNA
cctgaggttcctccattaac

SEQ ID NO: 170694 - DNA, 20 bp, synthetic construct
  source 1..20: mol_type = other DNA
ccctgaggttcctccattaa

SEQ ID NO: 170695 - DNA, 20 bp, synthetic construct
  source 1..20: mol_type = other DNA
cccctgaggttcctccatta

SEQ ID NO: 170696 - DNA, 20 bp, synthetic construct
  source 1..20: mol_type = other DNA
ccccctgaggttcctccatt

SEQ ID NO: 170697 - DNA, 20 bp, synthetic construct
  source 1..20: mol_type = other DNA
tccccctgaggttcctccat

SEQ ID NO: 170698 - DNA, 20 bp, synthetic construct
  source 1..20: mol_type = other DNA
gtccccctgaggttcctcca

SEQ ID NO: 170699 - DNA, 20 bp, synthetic construct
  source 1..20: mol_type = other DNA
cgtccccctgaggttcctcc

SEQ ID NO: 170700 - DNA, 20 bp, synthetic construct
  source 1..20: mol_type = other DNA
ccgtccccctgaggttcctc

SEQ ID NO: 170701 - DNA, 20 bp, synthetic construct
  source 1..20: mol_type = other DNA
accgtccccctgaggttcct

SEQ ID NO: 170702 - DNA, 20 bp, synthetic construct
  source 1..20: mol_type = other DNA
gaccgtccccctgaggttcc

SEQ ID NO: 170703 - DNA, 20 bp, synthetic construct
  source 1..20: mol_type = other DNA
ggaccgtccccctgaggttc

SEQ ID NO: 170704 - DNA, 20 bp, synthetic construct
  source 1..20: mol_type = other DNA
aggaccgtccccctgaggtt

SEQ ID NO: 170705 - DNA, 20 bp, synthetic construct
  source 1..20: mol_type = other DNA
aaggaccgtccccctgaggt

SEQ ID NO: 170706 - DNA, 20 bp, synthetic construct
  source 1..20: mol_type = other DNA
gaaggaccgtccccctgagg

SEQ ID NO: 170707 - DNA, 20 bp, synthetic construct
  source 1..20: mol_type = other DNA
cgaaggaccgtccccctgag

SEQ ID NO: 170708 - DNA, 20 bp, synthetic construct
  source 1..20: mol_type = other DNA
acgaaggaccgtccccctga

SEQ ID NO: 170709 - DNA, 20 bp, synthetic construct
  source 1..20: mol_type = other DNA
tacgaaggaccgtccccctg

SEQ ID NO: 170710 - DNA, 20 bp, synthetic construct
  source 1..20: mol_type = other DNA
ctacgaaggaccgtccccct

SEQ ID NO: 170711 - DNA, 20 bp, synthetic construct
  source 1..20: mol_type = other DNA
cctacgaaggaccgtccccc

SEQ ID NO: 170712 - DNA, 20 bp, synthetic construct
  source 1..20: mol_type = other DNA
tcctacgaaggaccgtcccc

SEQ ID NO: 170713 - DNA, 20 bp, synthetic construct
  source 1..20: mol_type = other DNA
ttcctacgaaggaccgtccc

SEQ ID NO: 170714 - DNA, 20 bp, synthetic construct
  source 1..20: mol_type = other DNA
tttcctacgaaggaccgtcc

SEQ ID NO: 170715 - DNA, 20 bp, synthetic construct
  source 1..20: mol_type = other DNA
gtttcctacgaaggaccgtc

SEQ ID NO: 170716 - DNA, 20 bp, synthetic construct
  source 1..20: mol_type = other DNA
agtttcctacgaaggaccgt

SEQ ID NO: 170717 - DNA, 20 bp, synthetic construct
  source 1..20: mol_type = other DNA
gagtttcctacgaaggaccg

SEQ ID NO: 170718 - DNA, 20 bp, synthetic construct
  source 1..20: mol_type = other DNA
agagtttcctacgaaggacc

SEQ ID NO: 170719 - DNA, 20 bp, synthetic construct
  source 1..20: mol_type = other DNA
tagagtttcctacgaaggac

SEQ ID NO: 170720 - DNA, 20 bp, synthetic construct
  source 1..20: mol_type = other DNA
atagagtttcctacgaagga

SEQ ID NO: 170721 - DNA, 20 bp, synthetic construct
  source 1..20: mol_type = other DNA
gatagagtttcctacgaagg

SEQ ID NO: 170722 - DNA, 20 bp, synthetic construct
  source 1..20: mol_type = other DNA
ggatagagtttcctacgaag

SEQ ID NO: 170723 - DNA, 20 bp, synthetic construct
  source 1..20: mol_type = other DNA
aggatagagtttcctacgaa

SEQ ID NO: 170724 - DNA, 20 bp, synthetic construct
  source 1..20: mol_type = other DNA
caggatagagtttcctacga

SEQ ID NO: 170725 - DNA, 20 bp, synthetic construct
  source 1..20: mol_type = other DNA
ccaggatagagtttcctacg

SEQ ID NO: 170726 - DNA, 20 bp, synthetic construct
  source 1..20: mol_type = other DNA
gccaggatagagtttcctac

SEQ ID NO: 170727 - DNA, 20 bp, synthetic construct
  source 1..20: mol_type = other DNA
agccaggatagagtttccta

SEQ ID NO: 170728 - DNA, 20 bp, synthetic construct
  source 1..20: mol_type = other DNA
gagccaggatagagtttcct

SEQ ID NO: 170729 - DNA, 20 bp, synthetic construct
  source 1..20: mol_type = other DNA
agagccaggatagagtttcc

SEQ ID NO: 170730 - DNA, 20 bp, synthetic construct
  source 1..20: mol_type = other DNA
cagagccaggatagagtttc

SEQ ID NO: 170731 - DNA, 20 bp, synthetic construct
  source 1..20: mol_type = other DNA
gcagagccaggatagagttt

SEQ ID NO: 170732 - DNA, 20 bp, synthetic construct
  source 1..20: mol_type = other DNA
cgcagagccaggatagagtt

SEQ ID NO: 170733 - DNA, 20 bp, synthetic construct
  source 1..20: mol_type = other DNA
gcgcagagccaggatagagt

SEQ ID NO: 170734 - DNA, 20 bp, synthetic construct
  source 1..20: mol_type = other DNA
cgcgcagagccaggatagag

SEQ ID NO: 170735 - DNA, 20 bp, synthetic construct
  source 1..20: mol_type = other DNA
gcgcgcagagccaggataga

SEQ ID NO: 170736 - DNA, 20 bp, synthetic construct
  source 1..20: mol_type = other DNA
cgcgcgcagagccaggatag

SEQ ID NO: 170737 - DNA, 20 bp, synthetic construct
  source 1..20: mol_type = other DNA
gcgcgcgcagagccaggata

SEQ ID NO: 170738 - DNA, 20 bp, synthetic construct
  source 1..20: mol_type = other DNA
agcgcgcgcagagccaggat

SEQ ID NO: 170739 - DNA, 20 bp, synthetic construct
  source 1..20: mol_type = other DNA
aagcgcgcgcagagccagga

SEQ ID NO: 170740 - DNA, 20 bp, synthetic construct
  source 1..20: mol_type = other DNA
aaagcgcgcgcagagccagg

SEQ ID NO: 170741 - DNA, 20 bp, synthetic construct
  source 1..20: mol_type = other DNA
taaagcgcgcgcagagccag

SEQ ID NO: 170742 - DNA, 20 bp, synthetic construct
  source 1..20: mol_type = other DNA
ttaaagcgcgcgcagagcca

SEQ ID NO: 170743 - DNA, 20 bp, synthetic construct
  source 1..20: mol_type = other DNA
cttaaagcgcgcgcagagcc

SEQ ID NO: 170744 - DNA, 20 bp, synthetic construct
  source 1..20: mol_type = other DNA
ccttaaagcgcgcgcagagc

SEQ ID NO: 170745 - DNA, 20 bp, synthetic construct
  source 1..20: mol_type = other DNA
tccttaaagcgcgcgcagag

SEQ ID NO: 170746 - DNA, 20 bp, synthetic construct
  source 1..20: mol_type = other DNA
ttccttaaagcgcgcgcaga

SEQ ID NO: 170747 - DNA, 20 bp, synthetic construct
  source 1..20: mol_type = other DNA
tttccttaaagcgcgcgcag

SEQ ID NO: 170748 - DNA, 20 bp, synthetic construct
  source 1..20: mol_type = other DNA
atttccttaaagcgcgcgca

SEQ ID NO: 170749 - DNA, 20 bp, synthetic construct
  source 1..20: mol_type = other DNA
catttccttaaagcgcgcgc

SEQ ID NO: 170750 - DNA, 20 bp, synthetic construct
  source 1..20: mol_type = other DNA
ccatttccttaaagcgcgcg

SEQ ID NO: 170751 - DNA, 20 bp, synthetic construct
  source 1..20: mol_type = other DNA
gccatttccttaaagcgcgc

SEQ ID NO: 170752 - DNA, 20 bp, synthetic construct
  source 1..20: mol_type = other DNA
agccatttccttaaagcgcg

SEQ ID NO: 170753 - DNA, 20 bp, synthetic construct
  source 1..20: mol_type = other DNA
aagccatttccttaaagcgc

SEQ ID NO: 170754 - DNA, 20 bp, synthetic construct
  source 1..20: mol_type = other DNA
gaagccatttccttaaagcg

SEQ ID NO: 170755 - DNA, 20 bp, synthetic construct
  source 1..20: mol_type = other DNA
ggaagccatttccttaaagc

SEQ ID NO: 170756 - DNA, 20 bp, synthetic construct
  source 1..20: mol_type = other DNA
gggaagccatttccttaaag

SEQ ID NO: 170757 - DNA, 20 bp, synthetic construct
  source 1..20: mol_type = other DNA
agggaagccatttccttaaa

SEQ ID NO: 170758 - DNA, 20 bp, synthetic construct
  source 1..20: mol_type = other DNA
gagggaagccatttccttaa

SEQ ID NO: 170759 - DNA, 20 bp, synthetic construct
  source 1..20: mol_type = other DNA
ggagggaagccatttcctta

SEQ ID NO: 170760 - DNA, 20 bp, synthetic construct
  source 1..20: mol_type = other DNA
tggagggaagccatttcctt

SEQ ID NO: 170761 - DNA, 20 bp, synthetic construct
  source 1..20: mol_type = other DNA
ctggagggaagccatttcct

SEQ ID NO: 170762 - DNA, 20 bp, synthetic construct
  source 1..20: mol_type = other DNA
cctggagggaagccatttcc

SEQ ID NO: 170763 - DNA, 20 bp, synthetic construct
  source 1..20: mol_type = other DNA
tcctggagggaagccatttc

SEQ ID NO: 170764 - DNA, 20 bp, synthetic construct
  source 1..20: mol_type = other DNA
gtcctggagggaagccattt

SEQ ID NO: 170765 - DNA, 20 bp, synthetic construct
  source 1..20: mol_type = other DNA
ggtcctggagggaagccatt

SEQ ID NO: 170766 - DNA, 20 bp, synthetic construct
  source 1..20: mol_type = other DNA
aggtcctggagggaagccat

SEQ ID NO: 170767 - DNA, 20 bp, synthetic construct
  source 1..20: mol_type = other DNA
gaggtcctggagggaagcca

SEQ ID NO: 170768 - DNA, 20 bp, synthetic construct
  source 1..20: mol_type = other DNA
cgaggtcctggagggaagcc

SEQ ID NO: 170769 - DNA, 20 bp, synthetic construct
  source 1..20: mol_type = other DNA
tcgaggtcctggagggaagc

SEQ ID NO: 170770 - DNA, 20 bp, synthetic construct
  source 1..20: mol_type = other DNA
ctcgaggtcctggagggaag

SEQ ID NO: 170771 - DNA, 20 bp, synthetic construct
  source 1..20: mol_type = other DNA
cctcgaggtcctggagggaa

SEQ ID NO: 170772 - DNA, 20 bp, synthetic construct
  source 1..20: mol_type = other DNA
ccctcgaggtcctggaggga

SEQ ID NO: 170773 - DNA, 20 bp, synthetic construct
  source 1..20: mol_type = other DNA
tccctcgaggtcctggaggg

SEQ ID NO: 170774 - DNA, 20 bp, synthetic construct
  source 1..20: mol_type = other DNA
atccctcgaggtcctggagg

SEQ ID NO: 170775 - DNA, 20 bp, synthetic construct
  source 1..20: mol_type = other DNA
catccctcgaggtcctggag

SEQ ID NO: 170776 - DNA, 20 bp, synthetic construct
  source 1..20: mol_type = other DNA
gcatccctcgaggtcctgga

SEQ ID NO: 170777 - DNA, 20 bp, synthetic construct
  source 1..20: mol_type = other DNA
tgcatccctcgaggtcctgg

SEQ ID NO: 170778 - DNA, 20 bp, synthetic construct
  source 1..20: mol_type = other DNA
ctgcatccctcgaggtcctg

SEQ ID NO: 170779 - DNA, 20 bp, synthetic construct
  source 1..20: mol_type = other DNA
gctgcatccctcgaggtcct

SEQ ID NO: 170780 - DNA, 20 bp, synthetic construct
  source 1..20: mol_type = other DNA
agctgcatccctcgaggtcc

SEQ ID NO: 170781 - DNA, 20 bp, synthetic construct
  source 1..20: mol_type = other DNA
aagctgcatccctcgaggtc

SEQ ID NO: 170782 - DNA, 20 bp, synthetic construct
  source 1..20: mol_type = other DNA
aaagctgcatccctcgaggt

SEQ ID NO: 170783 - DNA, 20 bp, synthetic construct
  source 1..20: mol_type = other DNA
aaaagctgcatccctcgagg

SEQ ID NO: 170784 - DNA, 20 bp, synthetic construct
  source 1..20: mol_type = other DNA
caaaagctgcatccctcgag

SEQ ID NO: 170785 - DNA, 20 bp, synthetic construct
  source 1..20: mol_type = other DNA
gcaaaagctgcatccctcga

SEQ ID NO: 170786 - DNA, 20 bp, synthetic construct
  source 1..20: mol_type = other DNA
cgcaaaagctgcatccctcg

SEQ ID NO: 170787 - DNA, 20 bp, synthetic construct
  source 1..20: mol_type = other DNA
gcgcaaaagctgcatccctc

SEQ ID NO: 170788 - DNA, 20 bp, synthetic construct
  source 1..20: mol_type = other DNA
cgcgcaaaagctgcatccct

SEQ ID NO: 170789 - DNA, 20 bp, synthetic construct
  source 1..20: mol_type = other DNA
ccgcgcaaaagctgcatccc

SEQ ID NO: 170790 - DNA, 20 bp, synthetic construct
  source 1..20: mol_type = other DNA
tccgcgcaaaagctgcatcc

SEQ ID NO: 170791 - DNA, 20 bp, synthetic construct
  source 1..20: mol_type = other DNA
atccgcgcaaaagctgcatc

SEQ ID NO: 170792 - DNA, 20 bp, synthetic construct
  source 1..20: mol_type = other DNA
catccgcgcaaaagctgcat

SEQ ID NO: 170793 - DNA, 20 bp, synthetic construct
  source 1..20: mol_type = other DNA
tcatccgcgcaaaagctgca

SEQ ID NO: 170794 - DNA, 20 bp, synthetic construct
  source 1..20: mol_type = other DNA
gtcatccgcgcaaaagctgc

SEQ ID NO: 170795 - DNA, 20 bp, synthetic construct
  source 1..20: mol_type = other DNA
cgtcatccgcgcaaaagctg

SEQ ID NO: 170796 - DNA, 20 bp, synthetic construct
  source 1..20: mol_type = other DNA
ccgtcatccgcgcaaaagct

SEQ ID NO: 170797 - DNA, 20 bp, synthetic construct
  source 1..20: mol_type = other DNA
accgtcatccgcgcaaaagc

SEQ ID NO: 170798 - DNA, 20 bp, synthetic construct
  source 1..20: mol_type = other DNA
caccgtcatccgcgcaaaag

SEQ ID NO: 170799 - DNA, 20 bp, synthetic construct
  source 1..20: mol_type = other DNA
ccaccgtcatccgcgcaaaa

SEQ ID NO: 170800 - DNA, 20 bp, synthetic construct
  source 1..20: mol_type = other DNA
cccaccgtcatccgcgcaaa

SEQ ID NO: 170801 - DNA, 20 bp, synthetic construct
  source 1..20: mol_type = other DNA
ccccaccgtcatccgcgcaa

SEQ ID NO: 170802 - DNA, 20 bp, synthetic construct
  source 1..20: mol_type = other DNA
accccaccgtcatccgcgca

SEQ ID NO: 170803 - DNA, 20 bp, synthetic construct
  source 1..20: mol_type = other DNA
caccccaccgtcatccgcgc

SEQ ID NO: 170804 - DNA, 20 bp, synthetic construct
  source 1..20: mol_type = other DNA
gcaccccaccgtcatccgcg

SEQ ID NO: 170805 - DNA, 20 bp, synthetic construct
  source 1..20: mol_type = other DNA
agcaccccaccgtcatccgc

SEQ ID NO: 170806 - DNA, 20 bp, synthetic construct
  source 1..20: mol_type = other DNA
cagcaccccaccgtcatccg

SEQ ID NO: 170807 - DNA, 20 bp, synthetic construct
  source 1..20: mol_type = other DNA
tcagcaccccaccgtcatcc

SEQ ID NO: 170808 - DNA, 20 bp, synthetic construct
  source 1..20: mol_type = other DNA
ttcagcaccccaccgtcatc

SEQ ID NO: 170809 - DNA, 20 bp, synthetic construct
  source 1..20: mol_type = other DNA
gttcagcaccccaccgtcat

SEQ ID NO: 170810 - DNA, 20 bp, synthetic construct
  source 1..20: mol_type = other DNA
ggttcagcaccccaccgtca

SEQ ID NO: 170811 - DNA, 20 bp, synthetic construct
  source 1..20: mol_type = other DNA
tggttcagcaccccaccgtc

SEQ ID NO: 170812 - DNA, 20 bp, synthetic construct
  source 1..20: mol_type = other DNA
ctggttcagcaccccaccgt

SEQ ID NO: 170813 - DNA, 20 bp, synthetic construct
  source 1..20: mol_type = other DNA
gctggttcagcaccccaccg

SEQ ID NO: 170814 - DNA, 20 bp, synthetic construct
  source 1..20: mol_type = other DNA
ggctggttcagcaccccacc

SEQ ID NO: 170815 - DNA, 20 bp, synthetic construct
  source 1..20: mol_type = other DNA
cggctggttcagcaccccac

SEQ ID NO: 170816 - DNA, 20 bp, synthetic construct
  source 1..20: mol_type = other DNA
ccggctggttcagcacccca

SEQ ID NO: 170817 - DNA, 20 bp, synthetic construct
  source 1..20: mol_type = other DNA
accggctggttcagcacccc

SEQ ID NO: 170818 - DNA, 20 bp, synthetic construct
  source 1..20: mol_type = other DNA
caccggctggttcagcaccc

SEQ ID NO: 170819 - DNA, 20 bp, synthetic construct
  source 1..20: mol_type = other DNA
gcaccggctggttcagcacc

SEQ ID NO: 170820 - DNA, 20 bp, synthetic construct
  source 1..20: mol_type = other DNA
cgcaccggctggttcagcac

SEQ ID NO: 170821 - DNA, 20 bp, synthetic construct
  source 1..20: mol_type = other DNA
gcgcaccggctggttcagca

SEQ ID NO: 170822 - DNA, 20 bp, synthetic construct
  source 1..20: mol_type = other DNA
ggcgcaccggctggttcagc

SEQ ID NO: 170823 - DNA, 20 bp, synthetic construct
  source 1..20: mol_type = other DNA
aggcgcaccggctggttcag

SEQ ID NO: 170824 - DNA, 20 bp, synthetic construct
  source 1..20: mol_type = other DNA
gaggcgcaccggctggttca

SEQ ID NO: 170825 - DNA, 20 bp, synthetic construct
  source 1..20: mol_type = other DNA
agaggcgcaccggctggttc

SEQ ID NO: 170826 - DNA, 20 bp, synthetic construct
  source 1..20: mol_type = other DNA
cagaggcgcaccggctggtt

SEQ ID NO: 170827 - DNA, 20 bp, synthetic construct
  source 1..20: mol_type = other DNA
ccagaggcgcaccggctggt

SEQ ID NO: 170828 - DNA, 20 bp, synthetic construct
  source 1..20: mol_type = other DNA
tccagaggcgcaccggctgg

SEQ ID NO: 170829 - DNA, 20 bp, synthetic construct
  source 1..20: mol_type = other DNA
ttccagaggcgcaccggctg

SEQ ID NO: 170830 - DNA, 20 bp, synthetic construct
  source 1..20: mol_type = other DNA
tttccagaggcgcaccggct

SEQ ID NO: 170831 - DNA, 20 bp, synthetic construct
  source 1..20: mol_type = other DNA
atttccagaggcgcaccggc

SEQ ID NO: 170832 - DNA, 20 bp, synthetic construct
  source 1..20: mol_type = other DNA
catttccagaggcgcaccgg

SEQ ID NO: 170833 - DNA, 20 bp, synthetic construct
  source 1..20: mol_type = other DNA
acatttccagaggcgcaccg

SEQ ID NO: 170834 - DNA, 20 bp, synthetic construct
  source 1..20: mol_type = other DNA
gacatttccagaggcgcacc

SEQ ID NO: 170835 - DNA, 20 bp, synthetic construct
  source 1..20: mol_type = other DNA
agacatttccagaggcgcac

SEQ ID NO: 170836 - DNA, 20 bp, synthetic construct
  source 1..20: mol_type = other DNA
cagacatttccagaggcgca

SEQ ID NO: 170837 - DNA, 20 bp, synthetic construct
  source 1..20: mol_type = other DNA
ccagacatttccagaggcgc

SEQ ID NO: 170838 - DNA, 20 bp, synthetic construct
  source 1..20: mol_type = other DNA
cccagacatttccagaggcg

SEQ ID NO: 170839 - DNA, 20 bp, synthetic construct
  source 1..20: mol_type = other DNA
gcccagacatttccagaggc

SEQ ID NO: 170840 - DNA, 20 bp, synthetic construct
  source 1..20: mol_type = other DNA
tgcccagacatttccagagg

SEQ ID NO: 170841 - DNA, 20 bp, synthetic construct
  source 1..20: mol_type = other DNA
gtgcccagacatttccagag

SEQ ID NO: 170842 - DNA, 20 bp, synthetic construct
  source 1..20: mol_type = other DNA
cgtgcccagacatttccaga

SEQ ID NO: 170843 - DNA, 20 bp, synthetic construct
  source 1..20: mol_type = other DNA
ccgtgcccagacatttccag

SEQ ID NO: 170844 - DNA, 20 bp, synthetic construct
  source 1..20: mol_type = other DNA
tccgtgcccagacatttcca

SEQ ID NO: 170845 - DNA, 20 bp, synthetic construct
  source 1..20: mol_type = other DNA
atccgtgcccagacatttcc

SEQ ID NO: 170846 - DNA, 20 bp, synthetic construct
  source 1..20: mol_type = other DNA
gatccgtgcccagacatttc

SEQ ID NO: 170847 - DNA, 20 bp, synthetic construct
  source 1..20: mol_type = other DNA
ggatccgtgcccagacattt

SEQ ID NO: 170848 - DNA, 20 bp, synthetic construct
  source 1..20: mol_type = other DNA
aggatccgtgcccagacatt

SEQ ID NO: 170849 - DNA, 20 bp, synthetic construct
  source 1..20: mol_type = other DNA
caggatccgtgcccagacat

SEQ ID NO: 170850 - DNA, 20 bp, synthetic construct
  source 1..20: mol_type = other DNA
ccaggatccgtgcccagaca

SEQ ID NO: 170851 - DNA, 20 bp, synthetic construct
  source 1..20: mol_type = other DNA
cccaggatccgtgcccagac

SEQ ID NO: 170852 - DNA, 20 bp, synthetic construct
  source 1..20: mol_type = other DNA
ccccaggatccgtgcccaga

SEQ ID NO: 170853 - DNA, 20 bp, synthetic construct
  source 1..20: mol_type = other DNA
gccccaggatccgtgcccag

SEQ ID NO: 170854 - DNA, 20 bp, synthetic construct
  source 1..20: mol_type = other DNA
ggccccaggatccgtgccca

SEQ ID NO: 170855 - DNA, 20 bp, synthetic construct
  source 1..20: mol_type = other DNA
tggccccaggatccgtgccc

SEQ ID NO: 170856 - DNA, 20 bp, synthetic construct
  source 1..20: mol_type = other DNA
atggccccaggatccgtgcc

SEQ ID NO: 170857 - DNA, 20 bp, synthetic construct
  source 1..20: mol_type = other DNA
gatggccccaggatccgtgc

SEQ ID NO: 170858 - DNA, 20 bp, synthetic construct
  source 1..20: mol_type = other DNA
cgatggccccaggatccgtg

SEQ ID NO: 170859 - DNA, 20 bp, synthetic construct
  source 1..20: mol_type = other DNA
tcgatggccccaggatccgt

SEQ ID NO: 170860 - DNA, 20 bp, synthetic construct
  source 1..20: mol_type = other DNA
gtcgatggccccaggatccg

SEQ ID NO: 170861 - DNA, 20 bp, synthetic construct
  source 1..20: mol_type = other DNA
cgtcgatggccccaggatcc

SEQ ID NO: 170862 - DNA, 20 bp, synthetic construct
  source 1..20: mol_type = other DNA
tcgtcgatggccccaggatc

SEQ ID NO: 170863 - DNA, 20 bp, synthetic construct
  source 1..20: mol_type = other DNA
gtcgtcgatggccccaggat

SEQ ID NO: 170864 - DNA, 20 bp, synthetic construct
  source 1..20: mol_type = other DNA
agtcgtcgatggccccagga

SEQ ID NO: 170865 - DNA, 20 bp, synthetic construct
  source 1..20: mol_type = other DNA
gagtcgtcgatggccccagg

SEQ ID NO: 170866 - DNA, 20 bp, synthetic construct
  source 1..20: mol_type = other DNA
ggagtcgtcgatggccccag

SEQ ID NO: 170867 - DNA, 20 bp, synthetic construct
  source 1..20: mol_type = other DNA
aggagtcgtcgatggcccca

SEQ ID NO: 170868 - DNA, 20 bp, synthetic construct
  source 1..20: mol_type = other DNA
gaggagtcgtcgatggcccc

SEQ ID NO: 170869 - DNA, 20 bp, synthetic construct
  source 1..20: mol_type = other DNA
ggaggagtcgtcgatggccc

SEQ ID NO: 170870 - DNA, 20 bp, synthetic construct
  source 1..20: mol_type = other DNA
gggaggagtcgtcgatggcc

SEQ ID NO: 170871 - DNA, 20 bp, synthetic construct
  source 1..20: mol_type = other DNA
ggggaggagtcgtcgatggc

SEQ ID NO: 170872 - DNA, 20 bp, synthetic construct
  source 1..20: mol_type = other DNA
tggggaggagtcgtcgatgg

SEQ ID NO: 170873 - DNA, 20 bp, synthetic construct
  source 1..20: mol_type = other DNA
atggggaggagtcgtcgatg

SEQ ID NO: 170874 - DNA, 20 bp, synthetic construct
  source 1..20: mol_type = other DNA
aatggggaggagtcgtcgat

SEQ ID NO: 170875 - DNA, 20 bp, synthetic construct
  source 1..20: mol_type = other DNA
gaatggggaggagtcgtcga

SEQ ID NO: 170876 - DNA, 20 bp, synthetic construct
  source 1..20: mol_type = other DNA
ggaatggggaggagtcgtcg

SEQ ID NO: 170877 - DNA, 20 bp, synthetic construct
  source 1..20: mol_type = other DNA
gggaatggggaggagtcgtc

SEQ ID NO: 170878 - DNA, 20 bp, synthetic construct
  source 1..20: mol_type = other DNA
tgggaatggggaggagtcgt

SEQ ID NO: 170879 - DNA, 20 bp, synthetic construct
  source 1..20: mol_type = other DNA
ctgggaatggggaggagtcg

SEQ ID NO: 170880 - DNA, 20 bp, synthetic construct
  source 1..20: mol_type = other DNA
gctgggaatggggaggagtc

SEQ ID NO: 170881 - DNA, 20 bp, synthetic construct
  source 1..20: mol_type = other DNA
tgctgggaatggggaggagt

SEQ ID NO: 170882 - DNA, 20 bp, synthetic construct
  source 1..20: mol_type = other DNA
ctgctgggaatggggaggag

SEQ ID NO: 170883 - DNA, 20 bp, synthetic construct
  source 1..20: mol_type = other DNA
cctgctgggaatggggagga

SEQ ID NO: 170884 - DNA, 20 bp, synthetic construct
  source 1..20: mol_type = other DNA
gcctgctgggaatggggagg

SEQ ID NO: 170885 - DNA, 20 bp, synthetic construct
  source 1..20: mol_type = other DNA
cgcctgctgggaatggggag

SEQ ID NO: 170886 - DNA, 20 bp, synthetic construct
  source 1..20: mol_type = other DNA
ccgcctgctgggaatgggga

SEQ ID NO: 170887 - DNA, 20 bp, synthetic construct
  source 1..20: mol_type = other DNA
cccgcctgctgggaatgggg

SEQ ID NO: 170888 - DNA, 20 bp, synthetic construct
  source 1..20: mol_type = other DNA
tcccgcctgctgggaatggg

SEQ ID NO: 170889 - DNA, 20 bp, synthetic construct
  source 1..20: mol_type = other DNA
ctcccgcctgctgggaatgg

SEQ ID NO: 170890 - DNA, 20 bp, synthetic construct
  source 1..20: mol_type = other DNA
gctcccgcctgctgggaatg

SEQ ID NO: 170891 - DNA, 20 bp, synthetic construct
  source 1..20: mol_type = other DNA
agctcccgcctgctgggaat

SEQ ID NO: 170892 - DNA, 20 bp, synthetic construct
  source 1..20: mol_type = other DNA
gagctcccgcctgctgggaa

SEQ ID NO: 170893 - DNA, 20 bp, synthetic construct
  source 1..20: mol_type = other DNA
agagctcccgcctgctggga

SEQ ID NO: 170894 - DNA, 20 bp, synthetic construct
  source 1..20: mol_type = other DNA
aagagctcccgcctgctggg

SEQ ID NO: 170895 - DNA, 20 bp, synthetic construct
  source 1..20: mol_type = other DNA
taagagctcccgcctgctgg

SEQ ID NO: 170896 - DNA, 20 bp, synthetic construct
  source 1..20: mol_type = other DNA
gtaagagctcccgcctgctg

SEQ ID NO: 170897 - DNA, 20 bp, synthetic construct
  source 1..20: mol_type = other DNA
tgtaagagctcccgcctgct

SEQ ID NO: 170898 - DNA, 20 bp, synthetic construct
  source 1..20: mol_type = other DNA
atgtaagagctcccgcctgc

SEQ ID NO: 170899 - DNA, 20 bp, synthetic construct
  source 1..20: mol_type = other DNA
aatgtaagagctcccgcctg

SEQ ID NO: 170900 - DNA, 20 bp, synthetic construct
  source 1..20: mol_type = other DNA
gaatgtaagagctcccgcct

SEQ ID NO: 170901 - DNA, 20 bp, synthetic construct
  source 1..20: mol_type = other DNA
ggaatgtaagagctcccgcc

SEQ ID NO: 170902 - DNA, 20 bp, synthetic construct
  source 1..20: mol_type = other DNA
cggaatgtaagagctcccgc

SEQ ID NO: 170903 - DNA, 20 bp, synthetic construct
  source 1..20: mol_type = other DNA
tcggaatgtaagagctcccg

SEQ ID NO: 170904 - DNA, 20 bp, synthetic construct
  source 1..20: mol_type = other DNA
ctcggaatgtaagagctccc

SEQ ID NO: 170905 - DNA, 20 bp, synthetic construct
  source 1..20: mol_type = other DNA
gctcggaatgtaagagctcc

SEQ ID NO: 170906 - DNA, 20 bp, synthetic construct
  source 1..20: mol_type = other DNA
cgctcggaatgtaagagctc

SEQ ID NO: 170907 - DNA, 20 bp, synthetic construct
  source 1..20: mol_type = other DNA
tcgctcggaatgtaagagct

SEQ ID NO: 170908 - DNA, 20 bp, synthetic construct
  source 1..20: mol_type = other DNA
ctcgctcggaatgtaagagc

SEQ ID NO: 170909 - DNA, 20 bp, synthetic construct
  source 1..20: mol_type = other DNA
actcgctcggaatgtaagag

SEQ ID NO: 170910 - DNA, 20 bp, synthetic construct
  source 1..20: mol_type = other DNA
cactcgctcggaatgtaaga

SEQ ID NO: 170911 - DNA, 20 bp, synthetic construct
  source 1..20: mol_type = other DNA
tcactcgctcggaatgtaag

SEQ ID NO: 170912 - DNA, 20 bp, synthetic construct
  source 1..20: mol_type = other DNA
gtcactcgctcggaatgtaa

SEQ ID NO: 170913 - DNA, 20 bp, synthetic construct
  source 1..20: mol_type = other DNA
ggtcactcgctcggaatgta

SEQ ID NO: 170914 - DNA, 20 bp, synthetic construct
  source 1..20: mol_type = other DNA
gggtcactcgctcggaatgt

SEQ ID NO: 170915 - DNA, 20 bp, synthetic construct
  source 1..20: mol_type = other DNA
ggggtcactcgctcggaatg

SEQ ID NO: 170916 - DNA, 20 bp, synthetic construct
  source 1..20: mol_type = other DNA
aggggtcactcgctcggaat

SEQ ID NO: 170917 - DNA, 20 bp, synthetic construct
  source 1..20: mol_type = other DNA
gaggggtcactcgctcggaa

SEQ ID NO: 170918 - DNA, 20 bp, synthetic construct
  source 1..20: mol_type = other DNA
agaggggtcactcgctcgga

SEQ ID NO: 170919 - DNA, 20 bp, synthetic construct
  source 1..20: mol_type = other DNA
gagaggggtcactcgctcgg

SEQ ID NO: 170920 - DNA, 20 bp, synthetic construct
  source 1..20: mol_type = other DNA
tgagaggggtcactcgctcg

SEQ ID NO: 170921 - DNA, 20 bp, synthetic construct
  source 1..20: mol_type = other DNA
gtgagaggggtcactcgctc

SEQ ID NO: 170922 - DNA, 20 bp, synthetic construct
  source 1..20: mol_type = other DNA
ggtgagaggggtcactcgct

SEQ ID NO: 170923 - DNA, 20 bp, synthetic construct
  source 1..20: mol_type = other DNA
gggtgagaggggtcactcgc

SEQ ID NO: 170924 - DNA, 20 bp, synthetic construct
  source 1..20: mol_type = other DNA
agggtgagaggggtcactcg

SEQ ID NO: 170925 - DNA, 20 bp, synthetic construct
  source 1..20: mol_type = other DNA
gagggtgagaggggtcactc

SEQ ID NO: 170926 - DNA, 20 bp, synthetic construct
  source 1..20: mol_type = other DNA
agagggtgagaggggtcact

SEQ ID NO: 170927 - DNA, 20 bp, synthetic construct
  source 1..20: mol_type = other DNA
cagagggtgagaggggtcac

SEQ ID NO: 170928 - DNA, 20 bp, synthetic construct
  source 1..20: mol_type = other DNA
ccagagggtgagaggggtca

SEQ ID NO: 170929 - DNA, 20 bp, synthetic construct
  source 1..20: mol_type = other DNA
gccagagggtgagaggggtc

SEQ ID NO: 170930 - DNA, 20 bp, synthetic construct
  source 1..20: mol_type = other DNA
cgccagagggtgagaggggt

SEQ ID NO: 170931 - DNA, 20 bp, synthetic construct
  source 1..20: mol_type = other DNA
gcgccagagggtgagagggg

SEQ ID NO: 170932 - DNA, 20 bp, synthetic construct
  source 1..20: mol_type = other DNA
agcgccagagggtgagaggg

SEQ ID NO: 170933 - DNA, 20 bp, synthetic construct
  source 1..20: mol_type = other DNA
gagcgccagagggtgagagg

SEQ ID NO: 170934 - DNA, 20 bp, synthetic construct
  source 1..20: mol_type = other DNA
tgagcgccagagggtgagag

SEQ ID NO: 170935 - DNA, 20 bp, synthetic construct
  source 1..20: mol_type = other DNA
gtgagcgccagagggtgaga

SEQ ID NO: 170936 - DNA, 20 bp, synthetic construct
  source 1..20: mol_type = other DNA
tgtgagcgccagagggtgag

SEQ ID NO: 170937 - DNA, 20 bp, synthetic construct
  source 1..20: mol_type = other DNA
gtgtgagcgccagagggtga

SEQ ID NO: 170938 - DNA, 20 bp, synthetic construct
  source 1..20: mol_type = other DNA
tgtgtgagcgccagagggtg

SEQ ID NO: 170939 - DNA, 20 bp, synthetic construct
  source 1..20: mol_type = other DNA
gtgtgtgagcgccagagggt

SEQ ID NO: 170940 - DNA, 20 bp, synthetic construct
  source 1..20: mol_type = other DNA
ggtgtgtgagcgccagaggg

SEQ ID NO: 170941 - DNA, 20 bp, synthetic construct
  source 1..20: mol_type = other DNA
aggtgtgtgagcgccagagg

SEQ ID NO: 170942 - DNA, 20 bp, synthetic construct
  source 1..20: mol_type = other DNA
caggtgtgtgagcgccagag

SEQ ID NO: 170943 - DNA, 20 bp, synthetic construct
  source 1..20: mol_type = other DNA
acaggtgtgtgagcgccaga

SEQ ID NO: 170944 - DNA, 20 bp, synthetic construct
  source 1..20: mol_type = other DNA
tacaggtgtgtgagcgccag

SEQ ID NO: 170945 - DNA, 20 bp, synthetic construct
  source 1..20: mol_type = other DNA
ttacaggtgtgtgagcgcca

SEQ ID NO: 170946 - DNA, 20 bp, synthetic construct
  source 1..20: mol_type = other DNA
gttacaggtgtgtgagcgcc

SEQ ID NO: 170947 - DNA, 20 bp, synthetic construct
  source 1..20: mol_type = other DNA
agttacaggtgtgtgagcgc

SEQ ID NO: 170948 - DNA, 20 bp, synthetic construct
  source 1..20: mol_type = other DNA
gagttacaggtgtgtgagcg

SEQ ID NO: 170949 - DNA, 20 bp, synthetic construct
  source 1..20: mol_type = other DNA
ggagttacaggtgtgtgagc

SEQ ID NO: 170950 - DNA, 20 bp, synthetic construct
  source 1..20: mol_type = other DNA
tggagttacaggtgtgtgag

SEQ ID NO: 170951 - DNA, 20 bp, synthetic construct
  source 1..20: mol_type = other DNA
ttggagttacaggtgtgtga

SEQ ID NO: 170952 - DNA, 20 bp, synthetic construct
  source 1..20: mol_type = other DNA
tttggagttacaggtgtgtg

SEQ ID NO: 170953 - DNA, 20 bp, synthetic construct
  source 1..20: mol_type = other DNA
gtttggagttacaggtgtgt

SEQ ID NO: 170954 - DNA, 20 bp, synthetic construct
  source 1..20: mol_type = other DNA
ggtttggagttacaggtgtg

SEQ ID NO: 170955 - DNA, 20 bp, synthetic construct
  source 1..20: mol_type = other DNA
aggtttggagttacaggtgt

SEQ ID NO: 170956 - DNA, 20 bp, synthetic construct
  source 1..20: mol_type = other DNA
gaggtttggagttacaggtg

SEQ ID NO: 170957 - DNA, 20 bp, synthetic construct
  source 1..20: mol_type = other DNA
ggaggtttggagttacaggt

SEQ ID NO: 170958 - DNA, 20 bp, synthetic construct
  source 1..20: mol_type = other DNA
cggaggtttggagttacagg

SEQ ID NO: 170959 - DNA, 20 bp, synthetic construct
  source 1..20: mol_type = other DNA
acggaggtttggagttacag

SEQ ID NO: 170960 - DNA, 20 bp, synthetic construct
  source 1..20: mol_type = other DNA
gacggaggtttggagttaca

SEQ ID NO: 170961 - DNA, 20 bp, synthetic construct
  source 1..20: mol_type = other DNA
agacggaggtttggagttac

SEQ ID NO: 170962 - DNA, 20 bp, synthetic construct
  source 1..20: mol_type = other DNA
gagacggaggtttggagtta

SEQ ID NO: 170963 - DNA, 20 bp, synthetic construct
  source 1..20: mol_type = other DNA
tgagacggaggtttggagtt

SEQ ID NO: 170964 - DNA, 20 bp, synthetic construct
  source 1..20: mol_type = other DNA
ctgagacggaggtttggagt

SEQ ID NO: 170965 - DNA, 20 bp, synthetic construct
  source 1..20: mol_type = other DNA
tctgagacggaggtttggag

SEQ ID NO: 170966 - DNA, 20 bp, synthetic construct
  source 1..20: mol_type = other DNA
ttctgagacggaggtttgga

SEQ ID NO: 170967 - DNA, 20 bp, synthetic construct
  source 1..20: mol_type = other DNA
attctgagacggaggtttgg

SEQ ID NO: 170968 - DNA, 20 bp, synthetic construct
  source 1..20: mol_type = other DNA
cattctgagacggaggtttg

SEQ ID NO: 170969 - DNA, 20 bp, synthetic construct
  source 1..20: mol_type = other DNA
ccattctgagacggaggttt

SEQ ID NO: 170970 - DNA, 20 bp, synthetic construct
  source 1..20: mol_type = other DNA
accattctgagacggaggtt

SEQ ID NO: 170971 - DNA, 20 bp, synthetic construct
  source 1..20: mol_type = other DNA
gaccattctgagacggaggt

SEQ ID NO: 170972 - DNA, 20 bp, synthetic construct
  source 1..20: mol_type = other DNA
ggaccattctgagacggagg

SEQ ID NO: 170973 - DNA, 20 bp, synthetic construct
  source 1..20: mol_type = other DNA
tggaccattctgagacggag

SEQ ID NO: 170974 - DNA, 20 bp, synthetic construct
  source 1..20: mol_type = other DNA
ctggaccattctgagacgga

SEQ ID NO: 170975 - DNA, 20 bp, synthetic construct
  source 1..20: mol_type = other DNA
cctggaccattctgagacgg

SEQ ID NO: 170976 - DNA, 20 bp, synthetic construct
  source 1..20: mol_type = other DNA
gcctggaccattctgagacg

SEQ ID NO: 170977 - DNA, 20 bp, synthetic construct
  source 1..20: mol_type = other DNA
agcctggaccattctgagac

SEQ ID NO: 170978 - DNA, 20 bp, synthetic construct
  source 1..20: mol_type = other DNA
cagcctggaccattctgaga

SEQ ID NO: 170979 - DNA, 20 bp, synthetic construct
  source 1..20: mol_type = other DNA
ccagcctggaccattctgag

SEQ ID NO: 170980 - DNA, 20 bp, synthetic construct
  source 1..20: mol_type = other DNA
tccagcctggaccattctga

SEQ ID NO: 170981 - DNA, 20 bp, synthetic construct
  source 1..20: mol_type = other DNA
ttccagcctggaccattctg

SEQ ID NO: 170982 - DNA, 20 bp, synthetic construct
  source 1..20: mol_type = other DNA
cttccagcctggaccattct

SEQ ID NO: 170983 - DNA, 20 bp, synthetic construct
  source 1..20: mol_type = other DNA
ccttccagcctggaccattc

SEQ ID NO: 170984 - DNA, 20 bp, synthetic construct
  source 1..20: mol_type = other DNA
cccttccagcctggaccatt

SEQ ID NO: 170985 - DNA, 20 bp, synthetic construct
  source 1..20: mol_type = other DNA
tcccttccagcctggaccat

SEQ ID NO: 170986 - DNA, 20 bp, synthetic construct
  source 1..20: mol_type = other DNA
atcccttccagcctggacca

SEQ ID NO: 170987 - DNA, 20 bp, synthetic construct
  source 1..20: mol_type = other DNA
catcccttccagcctggacc

SEQ ID NO: 170988 - DNA, 20 bp, synthetic construct
  source 1..20: mol_type = other DNA
tcatcccttccagcctggac

SEQ ID NO: 170989 - DNA, 20 bp, synthetic construct
  source 1..20: mol_type = other DNA
atcatcccttccagcctgga

SEQ ID NO: 170990 - DNA, 20 bp, synthetic construct
  source 1..20: mol_type = other DNA
catcatcccttccagcctgg

SEQ ID NO: 170991 - DNA, 20 bp, synthetic construct
  source 1..20: mol_type = other DNA
ccatcatcccttccagcctg

SEQ ID NO: 170992 - DNA, 20 bp, synthetic construct
  source 1..20: mol_type = other DNA
cccatcatcccttccagcct

SEQ ID NO: 170993 - DNA, 20 bp, synthetic construct
  source 1..20: mol_type = other DNA
ccccatcatcccttccagcc

SEQ ID NO: 170994 - DNA, 20 bp, synthetic construct
  source 1..20: mol_type = other DNA
cccccatcatcccttccagc

SEQ ID NO: 170995 - DNA, 20 bp, synthetic construct
  source 1..20: mol_type = other DNA
gcccccatcatcccttccag

SEQ ID NO: 170996 - DNA, 20 bp, synthetic construct
  source 1..20: mol_type = other DNA
agcccccatcatcccttcca

SEQ ID NO: 170997 - DNA, 20 bp, synthetic construct
  source 1..20: mol_type = other DNA
gagcccccatcatcccttcc

SEQ ID NO: 170998 - DNA, 20 bp, synthetic construct
  source 1..20: mol_type = other DNA
ggagcccccatcatcccttc

SEQ ID NO: 170999 - DNA, 20 bp, synthetic construct
  source 1..20: mol_type = other DNA
cggagcccccatcatccctt

SEQ ID NO: 171000 - DNA, 20 bp, synthetic construct
  source 1..20: mol_type = other DNA
tcggagcccccatcatccct

SEQ ID NO: 171001 - DNA, 20 bp, synthetic construct
  source 1..20: mol_type = other DNA
gtcggagcccccatcatccc

SEQ ID NO: 171002 - DNA, 20 bp, synthetic construct
  source 1..20: mol_type = other DNA
tgtcggagcccccatcatcc

SEQ ID NO: 171003 - DNA, 20 bp, synthetic construct
  source 1..20: mol_type = other DNA
ctgtcggagcccccatcatc

SEQ ID NO: 171004 - DNA, 20 bp, synthetic construct
  source 1..20: mol_type = other DNA
gctgtcggagcccccatcat

SEQ ID NO: 171005 - DNA, 20 bp, synthetic construct
  source 1..20: mol_type = other DNA
cgctgtcggagcccccatca

SEQ ID NO: 171006 - DNA, 20 bp, synthetic construct
  source 1..20: mol_type = other DNA
tcgctgtcggagcccccatc

SEQ ID NO: 171007 - DNA, 20 bp, synthetic construct
  source 1..20: mol_type = other DNA
gtcgctgtcggagcccccat

SEQ ID NO: 171008 - DNA, 20 bp, synthetic construct
  source 1..20: mol_type = other DNA
agtcgctgtcggagccccca

SEQ ID NO: 171009 - DNA, 20 bp, synthetic construct
  source 1..20: mol_type = other DNA
cagtcgctgtcggagccccc

SEQ ID NO: 171010 - DNA, 20 bp, synthetic construct
  source 1..20: mol_type = other DNA
gcagtcgctgtcggagcccc

SEQ ID NO: 171011 - DNA, 20 bp, synthetic construct
  source 1..20: mol_type = other DNA
ggcagtcgctgtcggagccc

SEQ ID NO: 171012 - DNA, 20 bp, synthetic construct
  source 1..20: mol_type = other DNA
aggcagtcgctgtcggagcc

SEQ ID NO: 171013 - DNA, 20 bp, synthetic construct
  source 1..20: mol_type = other DNA
taggcagtcgctgtcggagc

SEQ ID NO: 171014 - DNA, 20 bp, synthetic construct
  source 1..20: mol_type = other DNA
ctaggcagtcgctgtcggag

SEQ ID NO: 171015 - DNA, 20 bp, synthetic construct
  source 1..20: mol_type = other DNA
gctaggcagtcgctgtcgga

SEQ ID NO: 171016 - DNA, 20 bp, synthetic construct
  source 1..20: mol_type = other DNA
agctaggcagtcgctgtcgg

SEQ ID NO: 171017 - DNA, 20 bp, synthetic construct
  source 1..20: mol_type = other DNA
gagctaggcagtcgctgtcg

SEQ ID NO: 171018 - DNA, 20 bp, synthetic construct
  source 1..20: mol_type = other DNA
tgagctaggcagtcgctgtc

SEQ ID NO: 171019 - DNA, 20 bp, synthetic construct
  source 1..20: mol_type = other DNA
gtgagctaggcagtcgctgt

SEQ ID NO: 171020 - DNA, 20 bp, synthetic construct
  source 1..20: mol_type = other DNA
ggtgagctaggcagtcgctg

SEQ ID NO: 171021 - DNA, 20 bp, synthetic construct
  source 1..20: mol_type = other DNA
gggtgagctaggcagtcgct

SEQ ID NO: 171022 - DNA, 20 bp, synthetic construct
  source 1..20: mol_type = other DNA
ggggtgagctaggcagtcgc

SEQ ID NO: 171023 - DNA, 20 bp, synthetic construct
  source 1..20: mol_type = other DNA
aggggtgagctaggcagtcg

SEQ ID NO: 171024 - DNA, 20 bp, synthetic construct
  source 1..20: mol_type = other DNA
gaggggtgagctaggcagtc

SEQ ID NO: 171025 - DNA, 20 bp, synthetic construct
  source 1..20: mol_type = other DNA
agaggggtgagctaggcagt

SEQ ID NO: 171026 - DNA, 20 bp, synthetic construct
  source 1..20: mol_type = other DNA
cagaggggtgagctaggcag

SEQ ID NO: 171027 - DNA, 20 bp, synthetic construct
  source 1..20: mol_type = other DNA
gcagaggggtgagctaggca

SEQ ID NO: 171028 - DNA, 20 bp, synthetic construct
  source 1..20: mol_type = other DNA
cgcagaggggtgagctaggc

SEQ ID NO: 171029 - DNA, 20 bp, synthetic construct
  source 1..20: mol_type = other DNA
acgcagaggggtgagctagg

SEQ ID NO: 171030 - DNA, 20 bp, synthetic construct
  source 1..20: mol_type = other DNA
cacgcagaggggtgagctag

SEQ ID NO: 171031 - DNA, 20 bp, synthetic construct
  source 1..20: mol_type = other DNA
gcacgcagaggggtgagcta

SEQ ID NO: 171032 - DNA, 20 bp, synthetic construct
  source 1..20: mol_type = other DNA
agcacgcagaggggtgagct

SEQ ID NO: 171033 - DNA, 20 bp, synthetic construct
  source 1..20: mol_type = other DNA
gagcacgcagaggggtgagc

SEQ ID NO: 171034 - DNA, 20 bp, synthetic construct
  source 1..20: mol_type = other DNA
tgagcacgcagaggggtgag

SEQ ID NO: 171035 - DNA, 20 bp, synthetic construct
  source 1..20: mol_type = other DNA
ctgagcacgcagaggggtga

SEQ ID NO: 171036 - DNA, 20 bp, synthetic construct
  source 1..20: mol_type = other DNA
cctgagcacgcagaggggtg

SEQ ID NO: 171037 - DNA, 20 bp, synthetic construct
  source 1..20: mol_type = other DNA
gcctgagcacgcagaggggt

SEQ ID NO: 171038 - DNA, 20 bp, synthetic construct
  source 1..20: mol_type = other DNA
agcctgagcacgcagagggg

SEQ ID NO: 171039 - DNA, 20 bp, synthetic construct
  source 1..20: mol_type = other DNA
gagcctgagcacgcagaggg

SEQ ID NO: 171040 - DNA, 20 bp, synthetic construct
  source 1..20: mol_type = other DNA
ggagcctgagcacgcagagg

SEQ ID NO: 171041 - DNA, 20 bp, synthetic construct
  source 1..20: mol_type = other DNA
tggagcctgagcacgcagag

SEQ ID NO: 171042 - DNA, 20 bp, synthetic construct
  source 1..20: mol_type = other DNA
ctggagcctgagcacgcaga

SEQ ID NO: 171043 - DNA, 20 bp, synthetic construct
  source 1..20: mol_type = other DNA
cctggagcctgagcacgcag

SEQ ID NO: 171044 - DNA, 20 bp, synthetic construct
  source 1..20: mol_type = other DNA
gcctggagcctgagcacgca

SEQ ID NO: 171045 - DNA, 20 bp, synthetic construct
  source 1..20: mol_type = other DNA
agcctggagcctgagcacgc

SEQ ID NO: 171046 - DNA, 20 bp, synthetic construct
  source 1..20: mol_type = other DNA
gagcctggagcctgagcacg

SEQ ID NO: 171047 - DNA, 20 bp, synthetic construct
  source 1..20: mol_type = other DNA
tgagcctggagcctgagcac

SEQ ID NO: 171048 - DNA, 20 bp, synthetic construct
  source 1..20: mol_type = other DNA
ctgagcctggagcctgagca

SEQ ID NO: 171049 - DNA, 20 bp, synthetic construct
  source 1..20: mol_type = other DNA
gctgagcctggagcctgagc

SEQ ID NO: 171050 - DNA, 20 bp, synthetic construct
  source 1..20: mol_type = other DNA
tgctgagcctggagcctgag

SEQ ID NO: 171051 - DNA, 20 bp, synthetic construct
  source 1..20: mol_type = other DNA
ctgctgagcctggagcctga

SEQ ID NO: 171052 - DNA, 20 bp, synthetic construct
  source 1..20: mol_type = other DNA
cctgctgagcctggagcctg

SEQ ID NO: 171053 - DNA, 20 bp, synthetic construct
  source 1..20: mol_type = other DNA
tcctgctgagcctggagcct

SEQ ID NO: 171054 - DNA, 20 bp, synthetic construct
  source 1..20: mol_type = other DNA
gtcctgctgagcctggagcc

SEQ ID NO: 171055 - DNA, 20 bp, synthetic construct
  source 1..20: mol_type = other DNA
ggtcctgctgagcctggagc

SEQ ID NO: 171056 - DNA, 20 bp, synthetic construct
  source 1..20: mol_type = other DNA
tggtcctgctgagcctggag

SEQ ID NO: 171057 - DNA, 20 bp, synthetic construct
  source 1..20: mol_type = other DNA
ttggtcctgctgagcctgga

SEQ ID NO: 171058 - DNA, 20 bp, synthetic construct
  source 1..20: mol_type = other DNA
attggtcctgctgagcctgg

SEQ ID NO: 171059 - DNA, 20 bp, synthetic construct
  source 1..20: mol_type = other DNA
aattggtcctgctgagcctg

SEQ ID NO: 171060 - DNA, 20 bp, synthetic construct
  source 1..20: mol_type = other DNA
aaattggtcctgctgagcct

SEQ ID NO: 171061 - DNA, 20 bp, synthetic construct
  source 1..20: mol_type = other DNA
caaattggtcctgctgagcc

SEQ ID NO: 171062 - DNA, 20 bp, synthetic construct
  source 1..20: mol_type = other DNA
tcaaattggtcctgctgagc

SEQ ID NO: 171063 - DNA, 20 bp, synthetic construct
  source 1..20: mol_type = other DNA
ctcaaattggtcctgctgag

SEQ ID NO: 171064 - DNA, 20 bp, synthetic construct
  source 1..20: mol_type = other DNA
actcaaattggtcctgctga

SEQ ID NO: 171065 - DNA, 20 bp, synthetic construct
  source 1..20: mol_type = other DNA
aactcaaattggtcctgctg

SEQ ID NO: 171066 - DNA, 20 bp, synthetic construct
  source 1..20: mol_type = other DNA
gaactcaaattggtcctgct

SEQ ID NO: 171067 - DNA, 20 bp, synthetic construct
  source 1..20: mol_type = other DNA
agaactcaaattggtcctgc

SEQ ID NO: 171068 - DNA, 20 bp, synthetic construct
  source 1..20: mol_type = other DNA
tagaactcaaattggtcctg

SEQ ID NO: 171069 - DNA, 20 bp, synthetic construct
  source 1..20: mol_type = other DNA
atagaactcaaattggtcct

SEQ ID NO: 171070 - DNA, 20 bp, synthetic construct
  source 1..20: mol_type = other DNA
gatagaactcaaattggtcc

SEQ ID NO: 171071 - DNA, 20 bp, synthetic construct
  source 1..20: mol_type = other DNA
agatagaactcaaattggtc

SEQ ID NO: 171072 - DNA, 20 bp, synthetic construct
  source 1..20: mol_type = other DNA
cagatagaactcaaattggt

SEQ ID NO: 171073 - DNA, 20 bp, synthetic construct
  source 1..20: mol_type = other DNA
tcagatagaactcaaattgg

SEQ ID NO: 171074 - DNA, 20 bp, synthetic construct
  source 1..20: mol_type = other DNA
atcagatagaactcaaattg

SEQ ID NO: 171075 - DNA, 20 bp, synthetic construct
  source 1..20: mol_type = other DNA
gatcagatagaactcaaatt

SEQ ID NO: 171076 - DNA, 20 bp, synthetic construct
  source 1..20: mol_type = other DNA
ggatcagatagaactcaaat

SEQ ID NO: 171077 - DNA, 20 bp, synthetic construct
  source 1..20: mol_type = other DNA
gggatcagatagaactcaaa

SEQ ID NO: 171078 - DNA, 20 bp, synthetic construct
  source 1..20: mol_type = other DNA
ggggatcagatagaactcaa

SEQ ID NO: 171079 - DNA, 20 bp, synthetic construct
  source 1..20: mol_type = other DNA
gggggatcagatagaactca

SEQ ID NO: 171080 - DNA, 20 bp, synthetic construct
  source 1..20: mol_type = other DNA
agggggatcagatagaactc

SEQ ID NO: 171081 - DNA, 20 bp, synthetic construct
  source 1..20: mol_type = other DNA
gagggggatcagatagaact

SEQ ID NO: 171082 - DNA, 20 bp, synthetic construct
  source 1..20: mol_type = other DNA
cgagggggatcagatagaac

SEQ ID NO: 171083 - DNA, 20 bp, synthetic construct
  source 1..20: mol_type = other DNA
ccgagggggatcagatagaa

SEQ ID NO: 171084 - DNA, 20 bp, synthetic construct
  source 1..20: mol_type = other DNA
gccgagggggatcagataga

SEQ ID NO: 171085 - DNA, 20 bp, synthetic construct
  source 1..20: mol_type = other DNA
ggccgagggggatcagatag

SEQ ID NO: 171086 - DNA, 20 bp, synthetic construct
  source 1..20: mol_type = other DNA
gggccgagggggatcagata

SEQ ID NO: 171087 - DNA, 20 bp, synthetic construct
  source 1..20: mol_type = other DNA
ggggccgagggggatcagat

SEQ ID NO: 171088 - DNA, 20 bp, synthetic construct
  source 1..20: mol_type = other DNA
aggggccgagggggatcaga

SEQ ID NO: 171089 - DNA, 20 bp, synthetic construct
  source 1..20: mol_type = other DNA
aaggggccgagggggatcag

SEQ ID NO: 171090 - DNA, 20 bp, synthetic construct
  source 1..20: mol_type = other DNA
taaggggccgagggggatca

SEQ ID NO: 171091 - DNA, 20 bp, synthetic construct
  source 1..20: mol_type = other DNA
ttaaggggccgagggggatc

SEQ ID NO: 171092 - DNA, 20 bp, synthetic construct
  source 1..20: mol_type = other DNA
gttaaggggccgagggggat

SEQ ID NO: 171093 - DNA, 20 bp, synthetic construct
  source 1..20: mol_type = other DNA
agttaaggggccgaggggga

SEQ ID NO: 171094 - DNA, 20 bp, synthetic construct
  source 1..20: mol_type = other DNA
cagttaaggggccgaggggg

SEQ ID NO: 171095 - DNA, 20 bp, synthetic construct
  source 1..20: mol_type = other DNA
tcagttaaggggccgagggg

SEQ ID NO: 171096 - DNA, 20 bp, synthetic construct
  source 1..20: mol_type = other DNA
gtcagttaaggggccgaggg

SEQ ID NO: 171097 - DNA, 20 bp, synthetic construct
  source 1..20: mol_type = other DNA
ggtcagttaaggggccgagg

SEQ ID NO: 171098 - DNA, 20 bp, synthetic construct
  source 1..20: mol_type = other DNA
gggtcagttaaggggccgag

SEQ ID NO: 171099 - DNA, 20 bp, synthetic construct
  source 1..20: mol_type = other DNA
tgggtcagttaaggggccga

SEQ ID NO: 171100 - DNA, 20 bp, synthetic construct
  source 1..20: mol_type = other DNA
atgggtcagttaaggggccg

SEQ ID NO: 171101 - DNA, 20 bp, synthetic construct
  source 1..20: mol_type = other DNA
gatgggtcagttaaggggcc

SEQ ID NO: 171102 - DNA, 20 bp, synthetic construct
  source 1..20: mol_type = other DNA
ggatgggtcagttaaggggc

SEQ ID NO: 171103 - DNA, 20 bp, synthetic construct
  source 1..20: mol_type = other DNA
aggatgggtcagttaagggg

SEQ ID NO: 171104 - DNA, 20 bp, synthetic construct
  source 1..20: mol_type = other DNA
taggatgggtcagttaaggg

SEQ ID NO: 171105 - DNA, 20 bp, synthetic construct
  source 1..20: mol_type = other DNA
gtaggatgggtcagttaagg

SEQ ID NO: 171106 - DNA, 20 bp, synthetic construct
  source 1..20: mol_type = other DNA
tgtaggatgggtcagttaag

SEQ ID NO: 171107 - DNA, 20 bp, synthetic construct
  source 1..20: mol_type = other DNA
ctgtaggatgggtcagttaa

SEQ ID NO: 171108 - DNA, 20 bp, synthetic construct
  source 1..20: mol_type = other DNA
cctgtaggatgggtcagtta

SEQ ID NO: 171109 - DNA, 20 bp, synthetic construct
  source 1..20: mol_type = other DNA
tcctgtaggatgggtcagtt

SEQ ID NO: 171110 - DNA, 20 bp, synthetic construct
  source 1..20: mol_type = other DNA
ctcctgtaggatgggtcagt

SEQ ID NO: 171111 - DNA, 20 bp, synthetic construct
  source 1..20: mol_type = other DNA
tctcctgtaggatgggtcag

SEQ ID NO: 171112 - DNA, 20 bp, synthetic construct
  source 1..20: mol_type = other DNA
gtctcctgtaggatgggtca

SEQ ID NO: 171113 - DNA, 20 bp, synthetic construct
  source 1..20: mol_type = other DNA
tgtctcctgtaggatgggtc

SEQ ID NO: 171114 - DNA, 20 bp, synthetic construct
  source 1..20: mol_type = other DNA
ctgtctcctgtaggatgggt

SEQ ID NO: 171115 - DNA, 20 bp, synthetic construct
  source 1..20: mol_type = other DNA
cctgtctcctgtaggatggg

SEQ ID NO: 171116 - DNA, 20 bp, synthetic construct
  source 1..20: mol_type = other DNA
ccctgtctcctgtaggatgg

SEQ ID NO: 171117 - DNA, 20 bp, synthetic construct
  source 1..20: mol_type = other DNA
tccctgtctcctgtaggatg

SEQ ID NO: 171118 - DNA, 20 bp, synthetic construct
  source 1..20: mol_type = other DNA
ttccctgtctcctgtaggat

SEQ ID NO: 171119 - DNA, 20 bp, synthetic construct
  source 1..20: mol_type = other DNA
tttccctgtctcctgtagga

SEQ ID NO: 171120 - DNA, 20 bp, synthetic construct
  source 1..20: mol_type = other DNA
atttccctgtctcctgtagg

SEQ ID NO: 171121 - DNA, 20 bp, synthetic construct
  source 1..20: mol_type = other DNA
catttccctgtctcctgtag

SEQ ID NO: 171122 - DNA, 20 bp, synthetic construct
  source 1..20: mol_type = other DNA
acatttccctgtctcctgta

SEQ ID NO: 171123 - DNA, 20 bp, synthetic construct
  source 1..20: mol_type = other DNA
gacatttccctgtctcctgt

SEQ ID NO: 171124 - DNA, 20 bp, synthetic construct
  source 1..20: mol_type = other DNA
agacatttccctgtctcctg

SEQ ID NO: 171125 - DNA, 20 bp, synthetic construct
  source 1..20: mol_type = other DNA
aagacatttccctgtctcct

SEQ ID NO: 171126 - DNA, 20 bp, synthetic construct
  source 1..20: mol_type = other DNA
aaagacatttccctgtctcc

SEQ ID NO: 171127 - DNA, 20 bp, synthetic construct
  source 1..20: mol_type = other DNA
gaaagacatttccctgtctc

SEQ ID NO: 171128 - DNA, 20 bp, synthetic construct
  source 1..20: mol_type = other DNA
ggaaagacatttccctgtct

SEQ ID NO: 171129 - DNA, 20 bp, synthetic construct
  source 1..20: mol_type = other DNA
aggaaagacatttccctgtc

SEQ ID NO: 171130 - DNA, 20 bp, synthetic construct
  source 1..20: mol_type = other DNA
taggaaagacatttccctgt

SEQ ID NO: 171131 - DNA, 20 bp, synthetic construct
  source 1..20: mol_type = other DNA
gtaggaaagacatttccctg

SEQ ID NO: 171132 - DNA, 20 bp, synthetic construct
  source 1..20: mol_type = other DNA
ggtaggaaagacatttccct

SEQ ID NO: 171133 - DNA, 20 bp, synthetic construct
  source 1..20: mol_type = other DNA
cggtaggaaagacatttccc

SEQ ID NO: 171134 - DNA, 20 bp, synthetic construct
  source 1..20: mol_type = other DNA
gcggtaggaaagacatttcc

SEQ ID NO: 171135 - DNA, 20 bp, synthetic construct
  source 1..20: mol_type = other DNA
cgcggtaggaaagacatttc

SEQ ID NO: 171136 - DNA, 20 bp, synthetic construct
  source 1..20: mol_type = other DNA
ccgcggtaggaaagacattt

SEQ ID NO: 171137 - DNA, 20 bp, synthetic construct
  source 1..20: mol_type = other DNA
accgcggtaggaaagacatt

SEQ ID NO: 171138 - DNA, 20 bp, synthetic construct
  source 1..20: mol_type = other DNA
aaccgcggtaggaaagacat

SEQ ID NO: 171139 - DNA, 20 bp, synthetic construct
  source 1..20: mol_type = other DNA
caaccgcggtaggaaagaca

SEQ ID NO: 171140 - DNA, 20 bp, synthetic construct
  source 1..20: mol_type = other DNA
tcaaccgcggtaggaaagac

SEQ ID NO: 171141 - DNA, 20 bp, synthetic construct
  source 1..20: mol_type = other DNA
atcaaccgcggtaggaaaga

SEQ ID NO: 171142 - DNA, 20 bp, synthetic construct
  source 1..20: mol_type = other DNA
aatcaaccgcggtaggaaag

SEQ ID NO: 171143 - DNA, 20 bp, synthetic construct
  source 1..20: mol_type = other DNA
gaatcaaccgcggtaggaaa

SEQ ID NO: 171144 - DNA, 20 bp, synthetic construct
  source 1..20: mol_type = other DNA
agaatcaaccgcggtaggaa

SEQ ID NO: 171145 - DNA, 20 bp, synthetic construct
  source 1..20: mol_type = other DNA
cagaatcaaccgcggtagga

SEQ ID NO: 171146 - DNA, 20 bp, synthetic construct
  source 1..20: mol_type = other DNA
ccagaatcaaccgcggtagg

SEQ ID NO: 171147 - DNA, 20 bp, synthetic construct
  source 1..20: mol_type = other DNA
cccagaatcaaccgcggtag

SEQ ID NO: 171148 - DNA, 20 bp, synthetic construct
  source 1..20: mol_type = other DNA
ccccagaatcaaccgcggta

SEQ ID NO: 171149 - DNA, 20 bp, synthetic construct
  source 1..20: mol_type = other DNA
accccagaatcaaccgcggt

SEQ ID NO: 171150 - DNA, 20 bp, synthetic construct
  source 1..20: mol_type = other DNA
caccccagaatcaaccgcgg

SEQ ID NO: 171151 - DNA, 20 bp, synthetic construct
  source 1..20: mol_type = other DNA
acaccccagaatcaaccgcg

SEQ ID NO: 171152 - DNA, 20 bp, synthetic construct
  source 1..20: mol_type = other DNA
gacaccccagaatcaaccgc

SEQ ID NO: 171153 - DNA, 20 bp, synthetic construct
  source 1..20: mol_type = other DNA
tgacaccccagaatcaaccg

SEQ ID NO: 171154 - DNA, 20 bp, synthetic construct
  source 1..20: mol_type = other DNA
atgacaccccagaatcaacc

SEQ ID NO: 171155 - DNA, 20 bp, synthetic construct
  source 1..20: mol_type = other DNA
aatgacaccccagaatcaac

SEQ ID NO: 171156 - DNA, 20 bp, synthetic construct
  source 1..20: mol_type = other DNA
aaatgacaccccagaatcaa

SEQ ID NO: 171157 - DNA, 20 bp, synthetic construct
  source 1..20: mol_type = other DNA
aaaatgacaccccagaatca

SEQ ID NO: 171158 - DNA, 20 bp, synthetic construct
  source 1..20: mol_type = other DNA
caaaatgacaccccagaatc

SEQ ID NO: 171159 - DNA, 20 bp, synthetic construct
  source 1..20: mol_type = other DNA
acaaaatgacaccccagaat

SEQ ID NO: 171160 - DNA, 20 bp, synthetic construct
  source 1..20: mol_type = other DNA
cacaaaatgacaccccagaa

SEQ ID NO: 171161 - DNA, 20 bp, synthetic construct
  source 1..20: mol_type = other DNA
acacaaaatgacaccccaga

SEQ ID NO: 171162 - DNA, 20 bp, synthetic construct
  source 1..20: mol_type = other DNA
aacacaaaatgacaccccag

SEQ ID NO: 171163 - DNA, 20 bp, synthetic construct
  source 1..20: mol_type = other DNA
aaacacaaaatgacacccca

SEQ ID NO: 171164 - DNA, 20 bp, synthetic construct
  source 1..20: mol_type = other DNA
aaaacacaaaatgacacccc

SEQ ID NO: 171165 - DNA, 20 bp, synthetic construct
  source 1..20: mol_type = other DNA
caaaacacaaaatgacaccc

SEQ ID NO: 171166 - DNA, 20 bp, synthetic construct
  source 1..20: mol_type = other DNA
acaaaacacaaaatgacacc

SEQ ID NO: 171167 - DNA, 20 bp, synthetic construct
  source 1..20: mol_type = other DNA
cacaaaacacaaaatgacac

SEQ ID NO: 171168 - DNA, 20 bp, synthetic construct
  source 1..20: mol_type = other DNA
tcacaaaacacaaaatgaca

SEQ ID NO: 171169 - DNA, 20 bp, synthetic construct
  source 1..20: mol_type = other DNA
atcacaaaacacaaaatgac

SEQ ID NO: 171170 - DNA, 20 bp, synthetic construct
  source 1..20: mol_type = other DNA
catcacaaaacacaaaatga

SEQ ID NO: 171171 - DNA, 20 bp, synthetic construct
  source 1..20: mol_type = other DNA
ccatcacaaaacacaaaatg

SEQ ID NO: 171172 - DNA, 20 bp, synthetic construct
  source 1..20: mol_type = other DNA
gccatcacaaaacacaaaat

SEQ ID NO: 171173 - DNA, 20 bp, synthetic construct
  source 1..20: mol_type = other DNA
agccatcacaaaacacaaaa

SEQ ID NO: 171174 - DNA, 20 bp, synthetic construct
  source 1..20: mol_type = other DNA
cagccatcacaaaacacaaa

SEQ ID NO: 171175 - DNA, 20 bp, synthetic construct
  source 1..20: mol_type = other DNA
gcagccatcacaaaacacaa

SEQ ID NO: 171176 - DNA, 20 bp, synthetic construct
  source 1..20: mol_type = other DNA
agcagccatcacaaaacaca

SEQ ID NO: 171177 - DNA, 20 bp, synthetic construct
  source 1..20: mol_type = other DNA
aagcagccatcacaaaacac

SEQ ID NO: 171178 - DNA, 20 bp, synthetic construct
  source 1..20: mol_type = other DNA
taagcagccatcacaaaaca

SEQ ID NO: 171179 - DNA, 20 bp, synthetic construct
  source 1..20: mol_type = other DNA
ataagcagccatcacaaaac

SEQ ID NO: 171180 - DNA, 20 bp, synthetic construct
  source 1..20: mol_type = other DNA
tataagcagccatcacaaaa

SEQ ID NO: 171181 - DNA, 20 bp, synthetic construct
  source 1..20: mol_type = other DNA
atataagcagccatcacaaa

SEQ ID NO: 171182 - DNA, 20 bp, synthetic construct
  source 1..20: mol_type = other DNA
aatataagcagccatcacaa

SEQ ID NO: 171183 - DNA, 20 bp, synthetic construct
  source 1..20: mol_type = other DNA
aaatataagcagccatcaca

SEQ ID NO: 171184 - DNA, 20 bp, synthetic construct
  source 1..20: mol_type = other DNA
taaatataagcagccatcac

SEQ ID NO: 171185 - DNA, 20 bp, synthetic construct
  source 1..20: mol_type = other DNA
gtaaatataagcagccatca

SEQ ID NO: 171186 - DNA, 20 bp, synthetic construct
  source 1..20: mol_type = other DNA
agtaaatataagcagccatc

SEQ ID NO: 171187 - DNA, 20 bp, synthetic construct
  source 1..20: mol_type = other DNA
cagtaaatataagcagccat

SEQ ID NO: 171188 - DNA, 20 bp, synthetic construct
  source 1..20: mol_type = other DNA
acagtaaatataagcagcca

SEQ ID NO: 171189 - DNA, 20 bp, synthetic construct
  source 1..20: mol_type = other DNA
tacagtaaatataagcagcc

SEQ ID NO: 171190 - DNA, 20 bp, synthetic construct
  source 1..20: mol_type = other DNA
atacagtaaatataagcagc

SEQ ID NO: 171191 - DNA, 20 bp, synthetic construct
  source 1..20: mol_type = other DNA
tatacagtaaatataagcag

SEQ ID NO: 171192 - DNA, 20 bp, synthetic construct
  source 1..20: mol_type = other DNA
ttatacagtaaatataagca

SEQ ID NO: 171193 - DNA, 20 bp, synthetic construct
  source 1..20: mol_type = other DNA
cttatacagtaaatataagc

SEQ ID NO: 171194 - DNA, 20 bp, synthetic construct
  source 1..20: mol_type = other DNA
gcttatacagtaaatataag

SEQ ID NO: 171195 - DNA, 20 bp, synthetic construct
  source 1..20: mol_type = other DNA
tgcttatacagtaaatataa

SEQ ID NO: 171196 - DNA, 20 bp, synthetic construct
  source 1..20: mol_type = other DNA
atgcttatacagtaaatata

SEQ ID NO: 171197 - DNA, 20 bp, synthetic construct
  source 1..20: mol_type = other DNA
aatgcttatacagtaaatat

SEQ ID NO: 171198 - DNA, 20 bp, synthetic construct
  source 1..20: mol_type = other DNA
caatgcttatacagtaaata

SEQ ID NO: 171199 - DNA, 20 bp, synthetic construct
  source 1..20: mol_type = other DNA
acaatgcttatacagtaaat

SEQ ID NO: 171200 - DNA, 20 bp, synthetic construct
  source 1..20: mol_type = other DNA
tacaatgcttatacagtaaa

SEQ ID NO: 171201 - DNA, 20 bp, synthetic construct
  source 1..20: mol_type = other DNA
atacaatgcttatacagtaa

SEQ ID NO: 171202 - DNA, 20 bp, synthetic construct
  source 1..20: mol_type = other DNA
aatacaatgcttatacagta

SEQ ID NO: 171203 - DNA, 20 bp, synthetic construct
  source 1..20: mol_type = other DNA
aaatacaatgcttatacagt

SEQ ID NO: 171204 - DNA, 20 bp, synthetic construct
  source 1..20: mol_type = other DNA
taaatacaatgcttatacag

SEQ ID NO: 171205 - DNA, 20 bp, synthetic construct
  source 1..20: mol_type = other DNA
gtaaatacaatgcttataca

SEQ ID NO: 171206 - DNA, 20 bp, synthetic construct
  source 1..20: mol_type = other DNA
agtaaatacaatgcttatac

SEQ ID NO: 171207 - DNA, 20 bp, synthetic construct
  source 1..20: mol_type = other DNA
cagtaaatacaatgcttata

SEQ ID NO: 171208 - DNA, 20 bp, synthetic construct
  source 1..20: mol_type = other DNA
acagtaaatacaatgcttat

SEQ ID NO: 171209 - DNA, 20 bp, synthetic construct
  source 1..20: mol_type = other DNA
tacagtaaatacaatgctta

SEQ ID NO: 171210 - DNA, 20 bp, synthetic construct
  source 1..20: mol_type = other DNA
atacagtaaatacaatgctt

SEQ ID NO: 171211 - DNA, 20 bp, synthetic construct
  source 1..20: mol_type = other DNA
tatacagtaaatacaatgct

SEQ ID NO: 171212 - DNA, 20 bp, synthetic construct
  source 1..20: mol_type = other DNA
ttatacagtaaatacaatgc

SEQ ID NO: 171213 - DNA, 20 bp, synthetic construct
  source 1..20: mol_type = other DNA
cttatacagtaaatacaatg

SEQ ID NO: 171214 - DNA, 20 bp, synthetic construct
  source 1..20: mol_type = other DNA
gcttatacagtaaatacaat

SEQ ID NO: 171215 - DNA, 20 bp, synthetic construct
  source 1..20: mol_type = other DNA
tgcttatacagtaaatacaa

SEQ ID NO: 171216 - DNA, 20 bp, synthetic construct
  source 1..20: mol_type = other DNA
atgcttatacagtaaataca

SEQ ID NO: 171217 - DNA, 20 bp, synthetic construct
  source 1..20: mol_type = other DNA
aatgcttatacagtaaatac

SEQ ID NO: 171218 - DNA, 20 bp, synthetic construct
  source 1..20: mol_type = other DNA
caatgcttatacagtaaata

SEQ ID NO: 171219 - DNA, 20 bp, synthetic construct
  source 1..20: mol_type = other DNA
acaatgcttatacagtaaat

SEQ ID NO: 171220 - DNA, 20 bp, synthetic construct
  source 1..20: mol_type = other DNA
tacaatgcttatacagtaaa

SEQ ID NO: 171221 - DNA, 20 bp, synthetic construct
  source 1..20: mol_type = other DNA
atacaatgcttatacagtaa

SEQ ID NO: 171222 - DNA, 20 bp, synthetic construct
  source 1..20: mol_type = other DNA
aatacaatgcttatacagta

SEQ ID NO: 171223 - DNA, 20 bp, synthetic construct
  source 1..20: mol_type = other DNA
taatacaatgcttatacagt

SEQ ID NO: 171224 - DNA, 20 bp, synthetic construct
  source 1..20: mol_type = other DNA
ataatacaatgcttatacag

SEQ ID NO: 171225 - DNA, 20 bp, synthetic construct
  source 1..20: mol_type = other DNA
tataatacaatgcttataca

SEQ ID NO: 171226 - DNA, 20 bp, synthetic construct
  source 1..20: mol_type = other DNA
ttataatacaatgcttatac

SEQ ID NO: 171227 - DNA, 20 bp, synthetic construct
  source 1..20: mol_type = other DNA
attataatacaatgcttata

SEQ ID NO: 171228 - DNA, 20 bp, synthetic construct
  source 1..20: mol_type = other DNA
aattataatacaatgcttat

SEQ ID NO: 171229 - DNA, 20 bp, synthetic construct
  source 1..20: mol_type = other DNA
taattataatacaatgctta

SEQ ID NO: 171230 - DNA, 20 bp, synthetic construct
  source 1..20: mol_type = other DNA
gtaattataatacaatgctt

SEQ ID NO: 171231 - DNA, 20 bp, synthetic construct
  source 1..20: mol_type = other DNA
agtaattataatacaatgct

SEQ ID NO: 171232 - DNA, 20 bp, synthetic construct
  source 1..20: mol_type = other DNA
cagtaattataatacaatgc

SEQ ID NO: 171233 - DNA, 20 bp, synthetic construct
  source 1..20: mol_type = other DNA
acagtaattataatacaatg

SEQ ID NO: 171234 - DNA, 20 bp, synthetic construct
  source 1..20: mol_type = other DNA
tacagtaattataatacaat

SEQ ID NO: 171235 - DNA, 20 bp, synthetic construct
  source 1..20: mol_type = other DNA
atacagtaattataatacaa

SEQ ID NO: 171236 - DNA, 20 bp, synthetic construct
  source 1..20: mol_type = other DNA
tatacagtaattataataca

SEQ ID NO: 171237 - DNA, 20 bp, synthetic construct
  source 1..20: mol_type = other DNA
ttatacagtaattataatac

SEQ ID NO: 171238 - DNA, 20 bp, synthetic construct
  source 1..20: mol_type = other DNA
cttatacagtaattataata

SEQ ID NO: 171239 - DNA, 20 bp, synthetic construct
  source 1..20: mol_type = other DNA
gcttatacagtaattataat

SEQ ID NO: 171240 - DNA, 20 bp, synthetic construct
  source 1..20: mol_type = other DNA
agcttatacagtaattataa

SEQ ID NO: 171241 - DNA, 20 bp, synthetic construct
  source 1..20: mol_type = other DNA
cagcttatacagtaattata

SEQ ID NO: 171242 - DNA, 20 bp, synthetic construct
  source 1..20: mol_type = other DNA
gcagcttatacagtaattat

SEQ ID NO: 171243 - DNA, 20 bp, synthetic construct
  source 1..20: mol_type = other DNA
agcagcttatacagtaatta

SEQ ID NO: 171244 - DNA, 20 bp, synthetic construct
  source 1..20: mol_type = other DNA
aagcagcttatacagtaatt

SEQ ID NO: 171245 - DNA, 20 bp, synthetic construct
  source 1..20: mol_type = other DNA
taagcagcttatacagtaat

SEQ ID NO: 171246 - DNA, 20 bp, synthetic construct
  source 1..20: mol_type = other DNA
ataagcagcttatacagtaa

SEQ ID NO: 171247 - DNA, 20 bp, synthetic construct
  source 1..20: mol_type = other DNA
tataagcagcttatacagta

SEQ ID NO: 171248 - DNA, 20 bp, synthetic construct
  source 1..20: mol_type = other DNA
atataagcagcttatacagt

SEQ ID NO: 171249 - DNA, 20 bp, synthetic construct
  source 1..20: mol_type = other DNA
aatataagcagcttatacag

SEQ ID NO: 171250 - DNA, 20 bp, synthetic construct
  source 1..20: mol_type = other DNA
aaatataagcagcttataca

SEQ ID NO: 171251 - DNA, 20 bp, synthetic construct
  source 1..20: mol_type = other DNA
taaatataagcagcttatac

SEQ ID NO: 171252 - DNA, 20 bp, synthetic construct
  source 1..20: mol_type = other DNA
gtaaatataagcagcttata

SEQ ID NO: 171253 - DNA, 20 bp, synthetic construct
  source 1..20: mol_type = other DNA
agtaaatataagcagcttat

SEQ ID NO: 171254 - DNA, 20 bp, synthetic construct
  source 1..20: mol_type = other DNA
cagtaaatataagcagctta

SEQ ID NO: 171255 - DNA, 20 bp, synthetic construct
  source 1..20: mol_type = other DNA
acagtaaatataagcagctt

SEQ ID NO: 171256 - DNA, 20 bp, synthetic construct
  source 1..20: mol_type = other DNA
tacagtaaatataagcagct

SEQ ID NO: 171257 - DNA, 20 bp, synthetic construct
  source 1..20: mol_type = other DNA
atacagtaaatataagcagc

SEQ ID NO: 171258 - DNA, 20 bp, synthetic construct
  source 1..20: mol_type = other DNA
tatacagtaaatataagcag

SEQ ID NO: 171259 - DNA, 20 bp, synthetic construct
  source 1..20: mol_type = other DNA
ttatacagtaaatataagca

SEQ ID NO: 171260 - DNA, 20 bp, synthetic construct
  source 1..20: mol_type = other DNA
cttatacagtaaatataagc

SEQ ID NO: 171261 - DNA, 20 bp, synthetic construct
  source 1..20: mol_type = other DNA
gcttatacagtaaatataag

SEQ ID NO: 171262 - DNA, 20 bp, synthetic construct
  source 1..20: mol_type = other DNA
tgcttatacagtaaatataa

SEQ ID NO: 171263 - DNA, 20 bp, synthetic construct
  source 1..20: mol_type = other DNA
atgcttatacagtaaatata

SEQ ID NO: 171264 - DNA, 20 bp, synthetic construct
  source 1..20: mol_type = other DNA
gatgcttatacagtaaatat

SEQ ID NO: 171265 - DNA, 20 bp, synthetic construct
  source 1..20: mol_type = other DNA
agatgcttatacagtaaata

SEQ ID NO: 171266 - DNA, 20 bp, synthetic construct
  source 1..20: mol_type = other DNA
gagatgcttatacagtaaat

SEQ ID NO: 171267 - DNA, 20 bp, synthetic construct
  source 1..20: mol_type = other DNA
ggagatgcttatacagtaaa

SEQ ID NO: 171268 - DNA, 20 bp, synthetic construct
  source 1..20: mol_type = other DNA
tggagatgcttatacagtaa

SEQ ID NO: 171269 - DNA, 20 bp, synthetic construct
  source 1..20: mol_type = other DNA
ttggagatgcttatacagta

SEQ ID NO: 171270 - DNA, 20 bp, synthetic construct
  source 1..20: mol_type = other DNA
tttggagatgcttatacagt

SEQ ID NO: 171271 - DNA, 20 bp, synthetic construct
  source 1..20: mol_type = other DNA
atttggagatgcttatacag

SEQ ID NO: 171272 - DNA, 20 bp, synthetic construct
  source 1..20: mol_type = other DNA
gatttggagatgcttataca

SEQ ID NO: 171273 - DNA, 20 bp, synthetic construct
  source 1..20: mol_type = other DNA
ggatttggagatgcttatac

SEQ ID NO: 171274 - DNA, 20 bp, synthetic construct
  source 1..20: mol_type = other DNA
aggatttggagatgcttata

SEQ ID NO: 171275 - DNA, 20 bp, synthetic construct
  source 1..20: mol_type = other DNA
gaggatttggagatgcttat

SEQ ID NO: 171276 - DNA, 20 bp, synthetic construct
  source 1..20: mol_type = other DNA
ggaggatttggagatgctta

SEQ ID NO: 171277 - DNA, 20 bp, synthetic construct
  source 1..20: mol_type = other DNA
gggaggatttggagatgctt

SEQ ID NO: 171278 - DNA, 20 bp, synthetic construct
  source 1..20: mol_type = other DNA
agggaggatttggagatgct

SEQ ID NO: 171279 - DNA, 20 bp, synthetic construct
  source 1..20: mol_type = other DNA
gagggaggatttggagatgc

SEQ ID NO: 171280 - DNA, 20 bp, synthetic construct
  source 1..20: mol_type = other DNA
agagggaggatttggagatg

SEQ ID NO: 171281 - DNA, 20 bp, synthetic construct
  source 1..20: mol_type = other DNA
tagagggaggatttggagat

SEQ ID NO: 171282 - DNA, 20 bp, synthetic construct
  source 1..20: mol_type = other DNA
gtagagggaggatttggaga

SEQ ID NO: 171283 - DNA, 20 bp, synthetic construct
  source 1..20: mol_type = other DNA
cgtagagggaggatttggag

SEQ ID NO: 171284 - DNA, 20 bp, synthetic construct
  source 1..20: mol_type = other DNA
acgtagagggaggatttgga

SEQ ID NO: 171285 - DNA, 20 bp, synthetic construct
  source 1..20: mol_type = other DNA
tacgtagagggaggatttgg

SEQ ID NO: 171286 - DNA, 20 bp, synthetic construct
  source 1..20: mol_type = other DNA
ttacgtagagggaggatttg

SEQ ID NO: 171287 - DNA, 20 bp, synthetic construct
  source 1..20: mol_type = other DNA
tttacgtagagggaggattt

SEQ ID NO: 171288 - DNA, 20 bp, synthetic construct
  source 1..20: mol_type = other DNA
gtttacgtagagggaggatt

SEQ ID NO: 171289 - DNA, 20 bp, synthetic construct
  source 1..20: mol_type = other DNA
tgtttacgtagagggaggat

SEQ ID NO: 171290 - DNA, 20 bp, synthetic construct
  source 1..20: mol_type = other DNA
ttgtttacgtagagggagga

SEQ ID NO: 171291 - DNA, 20 bp, synthetic construct
  source 1..20: mol_type = other DNA
tttgtttacgtagagggagg

SEQ ID NO: 171292 - DNA, 20 bp, synthetic construct
  source 1..20: mol_type = other DNA
atttgtttacgtagagggag

SEQ ID NO: 171293 - DNA, 20 bp, synthetic construct
  source 1..20: mol_type = other DNA
aatttgtttacgtagaggga

SEQ ID NO: 171294 - DNA, 20 bp, synthetic construct
  source 1..20: mol_type = other DNA
taatttgtttacgtagaggg

SEQ ID NO: 171295 - DNA, 20 bp, synthetic construct
  source 1..20: mol_type = other DNA
ttaatttgtttacgtagagg

SEQ ID NO: 171296 - DNA, 20 bp, synthetic construct
  source 1..20: mol_type = other DNA
attaatttgtttacgtagag

SEQ ID NO: 171297 - DNA, 20 bp, synthetic construct
  source 1..20: mol_type = other DNA
cattaatttgtttacgtaga

SEQ ID NO: 171298 - DNA, 20 bp, synthetic construct
  source 1..20: mol_type = other DNA
ccattaatttgtttacgtag

SEQ ID NO: 171299 - DNA, 20 bp, synthetic construct
  source 1..20: mol_type = other DNA
tccattaatttgtttacgta

SEQ ID NO: 171300 - DNA, 20 bp, synthetic construct
  source 1..20: mol_type = other DNA
atccattaatttgtttacgt

SEQ ID NO: 171301 - DNA, 20 bp, synthetic construct
  source 1..20: mol_type = other DNA
tatccattaatttgtttacg

SEQ ID NO: 171302 - DNA, 20 bp, synthetic construct
  source 1..20: mol_type = other DNA
ttatccattaatttgtttac

SEQ ID NO: 171303 - DNA, 20 bp, synthetic construct
  source 1..20: mol_type = other DNA
tttatccattaatttgttta

SEQ ID NO: 171304 - DNA, 20 bp, synthetic construct
  source 1..20: mol_type = other DNA
gtttatccattaatttgttt

SEQ ID NO: 171305 - DNA, 20 bp, synthetic construct
  source 1..20: mol_type = other DNA
tgtttatccattaatttgtt

SEQ ID NO: 171306 - DNA, 20 bp, synthetic construct
  source 1..20: mol_type = other DNA
ctgtttatccattaatttgt

SEQ ID NO: 171307 - DNA, 20 bp, synthetic construct
  source 1..20: mol_type = other DNA
tctgtttatccattaatttg

SEQ ID NO: 171308 - DNA, 20 bp, synthetic construct
  source 1..20: mol_type = other DNA
atctgtttatccattaattt

SEQ ID NO: 171309 - DNA, 20 bp, synthetic construct
  source 1..20: mol_type = other DNA
tatctgtttatccattaatt

SEQ ID NO: 171310 - DNA, 20 bp, synthetic construct
  source 1..20: mol_type = other DNA
ttatctgtttatccattaat

SEQ ID NO: 171311 - DNA, 20 bp, synthetic construct
  source 1..20: mol_type = other DNA
cttatctgtttatccattaa

SEQ ID NO: 171312 - DNA, 20 bp, synthetic construct
  source 1..20: mol_type = other DNA
acttatctgtttatccatta

SEQ ID NO: 171313 - DNA, 20 bp, synthetic construct
  source 1..20: mol_type = other DNA
cacttatctgtttatccatt

SEQ ID NO: 171314 - DNA, 20 bp, synthetic construct
  source 1..20: mol_type = other DNA
acacttatctgtttatccat

SEQ ID NO: 171315 - DNA, 20 bp, synthetic construct
  source 1..20: mol_type = other DNA
tacacttatctgtttatcca

SEQ ID NO: 171316 - DNA, 20 bp, synthetic construct
  source 1..20: mol_type = other DNA
atacacttatctgtttatcc

SEQ ID NO: 171317 - DNA, 20 bp, synthetic construct
  source 1..20: mol_type = other DNA
gatacacttatctgtttatc

SEQ ID NO: 171318 - DNA, 20 bp, synthetic construct
  source 1..20: mol_type = other DNA
ggatacacttatctgtttat

SEQ ID NO: 171319 - DNA, 20 bp, synthetic construct
  source 1..20: mol_type = other DNA
gggatacacttatctgttta

SEQ ID NO: 171320 - DNA, 20 bp, synthetic construct
  source 1..20: mol_type = other DNA
ggggatacacttatctgttt

SEQ ID NO: 171321 - DNA, 20 bp, synthetic construct
  source 1..20: mol_type = other DNA
aggggatacacttatctgtt

SEQ ID NO: 171322 - DNA, 20 bp, synthetic construct
  source 1..20: mol_type = other DNA
caggggatacacttatctgt

SEQ ID NO: 171323 - DNA, 20 bp, synthetic construct
  source 1..20: mol_type = other DNA
gcaggggatacacttatctg

SEQ ID NO: 171324 - DNA, 20 bp, synthetic construct
  source 1..20: mol_type = other DNA
ggcaggggatacacttatct

SEQ ID NO: 171325 - DNA, 20 bp, synthetic construct
  source 1..20: mol_type = other DNA
gggcaggggatacacttatc

SEQ ID NO: 171326 - DNA, 20 bp, synthetic construct
  source 1..20: mol_type = other DNA
ggggcaggggatacacttat

SEQ ID NO: 171327 - DNA, 20 bp, synthetic construct
  source 1..20: mol_type = other DNA
gggggcaggggatacactta

SEQ ID NO: 171328 - DNA, 20 bp, synthetic construct
  source 1..20: mol_type = other DNA
tgggggcaggggatacactt

SEQ ID NO: 171329 - DNA, 20 bp, synthetic construct
  source 1..20: mol_type = other DNA
gtgggggcaggggatacact

SEQ ID NO: 171330 - DNA, 20 bp, synthetic construct
  source 1..20: mol_type = other DNA
ggtgggggcaggggatacac

SEQ ID NO: 171331 - DNA, 20 bp, synthetic construct
  source 1..20: mol_type = other DNA
gggtgggggcaggggataca

SEQ ID NO: 171332 - DNA, 20 bp, synthetic construct
  source 1..20: mol_type = other DNA
ggggtgggggcaggggatac

SEQ ID NO: 171333 - DNA, 20 bp, synthetic construct
  source 1..20: mol_type = other DNA
aggggtgggggcaggggata

SEQ ID NO: 171334 - DNA, 20 bp, synthetic construct
  source 1..20: mol_type = other DNA
caggggtgggggcaggggat

SEQ ID NO: 171335 - DNA, 20 bp, synthetic construct
  source 1..20: mol_type = other DNA
gcaggggtgggggcagggga

SEQ ID NO: 171336 - DNA, 20 bp, synthetic construct
  source 1..20: mol_type = other DNA
agcaggggtgggggcagggg

SEQ ID NO: 171337 - DNA, 20 bp, synthetic construct
  source 1..20: mol_type = other DNA
tagcaggggtgggggcaggg

SEQ ID NO: 171338 - DNA, 20 bp, synthetic construct
  source 1..20: mol_type = other DNA
gtagcaggggtgggggcagg

SEQ ID NO: 171339 - DNA, 20 bp, synthetic construct
  source 1..20: mol_type = other DNA
cgtagcaggggtgggggcag

SEQ ID NO: 171340 - DNA, 20 bp, synthetic construct
  source 1..20: mol_type = other DNA
gcgtagcaggggtgggggca

SEQ ID NO: 171341 - DNA, 20 bp, synthetic construct
  source 1..20: mol_type = other DNA
tgcgtagcaggggtgggggc

SEQ ID NO: 171342 - DNA, 20 bp, synthetic construct
  source 1..20: mol_type = other DNA
ctgcgtagcaggggtggggg

SEQ ID NO: 171343 - DNA, 20 bp, synthetic construct
  source 1..20: mol_type = other DNA
cctgcgtagcaggggtgggg

SEQ ID NO: 171344 - DNA, 20 bp, synthetic construct
  source 1..20: mol_type = other DNA
acctgcgtagcaggggtggg

SEQ ID NO: 171345 - DNA, 20 bp, synthetic construct
  source 1..20: mol_type = other DNA
gacctgcgtagcaggggtgg

SEQ ID NO: 171346 - DNA, 20 bp, synthetic construct
  source 1..20: mol_type = other DNA
ggacctgcgtagcaggggtg

SEQ ID NO: 171347 - DNA, 20 bp, synthetic construct
  source 1..20: mol_type = other DNA
cggacctgcgtagcaggggt

SEQ ID NO: 171348 - DNA, 20 bp, synthetic construct
  source 1..20: mol_type = other DNA
ccggacctgcgtagcagggg

SEQ ID NO: 171349 - DNA, 20 bp, synthetic construct
  source 1..20: mol_type = other DNA
tccggacctgcgtagcaggg

SEQ ID NO: 171350 - DNA, 20 bp, synthetic construct
  source 1..20: mol_type = other DNA
ctccggacctgcgtagcagg

SEQ ID NO: 171351 - DNA, 20 bp, synthetic construct
  source 1..20: mol_type = other DNA
actccggacctgcgtagcag

SEQ ID NO: 171352 - DNA, 20 bp, synthetic construct
  source 1..20: mol_type = other DNA
cactccggacctgcgtagca

SEQ ID NO: 171353 - DNA, 20 bp, synthetic construct
  source 1..20: mol_type = other DNA
tcactccggacctgcgtagc

SEQ ID NO: 171354 - DNA, 20 bp, synthetic construct
  source 1..20: mol_type = other DNA
gtcactccggacctgcgtag

SEQ ID NO: 171355 - DNA, 20 bp, synthetic construct
  source 1..20: mol_type = other DNA
agtcactccggacctgcgta

SEQ ID NO: 171356 - DNA, 20 bp, synthetic construct
  source 1..20: mol_type = other DNA
gagtcactccggacctgcgt

SEQ ID NO: 171357 - DNA, 20 bp, synthetic construct
  source 1..20: mol_type = other DNA
agagtcactccggacctgcg

SEQ ID NO: 171358 - DNA, 20 bp, synthetic construct
  source 1..20: mol_type = other DNA
aagagtcactccggacctgc

SEQ ID NO: 171359 - DNA, 20 bp, synthetic construct
  source 1..20: mol_type = other DNA
caagagtcactccggacctg

SEQ ID NO: 171360 - DNA, 20 bp, synthetic construct
  source 1..20: mol_type = other DNA
tcaagagtcactccggacct

SEQ ID NO: 171361 - DNA, 20 bp, synthetic construct
  source 1..20: mol_type = other DNA
ttcaagagtcactccggacc

SEQ ID NO: 171362 - DNA, 20 bp, synthetic construct
  source 1..20: mol_type = other DNA
cttcaagagtcactccggac

SEQ ID NO: 171363 - DNA, 20 bp, synthetic construct
  source 1..20: mol_type = other DNA
gcttcaagagtcactccgga

SEQ ID NO: 171364 - DNA, 20 bp, synthetic construct
  source 1..20: mol_type = other DNA
agcttcaagagtcactccgg

SEQ ID NO: 171365 - DNA, 20 bp, synthetic construct
  source 1..20: mol_type = other DNA
gagcttcaagagtcactccg

SEQ ID NO: 171366 - DNA, 20 bp, synthetic construct
  source 1..20: mol_type = other DNA
tgagcttcaagagtcactcc

SEQ ID NO: 171367 - DNA, 20 bp, synthetic construct
  source 1..20: mol_type = other DNA
atgagcttcaagagtcactc

SEQ ID NO: 171368 - DNA, 20 bp, synthetic construct
  source 1..20: mol_type = other DNA
tatgagcttcaagagtcact

SEQ ID NO: 171369 - DNA, 20 bp, synthetic construct
  source 1..20: mol_type = other DNA
gtatgagcttcaagagtcac

SEQ ID NO: 171370 - DNA, 20 bp, synthetic construct
  source 1..20: mol_type = other DNA
tgtatgagcttcaagagtca

SEQ ID NO: 171371 - DNA, 20 bp, synthetic construct
  source 1..20: mol_type = other DNA
atgtatgagcttcaagagtc

SEQ ID NO: 171372 - DNA, 20 bp, synthetic construct
  source 1..20: mol_type = other DNA
aatgtatgagcttcaagagt

SEQ ID NO: 171373 - DNA, 20 bp, synthetic construct
  source 1..20: mol_type = other DNA
gaatgtatgagcttcaagag

SEQ ID NO: 171374 - DNA, 20 bp, synthetic construct
  source 1..20: mol_type = other DNA
ggaatgtatgagcttcaaga

SEQ ID NO: 171375 - DNA, 20 bp, synthetic construct
  source 1..20: mol_type = other DNA
aggaatgtatgagcttcaag

SEQ ID NO: 171376 - DNA, 20 bp, synthetic construct
  source 1..20: mol_type = other DNA
aaggaatgtatgagcttcaa

SEQ ID NO: 171377 - DNA, 20 bp, synthetic construct
  source 1..20: mol_type = other DNA
caaggaatgtatgagcttca

SEQ ID NO: 171378 - DNA, 20 bp, synthetic construct
  source 1..20: mol_type = other DNA
ccaaggaatgtatgagcttc

SEQ ID NO: 171379 - DNA, 20 bp, synthetic construct
  source 1..20: mol_type = other DNA
gccaaggaatgtatgagctt

SEQ ID NO: 171380 - DNA, 20 bp, synthetic construct
  source 1..20: mol_type = other DNA
ggccaaggaatgtatgagct

SEQ ID NO: 171381 - DNA, 20 bp, synthetic construct
  source 1..20: mol_type = other DNA
tggccaaggaatgtatgagc

SEQ ID NO: 171382 - DNA, 20 bp, synthetic construct
  source 1..20: mol_type = other DNA
ttggccaaggaatgtatgag

SEQ ID NO: 171383 - DNA, 20 bp, synthetic construct
  source 1..20: mol_type = other DNA
cttggccaaggaatgtatga

SEQ ID NO: 171384 - DNA, 20 bp, synthetic construct
  source 1..20: mol_type = other DNA
acttggccaaggaatgtatg

SEQ ID NO: 171385 - DNA, 20 bp, synthetic construct
  source 1..20: mol_type = other DNA
aacttggccaaggaatgtat

SEQ ID NO: 171386 - DNA, 20 bp, synthetic construct
  source 1..20: mol_type = other DNA
aaacttggccaaggaatgta

SEQ ID NO: 171387 - DNA, 20 bp, synthetic construct
  source 1..20: mol_type = other DNA
caaacttggccaaggaatgt

SEQ ID NO: 171388 - DNA, 20 bp, synthetic construct
  source 1..20: mol_type = other DNA
gcaaacttggccaaggaatg

SEQ ID NO: 171389 - DNA, 20 bp, synthetic construct
  source 1..20: mol_type = other DNA
agcaaacttggccaaggaat

SEQ ID NO: 171390 - DNA, 20 bp, synthetic construct
  source 1..20: mol_type = other DNA
aagcaaacttggccaaggaa

SEQ ID NO: 171391 - DNA, 20 bp, synthetic construct
  source 1..20: mol_type = other DNA
gaagcaaacttggccaagga

SEQ ID NO: 171392 - DNA, 20 bp, synthetic construct
  source 1..20: mol_type = other DNA
agaagcaaacttggccaagg

SEQ ID NO: 171393 - DNA, 20 bp, synthetic construct
  source 1..20: mol_type = other DNA
gagaagcaaacttggccaag

SEQ ID NO: 171394 - DNA, 20 bp, synthetic construct
  source 1..20: mol_type = other DNA
agagaagcaaacttggccaa

SEQ ID NO: 171395 - DNA, 20 bp, synthetic construct
  source 1..20: mol_type = other DNA
tagagaagcaaacttggcca

SEQ ID NO: 171396 - DNA, 20 bp, synthetic construct
  source 1..20: mol_type = other DNA
ttagagaagcaaacttggcc

SEQ ID NO: 171397 - DNA, 20 bp, synthetic construct
  source 1..20: mol_type = other DNA
gttagagaagcaaacttggc

SEQ ID NO: 171398 - DNA, 20 bp, synthetic construct
  source 1..20: mol_type = other DNA
tgttagagaagcaaacttgg

SEQ ID NO: 171399 - DNA, 20 bp, synthetic construct
  source 1..20: mol_type = other DNA
ctgttagagaagcaaacttg

SEQ ID NO: 171400 - DNA, 20 bp, synthetic construct
  source 1..20: mol_type = other DNA
tctgttagagaagcaaactt

SEQ ID NO: 171401 - DNA, 20 bp, synthetic construct
  source 1..20: mol_type = other DNA
atctgttagagaagcaaact

SEQ ID NO: 171402 - DNA, 20 bp, synthetic construct
  source 1..20: mol_type = other DNA
catctgttagagaagcaaac

SEQ ID NO: 171403 - DNA, 20 bp, synthetic construct
  source 1..20: mol_type = other DNA
acatctgttagagaagcaaa

SEQ ID NO: 171404 - DNA, 20 bp, synthetic construct
  source 1..20: mol_type = other DNA
aacatctgttagagaagcaa

SEQ ID NO: 171405 - DNA, 20 bp, synthetic construct
  source 1..20: mol_type = other DNA
aaacatctgttagagaagca

SEQ ID NO: 171406 - DNA, 20 bp, synthetic construct
  source 1..20: mol_type = other DNA
taaacatctgttagagaagc

SEQ ID NO: 171407 - DNA, 20 bp, synthetic construct
  source 1..20: mol_type = other DNA
ataaacatctgttagagaag

SEQ ID NO: 171408 - DNA, 20 bp, synthetic construct
  source 1..20: mol_type = other DNA
tataaacatctgttagagaa

SEQ ID NO: 171409 - DNA, 20 bp, synthetic construct
  source 1..20: mol_type = other DNA
atataaacatctgttagaga

SEQ ID NO: 171410 - DNA, 20 bp, synthetic construct
  source 1..20: mol_type = other DNA
tatataaacatctgttagag

SEQ ID NO: 171411 - DNA, 20 bp, synthetic construct
  source 1..20: mol_type = other DNA
ctatataaacatctgttaga

SEQ ID NO: 171412 - DNA, 20 bp, synthetic construct
  source 1..20: mol_type = other DNA
gctatataaacatctgttag

SEQ ID NO: 171413 - DNA, 20 bp, synthetic construct
  source 1..20: mol_type = other DNA
tgctatataaacatctgtta

SEQ ID NO: 171414 - DNA, 20 bp, synthetic construct
  source 1..20: mol_type = other DNA
ttgctatataaacatctgtt

SEQ ID NO: 171415 - DNA, 20 bp, synthetic construct
  source 1..20: mol_type = other DNA
attgctatataaacatctgt

SEQ ID NO: 171416 - DNA, 20 bp, synthetic construct
  source 1..20: mol_type = other DNA
tattgctatataaacatctg

SEQ ID NO: 171417 - DNA, 20 bp, synthetic construct
  source 1..20: mol_type = other DNA
ttattgctatataaacatct

SEQ ID NO: 171418 - DNA, 20 bp, synthetic construct
  source 1..20: mol_type = other DNA
gttattgctatataaacatc

SEQ ID NO: 171419 - DNA, 20 bp, synthetic construct
  source 1..20: mol_type = other DNA
ggttattgctatataaacat

SEQ ID NO: 171420 - DNA, 20 bp, synthetic construct
  source 1..20: mol_type = other DNA
aggttattgctatataaaca

SEQ ID NO: 171421 - DNA, 20 bp, synthetic construct
  source 1..20: mol_type = other DNA
caggttattgctatataaac

SEQ ID NO: 171422 - DNA, 20 bp, synthetic construct
  source 1..20: mol_type = other DNA
ccaggttattgctatataaa

SEQ ID NO: 171423 - DNA, 20 bp, synthetic construct
  source 1..20: mol_type = other DNA
gccaggttattgctatataa

SEQ ID NO: 171424 - DNA, 20 bp, synthetic construct
  source 1..20: mol_type = other DNA
agccaggttattgctatata

SEQ ID NO: 171425 - DNA, 20 bp, synthetic construct
  source 1..20: mol_type = other DNA
aagccaggttattgctatat

SEQ ID NO: 171426 - DNA, 20 bp, synthetic construct
  source 1..20: mol_type = other DNA
caagccaggttattgctata

SEQ ID NO: 171427 - DNA, 20 bp, synthetic construct
  source 1..20: mol_type = other DNA
ccaagccaggttattgctat

SEQ ID NO: 171428 - DNA, 20 bp, synthetic construct
  source 1..20: mol_type = other DNA
gccaagccaggttattgcta

SEQ ID NO: 171429 - DNA, 20 bp, synthetic construct
  source 1..20: mol_type = other DNA
agccaagccaggttattgct

SEQ ID NO: 171430 - DNA, 20 bp, synthetic construct
  source 1..20: mol_type = other DNA
gagccaagccaggttattgc

SEQ ID NO: 171431 - DNA, 20 bp, synthetic construct
  source 1..20: mol_type = other DNA
agagccaagccaggttattg

SEQ ID NO: 171432 - DNA, 20 bp, synthetic construct
  source 1..20: mol_type = other DNA
aagagccaagccaggttatt

SEQ ID NO: 171433 - DNA, 20 bp, synthetic construct
  source 1..20: mol_type = other DNA
caagagccaagccaggttat

SEQ ID NO: 171434 - DNA, 20 bp, synthetic construct
  source 1..20: mol_type = other DNA
ccaagagccaagccaggtta

SEQ ID NO: 171435 - DNA, 20 bp, synthetic construct
  source 1..20: mol_type = other DNA
cccaagagccaagccaggtt

SEQ ID NO: 171436 - DNA, 20 bp, synthetic construct
  source 1..20: mol_type = other DNA
acccaagagccaagccaggt

SEQ ID NO: 171437 - DNA, 20 bp, synthetic construct
  source 1..20: mol_type = other DNA
aacccaagagccaagccagg

SEQ ID NO: 171438 - DNA, 20 bp, synthetic construct
  source 1..20: mol_type = other DNA
gaacccaagagccaagccag

SEQ ID NO: 171439 - DNA, 20 bp, synthetic construct
  source 1..20: mol_type = other DNA
tgaacccaagagccaagcca

SEQ ID NO: 171440 - DNA, 20 bp, synthetic construct
  source 1..20: mol_type = other DNA
gtgaacccaagagccaagcc

SEQ ID NO: 171441 - DNA, 20 bp, synthetic construct
  source 1..20: mol_type = other DNA
ggtgaacccaagagccaagc

SEQ ID NO: 171442 - DNA, 20 bp, synthetic construct
  source 1..20: mol_type = other DNA
aggtgaacccaagagccaag

SEQ ID NO: 171443 - DNA, 20 bp, synthetic construct
  source 1..20: mol_type = other DNA
aaggtgaacccaagagccaa

SEQ ID NO: 171444 - DNA, 20 bp, synthetic construct
  source 1..20: mol_type = other DNA
aaaggtgaacccaagagcca

SEQ ID NO: 171445 - DNA, 20 bp, synthetic construct
  source 1..20: mol_type = other DNA
caaaggtgaacccaagagcc

SEQ ID NO: 171446 - DNA, 20 bp, synthetic construct
  source 1..20: mol_type = other DNA
ccaaaggtgaacccaagagc

SEQ ID NO: 171447 - DNA, 20 bp, synthetic construct
  source 1..20: mol_type = other DNA
tccaaaggtgaacccaagag

SEQ ID NO: 171448 - DNA, 20 bp, synthetic construct
  source 1..20: mol_type = other DNA
gtccaaaggtgaacccaaga

SEQ ID NO: 171449 - DNA, 20 bp, synthetic construct
  source 1..20: mol_type = other DNA
cgtccaaaggtgaacccaag

SEQ ID NO: 171450 - DNA, 20 bp, synthetic construct
  source 1..20: mol_type = other DNA
tcgtccaaaggtgaacccaa

SEQ ID NO: 171451 - DNA, 20 bp, synthetic construct
  source 1..20: mol_type = other DNA
atcgtccaaaggtgaaccca

SEQ ID NO: 171452 - DNA, 20 bp, synthetic construct
  source 1..20: mol_type = other DNA
aatcgtccaaaggtgaaccc

SEQ ID NO: 171453 - DNA, 20 bp, synthetic construct
  source 1..20: mol_type = other DNA
aaatcgtccaaaggtgaacc

SEQ ID NO: 171454 - DNA, 20 bp, synthetic construct
  source 1..20: mol_type = other DNA
caaatcgtccaaaggtgaac

SEQ ID NO: 171455 - DNA, 20 bp, synthetic construct
  source 1..20: mol_type = other DNA
ccaaatcgtccaaaggtgaa

SEQ ID NO: 171456 - DNA, 20 bp, synthetic construct
  source 1..20: mol_type = other DNA
cccaaatcgtccaaaggtga

SEQ ID NO: 171457 - DNA, 20 bp, synthetic construct
  source 1..20: mol_type = other DNA
ccccaaatcgtccaaaggtg

SEQ ID NO: 171458 - DNA, 20 bp, synthetic construct
  source 1..20: mol_type = other DNA
tccccaaatcgtccaaaggt

SEQ ID NO: 171459 - DNA, 20 bp, synthetic construct
  source 1..20: mol_type = other DNA
ttccccaaatcgtccaaagg

SEQ ID NO: 171460 - DNA, 20 bp, synthetic construct
  source 1..20: mol_type = other DNA
cttccccaaatcgtccaaag

SEQ ID NO: 171461 - DNA, 20 bp, synthetic construct
  source 1..20: mol_type = other DNA
ccttccccaaatcgtccaaa

SEQ ID NO: 171462 - DNA, 20 bp, synthetic construct
  source 1..20: mol_type = other DNA
cccttccccaaatcgtccaa

SEQ ID NO: 171463 - DNA, 20 bp, synthetic construct
  source 1..20: mol_type = other DNA
ccccttccccaaatcgtcca

SEQ ID NO: 171464 - DNA, 20 bp, synthetic construct
  source 1..20: mol_type = other DNA
gccccttccccaaatcgtcc

SEQ ID NO: 171465 - DNA, 20 bp, synthetic construct
  source 1..20: mol_type = other DNA
agccccttccccaaatcgtc

SEQ ID NO: 171466 - DNA, 20 bp, synthetic construct
  source 1..20: mol_type = other DNA
aagccccttccccaaatcgt

SEQ ID NO: 171467 - DNA, 20 bp, synthetic construct
  source 1..20: mol_type = other DNA
caagccccttccccaaatcg

SEQ ID NO: 171468 - DNA, 20 bp, synthetic construct
  source 1..20: mol_type = other DNA
acaagccccttccccaaatc

SEQ ID NO: 171469 - DNA, 20 bp, synthetic construct
  source 1..20: mol_type = other DNA
aacaagccccttccccaaat

SEQ ID NO: 171470 - DNA, 20 bp, synthetic construct
  source 1..20: mol_type = other DNA
caacaagccccttccccaaa

SEQ ID NO: 171471 - DNA, 20 bp, synthetic construct
  source 1..20: mol_type = other DNA
ccaacaagccccttccccaa

SEQ ID NO: 171472 - DNA, 20 bp, synthetic construct
  source 1..20: mol_type = other DNA
gccaacaagccccttcccca

SEQ ID NO: 171473 - DNA, 20 bp, synthetic construct
  source 1..20: mol_type = other DNA
agccaacaagccccttcccc

SEQ ID NO: 171474 - DNA, 20 bp, synthetic construct
  source 1..20: mol_type = other DNA
aagccaacaagccccttccc

SEQ ID NO: 171475 - DNA, 20 bp, synthetic construct
  source 1..20: mol_type = other DNA
aaagccaacaagccccttcc

SEQ ID NO: 171476 - DNA, 20 bp, synthetic construct
  source 1..20: mol_type = other DNA
caaagccaacaagccccttc

SEQ ID NO: 171477 - DNA, 20 bp, synthetic construct
  source 1..20: mol_type = other DNA
gcaaagccaacaagcccctt

SEQ ID NO: 171478 - DNA, 20 bp, synthetic construct
  source 1..20: mol_type = other DNA
agcaaagccaacaagcccct

SEQ ID NO: 171479 - DNA, 20 bp, synthetic construct
  source 1..20: mol_type = other DNA
cagcaaagccaacaagcccc

SEQ ID NO: 171480 - DNA, 20 bp, synthetic construct
  source 1..20: mol_type = other DNA
ccagcaaagccaacaagccc

SEQ ID NO: 171481 - DNA, 20 bp, synthetic construct
  source 1..20: mol_type = other DNA
cccagcaaagccaacaagcc

SEQ ID NO: 171482 - DNA, 20 bp, synthetic construct
  source 1..20: mol_type = other DNA
acccagcaaagccaacaagc

SEQ ID NO: 171483 - DNA, 20 bp, synthetic construct
  source 1..20: mol_type = other DNA
aacccagcaaagccaacaag

SEQ ID NO: 171484 - DNA, 20 bp, synthetic construct
  source 1..20: mol_type = other DNA
aaacccagcaaagccaacaa

SEQ ID NO: 171485 - DNA, 20 bp, synthetic construct
  source 1..20: mol_type = other DNA
aaaacccagcaaagccaaca

SEQ ID NO: 171486 - DNA, 20 bp, synthetic construct
  source 1..20: mol_type = other DNA
caaaacccagcaaagccaac

SEQ ID NO: 171487 - DNA, 20 bp, synthetic construct
  source 1..20: mol_type = other DNA
ccaaaacccagcaaagccaa

SEQ ID NO: 171488 - DNA, 20 bp, synthetic construct
  source 1..20: mol_type = other DNA
tccaaaacccagcaaagcca

SEQ ID NO: 171489 - DNA, 20 bp, synthetic construct
  source 1..20: mol_type = other DNA
atccaaaacccagcaaagcc

SEQ ID NO: 171490 - DNA, 20 bp, synthetic construct
  source 1..20: mol_type = other DNA
catccaaaacccagcaaagc

SEQ ID NO: 171491 - DNA, 20 bp, synthetic construct
  source 1..20: mol_type = other DNA
tcatccaaaacccagcaaag

SEQ ID NO: 171492 - DNA, 20 bp, synthetic construct
  source 1..20: mol_type = other DNA
ctcatccaaaacccagcaaa

SEQ ID NO: 171493 - DNA, 20 bp, synthetic construct
  source 1..20: mol_type = other DNA
actcatccaaaacccagcaa

SEQ ID NO: 171494 - DNA, 20 bp, synthetic construct
  source 1..20: mol_type = other DNA
cactcatccaaaacccagca

SEQ ID NO: 171495 - DNA, 20 bp, synthetic construct
  source 1..20: mol_type = other DNA
tcactcatccaaaacccagc

SEQ ID NO: 171496 - DNA, 20 bp, synthetic construct
  source 1..20: mol_type = other DNA
gtcactcatccaaaacccag

SEQ ID NO: 171497 - DNA, 20 bp, synthetic construct
  source 1..20: mol_type = other DNA
tgtcactcatccaaaaccca

SEQ ID NO: 171498 - DNA, 20 bp, synthetic construct
  source 1..20: mol_type = other DNA
ctgtcactcatccaaaaccc

SEQ ID NO: 171499 - DNA, 20 bp, synthetic construct
  source 1..20: mol_type = other DNA
actgtcactcatccaaaacc

SEQ ID NO: 171500 - DNA, 20 bp, synthetic construct
  source 1..20: mol_type = other DNA
gactgtcactcatccaaaac

SEQ ID NO: 171501 - DNA, 20 bp, synthetic construct
  source 1..20: mol_type = other DNA
ggactgtcactcatccaaaa

SEQ ID NO: 171502 - DNA, 20 bp, synthetic construct
  source 1..20: mol_type = other DNA
tggactgtcactcatccaaa

SEQ ID NO: 171503 - DNA, 20 bp, synthetic construct
  source 1..20: mol_type = other DNA
atggactgtcactcatccaa

SEQ ID NO: 171504 - DNA, 20 bp, synthetic construct
  source 1..20: mol_type = other DNA
catggactgtcactcatcca

SEQ ID NO: 171505 - DNA, 20 bp, synthetic construct
  source 1..20: mol_type = other DNA
tcatggactgtcactcatcc

SEQ ID NO: 171506 - DNA, 20 bp, synthetic construct
  source 1..20: mol_type = other DNA
gtcatggactgtcactcatc

SEQ ID NO: 171507 - DNA, 20 bp, synthetic construct
  source 1..20: mol_type = other DNA
agtcatggactgtcactcat

SEQ ID NO: 171508 - DNA, 20 bp, synthetic construct
  source 1..20: mol_type = other DNA
cagtcatggactgtcactca

SEQ ID NO: 171509 - DNA, 20 bp, synthetic construct
  source 1..20: mol_type = other DNA
acagtcatggactgtcactc

SEQ ID NO: 171510 - DNA, 20 bp, synthetic construct
  source 1..20: mol_type = other DNA
aacagtcatggactgtcact

SEQ ID NO: 171511 - DNA, 20 bp, synthetic construct
  source 1..20: mol_type = other DNA
gaacagtcatggactgtcac

SEQ ID NO: 171512 - DNA, 20 bp, synthetic construct
  source 1..20: mol_type = other DNA
ggaacagtcatggactgtca

SEQ ID NO: 171513 - DNA, 20 bp, synthetic construct
  source 1..20: mol_type = other DNA
aggaacagtcatggactgtc

SEQ ID NO: 171514 - DNA, 20 bp, synthetic construct
  source 1..20: mol_type = other DNA
caggaacagtcatggactgt

SEQ ID NO: 171515 - DNA, 20 bp, synthetic construct
  source 1..20: mol_type = other DNA
gcaggaacagtcatggactg

SEQ ID NO: 171516 - DNA, 20 bp, synthetic construct
  source 1..20: mol_type = other DNA
agcaggaacagtcatggact

SEQ ID NO: 171517 - DNA, 20 bp, synthetic construct
  source 1..20: mol_type = other DNA
cagcaggaacagtcatggac

SEQ ID NO: 171518 - DNA, 20 bp, synthetic construct
  source 1..20: mol_type = other DNA
ccagcaggaacagtcatgga

SEQ ID NO: 171519 - DNA, 20 bp, synthetic construct
  source 1..20: mol_type = other DNA
tccagcaggaacagtcatgg

SEQ ID NO: 171520 - DNA, 20 bp, synthetic construct
  source 1..20: mol_type = other DNA
ttccagcaggaacagtcatg

SEQ ID NO: 171521 - DNA, 20 bp, synthetic construct
  source 1..20: mol_type = other DNA
cttccagcaggaacagtcat

SEQ ID NO: 171522 - DNA, 20 bp, synthetic construct
  source 1..20: mol_type = other DNA
ccttccagcaggaacagtca

SEQ ID NO: 171523 - DNA, 20 bp, synthetic construct
  source 1..20: mol_type = other DNA
cccttccagcaggaacagtc

SEQ ID NO: 171524 - DNA, 20 bp, synthetic construct
  source 1..20: mol_type = other DNA
gcccttccagcaggaacagt

SEQ ID NO: 171525 - DNA, 20 bp, synthetic construct
  source 1..20: mol_type = other DNA
cgcccttccagcaggaacag

SEQ ID NO: 171526 - DNA, 20 bp, synthetic construct
  source 1..20: mol_type = other DNA
acgcccttccagcaggaaca

SEQ ID NO: 171527 - DNA, 20 bp, synthetic construct
  source 1..20: mol_type = other DNA
cacgcccttccagcaggaac

SEQ ID NO: 171528 - DNA, 20 bp, synthetic construct
  source 1..20: mol_type = other DNA
tcacgcccttccagcaggaa

SEQ ID NO: 171529 - DNA, 20 bp, synthetic construct
  source 1..20: mol_type = other DNA
gtcacgcccttccagcagga

SEQ ID NO: 171530 - DNA, 20 bp, synthetic construct
  source 1..20: mol_type = other DNA
agtcacgcccttccagcagg

SEQ ID NO: 171531 - DNA, 20 bp, synthetic construct
  source 1..20: mol_type = other DNA
aagtcacgcccttccagcag

SEQ ID NO: 171532 - DNA, 20 bp, synthetic construct
  source 1..20: mol_type = other DNA
aaagtcacgcccttccagca

SEQ ID NO: 171533 - DNA, 20 bp, synthetic construct
  source 1..20: mol_type = other DNA
aaaagtcacgcccttccagc

SEQ ID NO: 171534 - DNA, 20 bp, synthetic construct
  source 1..20: mol_type = other DNA
taaaagtcacgcccttccag

SEQ ID NO: 171535 - DNA, 20 bp, synthetic construct
  source 1..20: mol_type = other DNA
ttaaaagtcacgcccttcca

SEQ ID NO: 171536 - DNA, 20 bp, synthetic construct
  source 1..20: mol_type = other DNA
cttaaaagtcacgcccttcc

SEQ ID NO: 171537 - DNA, 20 bp, synthetic construct
  source 1..20: mol_type = other DNA
acttaaaagtcacgcccttc

SEQ ID NO: 171538 - DNA, 20 bp, synthetic construct
  source 1..20: mol_type = other DNA
cacttaaaagtcacgccctt

SEQ ID NO: 171539 - DNA, 20 bp, synthetic construct
  source 1..20: mol_type = other DNA
ccacttaaaagtcacgccct

SEQ ID NO: 171540 - DNA, 20 bp, synthetic construct
  source 1..20: mol_type = other DNA
accacttaaaagtcacgccc

SEQ ID NO: 171541 - DNA, 20 bp, synthetic construct
  source 1..20: mol_type = other DNA
aaccacttaaaagtcacgcc

SEQ ID NO: 171542 - DNA, 20 bp, synthetic construct
  source 1..20: mol_type = other DNA
aaaccacttaaaagtcacgc

SEQ ID NO: 171543 - DNA, 20 bp, synthetic construct
  source 1..20: mol_type = other DNA
gaaaccacttaaaagtcacg

SEQ ID NO: 171544 - DNA, 20 bp, synthetic construct
  source 1..20: mol_type = other DNA
agaaaccacttaaaagtcac

SEQ ID NO: 171545 - DNA, 20 bp, synthetic construct
  source 1..20: mol_type = other DNA
tagaaaccacttaaaagtca

SEQ ID NO: 171546 - DNA, 20 bp, synthetic construct
  source 1..20: mol_type = other DNA
ttagaaaccacttaaaagtc

SEQ ID NO: 171547 - DNA, 20 bp, synthetic construct
  source 1..20: mol_type = other DNA
attagaaaccacttaaaagt

SEQ ID NO: 171548 - DNA, 20 bp, synthetic construct
  source 1..20: mol_type = other DNA
tattagaaaccacttaaaag

SEQ ID NO: 171549 - DNA, 20 bp, synthetic construct
  source 1..20: mol_type = other DNA
atattagaaaccacttaaaa

SEQ ID NO: 171550 - DNA, 20 bp, synthetic construct
  source 1..20: mol_type = other DNA
gatattagaaaccacttaaa

SEQ ID NO: 171551 - DNA, 20 bp, synthetic construct
  source 1..20: mol_type = other DNA
tgatattagaaaccacttaa

SEQ ID NO: 171552 - DNA, 20 bp, synthetic construct
  source 1..20: mol_type = other DNA
ctgatattagaaaccactta

SEQ ID NO: 171553 - DNA, 20 bp, synthetic construct
  source 1..20: mol_type = other DNA
cctgatattagaaaccactt

SEQ ID NO: 171554 - DNA, 20 bp, synthetic construct
  source 1..20: mol_type = other DNA
gcctgatattagaaaccact

SEQ ID NO: 171555 - DNA, 20 bp, synthetic construct
  source 1..20: mol_type = other DNA
tgcctgatattagaaaccac

SEQ ID NO: 171556 - DNA, 20 bp, synthetic construct
  source 1..20: mol_type = other DNA
atgcctgatattagaaacca

SEQ ID NO: 171557 - DNA, 20 bp, synthetic construct
  source 1..20: mol_type = other DNA
aatgcctgatattagaaacc

SEQ ID NO: 171558 - DNA, 20 bp, synthetic construct
  source 1..20: mol_type = other DNA
caatgcctgatattagaaac

SEQ ID NO: 171559 - DNA, 20 bp, synthetic construct
  source 1..20: mol_type = other DNA
gcaatgcctgatattagaaa

SEQ ID NO: 171560 - DNA, 20 bp, synthetic construct
  source 1..20: mol_type = other DNA
agcaatgcctgatattagaa

SEQ ID NO: 171561 - DNA, 20 bp, synthetic construct
  source 1..20: mol_type = other DNA
gagcaatgcctgatattaga

SEQ ID NO: 171562 - DNA, 20 bp, synthetic construct
  source 1..20: mol_type = other DNA
ggagcaatgcctgatattag

SEQ ID NO: 171563 - DNA, 20 bp, synthetic construct
  source 1..20: mol_type = other DNA
aggagcaatgcctgatatta

SEQ ID NO: 171564 - DNA, 20 bp, synthetic construct
  source 1..20: mol_type = other DNA
gaggagcaatgcctgatatt

SEQ ID NO: 171565 - DNA, 20 bp, synthetic construct
  source 1..20: mol_type = other DNA
ggaggagcaatgcctgatat

SEQ ID NO: 171566 - DNA, 20 bp, synthetic construct
  source 1..20: mol_type = other DNA
cggaggagcaatgcctgata

SEQ ID NO: 171567 - DNA, 20 bp, synthetic construct
  source 1..20: mol_type = other DNA
tcggaggagcaatgcctgat

SEQ ID NO: 171568 - DNA, 20 bp, synthetic construct
  source 1..20: mol_type = other DNA
gtcggaggagcaatgcctga

SEQ ID NO: 171569 - DNA, 20 bp, synthetic construct
  source 1..20: mol_type = other DNA
tgtcggaggagcaatgcctg

SEQ ID NO: 171570 - DNA, 20 bp, synthetic construct
  source 1..20: mol_type = other DNA
ctgtcggaggagcaatgcct

SEQ ID NO: 171571 - DNA, 20 bp, synthetic construct
  source 1..20: mol_type = other DNA
cctgtcggaggagcaatgcc

SEQ ID NO: 171572 - DNA, 20 bp, synthetic construct
  source 1..20: mol_type = other DNA
tcctgtcggaggagcaatgc

SEQ ID NO: 171573 - DNA, 20 bp, synthetic construct
  source 1..20: mol_type = other DNA
ttcctgtcggaggagcaatg

SEQ ID NO: 171574 - DNA, 20 bp, synthetic construct
  source 1..20: mol_type = other DNA
gttcctgtcggaggagcaat

SEQ ID NO: 171575 - DNA, 20 bp, synthetic construct
  source 1..20: mol_type = other DNA
tgttcctgtcggaggagcaa

SEQ ID NO: 171576 - DNA, 20 bp, synthetic construct
  source 1..20: mol_type = other DNA
ttgttcctgtcggaggagca

SEQ ID NO: 171577 - DNA, 20 bp, synthetic construct
  source 1..20: mol_type = other DNA
tttgttcctgtcggaggagc

SEQ ID NO: 171578 - DNA, 20 bp, synthetic construct
  source 1..20: mol_type = other DNA
ttttgttcctgtcggaggag

SEQ ID NO: 171579 - DNA, 20 bp, synthetic construct
  source 1..20: mol_type = other DNA
cttttgttcctgtcggagga

SEQ ID NO: 171580 - DNA, 20 bp, synthetic construct
  source 1..20: mol_type = other DNA
tcttttgttcctgtcggagg

SEQ ID NO: 171581 - DNA, 20 bp, synthetic construct
  source 1..20: mol_type = other DNA
ttcttttgttcctgtcggag

SEQ ID NO: 171582 - DNA, 20 bp, synthetic construct
  source 1..20: mol_type = other DNA
tttcttttgttcctgtcgga

SEQ ID NO: 171583 - DNA, 20 bp, synthetic construct
  source 1..20: mol_type = other DNA
atttcttttgttcctgtcgg

SEQ ID NO: 171584 - DNA, 20 bp, synthetic construct
  source 1..20: mol_type = other DNA
catttcttttgttcctgtcg

SEQ ID NO: 171585 - DNA, 20 bp, synthetic construct
  source 1..20: mol_type = other DNA
ccatttcttttgttcctgtc

SEQ ID NO: 171586 - DNA, 20 bp, synthetic construct
  source 1..20: mol_type = other DNA
tccatttcttttgttcctgt

SEQ ID NO: 171587 - DNA, 20 bp, synthetic construct
  source 1..20: mol_type = other DNA
atccatttcttttgttcctg

SEQ ID NO: 171588 - DNA, 20 bp, synthetic construct
  source 1..20: mol_type = other DNA
tatccatttcttttgttcct

SEQ ID NO: 171589 - DNA, 20 bp, synthetic construct
  source 1..20: mol_type = other DNA
gtatccatttcttttgttcc

SEQ ID NO: 171590 - DNA, 20 bp, synthetic construct
  source 1..20: mol_type = other DNA
agtatccatttcttttgttc

SEQ ID NO: 171591 - DNA, 20 bp, synthetic construct
  source 1..20: mol_type = other DNA
cagtatccatttcttttgtt

SEQ ID NO: 171592 - DNA, 20 bp, synthetic construct
  source 1..20: mol_type = other DNA
gcagtatccatttcttttgt

SEQ ID NO: 171593 - DNA, 20 bp, synthetic construct
  source 1..20: mol_type = other DNA
ggcagtatccatttcttttg

SEQ ID NO: 171594 - DNA, 20 bp, synthetic construct
  source 1..20: mol_type = other DNA
gggcagtatccatttctttt

SEQ ID NO: 171595 - DNA, 20 bp, synthetic construct
  source 1..20: mol_type = other DNA
tgggcagtatccatttcttt

SEQ ID NO: 171596 - DNA, 20 bp, synthetic construct
  source 1..20: mol_type = other DNA
atgggcagtatccatttctt

SEQ ID NO: 171597 - DNA, 20 bp, synthetic construct
  source 1..20: mol_type = other DNA
tatgggcagtatccatttct

SEQ ID NO: 171598 - DNA, 20 bp, synthetic construct
  source 1..20: mol_type = other DNA
ttatgggcagtatccatttc

SEQ ID NO: 171599 - DNA, 20 bp, synthetic construct
  source 1..20: mol_type = other DNA
tttatgggcagtatccattt

SEQ ID NO: 171600 - DNA, 20 bp, synthetic construct
  source 1..20: mol_type = other DNA
atttatgggcagtatccatt

SEQ ID NO: 171601 - DNA, 20 bp, synthetic construct
  source 1..20: mol_type = other DNA
aatttatgggcagtatccat

SEQ ID NO: 171602 - DNA, 20 bp, synthetic construct
  source 1..20: mol_type = other DNA
caatttatgggcagtatcca

SEQ ID NO: 171603 - DNA, 20 bp, synthetic construct
  source 1..20: mol_type = other DNA
acaatttatgggcagtatcc

SEQ ID NO: 171604 - DNA, 20 bp, synthetic construct
  source 1..20: mol_type = other DNA
aacaatttatgggcagtatc

SEQ ID NO: 171605 - DNA, 20 bp, synthetic construct
  source 1..20: mol_type = other DNA
taacaatttatgggcagtat

SEQ ID NO: 171606 - DNA, 20 bp, synthetic construct
  source 1..20: mol_type = other DNA
ctaacaatttatgggcagta

SEQ ID NO: 171607 - DNA, 20 bp, synthetic construct
  source 1..20: mol_type = other DNA
tctaacaatttatgggcagt

SEQ ID NO: 171608 - DNA, 20 bp, synthetic construct
  source 1..20: mol_type = other DNA
ttctaacaatttatgggcag

SEQ ID NO: 171609 - DNA, 20 bp, synthetic construct
  source 1..20: mol_type = other DNA
tttctaacaatttatgggca

SEQ ID NO: 171610 - DNA, 20 bp, synthetic construct
  source 1..20: mol_type = other DNA
ttttctaacaatttatgggc

SEQ ID NO: 171611 - DNA, 20 bp, synthetic construct
  source 1..20: mol_type = other DNA
gttttctaacaatttatggg

SEQ ID NO: 171612 - DNA, 20 bp, synthetic construct
  source 1..20: mol_type = other DNA
agttttctaacaatttatgg

SEQ ID NO: 171613 - DNA, 20 bp, synthetic construct
  source 1..20: mol_type = other DNA
aagttttctaacaatttatg

SEQ ID NO: 171614 - DNA, 20 bp, synthetic construct
  source 1..20: mol_type = other DNA
taagttttctaacaatttat

SEQ ID NO: 171615 - DNA, 20 bp, synthetic construct
  source 1..20: mol_type = other DNA
ctaagttttctaacaattta

SEQ ID NO: 171616 - DNA, 20 bp, synthetic construct
  source 1..20: mol_type = other DNA
tctaagttttctaacaattt

SEQ ID NO: 171617 - DNA, 20 bp, synthetic construct
  source 1..20: mol_type = other DNA
ttctaagttttctaacaatt

SEQ ID NO: 171618 - DNA, 20 bp, synthetic construct
  source 1..20: mol_type = other DNA
attctaagttttctaacaat

SEQ ID NO: 171619 - DNA, 20 bp, synthetic construct
  source 1..20: mol_type = other DNA
gattctaagttttctaacaa

SEQ ID NO: 171620 - DNA, 20 bp, synthetic construct
  source 1..20: mol_type = other DNA
cgattctaagttttctaaca

SEQ ID NO: 171621 - DNA, 20 bp, synthetic construct
  source 1..20: mol_type = other DNA
gcgattctaagttttctaac

SEQ ID NO: 171622 - DNA, 20 bp, synthetic construct
  source 1..20: mol_type = other DNA
agcgattctaagttttctaa

SEQ ID NO: 171623 - DNA, 20 bp, synthetic construct
  source 1..20: mol_type = other DNA
aagcgattctaagttttcta

SEQ ID NO: 171624 - DNA, 20 bp, synthetic construct
  source 1..20: mol_type = other DNA
aaagcgattctaagttttct

SEQ ID NO: 171625 - DNA, 20 bp, synthetic construct
  source 1..20: mol_type = other DNA
caaagcgattctaagttttc

SEQ ID NO: 171626 - DNA, 20 bp, synthetic construct
  source 1..20: mol_type = other DNA
tcaaagcgattctaagtttt

SEQ ID NO: 171627 - DNA, 20 bp, synthetic construct
  source 1..20: mol_type = other DNA
atcaaagcgattctaagttt

SEQ ID NO: 171628 - DNA, 20 bp, synthetic construct
  source 1..20: mol_type = other DNA
aatcaaagcgattctaagtt

SEQ ID NO: 171629 - DNA, 20 bp, synthetic construct
  source 1..20: mol_type = other DNA
caatcaaagcgattctaagt

SEQ ID NO: 171630 - DNA, 20 bp, synthetic construct
  source 1..20: mol_type = other DNA
tcaatcaaagcgattctaag

SEQ ID NO: 171631 - DNA, 20 bp, synthetic construct
  source 1..20: mol_type = other DNA
ctcaatcaaagcgattctaa

SEQ ID NO: 171632 - DNA, 20 bp, synthetic construct
  source 1..20: mol_type = other DNA
cctcaatcaaagcgattcta

SEQ ID NO: 171633 - DNA, 20 bp, synthetic construct
  source 1..20: mol_type = other DNA
tcctcaatcaaagcgattct

SEQ ID NO: 171634 - DNA, 20 bp, synthetic construct
  source 1..20: mol_type = other DNA
ttcctcaatcaaagcgattc

SEQ ID NO: 171635 - DNA, 20 bp, synthetic construct
  source 1..20: mol_type = other DNA
tttcctcaatcaaagcgatt

SEQ ID NO: 171636 - DNA, 20 bp, synthetic construct
  source 1..20: mol_type = other DNA
ctttcctcaatcaaagcgat

SEQ ID NO: 171637 - DNA, 20 bp, synthetic construct
  source 1..20: mol_type = other DNA
cctttcctcaatcaaagcga

SEQ ID NO: 171638 - DNA, 20 bp, synthetic construct
  source 1..20: mol_type = other DNA
acctttcctcaatcaaagcg

SEQ ID NO: 171639 - DNA, 20 bp, synthetic construct
  source 1..20: mol_type = other DNA
aacctttcctcaatcaaagc

SEQ ID NO: 171640 - DNA, 20 bp, synthetic construct
  source 1..20: mol_type = other DNA
taacctttcctcaatcaaag

SEQ ID NO: 171641 - DNA, 20 bp, synthetic construct
  source 1..20: mol_type = other DNA
ctaacctttcctcaatcaaa

SEQ ID NO: 171642 - DNA, 20 bp, synthetic construct
  source 1..20: mol_type = other DNA
tctaacctttcctcaatcaa

SEQ ID NO: 171643 - DNA, 20 bp, synthetic construct
  source 1..20: mol_type = other DNA
atctaacctttcctcaatca

SEQ ID NO: 171644 - DNA, 20 bp, synthetic construct
  source 1..20: mol_type = other DNA
aatctaacctttcctcaatc

SEQ ID NO: 171645 - DNA, 20 bp, synthetic construct
  source 1..20: mol_type = other DNA
aaatctaacctttcctcaat

SEQ ID NO: 171646 - DNA, 20 bp, synthetic construct
  source 1..20: mol_type = other DNA
taaatctaacctttcctcaa

SEQ ID NO: 171647 - DNA, 20 bp, synthetic construct
  source 1..20: mol_type = other DNA
ataaatctaacctttcctca

SEQ ID NO: 171648 - DNA, 20 bp, synthetic construct
  source 1..20: mol_type = other DNA
aataaatctaacctttcctc

SEQ ID NO: 171649 - DNA, 20 bp, synthetic construct
  source 1..20: mol_type = other DNA
gaataaatctaacctttcct

SEQ ID NO: 171650 - DNA, 20 bp, synthetic construct
  source 1..20: mol_type = other DNA
ggaataaatctaacctttcc

SEQ ID NO: 171651 - DNA, 20 bp, synthetic construct
  source 1..20: mol_type = other DNA
cggaataaatctaacctttc

SEQ ID NO: 171652 - DNA, 20 bp, synthetic construct
  source 1..20: mol_type = other DNA
ccggaataaatctaaccttt

SEQ ID NO: 171653 - DNA, 20 bp, synthetic construct
  source 1..20: mol_type = other DNA
accggaataaatctaacctt

SEQ ID NO: 171654 - DNA, 20 bp, synthetic construct
  source 1..20: mol_type = other DNA
aaccggaataaatctaacct

SEQ ID NO: 171655 - DNA, 20 bp, synthetic construct
  source 1..20: mol_type = other DNA
caaccggaataaatctaacc

SEQ ID NO: 171656 - DNA, 20 bp, synthetic construct
  source 1..20: mol_type = other DNA
ccaaccggaataaatctaac

SEQ ID NO: 171657 - DNA, 20 bp, synthetic construct
  source 1..20: mol_type = other DNA
tccaaccggaataaatctaa

SEQ ID NO: 171658 - DNA, 20 bp, synthetic construct
  source 1..20: mol_type = other DNA
ttccaaccggaataaatcta

SEQ ID NO: 171659 - DNA, 20 bp, synthetic construct
  source 1..20: mol_type = other DNA
tttccaaccggaataaatct

SEQ ID NO: 171660 - DNA, 20 bp, synthetic construct
  source 1..20: mol_type = other DNA
ttttccaaccggaataaatc

SEQ ID NO: 171661 - DNA, 20 bp, synthetic construct
  source 1..20: mol_type = other DNA
tttttccaaccggaataaat

SEQ ID NO: 171662 - DNA, 20 bp, synthetic construct
  source 1..20: mol_type = other DNA
ctttttccaaccggaataaa

SEQ ID NO: 171663 - DNA, 20 bp, synthetic construct
  source 1..20: mol_type = other DNA
actttttccaaccggaataa

SEQ ID NO: 171664 - DNA, 20 bp, synthetic construct
  source 1..20: mol_type = other DNA
cactttttccaaccggaata

SEQ ID NO: 171665 - DNA, 20 bp, synthetic construct
  source 1..20: mol_type = other DNA
ccactttttccaaccggaat

SEQ ID NO: 171666 - DNA, 20 bp, synthetic construct
  source 1..20: mol_type = other DNA
gccactttttccaaccggaa

SEQ ID NO: 171667 - DNA, 20 bp, synthetic construct
  source 1..20: mol_type = other DNA
ggccactttttccaaccgga

SEQ ID NO: 171668 - DNA, 20 bp, synthetic construct
  source 1..20: mol_type = other DNA
aggccactttttccaaccgg

SEQ ID NO: 171669 - DNA, 20 bp, synthetic construct
  source 1..20: mol_type = other DNA
aaggccactttttccaaccg

SEQ ID NO: 171670 - DNA, 20 bp, synthetic construct
  source 1..20: mol_type = other DNA
aaaggccactttttccaacc

SEQ ID NO: 171671 - DNA, 20 bp, synthetic construct
  source 1..20: mol_type = other DNA
gaaaggccactttttccaac

SEQ ID NO: 171672 - DNA, 20 bp, synthetic construct
  source 1..20: mol_type = other DNA
agaaaggccactttttccaa

SEQ ID NO: 171673 - DNA, 20 bp, synthetic construct
  source 1..20: mol_type = other DNA
tagaaaggccactttttcca

SEQ ID NO: 171674 - DNA, 20 bp, synthetic construct
  source 1..20: mol_type = other DNA
atagaaaggccactttttcc

SEQ ID NO: 171675 - DNA, 20 bp, synthetic construct
  source 1..20: mol_type = other DNA
aatagaaaggccactttttc

SEQ ID NO: 171676 - DNA, 20 bp, synthetic construct
  source 1..20: mol_type = other DNA
taatagaaaggccacttttt

SEQ ID NO: 171677 - DNA, 20 bp, synthetic construct
  source 1..20: mol_type = other DNA
ttaatagaaaggccactttt

SEQ ID NO: 171678 - DNA, 20 bp, synthetic construct
  source 1..20: mol_type = other DNA
tttaatagaaaggccacttt

SEQ ID NO: 171679 - DNA, 20 bp, synthetic construct
  source 1..20: mol_type = other DNA
gtttaatagaaaggccactt

SEQ ID NO: 171680 - DNA, 20 bp, synthetic construct
  source 1..20: mol_type = other DNA
cgtttaatagaaaggccact

SEQ ID NO: 171681 - DNA, 20 bp, synthetic construct
  source 1..20: mol_type = other DNA
acgtttaatagaaaggccac

SEQ ID NO: 171682 - DNA, 20 bp, synthetic construct
  source 1..20: mol_type = other DNA
cacgtttaatagaaaggcca

SEQ ID NO: 171683 - DNA, 20 bp, synthetic construct
  source 1..20: mol_type = other DNA
gcacgtttaatagaaaggcc

SEQ ID NO: 171684 - DNA, 20 bp, synthetic construct
  source 1..20: mol_type = other DNA
ggcacgtttaatagaaaggc

SEQ ID NO: 171685 - DNA, 20 bp, synthetic construct
  source 1..20: mol_type = other DNA
gggcacgtttaatagaaagg

SEQ ID NO: 171686 - DNA, 20 bp, synthetic construct
  source 1..20: mol_type = other DNA
agggcacgtttaatagaaag

SEQ ID NO: 171687 - DNA, 20 bp, synthetic construct
  source 1..20: mol_type = other DNA
aagggcacgtttaatagaaa

SEQ ID NO: 171688 - DNA, 20 bp, synthetic construct
  source 1..20: mol_type = other DNA
aaagggcacgtttaatagaa

SEQ ID NO: 171689 - DNA, 20 bp, synthetic construct
  source 1..20: mol_type = other DNA
caaagggcacgtttaataga

SEQ ID NO: 171690 - DNA, 20 bp, synthetic construct
  source 1..20: mol_type = other DNA
tcaaagggcacgtttaatag

SEQ ID NO: 171691 - DNA, 20 bp, synthetic construct
  source 1..20: mol_type = other DNA
gtcaaagggcacgtttaata

SEQ ID NO: 171692 - DNA, 20 bp, synthetic construct
  source 1..20: mol_type = other DNA
ggtcaaagggcacgtttaat

SEQ ID NO: 171693 - DNA, 20 bp, synthetic construct
  source 1..20: mol_type = other DNA
gggtcaaagggcacgtttaa

SEQ ID NO: 171694 - DNA, 20 bp, synthetic construct
  source 1..20: mol_type = other DNA
agggtcaaagggcacgttta

SEQ ID NO: 171695 - DNA, 20 bp, synthetic construct
  source 1..20: mol_type = other DNA
gagggtcaaagggcacgttt

SEQ ID NO: 171696 - DNA, 20 bp, synthetic construct
  source 1..20: mol_type = other DNA
tgagggtcaaagggcacgtt

SEQ ID NO: 171697 - DNA, 20 bp, synthetic construct
  source 1..20: mol_type = other DNA
atgagggtcaaagggcacgt

SEQ ID NO: 171698 - DNA, 20 bp, synthetic construct
  source 1..20: mol_type = other DNA
catgagggtcaaagggcacg

SEQ ID NO: 171699 - DNA, 20 bp, synthetic construct
  source 1..20: mol_type = other DNA
gcatgagggtcaaagggcac

SEQ ID NO: 171700 - DNA, 20 bp, synthetic construct
  source 1..20: mol_type = other DNA
ggcatgagggtcaaagggca

SEQ ID NO: 171701 - DNA, 20 bp, synthetic construct
  source 1..20: mol_type = other DNA
gggcatgagggtcaaagggc

SEQ ID NO: 171702 - DNA, 20 bp, synthetic construct
  source 1..20: mol_type = other DNA
agggcatgagggtcaaaggg

SEQ ID NO: 171703 - DNA, 20 bp, synthetic construct
  source 1..20: mol_type = other DNA
aagggcatgagggtcaaagg

SEQ ID NO: 171704 - DNA, 20 bp, synthetic construct
  source 1..20: mol_type = other DNA
caagggcatgagggtcaaag

SEQ ID NO: 171705 - DNA, 20 bp, synthetic construct
  source 1..20: mol_type = other DNA
ccaagggcatgagggtcaaa

SEQ ID NO: 171706 - DNA, 20 bp, synthetic construct
  source 1..20: mol_type = other DNA
tccaagggcatgagggtcaa

SEQ ID NO: 171707 - DNA, 20 bp, synthetic construct
  source 1..20: mol_type = other DNA
ctccaagggcatgagggtca

SEQ ID NO: 171708 - DNA, 20 bp, synthetic construct
  source 1..20: mol_type = other DNA
cctccaagggcatgagggtc

SEQ ID NO: 171709 - DNA, 20 bp, synthetic construct
  source 1..20: mol_type = other DNA
acctccaagggcatgagggt

SEQ ID NO: 171710 - DNA, 20 bp, synthetic construct
  source 1..20: mol_type = other DNA
gacctccaagggcatgaggg

SEQ ID NO: 171711 - DNA, 20 bp, synthetic construct
  source 1..20: mol_type = other DNA
cgacctccaagggcatgagg

SEQ ID NO: 171712 - DNA, 20 bp, synthetic construct
  source 1..20: mol_type = other DNA
ccgacctccaagggcatgag

SEQ ID NO: 171713 - DNA, 20 bp, synthetic construct
  source 1..20: mol_type = other DNA
accgacctccaagggcatga

SEQ ID NO: 171714 - DNA, 20 bp, synthetic construct
  source 1..20: mol_type = other DNA
caccgacctccaagggcatg

SEQ ID NO: 171715 - DNA, 20 bp, synthetic construct
  source 1..20: mol_type = other DNA
gcaccgacctccaagggcat

SEQ ID NO: 171716 - DNA, 20 bp, synthetic construct
  source 1..20: mol_type = other DNA
ggcaccgacctccaagggca

SEQ ID NO: 171717 - DNA, 20 bp, synthetic construct
  source 1..20: mol_type = other DNA
tggcaccgacctccaagggc

SEQ ID NO: 171718 - DNA, 20 bp, synthetic construct
  source 1..20: mol_type = other DNA
ctggcaccgacctccaaggg

SEQ ID NO: 171719 - DNA, 20 bp, synthetic construct
  source 1..20: mol_type = other DNA
gctggcaccgacctccaagg

SEQ ID NO: 171720 - DNA, 20 bp, synthetic construct
  source 1..20: mol_type = other DNA
ggctggcaccgacctccaag

SEQ ID NO: 171721 - DNA, 20 bp, synthetic construct
  source 1..20: mol_type = other DNA
aggctggcaccgacctccaa

SEQ ID NO: 171722 - DNA, 20 bp, synthetic construct
  source 1..20: mol_type = other DNA
caggctggcaccgacctcca

SEQ ID NO: 171723 - DNA, 20 bp, synthetic construct
  source 1..20: mol_type = other DNA
ccaggctggcaccgacctcc

SEQ ID NO: 171724 - DNA, 20 bp, synthetic construct
  source 1..20: mol_type = other DNA
tccaggctggcaccgacctc

SEQ ID NO: 171725 - DNA, 20 bp, synthetic construct
  source 1..20: mol_type = other DNA
ctccaggctggcaccgacct

SEQ ID NO: 171726 - DNA, 20 bp, synthetic construct
  source 1..20: mol_type = other DNA
tctccaggctggcaccgacc

SEQ ID NO: 171727 - DNA, 20 bp, synthetic construct
  source 1..20: mol_type = other DNA
atctccaggctggcaccgac

SEQ ID NO: 171728 - DNA, 20 bp, synthetic construct
  source 1..20: mol_type = other DNA
catctccaggctggcaccga

SEQ ID NO: 171729 - DNA, 20 bp, synthetic construct
  source 1..20: mol_type = other DNA
ccatctccaggctggcaccg

SEQ ID NO: 171730 - DNA, 20 bp, synthetic construct
  source 1..20: mol_type = other DNA
cccatctccaggctggcacc

SEQ ID NO: 171731 - DNA, 20 bp, synthetic construct
  source 1..20: mol_type = other DNA
tcccatctccaggctggcac

SEQ ID NO: 171732 - DNA, 20 bp, synthetic construct
  source 1..20: mol_type = other DNA
atcccatctccaggctggca

SEQ ID NO: 171733 - DNA, 20 bp, synthetic construct
  source 1..20: mol_type = other DNA
tatcccatctccaggctggc

SEQ ID NO: 171734 - DNA, 20 bp, synthetic construct
  source 1..20: mol_type = other DNA
ttatcccatctccaggctgg

SEQ ID NO: 171735 - DNA, 20 bp, synthetic construct
  source 1..20: mol_type = other DNA
cttatcccatctccaggctg

SEQ ID NO: 171736 - DNA, 20 bp, synthetic construct
  source 1..20: mol_type = other DNA
tcttatcccatctccaggct

SEQ ID NO: 171737 - DNA, 20 bp, synthetic construct
  source 1..20: mol_type = other DNA
atcttatcccatctccaggc

SEQ ID NO: 171738 - DNA, 20 bp, synthetic construct
  source 1..20: mol_type = other DNA
aatcttatcccatctccagg

SEQ ID NO: 171739 - DNA, 20 bp, synthetic construct
  source 1..20: mol_type = other DNA
caatcttatcccatctccag

SEQ ID NO: 171740 - DNA, 20 bp, synthetic construct
  source 1..20: mol_type = other DNA
acaatcttatcccatctcca

SEQ ID NO: 171741 - DNA, 20 bp, synthetic construct
  source 1..20: mol_type = other DNA
cacaatcttatcccatctcc

SEQ ID NO: 171742 - DNA, 20 bp, synthetic construct
  source 1..20: mol_type = other DNA
ccacaatcttatcccatctc

SEQ ID NO: 171743 - DNA, 20 bp, synthetic construct
  source 1..20: mol_type = other DNA
accacaatcttatcccatct

SEQ ID NO: 171744 - DNA, 20 bp, synthetic construct
  source 1..20: mol_type = other DNA
aaccacaatcttatcccatc

SEQ ID NO: 171745 - DNA, 20 bp, synthetic construct
  source 1..20: mol_type = other DNA
aaaccacaatcttatcccat

SEQ ID NO: 171746 - DNA, 20 bp, synthetic construct
  source 1..20: mol_type = other DNA
aaaaccacaatcttatccca

SEQ ID NO: 171747 - DNA, 20 bp, synthetic construct
  source 1..20: mol_type = other DNA
gaaaaccacaatcttatccc

SEQ ID NO: 171748 - DNA, 20 bp, synthetic construct
  source 1..20: mol_type = other DNA
ggaaaaccacaatcttatcc

SEQ ID NO: 171749 - DNA, 20 bp, synthetic construct
  source 1..20: mol_type = other DNA
aggaaaaccacaatcttatc

SEQ ID NO: 171750 - DNA, 20 bp, synthetic construct
  source 1..20: mol_type = other DNA
aaggaaaaccacaatcttat

SEQ ID NO: 171751 - DNA, 20 bp, synthetic construct
  source 1..20: mol_type = other DNA
gaaggaaaaccacaatctta

SEQ ID NO: 171752 - DNA, 20 bp, synthetic construct
  source 1..20: mol_type = other DNA
agaaggaaaaccacaatctt

SEQ ID NO: 171753 - DNA, 20 bp, synthetic construct
  source 1..20: mol_type = other DNA
cagaaggaaaaccacaatct

SEQ ID NO: 171754 - DNA, 20 bp, synthetic construct
  source 1..20: mol_type = other DNA
gcagaaggaaaaccacaatc

SEQ ID NO: 171755 - DNA, 20 bp, synthetic construct
  source 1..20: mol_type = other DNA
ggcagaaggaaaaccacaat

SEQ ID NO: 171756 - DNA, 20 bp, synthetic construct
  source 1..20: mol_type = other DNA
aggcagaaggaaaaccacaa

SEQ ID NO: 171757 - DNA, 20 bp, synthetic construct
  source 1..20: mol_type = other DNA
aaggcagaaggaaaaccaca

SEQ ID NO: 171758 - DNA, 20 bp, synthetic construct
  source 1..20: mol_type = other DNA
aaaggcagaaggaaaaccac

SEQ ID NO: 171759 - DNA, 20 bp, synthetic construct
  source 1..20: mol_type = other DNA
aaaaggcagaaggaaaacca

SEQ ID NO: 171760 - DNA, 20 bp, synthetic construct
  source 1..20: mol_type = other DNA
aaaaaggcagaaggaaaacc

SEQ ID NO: 171761 - DNA, 20 bp, synthetic construct
  source 1..20: mol_type = other DNA
taaaaaggcagaaggaaaac

SEQ ID NO: 171762 - DNA, 20 bp, synthetic construct
  source 1..20: mol_type = other DNA
ttaaaaaggcagaaggaaaa

SEQ ID NO: 171763 - DNA, 20 bp, synthetic construct
  source 1..20: mol_type = other DNA
gttaaaaaggcagaaggaaa

SEQ ID NO: 171764 - DNA, 20 bp, synthetic construct
  source 1..20: mol_type = other DNA
tgttaaaaaggcagaaggaa

SEQ ID NO: 171765 - DNA, 20 bp, synthetic construct
  source 1..20: mol_type = other DNA
atgttaaaaaggcagaagga

SEQ ID NO: 171766 - DNA, 20 bp, synthetic construct
  source 1..20: mol_type = other DNA
gatgttaaaaaggcagaagg

SEQ ID NO: 171767 - DNA, 20 bp, synthetic construct
  source 1..20: mol_type = other DNA
agatgttaaaaaggcagaag

SEQ ID NO: 171768 - DNA, 20 bp, synthetic construct
  source 1..20: mol_type = other DNA
cagatgttaaaaaggcagaa

SEQ ID NO: 171769 - DNA, 20 bp, synthetic construct
  source 1..20: mol_type = other DNA
acagatgttaaaaaggcaga

SEQ ID NO: 171770 - DNA, 20 bp, synthetic construct
  source 1..20: mol_type = other DNA
aacagatgttaaaaaggcag

SEQ ID NO: 171771 - DNA, 20 bp, synthetic construct
  source 1..20: mol_type = other DNA
caacagatgttaaaaaggca

SEQ ID NO: 171772 - DNA, 20 bp, synthetic construct
  source 1..20: mol_type = other DNA
acaacagatgttaaaaaggc

SEQ ID NO: 171773 - DNA, 20 bp, synthetic construct
  source 1..20: mol_type = other DNA
aacaacagatgttaaaaagg

SEQ ID NO: 171774 - DNA, 20 bp, synthetic construct
  source 1..20: mol_type = other DNA
taacaacagatgttaaaaag

SEQ ID NO: 171775 - DNA, 20 bp, synthetic construct
  source 1..20: mol_type = other DNA
gtaacaacagatgttaaaaa

SEQ ID NO: 171776 - DNA, 20 bp, synthetic construct
  source 1..20: mol_type = other DNA
tgtaacaacagatgttaaaa

SEQ ID NO: 171777 - DNA, 20 bp, synthetic construct
  source 1..20: mol_type = other DNA
ctgtaacaacagatgttaaa

SEQ ID NO: 171778 - DNA, 20 bp, synthetic construct
  source 1..20: mol_type = other DNA
actgtaacaacagatgttaa

SEQ ID NO: 171779 - DNA, 20 bp, synthetic construct
  source 1..20: mol_type = other DNA
gactgtaacaacagatgtta

SEQ ID NO: 171780 - DNA, 20 bp, synthetic construct
  source 1..20: mol_type = other DNA
ggactgtaacaacagatgtt

SEQ ID NO: 171781 - DNA, 20 bp, synthetic construct
  source 1..20: mol_type = other DNA
tggactgtaacaacagatgt

SEQ ID NO: 171782 - DNA, 20 bp, synthetic construct
  source 1..20: mol_type = other DNA
atggactgtaacaacagatg

SEQ ID NO: 171783 - DNA, 20 bp, synthetic construct
  source 1..20: mol_type = other DNA
aatggactgtaacaacagat

SEQ ID NO: 171784 - DNA, 20 bp, synthetic construct
  source 1..20: mol_type = other DNA
aaatggactgtaacaacaga

SEQ ID NO: 171785 - DNA, 20 bp, synthetic construct
  source 1..20: mol_type = other DNA
caaatggactgtaacaacag

SEQ ID NO: 171786 - DNA, 20 bp, synthetic construct
  source 1..20: mol_type = other DNA
acaaatggactgtaacaaca

SEQ ID NO: 171787 - DNA, 20 bp, synthetic construct
  source 1..20: mol_type = other DNA
aacaaatggactgtaacaac

SEQ ID NO: 171788 - DNA, 20 bp, synthetic construct
  source 1..20: mol_type = other DNA
caacaaatggactgtaacaa

SEQ ID NO: 171789 - DNA, 20 bp, synthetic construct
  source 1..20: mol_type = other DNA
tcaacaaatggactgtaaca

SEQ ID NO: 171790 - DNA, 20 bp, synthetic construct
  source 1..20: mol_type = other DNA
ttcaacaaatggactgtaac

SEQ ID NO: 171791 - DNA, 20 bp, synthetic construct
  source 1..20: mol_type = other DNA
tttcaacaaatggactgtaa

SEQ ID NO: 171792 - DNA, 20 bp, synthetic construct
  source 1..20: mol_type = other DNA
ttttcaacaaatggactgta

SEQ ID NO: 171793 - DNA, 20 bp, synthetic construct
  source 1..20: mol_type = other DNA
attttcaacaaatggactgt

SEQ ID NO: 171794 - DNA, 20 bp, synthetic construct
  source 1..20: mol_type = other DNA
aattttcaacaaatggactg

SEQ ID NO: 171795 - DNA, 20 bp, synthetic construct
  source 1..20: mol_type = other DNA
aaattttcaacaaatggact

SEQ ID NO: 171796 - DNA, 20 bp, synthetic construct
  source 1..20: mol_type = other DNA
taaattttcaacaaatggac

SEQ ID NO: 171797 - DNA, 20 bp, synthetic construct
  source 1..20: mol_type = other DNA
ttaaattttcaacaaatgga

SEQ ID NO: 171798 - DNA, 20 bp, synthetic construct
  source 1..20: mol_type = other DNA
tttaaattttcaacaaatgg

SEQ ID NO: 171799 - DNA, 20 bp, synthetic construct
  source 1..20: mol_type = other DNA
ctttaaattttcaacaaatg

SEQ ID NO: 171800 - DNA, 20 bp, synthetic construct
  source 1..20: mol_type = other DNA
tctttaaattttcaacaaat

SEQ ID NO: 171801 - DNA, 20 bp, synthetic construct
  source 1..20: mol_type = other DNA
ttctttaaattttcaacaaa

SEQ ID NO: 171802 - DNA, 20 bp, synthetic construct
  source 1..20: mol_type = other DNA
tttctttaaattttcaacaa

SEQ ID NO: 171803 - DNA, 20 bp, synthetic construct
  source 1..20: mol_type = other DNA
gtttctttaaattttcaaca

SEQ ID NO: 171804 - DNA, 20 bp, synthetic construct
  source 1..20: mol_type = other DNA
agtttctttaaattttcaac

SEQ ID NO: 171805 - DNA, 20 bp, synthetic construct
  source 1..20: mol_type = other DNA
cagtttctttaaattttcaa

SEQ ID NO: 171806 - DNA, 20 bp, synthetic construct
  source 1..20: mol_type = other DNA
acagtttctttaaattttca

SEQ ID NO: 171807 - DNA, 20 bp, synthetic construct
  source 1..20: mol_type = other DNA
aacagtttctttaaattttc

SEQ ID NO: 171808 - DNA, 20 bp, synthetic construct
  source 1..20: mol_type = other DNA
aaacagtttctttaaatttt

SEQ ID NO: 171809 - DNA, 20 bp, synthetic construct
  source 1..20: mol_type = other DNA
aaaacagtttctttaaattt

SEQ ID NO: 171810 - DNA, 20 bp, synthetic construct
  source 1..20: mol_type = other DNA
taaaacagtttctttaaatt

SEQ ID NO: 171811 - DNA, 20 bp, synthetic construct
  source 1..20: mol_type = other DNA
ataaaacagtttctttaaat

SEQ ID NO: 171812 - DNA, 20 bp, synthetic construct
  source 1..20: mol_type = other DNA
aataaaacagtttctttaaa

SEQ ID NO: 171813 - DNA, 20 bp, synthetic construct
  source 1..20: mol_type = other DNA
gaataaaacagtttctttaa

SEQ ID NO: 171814 - DNA, 20 bp, synthetic construct
  source 1..20: mol_type = other DNA
ggaataaaacagtttcttta

SEQ ID NO: 171815 - DNA, 20 bp, synthetic construct
  source 1..20: mol_type = other DNA
tggaataaaacagtttcttt

SEQ ID NO: 171816 - DNA, 20 bp, synthetic construct
  source 1..20: mol_type = other DNA
gtggaataaaacagtttctt

SEQ ID NO: 171817 - DNA, 20 bp, synthetic construct
  source 1..20: mol_type = other DNA
agtggaataaaacagtttct

SEQ ID NO: 171818 - DNA, 20 bp, synthetic construct
  source 1..20: mol_type = other DNA
aagtggaataaaacagtttc

SEQ ID NO: 171819 - DNA, 20 bp, synthetic construct
  source 1..20: mol_type = other DNA
aaagtggaataaaacagttt

SEQ ID NO: 171820 - DNA, 20 bp, synthetic construct
  source 1..20: mol_type = other DNA
gaaagtggaataaaacagtt

SEQ ID NO: 171821 - DNA, 20 bp, synthetic construct
  source 1..20: mol_type = other DNA
ggaaagtggaataaaacagt

SEQ ID NO: 171822 - DNA, 20 bp, synthetic construct
  source 1..20: mol_type = other DNA
gggaaagtggaataaaacag

SEQ ID NO: 171823 - DNA, 20 bp, synthetic construct
  source 1..20: mol_type = other DNA
agggaaagtggaataaaaca

SEQ ID NO: 171824 - DNA, 20 bp, synthetic construct
  source 1..20: mol_type = other DNA
gagggaaagtggaataaaac

SEQ ID NO: 171825 - DNA, 20 bp, synthetic construct
  source 1..20: mol_type = other DNA
tgagggaaagtggaataaaa

SEQ ID NO: 171826 - DNA, 20 bp, synthetic construct
  source 1..20: mol_type = other DNA
ctgagggaaagtggaataaa

SEQ ID NO: 171827 - DNA, 20 bp, synthetic construct
  source 1..20: mol_type = other DNA
gctgagggaaagtggaataa

SEQ ID NO: 171828 - DNA, 20 bp, synthetic construct
  source 1..20: mol_type = other DNA
tgctgagggaaagtggaata

SEQ ID NO: 171829 - DNA, 20 bp, synthetic construct
  source 1..20: mol_type = other DNA
atgctgagggaaagtggaat

SEQ ID NO: 171830 - DNA, 20 bp, synthetic construct
  source 1..20: mol_type = other DNA
aatgctgagggaaagtggaa

SEQ ID NO: 171831 - DNA, 20 bp, synthetic construct
  source 1..20: mol_type = other DNA
aaatgctgagggaaagtgga

SEQ ID NO: 171832 - DNA, 20 bp, synthetic construct
  source 1..20: mol_type = other DNA
taaatgctgagggaaagtgg

SEQ ID NO: 171833 - DNA, 20 bp, synthetic construct
  source 1..20: mol_type = other DNA
ataaatgctgagggaaagtg

SEQ ID NO: 171834 - DNA, 20 bp, synthetic construct
  source 1..20: mol_type = other DNA
cataaatgctgagggaaagt

SEQ ID NO: 171835 - DNA, 20 bp, synthetic construct
  source 1..20: mol_type = other DNA
acataaatgctgagggaaag

SEQ ID NO: 171836 - DNA, 20 bp, synthetic construct
  source 1..20: mol_type = other DNA
cacataaatgctgagggaaa

SEQ ID NO: 171837 - DNA, 20 bp, synthetic construct
  source 1..20: mol_type = other DNA
acacataaatgctgagggaa

SEQ ID NO: 171838 - DNA, 20 bp, synthetic construct
  source 1..20: mol_type = other DNA
cacacataaatgctgaggga

SEQ ID NO: 171839 - DNA, 20 bp, synthetic construct
  source 1..20: mol_type = other DNA
acacacataaatgctgaggg

SEQ ID NO: 171840 - DNA, 20 bp, synthetic construct
  source 1..20: mol_type = other DNA
cacacacataaatgctgagg

SEQ ID NO: 171841 - DNA, 20 bp, synthetic construct
  source 1..20: mol_type = other DNA
ccacacacataaatgctgag

SEQ ID NO: 171842 - DNA, 20 bp, synthetic construct
  source 1..20: mol_type = other DNA
accacacacataaatgctga

SEQ ID NO: 171843 - DNA, 20 bp, synthetic construct
  source 1..20: mol_type = other DNA
aaccacacacataaatgctg

SEQ ID NO: 171844 - DNA, 20 bp, synthetic construct
  source 1..20: mol_type = other DNA
aaaccacacacataaatgct

SEQ ID NO: 171845 - DNA, 20 bp, synthetic construct
  source 1..20: mol_type = other DNA
gaaaccacacacataaatgc

SEQ ID NO: 171846 - DNA, 20 bp, synthetic construct
  source 1..20: mol_type = other DNA
tgaaaccacacacataaatg

SEQ ID NO: 171847 - DNA, 20 bp, synthetic construct
  source 1..20: mol_type = other DNA
ctgaaaccacacacataaat

SEQ ID NO: 171848 - DNA, 20 bp, synthetic construct
  source 1..20: mol_type = other DNA
actgaaaccacacacataaa

SEQ ID NO: 171849 - DNA, 20 bp, synthetic construct
  source 1..20: mol_type = other DNA
tactgaaaccacacacataa

SEQ ID NO: 171850 - DNA, 20 bp, synthetic construct
  source 1..20: mol_type = other DNA
ctactgaaaccacacacata

SEQ ID NO: 171851 - DNA, 20 bp, synthetic construct
  source 1..20: mol_type = other DNA
gctactgaaaccacacacat

SEQ ID NO: 171852 - DNA, 20 bp, synthetic construct
  source 1..20: mol_type = other DNA
agctactgaaaccacacaca

SEQ ID NO: 171853 - DNA, 20 bp, synthetic construct
  source 1..20: mol_type = other DNA
gagctactgaaaccacacac

SEQ ID NO: 171854 - DNA, 20 bp, synthetic construct
  source 1..20: mol_type = other DNA
agagctactgaaaccacaca

SEQ ID NO: 171855 - DNA, 20 bp, synthetic construct
  source 1..20: mol_type = other DNA
cagagctactgaaaccacac

SEQ ID NO: 171856 - DNA, 20 bp, synthetic construct
  source 1..20: mol_type = other DNA
acagagctactgaaaccaca

SEQ ID NO: 171857 - DNA, 20 bp, synthetic construct
  source 1..20: mol_type = other DNA
cacagagctactgaaaccac

SEQ ID NO: 171858 - DNA, 20 bp, synthetic construct
  source 1..20: mol_type = other DNA
ccacagagctactgaaacca

SEQ ID NO: 171859 - DNA, 20 bp, synthetic construct
  source 1..20: mol_type = other DNA
gccacagagctactgaaacc

SEQ ID NO: 171860 - DNA, 20 bp, synthetic construct
  source 1..20: mol_type = other DNA
agccacagagctactgaaac

SEQ ID NO: 171861 - DNA, 20 bp, synthetic construct
  source 1..20: mol_type = other DNA
tagccacagagctactgaaa

SEQ ID NO: 171862 - DNA, 20 bp, synthetic construct
  source 1..20: mol_type = other DNA
atagccacagagctactgaa

SEQ ID NO: 171863 - DNA, 20 bp, synthetic construct
  source 1..20: mol_type = other DNA
tatagccacagagctactga

SEQ ID NO: 171864 - DNA, 20 bp, synthetic construct
  source 1..20: mol_type = other DNA
atatagccacagagctactg

SEQ ID NO: 171865 - DNA, 20 bp, synthetic construct
  source 1..20: mol_type = other DNA
catatagccacagagctact

SEQ ID NO: 171866 - DNA, 20 bp, synthetic construct
  source 1..20: mol_type = other DNA
acatatagccacagagctac

SEQ ID NO: 171867 - DNA, 20 bp, synthetic construct
  source 1..20: mol_type = other DNA
tacatatagccacagagcta

SEQ ID NO: 171868 - DNA, 20 bp, synthetic construct
  source 1..20: mol_type = other DNA
gtacatatagccacagagct

SEQ ID NO: 171869 - DNA, 20 bp, synthetic construct
  source 1..20: mol_type = other DNA
cgtacatatagccacagagc

SEQ ID NO: 171870 - DNA, 20 bp, synthetic construct
  source 1..20: mol_type = other DNA
tcgtacatatagccacagag

SEQ ID NO: 171871 - DNA, 20 bp, synthetic construct
  source 1..20: mol_type = other DNA
ttcgtacatatagccacaga

SEQ ID NO: 171872 - DNA, 20 bp, synthetic construct
  source 1..20: mol_type = other DNA
gttcgtacatatagccacag

SEQ ID NO: 171873 - DNA, 20 bp, synthetic construct
  source 1..20: mol_type = other DNA
tgttcgtacatatagccaca

SEQ ID NO: 171874 - DNA, 20 bp, synthetic construct
  source 1..20: mol_type = other DNA
gtgttcgtacatatagccac

SEQ ID NO: 171875 - DNA, 20 bp, synthetic construct
  source 1..20: mol_type = other DNA
cgtgttcgtacatatagcca

SEQ ID NO: 171876 - DNA, 20 bp, synthetic construct
  source 1..20: mol_type = other DNA
acgtgttcgtacatatagcc

SEQ ID NO: 171877 - DNA, 20 bp, synthetic construct
  source 1..20: mol_type = other DNA
cacgtgttcgtacatatagc

SEQ ID NO: 171878 - DNA, 20 bp, synthetic construct
  source 1..20: mol_type = other DNA
acacgtgttcgtacatatag

SEQ ID NO: 171879 - DNA, 20 bp, synthetic construct
  source 1..20: mol_type = other DNA
aacacgtgttcgtacatata

SEQ ID NO: 171880 - DNA, 20 bp, synthetic construct
  source 1..20: mol_type = other DNA
taacacgtgttcgtacatat

SEQ ID NO: 171881 - DNA, 20 bp, synthetic construct
  source 1..20: mol_type = other DNA
ataacacgtgttcgtacata

SEQ ID NO: 171882 - DNA, 20 bp, synthetic construct
  source 1..20: mol_type = other DNA
aataacacgtgttcgtacat

SEQ ID NO: 171883 - DNA, 20 bp, synthetic construct
  source 1..20: mol_type = other DNA
aaataacacgtgttcgtaca

SEQ ID NO: 171884 - DNA, 20 bp, synthetic construct
  source 1..20: mol_type = other DNA
aaaataacacgtgttcgtac

SEQ ID NO: 171885 - DNA, 20 bp, synthetic construct
  source 1..20: mol_type = other DNA
aaaaataacacgtgttcgta

SEQ ID NO: 171886 - DNA, 20 bp, synthetic construct
  source 1..20: mol_type = other DNA
gaaaaataacacgtgttcgt

SEQ ID NO: 171887 - DNA, 20 bp, synthetic construct
  source 1..20: mol_type = other DNA
ggaaaaataacacgtgttcg

SEQ ID NO: 171888 - DNA, 20 bp, synthetic construct
  source 1..20: mol_type = other DNA
tggaaaaataacacgtgttc

SEQ ID NO: 171889 - DNA, 20 bp, synthetic construct
  source 1..20: mol_type = other DNA
ttggaaaaataacacgtgtt

SEQ ID NO: 171890 - DNA, 20 bp, synthetic construct
  source 1..20: mol_type = other DNA
attggaaaaataacacgtgt

SEQ ID NO: 171891 - DNA, 20 bp, synthetic construct
  source 1..20: mol_type = other DNA
aattggaaaaataacacgtg

SEQ ID NO: 171892 - DNA, 20 bp, synthetic construct
  source 1..20: mol_type = other DNA
caattggaaaaataacacgt

SEQ ID NO: 171893 - DNA, 20 bp, synthetic construct
  source 1..20: mol_type = other DNA
ccaattggaaaaataacacg

SEQ ID NO: 171894 - DNA, 20 bp, synthetic construct
  source 1..20: mol_type = other DNA
tccaattggaaaaataacac

SEQ ID NO: 171895 - DNA, 20 bp, synthetic construct
  source 1..20: mol_type = other DNA
gtccaattggaaaaataaca

SEQ ID NO: 171896 - DNA, 20 bp, synthetic construct
  source 1..20: mol_type = other DNA
tgtccaattggaaaaataac

SEQ ID NO: 171897 - DNA, 20 bp, synthetic construct
  source 1..20: mol_type = other DNA
atgtccaattggaaaaataa

SEQ ID NO: 171898 - DNA, 20 bp, synthetic construct
  source 1..20: mol_type = other DNA
catgtccaattggaaaaata

SEQ ID NO: 171899 - DNA, 20 bp, synthetic construct
  source 1..20: mol_type = other DNA
acatgtccaattggaaaaat

SEQ ID NO: 171900 - DNA, 20 bp, synthetic construct
  source 1..20: mol_type = other DNA
cacatgtccaattggaaaaa

SEQ ID NO: 171901 - DNA, 20 bp, synthetic construct
  source 1..20: mol_type = other DNA
tcacatgtccaattggaaaa

SEQ ID NO: 171902 - DNA, 20 bp, synthetic construct
  source 1..20: mol_type = other DNA
atcacatgtccaattggaaa

SEQ ID NO: 171903 - DNA, 20 bp, synthetic construct
  source 1..20: mol_type = other DNA
tatcacatgtccaattggaa

SEQ ID NO: 171904 - DNA, 20 bp, synthetic construct
  source 1..20: mol_type = other DNA
ttatcacatgtccaattgga

SEQ ID NO: 171905 - DNA, 20 bp, synthetic construct
  source 1..20: mol_type = other DNA
attatcacatgtccaattgg

SEQ ID NO: 171906 - DNA, 20 bp, synthetic construct
  source 1..20: mol_type = other DNA
aattatcacatgtccaattg

SEQ ID NO: 171907 - DNA, 20 bp, synthetic construct
  source 1..20: mol_type = other DNA
aaattatcacatgtccaatt

SEQ ID NO: 171908 - DNA, 20 bp, synthetic construct
  source 1..20: mol_type = other DNA
aaaattatcacatgtccaat

SEQ ID NO: 171909 - DNA, 20 bp, synthetic construct
  source 1..20: mol_type = other DNA
gaaaattatcacatgtccaa

SEQ ID NO: 171910 - DNA, 20 bp, synthetic construct
  source 1..20: mol_type = other DNA
ggaaaattatcacatgtcca

SEQ ID NO: 171911 - DNA, 20 bp, synthetic construct
  source 1..20: mol_type = other DNA
tggaaaattatcacatgtcc

SEQ ID NO: 171912 - DNA, 20 bp, synthetic construct
  source 1..20: mol_type = other DNA
ttggaaaattatcacatgtc

SEQ ID NO: 171913 - DNA, 20 bp, synthetic construct
  source 1..20: mol_type = other DNA
gttggaaaattatcacatgt

SEQ ID NO: 171914 - DNA, 20 bp, synthetic construct
  source 1..20: mol_type = other DNA
agttggaaaattatcacatg

SEQ ID NO: 171915 - DNA, 20 bp, synthetic construct
  source 1..20: mol_type = other DNA
cagttggaaaattatcacat

SEQ ID NO: 171916 - DNA, 20 bp, synthetic construct
  source 1..20: mol_type = other DNA
ccagttggaaaattatcaca

SEQ ID NO: 171917 - DNA, 20 bp, synthetic construct
  source 1..20: mol_type = other DNA
tccagttggaaaattatcac

SEQ ID NO: 171918 - DNA, 20 bp, synthetic construct
  source 1..20: mol_type = other DNA
gtccagttggaaaattatca

SEQ ID NO: 171919 - DNA, 20 bp, synthetic construct
  source 1..20: mol_type = other DNA
ggtccagttggaaaattatc

SEQ ID NO: 171920 - DNA, 20 bp, synthetic construct
  source 1..20: mol_type = other DNA
aggtccagttggaaaattat

SEQ ID NO: 171921 - DNA, 20 bp, synthetic construct
  source 1..20: mol_type = other DNA
aaggtccagttggaaaatta

SEQ ID NO: 171922 - DNA, 20 bp, synthetic construct
  source 1..20: mol_type = other DNA
caaggtccagttggaaaatt

SEQ ID NO: 171923 - DNA, 20 bp, synthetic construct
  source 1..20: mol_type = other DNA
gcaaggtccagttggaaaat

SEQ ID NO: 171924 - DNA, 20 bp, synthetic construct
  source 1..20: mol_type = other DNA
ggcaaggtccagttggaaaa

SEQ ID NO: 171925 - DNA, 20 bp, synthetic construct
  source 1..20: mol_type = other DNA
aggcaaggtccagttggaaa

SEQ ID NO: 171926 - DNA, 20 bp, synthetic construct
  source 1..20: mol_type = other DNA
aaggcaaggtccagttggaa

SEQ ID NO: 171927 - DNA, 20 bp, synthetic construct
  source 1..20: mol_type = other DNA
gaaggcaaggtccagttgga

SEQ ID NO: 171928 - DNA, 20 bp, synthetic construct
  source 1..20: mol_type = other DNA
agaaggcaaggtccagttgg

SEQ ID NO: 171929 - DNA, 20 bp, synthetic construct
  source 1..20: mol_type = other DNA
tagaaggcaaggtccagttg

SEQ ID NO: 171930 - DNA, 20 bp, synthetic construct
  source 1..20: mol_type = other DNA
atagaaggcaaggtccagtt

SEQ ID NO: 171931 - DNA, 20 bp, synthetic construct
  source 1..20: mol_type = other DNA
aatagaaggcaaggtccagt

SEQ ID NO: 171932 - DNA, 20 bp, synthetic construct
  source 1..20: mol_type = other DNA
caatagaaggcaaggtccag

SEQ ID NO: 171933 - DNA, 20 bp, synthetic construct
  source 1..20: mol_type = other DNA
tcaatagaaggcaaggtcca

SEQ ID NO: 171934 - DNA, 20 bp, synthetic construct
  source 1..20: mol_type = other DNA
atcaatagaaggcaaggtcc

SEQ ID NO: 171935 - DNA, 20 bp, synthetic construct
  source 1..20: mol_type = other DNA
catcaatagaaggcaaggtc

SEQ ID NO: 171936 - DNA, 20 bp, synthetic construct
  source 1..20: mol_type = other DNA
acatcaatagaaggcaaggt

SEQ ID NO: 171937 - DNA, 20 bp, synthetic construct
  source 1..20: mol_type = other DNA
tacatcaatagaaggcaagg

SEQ ID NO: 171938 - DNA, 20 bp, synthetic construct
  source 1..20: mol_type = other DNA
atacatcaatagaaggcaag

SEQ ID NO: 171939 - DNA, 20 bp, synthetic construct
  source 1..20: mol_type = other DNA
aatacatcaatagaaggcaa

SEQ ID NO: 171940 - DNA, 20 bp, synthetic construct
  source 1..20: mol_type = other DNA
aaatacatcaatagaaggca

SEQ ID NO: 171941 - DNA, 20 bp, synthetic construct
  source 1..20: mol_type = other DNA
taaatacatcaatagaaggc

SEQ ID NO: 171942 - DNA, 20 bp, synthetic construct
  source 1..20: mol_type = other DNA
ataaatacatcaatagaagg

SEQ ID NO: 171943 - DNA, 20 bp, synthetic construct
  source 1..20: mol_type = other DNA
aataaatacatcaatagaag

SEQ ID NO: 171944 - DNA, 20 bp, synthetic construct
  source 1..20: mol_type = other DNA
aaataaatacatcaatagaa

SEQ ID NO: 171945 - DNA, 20 bp, synthetic construct
  source 1..20: mol_type = other DNA
taaataaatacatcaataga

SEQ ID NO: 171946 - DNA, 20 bp, synthetic construct
  source 1..20: mol_type = other DNA
ctaaataaatacatcaatag

SEQ ID NO: 171947 - DNA, 20 bp, synthetic construct
  source 1..20: mol_type = other DNA
gctaaataaatacatcaata

SEQ ID NO: 171948 - DNA, 20 bp, synthetic construct
  source 1..20: mol_type = other DNA
tgctaaataaatacatcaat

SEQ ID NO: 171949 - DNA, 20 bp, synthetic construct
  source 1..20: mol_type = other DNA
atgctaaataaatacatcaa

SEQ ID NO: 171950 - DNA, 20 bp, synthetic construct
  source 1..20: mol_type = other DNA
gatgctaaataaatacatca

SEQ ID NO: 171951 - DNA, 20 bp, synthetic construct
  source 1..20: mol_type = other DNA
agatgctaaataaatacatc

SEQ ID NO: 171952 - DNA, 20 bp, synthetic construct
  source 1..20: mol_type = other DNA
aagatgctaaataaatacat

SEQ ID NO: 171953 - DNA, 20 bp, synthetic construct
  source 1..20: mol_type = other DNA
gaagatgctaaataaataca

SEQ ID NO: 171954 - DNA, 20 bp, synthetic construct
  source 1..20: mol_type = other DNA
ggaagatgctaaataaatac

SEQ ID NO: 171955 - DNA, 20 bp, synthetic construct
  source 1..20: mol_type = other DNA
aggaagatgctaaataaata

SEQ ID NO: 171956 - DNA, 20 bp, synthetic construct
  source 1..20: mol_type = other DNA
aaggaagatgctaaataaat

SEQ ID NO: 171957 - DNA, 20 bp, synthetic construct
  source 1..20: mol_type = other DNA
taaggaagatgctaaataaa

SEQ ID NO: 171958 - DNA, 20 bp, synthetic construct
  source 1..20: mol_type = other DNA
gtaaggaagatgctaaataa

SEQ ID NO: 171959 - DNA, 20 bp, synthetic construct
  source 1..20: mol_type = other DNA
agtaaggaagatgctaaata

SEQ ID NO: 171960 - DNA, 20 bp, synthetic construct
  source 1..20: mol_type = other DNA
gagtaaggaagatgctaaat

SEQ ID NO: 171961 - DNA, 20 bp, synthetic construct
  source 1..20: mol_type = other DNA
ggagtaaggaagatgctaaa

SEQ ID NO: 171962 - DNA, 20 bp, synthetic construct
  source 1..20: mol_type = other DNA
gggagtaaggaagatgctaa

SEQ ID NO: 171963 - DNA, 20 bp, synthetic construct
  source 1..20: mol_type = other DNA
agggagtaaggaagatgcta

SEQ ID NO: 171964 - DNA, 20 bp, synthetic construct
  source 1..20: mol_type = other DNA
gagggagtaaggaagatgct

SEQ ID NO: 171965 - DNA, 20 bp, synthetic construct
  source 1..20: mol_type = other DNA
ggagggagtaaggaagatgc

SEQ ID NO: 171966 - DNA, 20 bp, synthetic construct
  source 1..20: mol_type = other DNA
aggagggagtaaggaagatg

SEQ ID NO: 171967 - DNA, 20 bp, synthetic construct
  source 1..20: mol_type = other DNA
aaggagggagtaaggaagat

SEQ ID NO: 171968 - DNA, 20 bp, synthetic construct
  source 1..20: mol_type = other DNA
caaggagggagtaaggaaga

SEQ ID NO: 171969 - DNA, 20 bp, synthetic construct
  source 1..20: mol_type = other DNA
tcaaggagggagtaaggaag

SEQ ID NO: 171970 - DNA, 20 bp, synthetic construct
  source 1..20: mol_type = other DNA
ttcaaggagggagtaaggaa

SEQ ID NO: 171971 - DNA, 20 bp, synthetic construct
  source 1..20: mol_type = other DNA
tttcaaggagggagtaagga

SEQ ID NO: 171972 - DNA, 20 bp, synthetic construct
  source 1..20: mol_type = other DNA
ttttcaaggagggagtaagg

SEQ ID NO: 171973 - DNA, 20 bp, synthetic construct
  source 1..20: mol_type = other DNA
tttttcaaggagggagtaag

SEQ ID NO: 171974 - DNA, 20 bp, synthetic construct
  source 1..20: mol_type = other DNA
ctttttcaaggagggagtaa

SEQ ID NO: 171975 - DNA, 20 bp, synthetic construct
  source 1..20: mol_type = other DNA
tctttttcaaggagggagta

SEQ ID NO: 171976 - DNA, 20 bp, synthetic construct
  source 1..20: mol_type = other DNA
ttctttttcaaggagggagt

SEQ ID NO: 171977 - DNA, 20 bp, synthetic construct
  source 1..20: mol_type = other DNA
attctttttcaaggagggag

SEQ ID NO: 171978 - DNA, 20 bp, synthetic construct
  source 1..20: mol_type = other DNA
gattctttttcaaggaggga

SEQ ID NO: 171979 - DNA, 20 bp, synthetic construct
  source 1..20: mol_type = other DNA
tgattctttttcaaggaggg

SEQ ID NO: 171980 - DNA, 20 bp, synthetic construct
  source 1..20: mol_type = other DNA
gtgattctttttcaaggagg

SEQ ID NO: 171981 - DNA, 20 bp, synthetic construct
  source 1..20: mol_type = other DNA
agtgattctttttcaaggag

SEQ ID NO: 171982 - DNA, 20 bp, synthetic construct
  source 1..20: mol_type = other DNA
gagtgattctttttcaagga

SEQ ID NO: 171983 - DNA, 20 bp, synthetic construct
  source 1..20: mol_type = other DNA
tgagtgattctttttcaagg

SEQ ID NO: 171984 - DNA, 20 bp, synthetic construct
  source 1..20: mol_type = other DNA
ttgagtgattctttttcaag

SEQ ID NO: 171985 - DNA, 20 bp, synthetic construct
  source 1..20: mol_type = other DNA
tttgagtgattctttttcaa

SEQ ID NO: 171986 - DNA, 20 bp, synthetic construct
  source 1..20: mol_type = other DNA
ttttgagtgattctttttca

SEQ ID NO: 171987 - DNA, 20 bp, synthetic construct
  source 1..20: mol_type = other DNA
tttttgagtgattctttttc

SEQ ID NO: 171988 - DNA, 20 bp, synthetic construct
  source 1..20: mol_type = other DNA
gtttttgagtgattcttttt

SEQ ID NO: 171989 - DNA, 20 bp, synthetic construct
  source 1..20: mol_type = other DNA
tgtttttgagtgattctttt

SEQ ID NO: 171990 - DNA, 20 bp, synthetic construct
  source 1..20: mol_type = other DNA
ttgtttttgagtgattcttt

SEQ ID NO: 171991 - DNA, 20 bp, synthetic construct
  source 1..20: mol_type = other DNA
tttgtttttgagtgattctt

SEQ ID NO: 171992 - DNA, 20 bp, synthetic construct
  source 1..20: mol_type = other DNA
atttgtttttgagtgattct

SEQ ID NO: 171993 - DNA, 20 bp, synthetic construct
  source 1..20: mol_type = other DNA
tatttgtttttgagtgattc

SEQ ID NO: 171994 - DNA, 20 bp, synthetic construct
  source 1..20: mol_type = other DNA
ttatttgtttttgagtgatt

SEQ ID NO: 171995 - DNA, 20 bp, synthetic construct
  source 1..20: mol_type = other DNA
tttatttgtttttgagtgat

SEQ ID NO: 171996 - DNA, 20 bp, synthetic construct
  source 1..20: mol_type = other DNA
ttttatttgtttttgagtga

SEQ ID NO: 171997 - DNA, 20 bp, synthetic construct
  source 1..20: mol_type = other DNA
tttttatttgtttttgagtg

SEQ ID NO: 171998 - DNA, 20 bp, synthetic construct
  source 1..20: mol_type = other DNA
gtttttatttgtttttgagt

SEQ ID NO: 171999 - DNA, 20 bp, synthetic construct
  source 1..20: mol_type = other DNA
tgtttttatttgtttttgag

SEQ ID NO: 172000 - DNA, 20 bp, synthetic construct
  source 1..20: mol_type = other DNA
ctgtttttatttgtttttga

SEQ ID NO: 172001 - DNA, 20 bp, synthetic construct
  source 1..20: mol_type = other DNA
gctgtttttatttgtttttg

SEQ ID NO: 172002 - DNA, 20 bp, synthetic construct
  source 1..20: mol_type = other DNA
ggctgtttttatttgttttt

SEQ ID NO: 172003 - DNA, 20 bp, synthetic construct
  source 1..20: mol_type = other DNA
cggctgtttttatttgtttt

SEQ ID NO: 172004 - DNA, 20 bp, synthetic construct
  source 1..20: mol_type = other DNA
acggctgtttttatttgttt

SEQ ID NO: 172005 - DNA, 20 bp, synthetic construct
  source 1..20: mol_type = other DNA
tacggctgtttttatttgtt

SEQ ID NO: 172006 - DNA, 20 bp, synthetic construct
  source 1..20: mol_type = other DNA
ctacggctgtttttatttgt

SEQ ID NO: 172007 - DNA, 20 bp, synthetic construct
  source 1..20: mol_type = other DNA
cctacggctgtttttatttg

SEQ ID NO: 172008 - DNA, 20 bp, synthetic construct
  source 1..20: mol_type = other DNA
ccctacggctgtttttattt

SEQ ID NO: 172009 - DNA, 20 bp, synthetic construct
  source 1..20: mol_type = other DNA
cccctacggctgtttttatt

SEQ ID NO: 172010 - DNA, 20 bp, synthetic construct
  source 1..20: mol_type = other DNA
gcccctacggctgtttttat

SEQ ID NO: 172011 - DNA, 20 bp, synthetic construct
  source 1..20: mol_type = other DNA
ggcccctacggctgttttta

SEQ ID NO: 172012 - DNA, 20 bp, synthetic construct
  source 1..20: mol_type = other DNA
aggcccctacggctgttttt

SEQ ID NO: 172013 - DNA, 20 bp, synthetic construct
  source 1..20: mol_type = other DNA
taggcccctacggctgtttt

SEQ ID NO: 172014 - DNA, 20 bp, synthetic construct
  source 1..20: mol_type = other DNA
ttaggcccctacggctgttt

SEQ ID NO: 172015 - DNA, 20 bp, synthetic construct
  source 1..20: mol_type = other DNA
attaggcccctacggctgtt

SEQ ID NO: 172016 - DNA, 20 bp, synthetic construct
  source 1..20: mol_type = other DNA
tattaggcccctacggctgt

SEQ ID NO: 172017 - DNA, 20 bp, synthetic construct
  source 1..20: mol_type = other DNA
gtattaggcccctacggctg

SEQ ID NO: 172018 - DNA, 20 bp, synthetic construct
  source 1..20: mol_type = other DNA
tgtattaggcccctacggct

SEQ ID NO: 172019 - DNA, 20 bp, synthetic construct
  source 1..20: mol_type = other DNA
ctgtattaggcccctacggc

SEQ ID NO: 172020 - DNA, 20 bp, synthetic construct
  source 1..20: mol_type = other DNA
actgtattaggcccctacgg

SEQ ID NO: 172021 - DNA, 20 bp, synthetic construct
  source 1..20: mol_type = other DNA
cactgtattaggcccctacg

SEQ ID NO: 172022 - DNA, 20 bp, synthetic construct
  source 1..20: mol_type = other DNA
gcactgtattaggcccctac

SEQ ID NO: 172023 - DNA, 20 bp, synthetic construct
  source 1..20: mol_type = other DNA
agcactgtattaggccccta

SEQ ID NO: 172024 - DNA, 20 bp, synthetic construct
  source 1..20: mol_type = other DNA
tagcactgtattaggcccct

SEQ ID NO: 172025 - DNA, 20 bp, synthetic construct
  source 1..20: mol_type = other DNA
ctagcactgtattaggcccc

SEQ ID NO: 172026 - DNA, 20 bp, synthetic construct
  source 1..20: mol_type = other DNA
tctagcactgtattaggccc

SEQ ID NO: 172027 - DNA, 20 bp, synthetic construct
  source 1..20: mol_type = other DNA
gtctagcactgtattaggcc

SEQ ID NO: 172028 - DNA, 20 bp, synthetic construct
  source 1..20: mol_type = other DNA
tgtctagcactgtattaggc

SEQ ID NO: 172029 - DNA, 20 bp, synthetic construct
  source 1..20: mol_type = other DNA
atgtctagcactgtattagg

SEQ ID NO: 172030 - DNA, 20 bp, synthetic construct
  source 1..20: mol_type = other DNA
tatgtctagcactgtattag

SEQ ID NO: 172031 - DNA, 20 bp, synthetic construct
  source 1..20: mol_type = other DNA
gtatgtctagcactgtatta

SEQ ID NO: 172032 - DNA, 20 bp, synthetic construct
  source 1..20: mol_type = other DNA
tgtatgtctagcactgtatt

SEQ ID NO: 172033 - DNA, 20 bp, synthetic construct
  source 1..20: mol_type = other DNA
ttgtatgtctagcactgtat

SEQ ID NO: 172034 - DNA, 20 bp, synthetic construct
  source 1..20: mol_type = other DNA
cttgtatgtctagcactgta

SEQ ID NO: 172035 - DNA, 20 bp, synthetic construct
  source 1..20: mol_type = other DNA
tcttgtatgtctagcactgt

SEQ ID NO: 172036 - DNA, 20 bp, synthetic construct
  source 1..20: mol_type = other DNA
ctcttgtatgtctagcactg

SEQ ID NO: 172037 - DNA, 20 bp, synthetic construct
  source 1..20: mol_type = other DNA
cctcttgtatgtctagcact

SEQ ID NO: 172038 - DNA, 20 bp, synthetic construct
  source 1..20: mol_type = other DNA
acctcttgtatgtctagcac

SEQ ID NO: 172039 - DNA, 20 bp, synthetic construct
  source 1..20: mol_type = other DNA
tacctcttgtatgtctagca

SEQ ID NO: 172040 - DNA, 20 bp, synthetic construct
  source 1..20: mol_type = other DNA
atacctcttgtatgtctagc

SEQ ID NO: 172041 - DNA, 20 bp, synthetic construct
  source 1..20: mol_type = other DNA
aatacctcttgtatgtctag

SEQ ID NO: 172042 - DNA, 20 bp, synthetic construct
  source 1..20: mol_type = other DNA
gaatacctcttgtatgtcta

SEQ ID NO: 172043 - DNA, 20 bp, synthetic construct
  source 1..20: mol_type = other DNA
cgaatacctcttgtatgtct

SEQ ID NO: 172044 - DNA, 20 bp, synthetic construct
  source 1..20: mol_type = other DNA
ccgaatacctcttgtatgtc

SEQ ID NO: 172045 - DNA, 20 bp, synthetic construct
  source 1..20: mol_type = other DNA
accgaatacctcttgtatgt

SEQ ID NO: 172046 - DNA, 20 bp, synthetic construct
  source 1..20: mol_type = other DNA
gaccgaatacctcttgtatg

SEQ ID NO: 172047 - DNA, 20 bp, synthetic construct
  source 1..20: mol_type = other DNA
ggaccgaatacctcttgtat

SEQ ID NO: 172048 - DNA, 20 bp, synthetic construct
  source 1..20: mol_type = other DNA
tggaccgaatacctcttgta

SEQ ID NO: 172049 - DNA, 20 bp, synthetic construct
  source 1..20: mol_type = other DNA
atggaccgaatacctcttgt

SEQ ID NO: 172050 - DNA, 20 bp, synthetic construct
  source 1..20: mol_type = other DNA
tatggaccgaatacctcttg

SEQ ID NO: 172051 - DNA, 20 bp, synthetic construct
  source 1..20: mol_type = other DNA
gtatggaccgaatacctctt

SEQ ID NO: 172052 - DNA, 20 bp, synthetic construct
  source 1..20: mol_type = other DNA
ggtatggaccgaatacctct

SEQ ID NO: 172053 - DNA, 20 bp, synthetic construct
  source 1..20: mol_type = other DNA
tggtatggaccgaatacctc

SEQ ID NO: 172054 - DNA, 20 bp, synthetic construct
  source 1..20: mol_type = other DNA
ttggtatggaccgaatacct

SEQ ID NO: 172055 - DNA, 20 bp, synthetic construct
  source 1..20: mol_type = other DNA
tttggtatggaccgaatacc

SEQ ID NO: 172056 - DNA, 20 bp, synthetic construct
  source 1..20: mol_type = other DNA
atttggtatggaccgaatac

SEQ ID NO: 172057 - DNA, 20 bp, synthetic construct
  source 1..20: mol_type = other DNA
catttggtatggaccgaata

SEQ ID NO: 172058 - DNA, 20 bp, synthetic construct
  source 1..20: mol_type = other DNA
ccatttggtatggaccgaat

SEQ ID NO: 172059 - DNA, 20 bp, synthetic construct
  source 1..20: mol_type = other DNA
tccatttggtatggaccgaa

SEQ ID NO: 172060 - DNA, 20 bp, synthetic construct
  source 1..20: mol_type = other DNA
atccatttggtatggaccga

SEQ ID NO: 172061 - DNA, 20 bp, synthetic construct
  source 1..20: mol_type = other DNA
aatccatttggtatggaccg

SEQ ID NO: 172062 - DNA, 20 bp, synthetic construct
  source 1..20: mol_type = other DNA
aaatccatttggtatggacc

SEQ ID NO: 172063 - DNA, 20 bp, synthetic construct
  source 1..20: mol_type = other DNA
aaaatccatttggtatggac

SEQ ID NO: 172064 - DNA, 20 bp, synthetic construct
  source 1..20: mol_type = other DNA
taaaatccatttggtatgga

SEQ ID NO: 172065 - DNA, 20 bp, synthetic construct
  source 1..20: mol_type = other DNA
ataaaatccatttggtatgg

SEQ ID NO: 172066 - DNA, 20 bp, synthetic construct
  source 1..20: mol_type = other DNA
gataaaatccatttggtatg

SEQ ID NO: 172067 - DNA, 20 bp, synthetic construct
  source 1..20: mol_type = other DNA
ggataaaatccatttggtat

SEQ ID NO: 172068 - DNA, 20 bp, synthetic construct
  source 1..20: mol_type = other DNA
tggataaaatccatttggta

SEQ ID NO: 172069 - DNA, 20 bp, synthetic construct
  source 1..20: mol_type = other DNA
atggataaaatccatttggt

SEQ ID NO: 172070 - DNA, 20 bp, synthetic construct
  source 1..20: mol_type = other DNA
catggataaaatccatttgg

SEQ ID NO: 172071 - DNA, 20 bp, synthetic construct
  source 1..20: mol_type = other DNA
tcatggataaaatccatttg

SEQ ID NO: 172072 - DNA, 20 bp, synthetic construct
  source 1..20: mol_type = other DNA
ttcatggataaaatccattt

SEQ ID NO: 172073 - DNA, 20 bp, synthetic construct
  source 1..20: mol_type = other DNA
cttcatggataaaatccatt

SEQ ID NO: 172074 - DNA, 20 bp, synthetic construct
  source 1..20: mol_type = other DNA
ccttcatggataaaatccat

SEQ ID NO: 172075 - DNA, 20 bp, synthetic construct
  source 1..20: mol_type = other DNA
tccttcatggataaaatcca

SEQ ID NO: 172076 - DNA, 20 bp, synthetic construct
  source 1..20: mol_type = other DNA
atccttcatggataaaatcc

SEQ ID NO: 172077 - DNA, 20 bp, synthetic construct
  source 1..20: mol_type = other DNA
tatccttcatggataaaatc

SEQ ID NO: 172078 - DNA, 20 bp, synthetic construct
  source 1..20: mol_type = other DNA
ttatccttcatggataaaat

SEQ ID NO: 172079 - DNA, 20 bp, synthetic construct
  source 1..20: mol_type = other DNA
tttatccttcatggataaaa

SEQ ID NO: 172080 - DNA, 20 bp, synthetic construct
  source 1..20: mol_type = other DNA
atttatccttcatggataaa

SEQ ID NO: 172081 - DNA, 20 bp, synthetic construct
  source 1..20: mol_type = other DNA
catttatccttcatggataa

SEQ ID NO: 172082 - DNA, 20 bp, synthetic construct
  source 1..20: mol_type = other DNA
ccatttatccttcatggata

SEQ ID NO: 172083 - DNA, 20 bp, synthetic construct
  source 1..20: mol_type = other DNA
cccatttatccttcatggat

SEQ ID NO: 172084 - DNA, 20 bp, synthetic construct
  source 1..20: mol_type = other DNA
ccccatttatccttcatgga

SEQ ID NO: 172085 - DNA, 20 bp, synthetic construct
  source 1..20: mol_type = other DNA
tccccatttatccttcatgg

SEQ ID NO: 172086 - DNA, 20 bp, synthetic construct
  source 1..20: mol_type = other DNA
ttccccatttatccttcatg

SEQ ID NO: 172087 - DNA, 20 bp, synthetic construct
  source 1..20: mol_type = other DNA
tttccccatttatccttcat

SEQ ID NO: 172088 - DNA, 20 bp, synthetic construct
  source 1..20: mol_type = other DNA
atttccccatttatccttca

SEQ ID NO: 172089 - DNA, 20 bp, synthetic construct
  source 1..20: mol_type = other DNA
tatttccccatttatccttc

SEQ ID NO: 172090 - DNA, 20 bp, synthetic construct
  source 1..20: mol_type = other DNA
gtatttccccatttatcctt

SEQ ID NO: 172091 - DNA, 20 bp, synthetic construct
  source 1..20: mol_type = other DNA
tgtatttccccatttatcct

SEQ ID NO: 172092 - DNA, 20 bp, synthetic construct
  source 1..20: mol_type = other DNA
ctgtatttccccatttatcc

SEQ ID NO: 172093 - DNA, 20 bp, synthetic construct
  source 1..20: mol_type = other DNA
actgtatttccccatttatc

SEQ ID NO: 172094 - DNA, 20 bp, synthetic construct
  source 1..20: mol_type = other DNA
cactgtatttccccatttat

SEQ ID NO: 172095 - DNA, 20 bp, synthetic construct
  source 1..20: mol_type = other DNA
ccactgtatttccccattta

SEQ ID NO: 172096 - DNA, 20 bp, synthetic construct
  source 1..20: mol_type = other DNA
cccactgtatttccccattt

SEQ ID NO: 172097 - DNA, 20 bp, synthetic construct
  source 1..20: mol_type = other DNA
tcccactgtatttccccatt

SEQ ID NO: 172098 - DNA, 20 bp, synthetic construct
  source 1..20: mol_type = other DNA
ttcccactgtatttccccat

SEQ ID NO: 172099 - DNA, 20 bp, synthetic construct
  source 1..20: mol_type = other DNA
cttcccactgtatttcccca

SEQ ID NO: 172100 - DNA, 20 bp, synthetic construct
  source 1..20: mol_type = other DNA
gcttcccactgtatttcccc

SEQ ID NO: 172101 - DNA, 20 bp, synthetic construct
  source 1..20: mol_type = other DNA
tgcttcccactgtatttccc

SEQ ID NO: 172102 - DNA, 20 bp, synthetic construct
  source 1..20: mol_type = other DNA
ctgcttcccactgtatttcc

SEQ ID NO: 172103 - DNA, 20 bp, synthetic construct
  source 1..20: mol_type = other DNA
cctgcttcccactgtatttc

SEQ ID NO: 172104 - DNA, 20 bp, synthetic construct
  source 1..20: mol_type = other DNA
acctgcttcccactgtattt

SEQ ID NO: 172105 - DNA, 20 bp, synthetic construct
  source 1..20: mol_type = other DNA
cacctgcttcccactgtatt

SEQ ID NO: 172106 - DNA, 20 bp, synthetic construct
  source 1..20: mol_type = other DNA
ccacctgcttcccactgtat

SEQ ID NO: 172107 - DNA, 20 bp, synthetic construct
  source 1..20: mol_type = other DNA
cccacctgcttcccactgta

SEQ ID NO: 172108 - DNA, 20 bp, synthetic construct
  source 1..20: mol_type = other DNA
tcccacctgcttcccactgt

SEQ ID NO: 172109 - DNA, 20 bp, synthetic construct
  source 1..20: mol_type = other DNA
ttcccacctgcttcccactg

SEQ ID NO: 172110 - DNA, 20 bp, synthetic construct
  source 1..20: mol_type = other DNA
tttcccacctgcttcccact

SEQ ID NO: 172111 - DNA, 20 bp, synthetic construct
  source 1..20: mol_type = other DNA
gtttcccacctgcttcccac

SEQ ID NO: 172112 - DNA, 20 bp, synthetic construct
  source 1..20: mol_type = other DNA
agtttcccacctgcttccca

SEQ ID NO: 172113 - DNA, 20 bp, synthetic construct
  source 1..20: mol_type = other DNA
cagtttcccacctgcttccc

SEQ ID NO: 172114 - DNA, 20 bp, synthetic construct
  source 1..20: mol_type = other DNA
gcagtttcccacctgcttcc

SEQ ID NO: 172115 - DNA, 20 bp, synthetic construct
  source 1..20: mol_type = other DNA
cgcagtttcccacctgcttc

SEQ ID NO: 172116 - DNA, 20 bp, synthetic construct
  source 1..20: mol_type = other DNA
acgcagtttcccacctgctt

SEQ ID NO: 172117 - DNA, 20 bp, synthetic construct
  source 1..20: mol_type = other DNA
aacgcagtttcccacctgct

SEQ ID NO: 172118 - DNA, 20 bp, synthetic construct
  source 1..20: mol_type = other DNA
aaacgcagtttcccacctgc

SEQ ID NO: 172119 - DNA, 20 bp, synthetic construct
  source 1..20: mol_type = other DNA
caaacgcagtttcccacctg

SEQ ID NO: 172120 - DNA, 20 bp, synthetic construct
  source 1..20: mol_type = other DNA
tcaaacgcagtttcccacct

SEQ ID NO: 172121 - DNA, 20 bp, synthetic construct
  source 1..20: mol_type = other DNA
gtcaaacgcagtttcccacc

SEQ ID NO: 172122 - DNA, 20 bp, synthetic construct
  source 1..20: mol_type = other DNA
agtcaaacgcagtttcccac

SEQ ID NO: 172123 - DNA, 20 bp, synthetic construct
  source 1..20: mol_type = other DNA
gagtcaaacgcagtttccca

SEQ ID NO: 172124 - DNA, 20 bp, synthetic construct
  source 1..20: mol_type = other DNA
agagtcaaacgcagtttccc

SEQ ID NO: 172125 - DNA, 20 bp, synthetic construct
  source 1..20: mol_type = other DNA
cagagtcaaacgcagtttcc

SEQ ID NO: 172126 - DNA, 20 bp, synthetic construct
  source 1..20: mol_type = other DNA
gcagagtcaaacgcagtttc

SEQ ID NO: 172127 - DNA, 20 bp, synthetic construct
  source 1..20: mol_type = other DNA
agcagagtcaaacgcagttt

SEQ ID NO: 172128 - DNA, 20 bp, synthetic construct
  source 1..20: mol_type = other DNA
gagcagagtcaaacgcagtt

SEQ ID NO: 172129 - DNA, 20 bp, synthetic construct
  source 1..20: mol_type = other DNA
agagcagagtcaaacgcagt

SEQ ID NO: 172130 - DNA, 20 bp, synthetic construct
  source 1..20: mol_type = other DNA
aagagcagagtcaaacgcag

SEQ ID NO: 172131 - DNA, 20 bp, synthetic construct
  source 1..20: mol_type = other DNA
aaagagcagagtcaaacgca

SEQ ID NO: 172132 - DNA, 20 bp, synthetic construct
  source 1..20: mol_type = other DNA
gaaagagcagagtcaaacgc

SEQ ID NO: 172133 - DNA, 20 bp, synthetic construct
  source 1..20: mol_type = other DNA
ggaaagagcagagtcaaacg

SEQ ID NO: 172134 - DNA, 20 bp, synthetic construct
  source 1..20: mol_type = other DNA
aggaaagagcagagtcaaac

SEQ ID NO: 172135 - DNA, 20 bp, synthetic construct
  source 1..20: mol_type = other DNA
gaggaaagagcagagtcaaa

SEQ ID NO: 172136 - DNA, 20 bp, synthetic construct
  source 1..20: mol_type = other DNA
ggaggaaagagcagagtcaa

SEQ ID NO: 172137 - DNA, 20 bp, synthetic construct
  source 1..20: mol_type = other DNA
tggaggaaagagcagagtca

SEQ ID NO: 172138 - DNA, 20 bp, synthetic construct
  source 1..20: mol_type = other DNA
gtggaggaaagagcagagtc

SEQ ID NO: 172139 - DNA, 20 bp, synthetic construct
  source 1..20: mol_type = other DNA
ggtggaggaaagagcagagt

SEQ ID NO: 172140 - DNA, 20 bp, synthetic construct
  source 1..20: mol_type = other DNA
tggtggaggaaagagcagag

SEQ ID NO: 172141 - DNA, 20 bp, synthetic construct
  source 1..20: mol_type = other DNA
gtggtggaggaaagagcaga

SEQ ID NO: 172142 - DNA, 20 bp, synthetic construct
  source 1..20: mol_type = other DNA
ggtggtggaggaaagagcag

SEQ ID NO: 172143 - DNA, 20 bp, synthetic construct
  source 1..20: mol_type = other DNA
tggtggtggaggaaagagca

SEQ ID NO: 172144 - DNA, 20 bp, synthetic construct
  source 1..20: mol_type = other DNA
gtggtggtggaggaaagagc

SEQ ID NO: 172145 - DNA, 20 bp, synthetic construct
  source 1..20: mol_type = other DNA
agtggtggtggaggaaagag

SEQ ID NO: 172146 - DNA, 20 bp, synthetic construct
  source 1..20: mol_type = other DNA
aagtggtggtggaggaaaga

SEQ ID NO: 172147 - DNA, 20 bp, synthetic construct
  source 1..20: mol_type = other DNA
aaagtggtggtggaggaaag

SEQ ID NO: 172148 - DNA, 20 bp, synthetic construct
  source 1..20: mol_type = other DNA
gaaagtggtggtggaggaaa

SEQ ID NO: 172149 - DNA, 20 bp, synthetic construct
  source 1..20: mol_type = other DNA
ggaaagtggtggtggaggaa

SEQ ID NO: 172150 - DNA, 20 bp, synthetic construct
  source 1..20: mol_type = other DNA
aggaaagtggtggtggagga

SEQ ID NO: 172151 - DNA, 20 bp, synthetic construct
  source 1..20: mol_type = other DNA
gaggaaagtggtggtggagg

SEQ ID NO: 172152 - DNA, 20 bp, synthetic construct
  source 1..20: mol_type = other DNA
tgaggaaagtggtggtggag

SEQ ID NO: 172153 - DNA, 20 bp, synthetic construct
  source 1..20: mol_type = other DNA
atgaggaaagtggtggtgga

SEQ ID NO: 172154 - DNA, 20 bp, synthetic construct
  source 1..20: mol_type = other DNA
gatgaggaaagtggtggtgg

SEQ ID NO: 172155 - DNA, 20 bp, synthetic construct
  source 1..20: mol_type = other DNA
tgatgaggaaagtggtggtg

SEQ ID NO: 172156 - DNA, 20 bp, synthetic construct
  source 1..20: mol_type = other DNA
gtgatgaggaaagtggtggt

SEQ ID NO: 172157 - DNA, 20 bp, synthetic construct
  source 1..20: mol_type = other DNA
ggtgatgaggaaagtggtgg

SEQ ID NO: 172158 - DNA, 20 bp, synthetic construct
  source 1..20: mol_type = other DNA
cggtgatgaggaaagtggtg

SEQ ID NO: 172159 - DNA, 20 bp, synthetic construct
  source 1..20: mol_type = other DNA
acggtgatgaggaaagtggt

SEQ ID NO: 172160 - DNA, 20 bp, synthetic construct
  source 1..20: mol_type = other DNA
cacggtgatgaggaaagtgg

SEQ ID NO: 172161 - DNA, 20 bp, synthetic construct
  source 1..20: mol_type = other DNA
acacggtgatgaggaaagtg

SEQ ID NO: 172162 - DNA, 20 bp, synthetic construct
  source 1..20: mol_type = other DNA
aacacggtgatgaggaaagt

SEQ ID NO: 172163 - DNA, 20 bp, synthetic construct
  source 1..20: mol_type = other DNA
gaacacggtgatgaggaaag

SEQ ID NO: 172164 - DNA, 20 bp, synthetic construct
  source 1..20: mol_type = other DNA
tgaacacggtgatgaggaaa

SEQ ID NO: 172165 - DNA, 20 bp, synthetic construct
  source 1..20: mol_type = other DNA
ctgaacacggtgatgaggaa

SEQ ID NO: 172166 - DNA, 20 bp, synthetic construct
  source 1..20: mol_type = other DNA
tctgaacacggtgatgagga

SEQ ID NO: 172167 - DNA, 20 bp, synthetic construct
  source 1..20: mol_type = other DNA
ctctgaacacggtgatgagg

SEQ ID NO: 172168 - DNA, 20 bp, synthetic construct
  source 1..20: mol_type = other DNA
tctctgaacacggtgatgag

SEQ ID NO: 172169 - DNA, 20 bp, synthetic construct
  source 1..20: mol_type = other DNA
gtctctgaacacggtgatga

SEQ ID NO: 172170 - DNA, 20 bp, synthetic construct
  source 1..20: mol_type = other DNA
ggtctctgaacacggtgatg

SEQ ID NO: 172171 - DNA, 20 bp, synthetic construct
  source 1..20: mol_type = other DNA
gggtctctgaacacggtgat

SEQ ID NO: 172172 - DNA, 20 bp, synthetic construct
  source 1..20: mol_type = other DNA
ggggtctctgaacacggtga

SEQ ID NO: 172173 - DNA, 20 bp, synthetic construct
  source 1..20: mol_type = other DNA
gggggtctctgaacacggtg

SEQ ID NO: 172174 - DNA, 20 bp, synthetic construct
  source 1..20: mol_type = other DNA
tgggggtctctgaacacggt

SEQ ID NO: 172175 - DNA, 20 bp, synthetic construct
  source 1..20: mol_type = other DNA
ttgggggtctctgaacacgg

SEQ ID NO: 172176 - DNA, 20 bp, synthetic construct
  source 1..20: mol_type = other DNA
tttgggggtctctgaacacg

SEQ ID NO: 172177 - DNA, 20 bp, synthetic construct
  source 1..20: mol_type = other DNA
ctttgggggtctctgaacac

SEQ ID NO: 172178 - DNA, 20 bp, synthetic construct
  source 1..20: mol_type = other DNA
gctttgggggtctctgaaca

SEQ ID NO: 172179 - DNA, 20 bp, synthetic construct
  source 1..20: mol_type = other DNA
ggctttgggggtctctgaac

SEQ ID NO: 172180 - DNA, 20 bp, synthetic construct
  source 1..20: mol_type = other DNA
gggctttgggggtctctgaa

SEQ ID NO: 172181 - DNA, 20 bp, synthetic construct
  source 1..20: mol_type = other DNA
ggggctttgggggtctctga

SEQ ID NO: 172182 - DNA, 20 bp, synthetic construct
  source 1..20: mol_type = other DNA
gggggctttgggggtctctg

SEQ ID NO: 172183 - DNA, 20 bp, synthetic construct
  source 1..20: mol_type = other DNA
agggggctttgggggtctct

SEQ ID NO: 172184 - DNA, 20 bp, synthetic construct
  source 1..20: mol_type = other DNA
gagggggctttgggggtctc

SEQ ID NO: 172185 - DNA, 20 bp, synthetic construct
  source 1..20: mol_type = other DNA
tgagggggctttgggggtct

SEQ ID NO: 172186 - DNA, 20 bp, synthetic construct
  source 1..20: mol_type = other DNA
gtgagggggctttgggggtc

SEQ ID NO: 172187 - DNA, 20 bp, synthetic construct
  source 1..20: mol_type = other DNA
tgtgagggggctttgggggt

SEQ ID NO: 172188 - DNA, 20 bp, synthetic construct
  source 1..20: mol_type = other DNA
gtgtgagggggctttggggg

SEQ ID NO: 172189 - DNA, 20 bp, synthetic construct
  source 1..20: mol_type = other DNA
agtgtgagggggctttgggg

SEQ ID NO: 172190 - DNA, 20 bp, synthetic construct
  source 1..20: mol_type = other DNA
gagtgtgagggggctttggg

SEQ ID NO: 172191 - DNA, 20 bp, synthetic construct
  source 1..20: mol_type = other DNA
ggagtgtgagggggctttgg

SEQ ID NO: 172192 - DNA, 20 bp, synthetic construct
  source 1..20: mol_type = other DNA
gggagtgtgagggggctttg

SEQ ID NO: 172193 - DNA, 20 bp, synthetic construct
  source 1..20: mol_type = other DNA
tgggagtgtgagggggcttt

SEQ ID NO: 172194 - DNA, 20 bp, synthetic construct
  source 1..20: mol_type = other DNA
ctgggagtgtgagggggctt

SEQ ID NO: 172195 - DNA, 20 bp, synthetic construct
  source 1..20: mol_type = other DNA
tctgggagtgtgagggggct

SEQ ID NO: 172196 - DNA, 20 bp, synthetic construct
  source 1..20: mol_type = other DNA
ttctgggagtgtgagggggc

SEQ ID NO: 172197 - DNA, 20 bp, synthetic construct
  source 1..20: mol_type = other DNA
tttctgggagtgtgaggggg

SEQ ID NO: 172198 - DNA, 20 bp, synthetic construct
  source 1..20: mol_type = other DNA
gtttctgggagtgtgagggg

SEQ ID NO: 172199 - DNA, 20 bp, synthetic construct
  source 1..20: mol_type = other DNA
tgtttctgggagtgtgaggg

SEQ ID NO: 172200 - DNA, 20 bp, synthetic construct
  source 1..20: mol_type = other DNA
gtgtttctgggagtgtgagg

SEQ ID NO: 172201 - DNA, 20 bp, synthetic construct
  source 1..20: mol_type = other DNA
ggtgtttctgggagtgtgag

SEQ ID NO: 172202 - DNA, 20 bp, synthetic construct
  source 1..20: mol_type = other DNA
gggtgtttctgggagtgtga

SEQ ID NO: 172203 - DNA, 20 bp, synthetic construct
  source 1..20: mol_type = other DNA
ggggtgtttctgggagtgtg

SEQ ID NO: 172204 - DNA, 20 bp, synthetic construct
  source 1..20: mol_type = other DNA
gggggtgtttctgggagtgt

SEQ ID NO: 172205 - DNA, 20 bp, synthetic construct
  source 1..20: mol_type = other DNA
ggggggtgtttctgggagtg

SEQ ID NO: 172206 - DNA, 20 bp, synthetic construct
  source 1..20: mol_type = other DNA
aggggggtgtttctgggagt

SEQ ID NO: 172207 - DNA, 20 bp, synthetic construct
  source 1..20: mol_type = other DNA
caggggggtgtttctgggag

SEQ ID NO: 172208 - DNA, 20 bp, synthetic construct
  source 1..20: mol_type = other DNA
ccaggggggtgtttctggga

SEQ ID NO: 172209 - DNA, 20 bp, synthetic construct
  source 1..20: mol_type = other DNA
gccaggggggtgtttctggg

SEQ ID NO: 172210 - DNA, 20 bp, synthetic construct
  source 1..20: mol_type = other DNA
ggccaggggggtgtttctgg

SEQ ID NO: 172211 - DNA, 20 bp, synthetic construct
  source 1..20: mol_type = other DNA
tggccaggggggtgtttctg

SEQ ID NO: 172212 - DNA, 20 bp, synthetic construct
  source 1..20: mol_type = other DNA
gtggccaggggggtgtttct

SEQ ID NO: 172213 - DNA, 20 bp, synthetic construct
  source 1..20: mol_type = other DNA
agtggccaggggggtgtttc

SEQ ID NO: 172214 - DNA, 20 bp, synthetic construct
  source 1..20: mol_type = other DNA
gagtggccaggggggtgttt

SEQ ID NO: 172215 - DNA, 20 bp, synthetic construct
  source 1..20: mol_type = other DNA
ggagtggccaggggggtgtt

SEQ ID NO: 172216 - DNA, 20 bp, synthetic construct
  source 1..20: mol_type = other DNA
aggagtggccaggggggtgt

SEQ ID NO: 172217 - DNA, 20 bp, synthetic construct
  source 1..20: mol_type = other DNA
taggagtggccaggggggtg

SEQ ID NO: 172218 - DNA, 20 bp, synthetic construct
  source 1..20: mol_type = other DNA
ttaggagtggccaggggggt

SEQ ID NO: 172219 - DNA, 20 bp, synthetic construct
  source 1..20: mol_type = other DNA
gttaggagtggccagggggg

SEQ ID NO: 172220 - DNA, 20 bp, synthetic construct
  source 1..20: mol_type = other DNA
agttaggagtggccaggggg

SEQ ID NO: 172221 - DNA, 20 bp, synthetic construct
  source 1..20: mol_type = other DNA
aagttaggagtggccagggg

SEQ ID NO: 172222 - DNA, 20 bp, synthetic construct
  source 1..20: mol_type = other DNA
caagttaggagtggccaggg

SEQ ID NO: 172223 - DNA, 20 bp, synthetic construct
  source 1..20: mol_type = other DNA
gcaagttaggagtggccagg

SEQ ID NO: 172224 - DNA, 20 bp, synthetic construct
  source 1..20: mol_type = other DNA
ggcaagttaggagtggccag

SEQ ID NO: 172225 - DNA, 20 bp, synthetic construct
  source 1..20: mol_type = other DNA
tggcaagttaggagtggcca

SEQ ID NO: 172226 - DNA, 20 bp, synthetic construct
  source 1..20: mol_type = other DNA
atggcaagttaggagtggcc

SEQ ID NO: 172227 - DNA, 20 bp, synthetic construct
  source 1..20: mol_type = other DNA
catggcaagttaggagtggc

SEQ ID NO: 172228 - DNA, 20 bp, synthetic construct
  source 1..20: mol_type = other DNA
gcatggcaagttaggagtgg

SEQ ID NO: 172229 - DNA, 20 bp, synthetic construct
  source 1..20: mol_type = other DNA
ggcatggcaagttaggagtg

SEQ ID NO: 172230 - DNA, 20 bp, synthetic construct
  source 1..20: mol_type = other DNA
gggcatggcaagttaggagt

SEQ ID NO: 172231 - DNA, 20 bp, synthetic construct
  source 1..20: mol_type = other DNA
tgggcatggcaagttaggag

SEQ ID NO: 172232 - DNA, 20 bp, synthetic construct
  source 1..20: mol_type = other DNA
ctgggcatggcaagttagga

SEQ ID NO: 172233 - DNA, 20 bp, synthetic construct
  source 1..20: mol_type = other DNA
cctgggcatggcaagttagg

SEQ ID NO: 172234 - DNA, 20 bp, synthetic construct
  source 1..20: mol_type = other DNA
tcctgggcatggcaagttag

SEQ ID NO: 172235 - DNA, 20 bp, synthetic construct
  source 1..20: mol_type = other DNA
ctcctgggcatggcaagtta

SEQ ID NO: 172236 - DNA, 20 bp, synthetic construct
  source 1..20: mol_type = other DNA
actcctgggcatggcaagtt

SEQ ID NO: 172237 - DNA, 20 bp, synthetic construct
  source 1..20: mol_type = other DNA
aactcctgggcatggcaagt

SEQ ID NO: 172238 - DNA, 20 bp, synthetic construct
  source 1..20: mol_type = other DNA
taactcctgggcatggcaag

SEQ ID NO: 172239 - DNA, 20 bp, synthetic construct
  source 1..20: mol_type = other DNA
ctaactcctgggcatggcaa

SEQ ID NO: 172240 - DNA, 20 bp, synthetic construct
  source 1..20: mol_type = other DNA
cctaactcctgggcatggca

SEQ ID NO: 172241 - DNA, 20 bp, synthetic construct
  source 1..20: mol_type = other DNA
acctaactcctgggcatggc

SEQ ID NO: 172242 - DNA, 20 bp, synthetic construct
  source 1..20: mol_type = other DNA
cacctaactcctgggcatgg

SEQ ID NO: 172243 - DNA, 20 bp, synthetic construct
  source 1..20: mol_type = other DNA
gcacctaactcctgggcatg

SEQ ID NO: 172244 - DNA, 20 bp, synthetic construct
  source 1..20: mol_type = other DNA
agcacctaactcctgggcat

SEQ ID NO: 172245 - DNA, 20 bp, synthetic construct
  source 1..20: mol_type = other DNA
aagcacctaactcctgggca

SEQ ID NO: 172246 - DNA, 20 bp, synthetic construct
  source 1..20: mol_type = other DNA
gaagcacctaactcctgggc

SEQ ID NO: 172247 - DNA, 20 bp, synthetic construct
  source 1..20: mol_type = other DNA
ggaagcacctaactcctggg

SEQ ID NO: 172248 - DNA, 20 bp, synthetic construct
  source 1..20: mol_type = other DNA
tggaagcacctaactcctgg

SEQ ID NO: 172249 - DNA, 20 bp, synthetic construct
  source 1..20: mol_type = other DNA
gtggaagcacctaactcctg

SEQ ID NO: 172250 - DNA, 20 bp, synthetic construct
  source 1..20: mol_type = other DNA
agtggaagcacctaactcct

SEQ ID NO: 172251 - DNA, 20 bp, synthetic construct
  source 1..20: mol_type = other DNA
tagtggaagcacctaactcc

SEQ ID NO: 172252 - DNA, 20 bp, synthetic construct
  source 1..20: mol_type = other DNA
ctagtggaagcacctaactc

SEQ ID NO: 172253 - DNA, 20 bp, synthetic construct
  source 1..20: mol_type = other DNA
actagtggaagcacctaact

SEQ ID NO: 172254 - DNA, 20 bp, synthetic construct
  source 1..20: mol_type = other DNA
cactagtggaagcacctaac

SEQ ID NO: 172255 - DNA, 20 bp, synthetic construct
  source 1..20: mol_type = other DNA
tcactagtggaagcacctaa

SEQ ID NO: 172256 - DNA, 20 bp, synthetic construct
  source 1..20: mol_type = other DNA
gtcactagtggaagcaccta

SEQ ID NO: 172257 - DNA, 20 bp, synthetic construct
  source 1..20: mol_type = other DNA
tgtcactagtggaagcacct

SEQ ID NO: 172258 - DNA, 20 bp, synthetic construct
  source 1..20: mol_type = other DNA
atgtcactagtggaagcacc

SEQ ID NO: 172259 - DNA, 20 bp, synthetic construct
  source 1..20: mol_type = other DNA
catgtcactagtggaagcac

SEQ ID NO: 172260 - DNA, 20 bp, synthetic construct
  source 1..20: mol_type = other DNA
ccatgtcactagtggaagca

SEQ ID NO: 172261 - DNA, 20 bp, synthetic construct
  source 1..20: mol_type = other DNA
tccatgtcactagtggaagc

SEQ ID NO: 172262 - DNA, 20 bp, synthetic construct
  source 1..20: mol_type = other DNA
ctccatgtcactagtggaag

SEQ ID NO: 172263 - DNA, 20 bp, synthetic construct
  source 1..20: mol_type = other DNA
gctccatgtcactagtggaa

SEQ ID NO: 172264 - DNA, 20 bp, synthetic construct
  source 1..20: mol_type = other DNA
agctccatgtcactagtgga

SEQ ID NO: 172265 - DNA, 20 bp, synthetic construct
  source 1..20: mol_type = other DNA
cagctccatgtcactagtgg

SEQ ID NO: 172266 - DNA, 20 bp, synthetic construct
  source 1..20: mol_type = other DNA
ccagctccatgtcactagtg

SEQ ID NO: 172267 - DNA, 20 bp, synthetic construct
  source 1..20: mol_type = other DNA
gccagctccatgtcactagt

SEQ ID NO: 172268 - DNA, 20 bp, synthetic construct
  source 1..20: mol_type = other DNA
cgccagctccatgtcactag

SEQ ID NO: 172269 - DNA, 20 bp, synthetic construct
  source 1..20: mol_type = other DNA
acgccagctccatgtcacta

SEQ ID NO: 172270 - DNA, 20 bp, synthetic construct
  source 1..20: mol_type = other DNA
aacgccagctccatgtcact

SEQ ID NO: 172271 - DNA, 20 bp, synthetic construct
  source 1..20: mol_type = other DNA
aaacgccagctccatgtcac

SEQ ID NO: 172272 - DNA, 20 bp, synthetic construct
  source 1..20: mol_type = other DNA
caaacgccagctccatgtca

SEQ ID NO: 172273 - DNA, 20 bp, synthetic construct
  source 1..20: mol_type = other DNA
ccaaacgccagctccatgtc

SEQ ID NO: 172274 - DNA, 20 bp, synthetic construct
  source 1..20: mol_type = other DNA
cccaaacgccagctccatgt

SEQ ID NO: 172275 - DNA, 20 bp, synthetic construct
  source 1..20: mol_type = other DNA
ccccaaacgccagctccatg

SEQ ID NO: 172276 - DNA, 20 bp, synthetic construct
  source 1..20: mol_type = other DNA
cccccaaacgccagctccat

SEQ ID NO: 172277 - DNA, 20 bp, synthetic construct
  source 1..20: mol_type = other DNA
ccccccaaacgccagctcca

SEQ ID NO: 172278 - DNA, 20 bp, synthetic construct
  source 1..20: mol_type = other DNA
gccccccaaacgccagctcc

SEQ ID NO: 172279 - DNA, 20 bp, synthetic construct
  source 1..20: mol_type = other DNA
tgccccccaaacgccagctc

SEQ ID NO: 172280 - DNA, 20 bp, synthetic construct
  source 1..20: mol_type = other DNA
gtgccccccaaacgccagct

SEQ ID NO: 172281 - DNA, 20 bp, synthetic construct
  source 1..20: mol_type = other DNA
ggtgccccccaaacgccagc

SEQ ID NO: 172282 - DNA, 20 bp, synthetic construct
  source 1..20: mol_type = other DNA
aggtgccccccaaacgccag

SEQ ID NO: 172283 - DNA, 20 bp, synthetic construct
  source 1..20: mol_type = other DNA
gaggtgccccccaaacgcca

SEQ ID NO: 172284 - DNA, 20 bp, synthetic construct
  source 1..20: mol_type = other DNA
tgaggtgccccccaaacgcc

SEQ ID NO: 172285 - DNA, 20 bp, synthetic construct
  source 1..20: mol_type = other DNA
ctgaggtgccccccaaacgc

SEQ ID NO: 172286 - DNA, 20 bp, synthetic construct
  source 1..20: mol_type = other DNA
gctgaggtgccccccaaacg

SEQ ID NO: 172287 - DNA, 20 bp, synthetic construct
  source 1..20: mol_type = other DNA
tgctgaggtgccccccaaac

SEQ ID NO: 172288 - DNA, 20 bp, synthetic construct
  source 1..20: mol_type = other DNA
ctgctgaggtgccccccaaa

SEQ ID NO: 172289 - DNA, 20 bp, synthetic construct
  source 1..20: mol_type = other DNA
cctgctgaggtgccccccaa

SEQ ID NO: 172290 - DNA, 20 bp, synthetic construct
  source 1..20: mol_type = other DNA
acctgctgaggtgcccccca

SEQ ID NO: 172291 - DNA, 20 bp, synthetic construct
  source 1..20: mol_type = other DNA
cacctgctgaggtgcccccc

SEQ ID NO: 172292 - DNA, 20 bp, synthetic construct
  source 1..20: mol_type = other DNA
tcacctgctgaggtgccccc

SEQ ID NO: 172293 - DNA, 20 bp, synthetic construct
  source 1..20: mol_type = other DNA
gtcacctgctgaggtgcccc

SEQ ID NO: 172294 - DNA, 20 bp, synthetic construct
  source 1..20: mol_type = other DNA
cgtcacctgctgaggtgccc

SEQ ID NO: 172295 - DNA, 20 bp, synthetic construct
  source 1..20: mol_type = other DNA
ccgtcacctgctgaggtgcc

SEQ ID NO: 172296 - DNA, 20 bp, synthetic construct
  source 1..20: mol_type = other DNA
cccgtcacctgctgaggtgc

SEQ ID NO: 172297 - DNA, 20 bp, synthetic construct
  source 1..20: mol_type = other DNA
tcccgtcacctgctgaggtg

SEQ ID NO: 172298 - DNA, 20 bp, synthetic construct
  source 1..20: mol_type = other DNA
ttcccgtcacctgctgaggt

SEQ ID NO: 172299 - DNA, 20 bp, synthetic construct
  source 1..20: mol_type = other DNA
cttcccgtcacctgctgagg

SEQ ID NO: 172300 - DNA, 20 bp, synthetic construct
  source 1..20: mol_type = other DNA
tcttcccgtcacctgctgag

SEQ ID NO: 172301 - DNA, 20 bp, synthetic construct
  source 1..20: mol_type = other DNA
ctcttcccgtcacctgctga

SEQ ID NO: 172302 - DNA, 20 bp, synthetic construct
  source 1..20: mol_type = other DNA
tctcttcccgtcacctgctg

SEQ ID NO: 172303 - DNA, 20 bp, synthetic construct
  source 1..20: mol_type = other DNA
ttctcttcccgtcacctgct

SEQ ID NO: 172304 - DNA, 20 bp, synthetic construct
  source 1..20: mol_type = other DNA
cttctcttcccgtcacctgc

SEQ ID NO: 172305 - DNA, 20 bp, synthetic construct
  source 1..20: mol_type = other DNA
tcttctcttcccgtcacctg

SEQ ID NO: 172306 - DNA, 20 bp, synthetic construct
  source 1..20: mol_type = other DNA
gtcttctcttcccgtcacct

SEQ ID NO: 172307 - DNA, 20 bp, synthetic construct
  source 1..20: mol_type = other DNA
ggtcttctcttcccgtcacc

SEQ ID NO: 172308 - DNA, 20 bp, synthetic construct
  source 1..20: mol_type = other DNA
gggtcttctcttcccgtcac

SEQ ID NO: 172309 - DNA, 20 bp, synthetic construct
  source 1..20: mol_type = other DNA
ggggtcttctcttcccgtca

SEQ ID NO: 172310 - DNA, 20 bp, synthetic construct
  source 1..20: mol_type = other DNA
tggggtcttctcttcccgtc

SEQ ID NO: 172311 - DNA, 20 bp, synthetic construct
  source 1..20: mol_type = other DNA
ctggggtcttctcttcccgt

SEQ ID NO: 172312 - DNA, 20 bp, synthetic construct
  source 1..20: mol_type = other DNA
gctggggtcttctcttcccg

SEQ ID NO: 172313 - DNA, 20 bp, synthetic construct
  source 1..20: mol_type = other DNA
ggctggggtcttctcttccc

SEQ ID NO: 172314 - DNA, 20 bp, synthetic construct
  source 1..20: mol_type = other DNA
aggctggggtcttctcttcc

SEQ ID NO: 172315 - DNA, 20 bp, synthetic construct
  source 1..20: mol_type = other DNA
gaggctggggtcttctcttc

SEQ ID NO: 172316 - DNA, 20 bp, synthetic construct
  source 1..20: mol_type = other DNA
tgaggctggggtcttctctt

SEQ ID NO: 172317 - DNA, 20 bp, synthetic construct
  source 1..20: mol_type = other DNA
gtgaggctggggtcttctct

SEQ ID NO: 172318 - DNA, 20 bp, synthetic construct
  source 1..20: mol_type = other DNA
ggtgaggctggggtcttctc

SEQ ID NO: 172319 - DNA, 20 bp, synthetic construct
  source 1..20: mol_type = other DNA
tggtgaggctggggtcttct

SEQ ID NO: 172320 - DNA, 20 bp, synthetic construct
  source 1..20: mol_type = other DNA
ctggtgaggctggggtcttc

SEQ ID NO: 172321 - DNA, 20 bp, synthetic construct
  source 1..20: mol_type = other DNA
gctggtgaggctggggtctt

SEQ ID NO: 172322 - DNA, 20 bp, synthetic construct
  source 1..20: mol_type = other DNA
agctggtgaggctggggtct

SEQ ID NO: 172323 - DNA, 20 bp, synthetic construct
  source 1..20: mol_type = other DNA
cagctggtgaggctggggtc

SEQ ID NO: 172324 - DNA, 20 bp, synthetic construct
  source 1..20: mol_type = other DNA
ccagctggtgaggctggggt

SEQ ID NO: 172325 - DNA, 20 bp, synthetic construct
  source 1..20: mol_type = other DNA
cccagctggtgaggctgggg

SEQ ID NO: 172326 - DNA, 20 bp, synthetic construct
  source 1..20: mol_type = other DNA
gcccagctggtgaggctggg

SEQ ID NO: 172327 - DNA, 20 bp, synthetic construct
  source 1..20: mol_type = other DNA
agcccagctggtgaggctgg

SEQ ID NO: 172328 - DNA, 20 bp, synthetic construct
  source 1..20: mol_type = other DNA
cagcccagctggtgaggctg

SEQ ID NO: 172329 - DNA, 20 bp, synthetic construct
  source 1..20: mol_type = other DNA
gcagcccagctggtgaggct

SEQ ID NO: 172330 - DNA, 20 bp, synthetic construct
  source 1..20: mol_type = other DNA
tgcagcccagctggtgaggc

SEQ ID NO: 172331 - DNA, 20 bp, synthetic construct
  source 1..20: mol_type = other DNA
ctgcagcccagctggtgagg

SEQ ID NO: 172332 - DNA, 20 bp, synthetic construct
  source 1..20: mol_type = other DNA
gctgcagcccagctggtgag

SEQ ID NO: 172333 - DNA, 20 bp, synthetic construct
  source 1..20: mol_type = other DNA
tgctgcagcccagctggtga

SEQ ID NO: 172334 - DNA, 20 bp, synthetic construct
  source 1..20: mol_type = other DNA
ctgctgcagcccagctggtg

SEQ ID NO: 172335 - DNA, 20 bp, synthetic construct
  source 1..20: mol_type = other DNA
cctgctgcagcccagctggt

SEQ ID NO: 172336 - DNA, 20 bp, synthetic construct
  source 1..20: mol_type = other DNA
ccctgctgcagcccagctgg

SEQ ID NO: 172337 - DNA, 20 bp, synthetic construct
  source 1..20: mol_type = other DNA
tccctgctgcagcccagctg

SEQ ID NO: 172338 - DNA, 20 bp, synthetic construct
  source 1..20: mol_type = other DNA
ctccctgctgcagcccagct

SEQ ID NO: 172339 - DNA, 20 bp, synthetic construct
  source 1..20: mol_type = other DNA
tctccctgctgcagcccagc

SEQ ID NO: 172340 - DNA, 20 bp, synthetic construct
  source 1..20: mol_type = other DNA
ctctccctgctgcagcccag

SEQ ID NO: 172341 - DNA, 20 bp, synthetic construct
  source 1..20: mol_type = other DNA
cctctccctgctgcagccca

SEQ ID NO: 172342 - DNA, 20 bp, synthetic construct
  source 1..20: mol_type = other DNA
tcctctccctgctgcagccc

SEQ ID NO: 172343 - DNA, 20 bp, synthetic construct
  source 1..20: mol_type = other DNA
ctcctctccctgctgcagcc

SEQ ID NO: 172344 - DNA, 20 bp, synthetic construct
  source 1..20: mol_type = other DNA
actcctctccctgctgcagc

SEQ ID NO: 172345 - DNA, 20 bp, synthetic construct
  source 1..20: mol_type = other DNA
gactcctctccctgctgcag

SEQ ID NO: 172346 - DNA, 20 bp, synthetic construct
  source 1..20: mol_type = other DNA
ggactcctctccctgctgca

SEQ ID NO: 172347 - DNA, 20 bp, synthetic construct
  source 1..20: mol_type = other DNA
aggactcctctccctgctgc

SEQ ID NO: 172348 - DNA, 20 bp, synthetic construct
  source 1..20: mol_type = other DNA
gaggactcctctccctgctg

SEQ ID NO: 172349 - DNA, 20 bp, synthetic construct
  source 1..20: mol_type = other DNA
tgaggactcctctccctgct

SEQ ID NO: 172350 - DNA, 20 bp, synthetic construct
  source 1..20: mol_type = other DNA
atgaggactcctctccctgc

SEQ ID NO: 172351 - DNA, 20 bp, synthetic construct
  source 1..20: mol_type = other DNA
catgaggactcctctccctg

SEQ ID NO: 172352 - DNA, 20 bp, synthetic construct
  source 1..20: mol_type = other DNA
acatgaggactcctctccct

SEQ ID NO: 172353 - DNA, 20 bp, synthetic construct
  source 1..20: mol_type = other DNA
aacatgaggactcctctccc

SEQ ID NO: 172354 - DNA, 20 bp, synthetic construct
  source 1..20: mol_type = other DNA
gaacatgaggactcctctcc

SEQ ID NO: 172355 - DNA, 20 bp, synthetic construct
  source 1..20: mol_type = other DNA
ggaacatgaggactcctctc

SEQ ID NO: 172356 - DNA, 20 bp, synthetic construct
  source 1..20: mol_type = other DNA
tggaacatgaggactcctct

SEQ ID NO: 172357 - DNA, 20 bp, synthetic construct
  source 1..20: mol_type = other DNA
ctggaacatgaggactcctc

SEQ ID NO: 172358 - DNA, 20 bp, synthetic construct
  source 1..20: mol_type = other DNA
gctggaacatgaggactcct

SEQ ID NO: 172359 - DNA, 20 bp, synthetic construct
  source 1..20: mol_type = other DNA
tgctggaacatgaggactcc

SEQ ID NO: 172360 - DNA, 20 bp, synthetic construct
  source 1..20: mol_type = other DNA
ctgctggaacatgaggactc

SEQ ID NO: 172361 - DNA, 20 bp, synthetic construct
  source 1..20: mol_type = other DNA
cctgctggaacatgaggact

SEQ ID NO: 172362 - DNA, 20 bp, synthetic construct
  source 1..20: mol_type = other DNA
ccctgctggaacatgaggac

SEQ ID NO: 172363 - DNA, 20 bp, synthetic construct
  source 1..20: mol_type = other DNA
tccctgctggaacatgagga

SEQ ID NO: 172364 - DNA, 20 bp, synthetic construct
  source 1..20: mol_type = other DNA
gtccctgctggaacatgagg

SEQ ID NO: 172365 - DNA, 20 bp, synthetic construct
  source 1..20: mol_type = other DNA
agtccctgctggaacatgag

SEQ ID NO: 172366 - DNA, 20 bp, synthetic construct
  source 1..20: mol_type = other DNA
gagtccctgctggaacatga

SEQ ID NO: 172367 - DNA, 20 bp, synthetic construct
  source 1..20: mol_type = other DNA
agagtccctgctggaacatg

SEQ ID NO: 172368 - DNA, 20 bp, synthetic construct
  source 1..20: mol_type = other DNA
gagagtccctgctggaacat

SEQ ID NO: 172369 - DNA, 20 bp, synthetic construct
  source 1..20: mol_type = other DNA
tgagagtccctgctggaaca

SEQ ID NO: 172370 - DNA, 20 bp, synthetic construct
  source 1..20: mol_type = other DNA
ctgagagtccctgctggaac

SEQ ID NO: 172371 - DNA, 20 bp, synthetic construct
  source 1..20: mol_type = other DNA
gctgagagtccctgctggaa

SEQ ID NO: 172372 - DNA, 20 bp, synthetic construct
  source 1..20: mol_type = other DNA
agctgagagtccctgctgga

SEQ ID NO: 172373 - DNA, 20 bp, synthetic construct
  source 1..20: mol_type = other DNA
cagctgagagtccctgctgg

SEQ ID NO: 172374 - DNA, 20 bp, synthetic construct
  source 1..20: mol_type = other DNA
acagctgagagtccctgctg

SEQ ID NO: 172375 - DNA, 20 bp, synthetic construct
  source 1..20: mol_type = other DNA
aacagctgagagtccctgct

SEQ ID NO: 172376 - DNA, 20 bp, synthetic construct
  source 1..20: mol_type = other DNA
aaacagctgagagtccctgc

SEQ ID NO: 172377 - DNA, 20 bp, synthetic construct
  source 1..20: mol_type = other DNA
aaaacagctgagagtccctg

SEQ ID NO: 172378 - DNA, 20 bp, synthetic construct
  source 1..20: mol_type = other DNA
gaaaacagctgagagtccct

SEQ ID NO: 172379 - DNA, 20 bp, synthetic construct
  source 1..20: mol_type = other DNA
ggaaaacagctgagagtccc

SEQ ID NO: 172380 - DNA, 20 bp, synthetic construct
  source 1..20: mol_type = other DNA
aggaaaacagctgagagtcc

SEQ ID NO: 172381 - DNA, 20 bp, synthetic construct
  source 1..20: mol_type = other DNA
caggaaaacagctgagagtc

SEQ ID NO: 172382 - DNA, 20 bp, synthetic construct
  source 1..20: mol_type = other DNA
acaggaaaacagctgagagt

SEQ ID NO: 172383 - DNA, 20 bp, synthetic construct
  source 1..20: mol_type = other DNA
tacaggaaaacagctgagag

SEQ ID NO: 172384 - DNA, 20 bp, synthetic construct
  source 1..20: mol_type = other DNA
ttacaggaaaacagctgaga

SEQ ID NO: 172385 - DNA, 20 bp, synthetic construct
  source 1..20: mol_type = other DNA
tttacaggaaaacagctgag

SEQ ID NO: 172386 - DNA, 20 bp, synthetic construct
  source 1..20: mol_type = other DNA
ttttacaggaaaacagctga

SEQ ID NO: 172387 - DNA, 20 bp, synthetic construct
  source 1..20: mol_type = other DNA
gttttacaggaaaacagctg

SEQ ID NO: 172388 - DNA, 20 bp, synthetic construct
  source 1..20: mol_type = other DNA
ggttttacaggaaaacagct

SEQ ID NO: 172389 - DNA, 20 bp, synthetic construct
  source 1..20: mol_type = other DNA
tggttttacaggaaaacagc

SEQ ID NO: 172390 - DNA, 20 bp, synthetic construct
  source 1..20: mol_type = other DNA
atggttttacaggaaaacag

SEQ ID NO: 172391 - DNA, 20 bp, synthetic construct
  source 1..20: mol_type = other DNA
catggttttacaggaaaaca

SEQ ID NO: 172392 - DNA, 20 bp, synthetic construct
  source 1..20: mol_type = other DNA
ccatggttttacaggaaaac

SEQ ID NO: 172393 - DNA, 20 bp, synthetic construct
  source 1..20: mol_type = other DNA
accatggttttacaggaaaa

SEQ ID NO: 172394 - DNA, 20 bp, synthetic construct
  source 1..20: mol_type = other DNA
aaccatggttttacaggaaa

SEQ ID NO: 172395 - DNA, 20 bp, synthetic construct
  source 1..20: mol_type = other DNA
gaaccatggttttacaggaa

SEQ ID NO: 172396 - DNA, 20 bp, synthetic construct
  source 1..20: mol_type = other DNA
agaaccatggttttacagga

SEQ ID NO: 172397 - DNA, 20 bp, synthetic construct
  source 1..20: mol_type = other DNA
gagaaccatggttttacagg

SEQ ID NO: 172398 - DNA, 20 bp, synthetic construct
  source 1..20: mol_type = other DNA
tgagaaccatggttttacag

SEQ ID NO: 172399 - DNA, 20 bp, synthetic construct
  source 1..20: mol_type = other DNA
ttgagaaccatggttttaca

SEQ ID NO: 172400 - DNA, 20 bp, synthetic construct
  source 1..20: mol_type = other DNA
gttgagaaccatggttttac

SEQ ID NO: 172401 - DNA, 20 bp, synthetic construct
  source 1..20: mol_type = other DNA
agttgagaaccatggtttta

SEQ ID NO: 172402 - DNA, 20 bp, synthetic construct
  source 1..20: mol_type = other DNA
cagttgagaaccatggtttt

SEQ ID NO: 172403 - DNA, 20 bp, synthetic construct
  source 1..20: mol_type = other DNA
ccagttgagaaccatggttt

SEQ ID NO: 172404 - DNA, 20 bp, synthetic construct
  source 1..20: mol_type = other DNA
cccagttgagaaccatggtt

SEQ ID NO: 172405 - DNA, 20 bp, synthetic construct
  source 1..20: mol_type = other DNA
ccccagttgagaaccatggt

SEQ ID NO: 172406 - DNA, 20 bp, synthetic construct
  source 1..20: mol_type = other DNA
cccccagttgagaaccatgg

SEQ ID NO: 172407 - DNA, 20 bp, synthetic construct
  source 1..20: mol_type = other DNA
gcccccagttgagaaccatg

SEQ ID NO: 172408 - DNA, 20 bp, synthetic construct
  source 1..20: mol_type = other DNA
ggcccccagttgagaaccat

SEQ ID NO: 172409 - DNA, 20 bp, synthetic construct
  source 1..20: mol_type = other DNA
tggcccccagttgagaacca

SEQ ID NO: 172410 - DNA, 20 bp, synthetic construct
  source 1..20: mol_type = other DNA
gtggcccccagttgagaacc

SEQ ID NO: 172411 - DNA, 20 bp, synthetic construct
  source 1..20: mol_type = other DNA
agtggcccccagttgagaac

SEQ ID NO: 172412 - DNA, 20 bp, synthetic construct
  source 1..20: mol_type = other DNA
cagtggcccccagttgagaa

SEQ ID NO: 172413 - DNA, 20 bp, synthetic construct
  source 1..20: mol_type = other DNA
tcagtggcccccagttgaga

SEQ ID NO: 172414 - DNA, 20 bp, synthetic construct
  source 1..20: mol_type = other DNA
ctcagtggcccccagttgag

SEQ ID NO: 172415 - DNA, 20 bp, synthetic construct
  source 1..20: mol_type = other DNA
tctcagtggcccccagttga

SEQ ID NO: 172416 - DNA, 20 bp, synthetic construct
  source 1..20: mol_type = other DNA
atctcagtggcccccagttg

SEQ ID NO: 172417 - DNA, 20 bp, synthetic construct
  source 1..20: mol_type = other DNA
catctcagtggcccccagtt

SEQ ID NO: 172418 - DNA, 20 bp, synthetic construct
  source 1..20: mol_type = other DNA
acatctcagtggcccccagt

SEQ ID NO: 172419 - DNA, 20 bp, synthetic construct
  source 1..20: mol_type = other DNA
gacatctcagtggcccccag

SEQ ID NO: 172420 - DNA, 20 bp, synthetic construct
  source 1..20: mol_type = other DNA
agacatctcagtggccccca

SEQ ID NO: 172421 - DNA, 20 bp, synthetic construct
  source 1..20: mol_type = other DNA
tagacatctcagtggccccc

SEQ ID NO: 172422 - DNA, 20 bp, synthetic construct
  source 1..20: mol_type = other DNA
ctagacatctcagtggcccc

SEQ ID NO: 172423 - DNA, 20 bp, synthetic construct
  source 1..20: mol_type = other DNA
tctagacatctcagtggccc

SEQ ID NO: 172424 - DNA, 20 bp, synthetic construct
  source 1..20: mol_type = other DNA
ctctagacatctcagtggcc

SEQ ID NO: 172425 - DNA, 20 bp, synthetic construct
  source 1..20: mol_type = other DNA
tctctagacatctcagtggc

SEQ ID NO: 172426 - DNA, 20 bp, synthetic construct
  source 1..20: mol_type = other DNA
ctctctagacatctcagtgg

SEQ ID NO: 172427 - DNA, 20 bp, synthetic construct
  source 1..20: mol_type = other DNA
tctctctagacatctcagtg

SEQ ID NO: 172428 - DNA, 20 bp, synthetic construct
  source 1..20: mol_type = other DNA
atctctctagacatctcagt

SEQ ID NO: 172429 - DNA, 20 bp, synthetic construct
  source 1..20: mol_type = other DNA
catctctctagacatctcag

SEQ ID NO: 172430 - DNA, 20 bp, synthetic construct
  source 1..20: mol_type = other DNA
acatctctctagacatctca

SEQ ID NO: 172431 - DNA, 20 bp, synthetic construct
  source 1..20: mol_type = other DNA
aacatctctctagacatctc

SEQ ID NO: 172432 - DNA, 20 bp, synthetic construct
  source 1..20: mol_type = other DNA
aaacatctctctagacatct

SEQ ID NO: 172433 - DNA, 20 bp, synthetic construct
  source 1..20: mol_type = other DNA
aaaacatctctctagacatc

SEQ ID NO: 172434 - DNA, 20 bp, synthetic construct
  source 1..20: mol_type = other DNA
aaaaacatctctctagacat

SEQ ID NO: 172435 - DNA, 20 bp, synthetic construct
  source 1..20: mol_type = other DNA
caaaaacatctctctagaca

SEQ ID NO: 172436 - DNA, 20 bp, synthetic construct
  source 1..20: mol_type = other DNA
acaaaaacatctctctagac

SEQ ID NO: 172437 - DNA, 20 bp, synthetic construct
  source 1..20: mol_type = other DNA
aacaaaaacatctctctaga

SEQ ID NO: 172438 - DNA, 20 bp, synthetic construct
  source 1..20: mol_type = other DNA
aaacaaaaacatctctctag

SEQ ID NO: 172439 - DNA, 20 bp, synthetic construct
  source 1..20: mol_type = other DNA
aaaacaaaaacatctctcta

SEQ ID NO: 172440 - DNA, 20 bp, synthetic construct
  source 1..20: mol_type = other DNA
gaaaacaaaaacatctctct

SEQ ID NO: 172441 - DNA, 20 bp, synthetic construct
  source 1..20: mol_type = other DNA
tgaaaacaaaaacatctctc

SEQ ID NO: 172442 - DNA, 20 bp, synthetic construct
  source 1..20: mol_type = other DNA
gtgaaaacaaaaacatctct

SEQ ID NO: 172443 - DNA, 20 bp, synthetic construct
  source 1..20: mol_type = other DNA
tgtgaaaacaaaaacatctc

SEQ ID NO: 172444 - DNA, 20 bp, synthetic construct
  source 1..20: mol_type = other DNA
ttgtgaaaacaaaaacatct

SEQ ID NO: 172445 - DNA, 20 bp, synthetic construct
  source 1..20: mol_type = other DNA
gttgtgaaaacaaaaacatc

SEQ ID NO: 172446 - DNA, 20 bp, synthetic construct
  source 1..20: mol_type = other DNA
agttgtgaaaacaaaaacat

SEQ ID NO: 172447 - DNA, 20 bp, synthetic construct
  source 1..20: mol_type = other DNA
gagttgtgaaaacaaaaaca

SEQ ID NO: 172448 - DNA, 20 bp, synthetic construct
  source 1..20: mol_type = other DNA
cgagttgtgaaaacaaaaac

SEQ ID NO: 172449 - DNA, 20 bp, synthetic construct
  source 1..20: mol_type = other DNA
ccgagttgtgaaaacaaaaa

SEQ ID NO: 172450 - DNA, 20 bp, synthetic construct
  source 1..20: mol_type = other DNA
cccgagttgtgaaaacaaaa

SEQ ID NO: 172451 - DNA, 20 bp, synthetic construct
  source 1..20: mol_type = other DNA
ccccgagttgtgaaaacaaa

SEQ ID NO: 172452 - DNA, 20 bp, synthetic construct
  source 1..20: mol_type = other DNA
tccccgagttgtgaaaacaa

SEQ ID NO: 172453 - DNA, 20 bp, synthetic construct
  source 1..20: mol_type = other DNA
ctccccgagttgtgaaaaca

SEQ ID NO: 172454 - DNA, 20 bp, synthetic construct
  source 1..20: mol_type = other DNA
cctccccgagttgtgaaaac

SEQ ID NO: 172455 - DNA, 20 bp, synthetic construct
  source 1..20: mol_type = other DNA
ccctccccgagttgtgaaaa

SEQ ID NO: 172456 - DNA, 20 bp, synthetic construct
  source 1..20: mol_type = other DNA
accctccccgagttgtgaaa

SEQ ID NO: 172457 - DNA, 20 bp, synthetic construct
  source 1..20: mol_type = other DNA
caccctccccgagttgtgaa

SEQ ID NO: 172458 - DNA, 20 bp, synthetic construct
  source 1..20: mol_type = other DNA
gcaccctccccgagttgtga

SEQ ID NO: 172459 - DNA, 20 bp, synthetic construct
  source 1..20: mol_type = other DNA
agcaccctccccgagttgtg

SEQ ID NO: 172460 - DNA, 20 bp, synthetic construct
  source 1..20: mol_type = other DNA
tagcaccctccccgagttgt

SEQ ID NO: 172461 - DNA, 20 bp, synthetic construct
  source 1..20: mol_type = other DNA
gtagcaccctccccgagttg

SEQ ID NO: 172462 - DNA, 20 bp, synthetic construct
  source 1..20: mol_type = other DNA
agtagcaccctccccgagtt

SEQ ID NO: 172463 - DNA, 20 bp, synthetic construct
  source 1..20: mol_type = other DNA
cagtagcaccctccccgagt

SEQ ID NO: 172464 - DNA, 20 bp, synthetic construct
  source 1..20: mol_type = other DNA
tcagtagcaccctccccgag

SEQ ID NO: 172465 - DNA, 20 bp, synthetic construct
  source 1..20: mol_type = other DNA
gtcagtagcaccctccccga

SEQ ID NO: 172466 - DNA, 20 bp, synthetic construct
  source 1..20: mol_type = other DNA
tgtcagtagcaccctccccg

SEQ ID NO: 172467 - DNA, 20 bp, synthetic construct
  source 1..20: mol_type = other DNA
atgtcagtagcaccctcccc

SEQ ID NO: 172468 - DNA, 20 bp, synthetic construct
  source 1..20: mol_type = other DNA
gatgtcagtagcaccctccc

SEQ ID NO: 172469 - DNA, 20 bp, synthetic construct
  source 1..20: mol_type = other DNA
agatgtcagtagcaccctcc

SEQ ID NO: 172470 - DNA, 20 bp, synthetic construct
  source 1..20: mol_type = other DNA
aagatgtcagtagcaccctc

SEQ ID NO: 172471 - DNA, 20 bp, synthetic construct
  source 1..20: mol_type = other DNA
caagatgtcagtagcaccct

SEQ ID NO: 172472 - DNA, 20 bp, synthetic construct
  source 1..20: mol_type = other DNA
acaagatgtcagtagcaccc

SEQ ID NO: 172473 - DNA, 20 bp, synthetic construct
  source 1..20: mol_type = other DNA
cacaagatgtcagtagcacc

SEQ ID NO: 172474 - DNA, 20 bp, synthetic construct
  source 1..20: mol_type = other DNA
ccacaagatgtcagtagcac

SEQ ID NO: 172475 - DNA, 20 bp, synthetic construct
  source 1..20: mol_type = other DNA
cccacaagatgtcagtagca

SEQ ID NO: 172476 - DNA, 20 bp, synthetic construct
  source 1..20: mol_type = other DNA
acccacaagatgtcagtagc

SEQ ID NO: 172477 - DNA, 20 bp, synthetic construct
  source 1..20: mol_type = other DNA
tacccacaagatgtcagtag

SEQ ID NO: 172478 - DNA, 20 bp, synthetic construct
  source 1..20: mol_type = other DNA
ctacccacaagatgtcagta

SEQ ID NO: 172479 - DNA, 20 bp, synthetic construct
  source 1..20: mol_type = other DNA
tctacccacaagatgtcagt

SEQ ID NO: 172480 - DNA, 20 bp, synthetic construct
  source 1..20: mol_type = other DNA
ctctacccacaagatgtcag

SEQ ID NO: 172481 - DNA, 20 bp, synthetic construct
  source 1..20: mol_type = other DNA
cctctacccacaagatgtca

SEQ ID NO: 172482 - DNA, 20 bp, synthetic construct
  source 1..20: mol_type = other DNA
gcctctacccacaagatgtc

SEQ ID NO: 172483 - DNA, 20 bp, synthetic construct
  source 1..20: mol_type = other DNA
ggcctctacccacaagatgt

SEQ ID NO: 172484 - DNA, 20 bp, synthetic construct
  source 1..20: mol_type = other DNA
tggcctctacccacaagatg

SEQ ID NO: 172485 - DNA, 20 bp, synthetic construct
  source 1..20: mol_type = other DNA
ctggcctctacccacaagat

SEQ ID NO: 172486 - DNA, 20 bp, synthetic construct
  source 1..20: mol_type = other DNA
cctggcctctacccacaaga

SEQ ID NO: 172487 - DNA, 20 bp, synthetic construct
  source 1..20: mol_type = other DNA
tcctggcctctacccacaag

SEQ ID NO: 172488 - DNA, 20 bp, synthetic construct
  source 1..20: mol_type = other DNA
ttcctggcctctacccacaa

SEQ ID NO: 172489 - DNA, 20 bp, synthetic construct
  source 1..20: mol_type = other DNA
attcctggcctctacccaca

SEQ ID NO: 172490 - DNA, 20 bp, synthetic construct
  source 1..20: mol_type = other DNA
cattcctggcctctacccac

SEQ ID NO: 172491 - DNA, 20 bp, synthetic construct
  source 1..20: mol_type = other DNA
gcattcctggcctctaccca

SEQ ID NO: 172492 - DNA, 20 bp, synthetic construct
  source 1..20: mol_type = other DNA
agcattcctggcctctaccc

SEQ ID NO: 172493 - DNA, 20 bp, synthetic construct
  source 1..20: mol_type = other DNA
cagcattcctggcctctacc

SEQ ID NO: 172494 - DNA, 20 bp, synthetic construct
  source 1..20: mol_type = other DNA
acagcattcctggcctctac

SEQ ID NO: 172495 - DNA, 20 bp, synthetic construct
  source 1..20: mol_type = other DNA
aacagcattcctggcctcta

SEQ ID NO: 172496 - DNA, 20 bp, synthetic construct
  source 1..20: mol_type = other DNA
taacagcattcctggcctct

SEQ ID NO: 172497 - DNA, 20 bp, synthetic construct
  source 1..20: mol_type = other DNA
ttaacagcattcctggcctc

SEQ ID NO: 172498 - DNA, 20 bp, synthetic construct
  source 1..20: mol_type = other DNA
tttaacagcattcctggcct

SEQ ID NO: 172499 - DNA, 20 bp, synthetic construct
  source 1..20: mol_type = other DNA
gtttaacagcattcctggcc

SEQ ID NO: 172500 - DNA, 20 bp, synthetic construct
  source 1..20: mol_type = other DNA
tgtttaacagcattcctggc

SEQ ID NO: 172501 - DNA, 20 bp, synthetic construct
  source 1..20: mol_type = other DNA
atgtttaacagcattcctgg

SEQ ID NO: 172502 - DNA, 20 bp, synthetic construct
  source 1..20: mol_type = other DNA
gatgtttaacagcattcctg

SEQ ID NO: 172503 - DNA, 20 bp, synthetic construct
  source 1..20: mol_type = other DNA
ggatgtttaacagcattcct

SEQ ID NO: 172504 - DNA, 20 bp, synthetic construct
  source 1..20: mol_type = other DNA
aggatgtttaacagcattcc

SEQ ID NO: 172505 - DNA, 20 bp, synthetic construct
  source 1..20: mol_type = other DNA
taggatgtttaacagcattc

SEQ ID NO: 172506 - DNA, 20 bp, synthetic construct
  source 1..20: mol_type = other DNA
gtaggatgtttaacagcatt

SEQ ID NO: 172507 - DNA, 20 bp, synthetic construct
  source 1..20: mol_type = other DNA
tgtaggatgtttaacagcat

SEQ ID NO: 172508 - DNA, 20 bp, synthetic construct
  source 1..20: mol_type = other DNA
ttgtaggatgtttaacagca

SEQ ID NO: 172509 - DNA, 20 bp, synthetic construct
  source 1..20: mol_type = other DNA
cttgtaggatgtttaacagc

SEQ ID NO: 172510 - DNA, 20 bp, synthetic construct
  source 1..20: mol_type = other DNA
ccttgtaggatgtttaacag

SEQ ID NO: 172511 - DNA, 20 bp, synthetic construct
  source 1..20: mol_type = other DNA
tccttgtaggatgtttaaca

SEQ ID NO: 172512 - DNA, 20 bp, synthetic construct
  source 1..20: mol_type = other DNA
ttccttgtaggatgtttaac

SEQ ID NO: 172513 - DNA, 20 bp, synthetic construct
  source 1..20: mol_type = other DNA
cttccttgtaggatgtttaa

SEQ ID NO: 172514 - DNA, 20 bp, synthetic construct
  source 1..20: mol_type = other DNA
ccttccttgtaggatgttta

SEQ ID NO: 172515 - DNA, 20 bp, synthetic construct
  source 1..20: mol_type = other DNA
gccttccttgtaggatgttt

SEQ ID NO: 172516 - DNA, 20 bp, synthetic construct
  source 1..20: mol_type = other DNA
tgccttccttgtaggatgtt

SEQ ID NO: 172517 - DNA, 20 bp, synthetic construct
  source 1..20: mol_type = other DNA
gtgccttccttgtaggatgt

SEQ ID NO: 172518 - DNA, 20 bp, synthetic construct
  source 1..20: mol_type = other DNA
tgtgccttccttgtaggatg

SEQ ID NO: 172519 - DNA, 20 bp, synthetic construct
  source 1..20: mol_type = other DNA
ctgtgccttccttgtaggat

SEQ ID NO: 172520 - DNA, 20 bp, synthetic construct
  source 1..20: mol_type = other DNA
cctgtgccttccttgtagga

SEQ ID NO: 172521 - DNA, 20 bp, synthetic construct
  source 1..20: mol_type = other DNA
tcctgtgccttccttgtagg

SEQ ID NO: 172522 - DNA, 20 bp, synthetic construct
  source 1..20: mol_type = other DNA
gtcctgtgccttccttgtag

SEQ ID NO: 172523 - DNA, 20 bp, synthetic construct
  source 1..20: mol_type = other DNA
tgtcctgtgccttccttgta

SEQ ID NO: 172524 - DNA, 20 bp, synthetic construct
  source 1..20: mol_type = other DNA
ctgtcctgtgccttccttgt

SEQ ID NO: 172525 - DNA, 20 bp, synthetic construct
  source 1..20: mol_type = other DNA
actgtcctgtgccttccttg

SEQ ID NO: 172526 - DNA, 20 bp, synthetic construct
  source 1..20: mol_type = other DNA
gactgtcctgtgccttcctt

SEQ ID NO: 172527 - DNA, 20 bp, synthetic construct
  source 1..20: mol_type = other DNA
agactgtcctgtgccttcct

SEQ ID NO: 172528 - DNA, 20 bp, synthetic construct
  source 1..20: mol_type = other DNA
gagactgtcctgtgccttcc

SEQ ID NO: 172529 - DNA, 20 bp, synthetic construct
  source 1..20: mol_type = other DNA
ggagactgtcctgtgccttc

SEQ ID NO: 172530 - DNA, 20 bp, synthetic construct
  source 1..20: mol_type = other DNA
aggagactgtcctgtgcctt

SEQ ID NO: 172531 - DNA, 20 bp, synthetic construct
  source 1..20: mol_type = other DNA
taggagactgtcctgtgcct

SEQ ID NO: 172532 - DNA, 20 bp, synthetic construct
  source 1..20: mol_type = other DNA
gtaggagactgtcctgtgcc

SEQ ID NO: 172533 - DNA, 20 bp, synthetic construct
  source 1..20: mol_type = other DNA
tgtaggagactgtcctgtgc

SEQ ID NO: 172534 - DNA, 20 bp, synthetic construct
  source 1..20: mol_type = other DNA
atgtaggagactgtcctgtg

SEQ ID NO: 172535 - DNA, 20 bp, synthetic construct
  source 1..20: mol_type = other DNA
gatgtaggagactgtcctgt

SEQ ID NO: 172536 - DNA, 20 bp, synthetic construct
  source 1..20: mol_type = other DNA
tgatgtaggagactgtcctg

SEQ ID NO: 172537 - DNA, 20 bp, synthetic construct
  source 1..20: mol_type = other DNA
ttgatgtaggagactgtcct

SEQ ID NO: 172538 - DNA, 20 bp, synthetic construct
  source 1..20: mol_type = other DNA
tttgatgtaggagactgtcc

SEQ ID NO: 172539 - DNA, 20 bp, synthetic construct
  source 1..20: mol_type = other DNA
ttttgatgtaggagactgtc

SEQ ID NO: 172540 - DNA, 20 bp, synthetic construct
  source 1..20: mol_type = other DNA
attttgatgtaggagactgt

SEQ ID NO: 172541 - DNA, 20 bp, synthetic construct
  source 1..20: mol_type = other DNA
tattttgatgtaggagactg

SEQ ID NO: 172542 - DNA, 20 bp, synthetic construct
  source 1..20: mol_type = other DNA
atattttgatgtaggagact

SEQ ID NO: 172543 - DNA, 20 bp, synthetic construct
  source 1..20: mol_type = other DNA
catattttgatgtaggagac

SEQ ID NO: 172544 - DNA, 20 bp, synthetic construct
  source 1..20: mol_type = other DNA
tcatattttgatgtaggaga

SEQ ID NO: 172545 - DNA, 20 bp, synthetic construct
  source 1..20: mol_type = other DNA
gtcatattttgatgtaggag

SEQ ID NO: 172546 - DNA, 20 bp, synthetic construct
  source 1..20: mol_type = other DNA
ggtcatattttgatgtagga

SEQ ID NO: 172547 - DNA, 20 bp, synthetic construct
  source 1..20: mol_type = other DNA
gggtcatattttgatgtagg

SEQ ID NO: 172548 - DNA, 20 bp, synthetic construct
  source 1..20: mol_type = other DNA
tgggtcatattttgatgtag

SEQ ID NO: 172549 - DNA, 20 bp, synthetic construct
  source 1..20: mol_type = other DNA
ctgggtcatattttgatgta

SEQ ID NO: 172550 - DNA, 20 bp, synthetic construct
  source 1..20: mol_type = other DNA
actgggtcatattttgatgt

SEQ ID NO: 172551 - DNA, 20 bp, synthetic construct
  source 1..20: mol_type = other DNA
gactgggtcatattttgatg

SEQ ID NO: 172552 - DNA, 20 bp, synthetic construct
  source 1..20: mol_type = other DNA
ggactgggtcatattttgat

SEQ ID NO: 172553 - DNA, 20 bp, synthetic construct
  source 1..20: mol_type = other DNA
gggactgggtcatattttga

SEQ ID NO: 172554 - DNA, 20 bp, synthetic construct
  source 1..20: mol_type = other DNA
tgggactgggtcatattttg

SEQ ID NO: 172555 - DNA, 20 bp, synthetic construct
  source 1..20: mol_type = other DNA
ttgggactgggtcatatttt

SEQ ID NO: 172556 - DNA, 20 bp, synthetic construct
  source 1..20: mol_type = other DNA
attgggactgggtcatattt

SEQ ID NO: 172557 - DNA, 20 bp, synthetic construct
  source 1..20: mol_type = other DNA
cattgggactgggtcatatt

SEQ ID NO: 172558 - DNA, 20 bp, synthetic construct
  source 1..20: mol_type = other DNA
acattgggactgggtcatat

SEQ ID NO: 172559 - DNA, 20 bp, synthetic construct
  source 1..20: mol_type = other DNA
gacattgggactgggtcata

SEQ ID NO: 172560 - DNA, 20 bp, synthetic construct
  source 1..20: mol_type = other DNA
tgacattgggactgggtcat

SEQ ID NO: 172561 - DNA, 20 bp, synthetic construct
  source 1..20: mol_type = other DNA
gtgacattgggactgggtca

SEQ ID NO: 172562 - DNA, 20 bp, synthetic construct
  source 1..20: mol_type = other DNA
ggtgacattgggactgggtc

SEQ ID NO: 172563 - DNA, 20 bp, synthetic construct
  source 1..20: mol_type = other DNA
tggtgacattgggactgggt

SEQ ID NO: 172564 - DNA, 20 bp, synthetic construct
  source 1..20: mol_type = other DNA
gtggtgacattgggactggg

SEQ ID NO: 172565 - DNA, 20 bp, synthetic construct
  source 1..20: mol_type = other DNA
agtggtgacattgggactgg

SEQ ID NO: 172566 - DNA, 20 bp, synthetic construct
  source 1..20: mol_type = other DNA
cagtggtgacattgggactg

SEQ ID NO: 172567 - DNA, 20 bp, synthetic construct
  source 1..20: mol_type = other DNA
gcagtggtgacattgggact

SEQ ID NO: 172568 - DNA, 20 bp, synthetic construct
  source 1..20: mol_type = other DNA
agcagtggtgacattgggac

SEQ ID NO: 172569 - DNA, 20 bp, synthetic construct
  source 1..20: mol_type = other DNA
cagcagtggtgacattggga

SEQ ID NO: 172570 - DNA, 20 bp, synthetic construct
  source 1..20: mol_type = other DNA
ccagcagtggtgacattggg

SEQ ID NO: 172571 - DNA, 20 bp, synthetic construct
  source 1..20: mol_type = other DNA
cccagcagtggtgacattgg

SEQ ID NO: 172572 - DNA, 20 bp, synthetic construct
  source 1..20: mol_type = other DNA
ccccagcagtggtgacattg

SEQ ID NO: 172573 - DNA, 20 bp, synthetic construct
  source 1..20: mol_type = other DNA
accccagcagtggtgacatt

SEQ ID NO: 172574 - DNA, 20 bp, synthetic construct
  source 1..20: mol_type = other DNA
aaccccagcagtggtgacat

SEQ ID NO: 172575 - DNA, 20 bp, synthetic construct
  source 1..20: mol_type = other DNA
caaccccagcagtggtgaca

SEQ ID NO: 172576 - DNA, 20 bp, synthetic construct
  source 1..20: mol_type = other DNA
tcaaccccagcagtggtgac

SEQ ID NO: 172577 - DNA, 20 bp, synthetic construct
  source 1..20: mol_type = other DNA
gtcaaccccagcagtggtga

SEQ ID NO: 172578 - DNA, 20 bp, synthetic construct
  source 1..20: mol_type = other DNA
tgtcaaccccagcagtggtg

SEQ ID NO: 172579 - DNA, 20 bp, synthetic construct
  source 1..20: mol_type = other DNA
gtgtcaaccccagcagtggt

SEQ ID NO: 172580 - DNA, 20 bp, synthetic construct
  source 1..20: mol_type = other DNA
agtgtcaaccccagcagtgg

SEQ ID NO: 172581 - DNA, 20 bp, synthetic construct
  source 1..20: mol_type = other DNA
cagtgtcaaccccagcagtg

SEQ ID NO: 172582 - DNA, 20 bp, synthetic construct
  source 1..20: mol_type = other DNA
ccagtgtcaaccccagcagt

SEQ ID NO: 172583 - DNA, 20 bp, synthetic construct
  source 1..20: mol_type = other DNA
gccagtgtcaaccccagcag

SEQ ID NO: 172584 - DNA, 20 bp, synthetic construct
  source 1..20: mol_type = other DNA
tgccagtgtcaaccccagca

SEQ ID NO: 172585 - DNA, 20 bp, synthetic construct
  source 1..20: mol_type = other DNA
gtgccagtgtcaaccccagc

SEQ ID NO: 172586 - DNA, 20 bp, synthetic construct
  source 1..20: mol_type = other DNA
agtgccagtgtcaaccccag

SEQ ID NO: 172587 - DNA, 20 bp, synthetic construct
  source 1..20: mol_type = other DNA
cagtgccagtgtcaacccca

SEQ ID NO: 172588 - DNA, 20 bp, synthetic construct
  source 1..20: mol_type = other DNA
gcagtgccagtgtcaacccc

SEQ ID NO: 172589 - DNA, 20 bp, synthetic construct
  source 1..20: mol_type = other DNA
agcagtgccagtgtcaaccc

SEQ ID NO: 172590 - DNA, 20 bp, synthetic construct
  source 1..20: mol_type = other DNA
tagcagtgccagtgtcaacc

SEQ ID NO: 172591 - DNA, 20 bp, synthetic construct
  source 1..20: mol_type = other DNA
atagcagtgccagtgtcaac

SEQ ID NO: 172592 - DNA, 20 bp, synthetic construct
  source 1..20: mol_type = other DNA
gatagcagtgccagtgtcaa

SEQ ID NO: 172593 - DNA, 20 bp, synthetic construct
  source 1..20: mol_type = other DNA
agatagcagtgccagtgtca

SEQ ID NO: 172594 - DNA, 20 bp, synthetic construct
  source 1..20: mol_type = other DNA
aagatagcagtgccagtgtc

SEQ ID NO: 172595 - DNA, 20 bp, synthetic construct
  source 1..20: mol_type = other DNA
taagatagcagtgccagtgt

SEQ ID NO: 172596 - DNA, 20 bp, synthetic construct
  source 1..20: mol_type = other DNA
ttaagatagcagtgccagtg

SEQ ID NO: 172597 - DNA, 20 bp, synthetic construct
  source 1..20: mol_type = other DNA
attaagatagcagtgccagt

SEQ ID NO: 172598 - DNA, 20 bp, synthetic construct
  source 1..20: mol_type = other DNA
aattaagatagcagtgccag

SEQ ID NO: 172599 - DNA, 20 bp, synthetic construct
  source 1..20: mol_type = other DNA
taattaagatagcagtgcca

SEQ ID NO: 172600 - DNA, 20 bp, synthetic construct
  source 1..20: mol_type = other DNA
gtaattaagatagcagtgcc

SEQ ID NO: 172601 - DNA, 20 bp, synthetic construct
  source 1..20: mol_type = other DNA
tgtaattaagatagcagtgc

SEQ ID NO: 172602 - DNA, 20 bp, synthetic construct
  source 1..20: mol_type = other DNA
atgtaattaagatagcagtg

SEQ ID NO: 172603 - DNA, 20 bp, synthetic construct
  source 1..20: mol_type = other DNA
aatgtaattaagatagcagt

SEQ ID NO: 172604 - DNA, 20 bp, synthetic construct
  source 1..20: mol_type = other DNA
gaatgtaattaagatagcag

SEQ ID NO: 172605 - DNA, 20 bp, synthetic construct
  source 1..20: mol_type = other DNA
tgaatgtaattaagatagca

SEQ ID NO: 172606 - DNA, 20 bp, synthetic construct
  source 1..20: mol_type = other DNA
atgaatgtaattaagatagc

SEQ ID NO: 172607 - DNA, 20 bp, synthetic construct
  source 1..20: mol_type = other DNA
aatgaatgtaattaagatag

SEQ ID NO: 172608 - DNA, 20 bp, synthetic construct
  source 1..20: mol_type = other DNA
caatgaatgtaattaagata

SEQ ID NO: 172609 - DNA, 20 bp, synthetic construct
  source 1..20: mol_type = other DNA
tcaatgaatgtaattaagat

SEQ ID NO: 172610 - DNA, 20 bp, synthetic construct
  source 1..20: mol_type = other DNA
ctcaatgaatgtaattaaga

SEQ ID NO: 172611 - DNA, 20 bp, synthetic construct
  source 1..20: mol_type = other DNA
actcaatgaatgtaattaag

SEQ ID NO: 172612 - DNA, 20 bp, synthetic construct
  source 1..20: mol_type = other DNA
cactcaatgaatgtaattaa

SEQ ID NO: 172613 - DNA, 20 bp, synthetic construct
  source 1..20: mol_type = other DNA
acactcaatgaatgtaatta

SEQ ID NO: 172614 - DNA, 20 bp, synthetic construct
  source 1..20: mol_type = other DNA
gacactcaatgaatgtaatt

SEQ ID NO: 172615 - DNA, 20 bp, synthetic construct
  source 1..20: mol_type = other DNA
agacactcaatgaatgtaat

SEQ ID NO: 172616 - DNA, 20 bp, synthetic construct
  source 1..20: mol_type = other DNA
aagacactcaatgaatgtaa

SEQ ID NO: 172617 - DNA, 20 bp, synthetic construct
  source 1..20: mol_type = other DNA
aaagacactcaatgaatgta

SEQ ID NO: 172618 - DNA, 20 bp, synthetic construct
  source 1..20: mol_type = other DNA
aaaagacactcaatgaatgt

SEQ ID NO: 172619 - DNA, 20 bp, synthetic construct
  source 1..20: mol_type = other DNA
taaaagacactcaatgaatg

SEQ ID NO: 172620 - DNA, 20 bp, synthetic construct
  source 1..20: mol_type = other DNA
ctaaaagacactcaatgaat

SEQ ID NO: 172621 - DNA, 20 bp, synthetic construct
  source 1..20: mol_type = other DNA
cctaaaagacactcaatgaa

SEQ ID NO: 172622 - DNA, 20 bp, synthetic construct
  source 1..20: mol_type = other DNA
tcctaaaagacactcaatga

SEQ ID NO: 172623 - DNA, 20 bp, synthetic construct
  source 1..20: mol_type = other DNA
ctcctaaaagacactcaatg

SEQ ID NO: 172624 - DNA, 20 bp, synthetic construct
  source 1..20: mol_type = other DNA
cctcctaaaagacactcaat

SEQ ID NO: 172625 - DNA, 20 bp, synthetic construct
  source 1..20: mol_type = other DNA
gcctcctaaaagacactcaa

SEQ ID NO: 172626 - DNA, 20 bp, synthetic construct
  source 1..20: mol_type = other DNA
ggcctcctaaaagacactca

SEQ ID NO: 172627 - DNA, 20 bp, synthetic construct
  source 1..20: mol_type = other DNA
gggcctcctaaaagacactc

SEQ ID NO: 172628 - DNA, 20 bp, synthetic construct
  source 1..20: mol_type = other DNA
agggcctcctaaaagacact

SEQ ID NO: 172629 - DNA, 20 bp, synthetic construct
  source 1..20: mol_type = other DNA
tagggcctcctaaaagacac

SEQ ID NO: 172630 - DNA, 20 bp, synthetic construct
  source 1..20: mol_type = other DNA
atagggcctcctaaaagaca

SEQ ID NO: 172631 - DNA, 20 bp, synthetic construct
  source 1..20: mol_type = other DNA
aatagggcctcctaaaagac

SEQ ID NO: 172632 - DNA, 20 bp, synthetic construct
  source 1..20: mol_type = other DNA
gaatagggcctcctaaaaga

SEQ ID NO: 172633 - DNA, 20 bp, synthetic construct
  source 1..20: mol_type = other DNA
agaatagggcctcctaaaag

SEQ ID NO: 172634 - DNA, 20 bp, synthetic construct
  source 1..20: mol_type = other DNA
tagaatagggcctcctaaaa

SEQ ID NO: 172635 - DNA, 20 bp, synthetic construct
  source 1..20: mol_type = other DNA
ttagaatagggcctcctaaa

SEQ ID NO: 172636 - DNA, 20 bp, synthetic construct
  source 1..20: mol_type = other DNA
cttagaatagggcctcctaa

SEQ ID NO: 172637 - DNA, 20 bp, synthetic construct
  source 1..20: mol_type = other DNA
acttagaatagggcctccta

SEQ ID NO: 172638 - DNA, 20 bp, synthetic construct
  source 1..20: mol_type = other DNA
cacttagaatagggcctcct

SEQ ID NO: 172639 - DNA, 20 bp, synthetic construct
  source 1..20: mol_type = other DNA
gcacttagaatagggcctcc

SEQ ID NO: 172640 - DNA, 20 bp, synthetic construct
  source 1..20: mol_type = other DNA
agcacttagaatagggcctc

SEQ ID NO: 172641 - DNA, 20 bp, synthetic construct
  source 1..20: mol_type = other DNA
aagcacttagaatagggcct

SEQ ID NO: 172642 - DNA, 20 bp, synthetic construct
  source 1..20: mol_type = other DNA
caagcacttagaatagggcc

SEQ ID NO: 172643 - DNA, 20 bp, synthetic construct
  source 1..20: mol_type = other DNA
gcaagcacttagaatagggc

SEQ ID NO: 172644 - DNA, 20 bp, synthetic construct
  source 1..20: mol_type = other DNA
agcaagcacttagaataggg

SEQ ID NO: 172645 - DNA, 20 bp, synthetic construct
  source 1..20: mol_type = other DNA
tagcaagcacttagaatagg

SEQ ID NO: 172646 - DNA, 20 bp, synthetic construct
  source 1..20: mol_type = other DNA
ttagcaagcacttagaatag

SEQ ID NO: 172647 - DNA, 20 bp, synthetic construct
  source 1..20: mol_type = other DNA
cttagcaagcacttagaata

SEQ ID NO: 172648 - DNA, 20 bp, synthetic construct
  source 1..20: mol_type = other DNA
tcttagcaagcacttagaat

SEQ ID NO: 172649 - DNA, 20 bp, synthetic construct
  source 1..20: mol_type = other DNA
atcttagcaagcacttagaa

SEQ ID NO: 172650 - DNA, 20 bp, synthetic construct
  source 1..20: mol_type = other DNA
aatcttagcaagcacttaga

SEQ ID NO: 172651 - DNA, 20 bp, synthetic construct
  source 1..20: mol_type = other DNA
taatcttagcaagcacttag

SEQ ID NO: 172652 - DNA, 20 bp, synthetic construct
  source 1..20: mol_type = other DNA
ataatcttagcaagcactta

SEQ ID NO: 172653 - DNA, 20 bp, synthetic construct
  source 1..20: mol_type = other DNA
gataatcttagcaagcactt

SEQ ID NO: 172654 - DNA, 20 bp, synthetic construct
  source 1..20: mol_type = other DNA
agataatcttagcaagcact

SEQ ID NO: 172655 - DNA, 20 bp, synthetic construct
  source 1..20: mol_type = other DNA
gagataatcttagcaagcac

SEQ ID NO: 172656 - DNA, 20 bp, synthetic construct
  source 1..20: mol_type = other DNA
tgagataatcttagcaagca

SEQ ID NO: 172657 - DNA, 20 bp, synthetic construct
  source 1..20: mol_type = other DNA
atgagataatcttagcaagc

SEQ ID NO: 172658 - DNA, 20 bp, synthetic construct
  source 1..20: mol_type = other DNA
aatgagataatcttagcaag

SEQ ID NO: 172659 - DNA, 20 bp, synthetic construct
  source 1..20: mol_type = other DNA
aaatgagataatcttagcaa

SEQ ID NO: 172660 - DNA, 20 bp, synthetic construct
  source 1..20: mol_type = other DNA
taaatgagataatcttagca

SEQ ID NO: 172661 - DNA, 20 bp, synthetic construct
  source 1..20: mol_type = other DNA
ttaaatgagataatcttagc

SEQ ID NO: 172662 - DNA, 20 bp, synthetic construct
  source 1..20: mol_type = other DNA
attaaatgagataatcttag

SEQ ID NO: 172663 - DNA, 20 bp, synthetic construct
  source 1..20: mol_type = other DNA
gattaaatgagataatctta

SEQ ID NO: 172664 - DNA, 20 bp, synthetic construct
  source 1..20: mol_type = other DNA
ggattaaatgagataatctt

SEQ ID NO: 172665 - DNA, 20 bp, synthetic construct
  source 1..20: mol_type = other DNA
aggattaaatgagataatct

SEQ ID NO: 172666 - DNA, 20 bp, synthetic construct
  source 1..20: mol_type = other DNA
gaggattaaatgagataatc

SEQ ID NO: 172667 - DNA, 20 bp, synthetic construct
  source 1..20: mol_type = other DNA
tgaggattaaatgagataat

SEQ ID NO: 172668 - DNA, 20 bp, synthetic construct
  source 1..20: mol_type = other DNA
gtgaggattaaatgagataa

SEQ ID NO: 172669 - DNA, 20 bp, synthetic construct
  source 1..20: mol_type = other DNA
tgtgaggattaaatgagata

SEQ ID NO: 172670 - DNA, 20 bp, synthetic construct
  source 1..20: mol_type = other DNA
ttgtgaggattaaatgagat

SEQ ID NO: 172671 - DNA, 20 bp, synthetic construct
  source 1..20: mol_type = other DNA
gttgtgaggattaaatgaga

SEQ ID NO: 172672 - DNA, 20 bp, synthetic construct
  source 1..20: mol_type = other DNA
tgttgtgaggattaaatgag

SEQ ID NO: 172673 - DNA, 20 bp, synthetic construct
  source 1..20: mol_type = other DNA
gtgttgtgaggattaaatga

SEQ ID NO: 172674 - DNA, 20 bp, synthetic construct
  source 1..20: mol_type = other DNA
agtgttgtgaggattaaatg

SEQ ID NO: 172675 - DNA, 20 bp, synthetic construct
  source 1..20: mol_type = other DNA
aagtgttgtgaggattaaat

SEQ ID NO: 172676 - DNA, 20 bp, synthetic construct
  source 1..20: mol_type = other DNA
gaagtgttgtgaggattaaa

SEQ ID NO: 172677 - DNA, 20 bp, synthetic construct
  source 1..20: mol_type = other DNA
ggaagtgttgtgaggattaa

SEQ ID NO: 172678 - DNA, 20 bp, synthetic construct
  source 1..20: mol_type = other DNA
cggaagtgttgtgaggatta

SEQ ID NO: 172679 - DNA, 20 bp, synthetic construct
  source 1..20: mol_type = other DNA
gcggaagtgttgtgaggatt

SEQ ID NO: 172680 - DNA, 20 bp, synthetic construct
  source 1..20: mol_type = other DNA
agcggaagtgttgtgaggat

SEQ ID NO: 172681 - DNA, 20 bp, synthetic construct
  source 1..20: mol_type = other DNA
tagcggaagtgttgtgagga

SEQ ID NO: 172682 - DNA, 20 bp, synthetic construct
  source 1..20: mol_type = other DNA
atagcggaagtgttgtgagg

SEQ ID NO: 172683 - DNA, 20 bp, synthetic construct
  source 1..20: mol_type = other DNA
catagcggaagtgttgtgag

SEQ ID NO: 172684 - DNA, 20 bp, synthetic construct
  source 1..20: mol_type = other DNA
acatagcggaagtgttgtga

SEQ ID NO: 172685 - DNA, 20 bp, synthetic construct
  source 1..20: mol_type = other DNA
tacatagcggaagtgttgtg

SEQ ID NO: 172686 - DNA, 20 bp, synthetic construct
  source 1..20: mol_type = other DNA
ctacatagcggaagtgttgt

SEQ ID NO: 172687 - DNA, 20 bp, synthetic construct
  source 1..20: mol_type = other DNA
gctacatagcggaagtgttg

SEQ ID NO: 172688 - DNA, 20 bp, synthetic construct
  source 1..20: mol_type = other DNA
tgctacatagcggaagtgtt

SEQ ID NO: 172689 - DNA, 20 bp, synthetic construct
  source 1..20: mol_type = other DNA
ctgctacatagcggaagtgt

SEQ ID NO: 172690 - DNA, 20 bp, synthetic construct
  source 1..20: mol_type = other DNA
cctgctacatagcggaagtg

SEQ ID NO: 172691 - DNA, 20 bp, synthetic construct
  source 1..20: mol_type = other DNA
acctgctacatagcggaagt

SEQ ID NO: 172692 - DNA, 20 bp, synthetic construct
  source 1..20: mol_type = other DNA
cacctgctacatagcggaag

SEQ ID NO: 172693 - DNA, 20 bp, synthetic construct
  source 1..20: mol_type = other DNA
gcacctgctacatagcggaa

SEQ ID NO: 172694 - DNA, 20 bp, synthetic construct
  source 1..20: mol_type = other DNA
agcacctgctacatagcgga

SEQ ID NO: 172695 - DNA, 20 bp, synthetic construct
  source 1..20: mol_type = other DNA
cagcacctgctacatagcgg

SEQ ID NO: 172696 - DNA, 20 bp, synthetic construct
  source 1..20: mol_type = other DNA
acagcacctgctacatagcg

SEQ ID NO: 172697 - DNA, 20 bp, synthetic construct
  source 1..20: mol_type = other DNA
aacagcacctgctacatagc

SEQ ID NO: 172698 - DNA, 20 bp, synthetic construct
  source 1..20: mol_type = other DNA
taacagcacctgctacatag

SEQ ID NO: 172699 - DNA, 20 bp, synthetic construct
  source 1..20: mol_type = other DNA
ataacagcacctgctacata

SEQ ID NO: 172700 - DNA, 20 bp, synthetic construct
  source 1..20: mol_type = other DNA
aataacagcacctgctacat

SEQ ID NO: 172701 - DNA, 20 bp, synthetic construct
  source 1..20: mol_type = other DNA
taataacagcacctgctaca

SEQ ID NO: 172702 - DNA, 20 bp, synthetic construct
  source 1..20: mol_type = other DNA
ataataacagcacctgctac

SEQ ID NO: 172703 - DNA, 20 bp, synthetic construct
  source 1..20: mol_type = other DNA
gataataacagcacctgcta

SEQ ID NO: 172704 - DNA, 20 bp, synthetic construct
  source 1..20: mol_type = other DNA
agataataacagcacctgct

SEQ ID NO: 172705 - DNA, 20 bp, synthetic construct
  source 1..20: mol_type = other DNA
gagataataacagcacctgc

SEQ ID NO: 172706 - DNA, 20 bp, synthetic construct
  source 1..20: mol_type = other DNA
ggagataataacagcacctg

SEQ ID NO: 172707 - DNA, 20 bp, synthetic construct
  source 1..20: mol_type = other DNA
cggagataataacagcacct

SEQ ID NO: 172708 - DNA, 20 bp, synthetic construct
  source 1..20: mol_type = other DNA
acggagataataacagcacc

SEQ ID NO: 172709 - DNA, 20 bp, synthetic construct
  source 1..20: mol_type = other DNA
cacggagataataacagcac

SEQ ID NO: 172710 - DNA, 20 bp, synthetic construct
  source 1..20: mol_type = other DNA
tcacggagataataacagca

SEQ ID NO: 172711 - DNA, 20 bp, synthetic construct
  source 1..20: mol_type = other DNA
atcacggagataataacagc

SEQ ID NO: 172712 - DNA, 20 bp, synthetic construct
  source 1..20: mol_type = other DNA
catcacggagataataacag

SEQ ID NO: 172713 - DNA, 20 bp, synthetic construct
  source 1..20: mol_type = other DNA
ccatcacggagataataaca

SEQ ID NO: 172714 - DNA, 20 bp, synthetic construct
  source 1..20: mol_type = other DNA
cccatcacggagataataac

SEQ ID NO: 172715 - DNA, 20 bp, synthetic construct
  source 1..20: mol_type = other DNA
ccccatcacggagataataa

SEQ ID NO: 172716 - DNA, 20 bp, synthetic construct
  source 1..20: mol_type = other DNA
tccccatcacggagataata

SEQ ID NO: 172717 - DNA, 20 bp, synthetic construct
  source 1..20: mol_type = other DNA
ttccccatcacggagataat

SEQ ID NO: 172718 - DNA, 20 bp, synthetic construct
  source 1..20: mol_type = other DNA
tttccccatcacggagataa

SEQ ID NO: 172719 - DNA, 20 bp, synthetic construct
  source 1..20: mol_type = other DNA
gtttccccatcacggagata

SEQ ID NO: 172720 - DNA, 20 bp, synthetic construct
  source 1..20: mol_type = other DNA
agtttccccatcacggagat

SEQ ID NO: 172721 - DNA, 20 bp, synthetic construct
  source 1..20: mol_type = other DNA
cagtttccccatcacggaga

SEQ ID NO: 172722 - DNA, 20 bp, synthetic construct
  source 1..20: mol_type = other DNA
tcagtttccccatcacggag

SEQ ID NO: 172723 - DNA, 20 bp, synthetic construct
  source 1..20: mol_type = other DNA
ttcagtttccccatcacgga

SEQ ID NO: 172724 - DNA, 20 bp, synthetic construct
  source 1..20: mol_type = other DNA
cttcagtttccccatcacgg

SEQ ID NO: 172725 - DNA, 20 bp, synthetic construct
  source 1..20: mol_type = other DNA
gcttcagtttccccatcacg

SEQ ID NO: 172726 - DNA, 20 bp, synthetic construct
  source 1..20: mol_type = other DNA
tgcttcagtttccccatcac

SEQ ID NO: 172727 - DNA, 20 bp, synthetic construct
  source 1..20: mol_type = other DNA
gtgcttcagtttccccatca

SEQ ID NO: 172728 - DNA, 20 bp, synthetic construct
  source 1..20: mol_type = other DNA
tgtgcttcagtttccccatc

SEQ ID NO: 172729 - DNA, 20 bp, synthetic construct
  source 1..20: mol_type = other DNA
ctgtgcttcagtttccccat

SEQ ID NO: 172730 - DNA, 20 bp, synthetic construct
  source 1..20: mol_type = other DNA
tctgtgcttcagtttcccca

SEQ ID NO: 172731 - DNA, 20 bp, synthetic construct
  source 1..20: mol_type = other DNA
ctctgtgcttcagtttcccc

SEQ ID NO: 172732 - DNA, 20 bp, synthetic construct
  source 1..20: mol_type = other DNA
tctctgtgcttcagtttccc

SEQ ID NO: 172733 - DNA, 20 bp, synthetic construct
  source 1..20: mol_type = other DNA
ctctctgtgcttcagtttcc

SEQ ID NO: 172734 - DNA, 20 bp, synthetic construct
  source 1..20: mol_type = other DNA
cctctctgtgcttcagtttc

SEQ ID NO: 172735 - DNA, 20 bp, synthetic construct
  source 1..20: mol_type = other DNA
ccctctctgtgcttcagttt

SEQ ID NO: 172736 - DNA, 20 bp, synthetic construct
  source 1..20: mol_type = other DNA
accctctctgtgcttcagtt

SEQ ID NO: 172737 - DNA, 20 bp, synthetic construct
  source 1..20: mol_type = other DNA
aaccctctctgtgcttcagt

SEQ ID NO: 172738 - DNA, 20 bp, synthetic construct
  source 1..20: mol_type = other DNA
taaccctctctgtgcttcag

SEQ ID NO: 172739 - DNA, 20 bp, synthetic construct
  source 1..20: mol_type = other DNA
ctaaccctctctgtgcttca

SEQ ID NO: 172740 - DNA, 20 bp, synthetic construct
  source 1..20: mol_type = other DNA
actaaccctctctgtgcttc

SEQ ID NO: 172741 - DNA, 20 bp, synthetic construct
  source 1..20: mol_type = other DNA
tactaaccctctctgtgctt

SEQ ID NO: 172742 - DNA, 20 bp, synthetic construct
  source 1..20: mol_type = other DNA
ttactaaccctctctgtgct

SEQ ID NO: 172743 - DNA, 20 bp, synthetic construct
  source 1..20: mol_type = other DNA
gttactaaccctctctgtgc

SEQ ID NO: 172744 - DNA, 20 bp, synthetic construct
  source 1..20: mol_type = other DNA
agttactaaccctctctgtg

SEQ ID NO: 172745 - DNA, 20 bp, synthetic construct
  source 1..20: mol_type = other DNA
aagttactaaccctctctgt

SEQ ID NO: 172746 - DNA, 20 bp, synthetic construct
  source 1..20: mol_type = other DNA
caagttactaaccctctctg

SEQ ID NO: 172747 - DNA, 20 bp, synthetic construct
  source 1..20: mol_type = other DNA
gcaagttactaaccctctct

SEQ ID NO: 172748 - DNA, 20 bp, synthetic construct
  source 1..20: mol_type = other DNA
agcaagttactaaccctctc

SEQ ID NO: 172749 - DNA, 20 bp, synthetic construct
  source 1..20: mol_type = other DNA
tagcaagttactaaccctct

SEQ ID NO: 172750 - DNA, 20 bp, synthetic construct
  source 1..20: mol_type = other DNA
ttagcaagttactaaccctc

SEQ ID NO: 172751 - DNA, 20 bp, synthetic construct
  source 1..20: mol_type = other DNA
tttagcaagttactaaccct

SEQ ID NO: 172752 - DNA, 20 bp, synthetic construct
  source 1..20: mol_type = other DNA
ctttagcaagttactaaccc

SEQ ID NO: 172753 - DNA, 20 bp, synthetic construct
  source 1..20: mol_type = other DNA
cctttagcaagttactaacc

SEQ ID NO: 172754 - DNA, 20 bp, synthetic construct
  source 1..20: mol_type = other DNA
acctttagcaagttactaac

SEQ ID NO: 172755 - DNA, 20 bp, synthetic construct
  source 1..20: mol_type = other DNA
gacctttagcaagttactaa

SEQ ID NO: 172756 - DNA, 20 bp, synthetic construct
  source 1..20: mol_type = other DNA
tgacctttagcaagttacta

SEQ ID NO: 172757 - DNA, 20 bp, synthetic construct
  source 1..20: mol_type = other DNA
gtgacctttagcaagttact

SEQ ID NO: 172758 - DNA, 20 bp, synthetic construct
  source 1..20: mol_type = other DNA
tgtgacctttagcaagttac

SEQ ID NO: 172759 - DNA, 20 bp, synthetic construct
  source 1..20: mol_type = other DNA
ctgtgacctttagcaagtta

SEQ ID NO: 172760 - DNA, 20 bp, synthetic construct
  source 1..20: mol_type = other DNA
tctgtgacctttagcaagtt

SEQ ID NO: 172761 - DNA, 20 bp, synthetic construct
  source 1..20: mol_type = other DNA
ctctgtgacctttagcaagt

SEQ ID NO: 172762 - DNA, 20 bp, synthetic construct
  source 1..20: mol_type = other DNA
gctctgtgacctttagcaag

SEQ ID NO: 172763 - DNA, 20 bp, synthetic construct
  source 1..20: mol_type = other DNA
ggctctgtgacctttagcaa

SEQ ID NO: 172764 - DNA, 20 bp, synthetic construct
  source 1..20: mol_type = other DNA
tggctctgtgacctttagca

SEQ ID NO: 172765 - DNA, 20 bp, synthetic construct
  source 1..20: mol_type = other DNA
ctggctctgtgacctttagc

SEQ ID NO: 172766 - DNA, 20 bp, synthetic construct
  source 1..20: mol_type = other DNA
actggctctgtgacctttag

SEQ ID NO: 172767 - DNA, 20 bp, synthetic construct
  source 1..20: mol_type = other DNA
cactggctctgtgaccttta

SEQ ID NO: 172768 - DNA, 20 bp, synthetic construct
  source 1..20: mol_type = other DNA
ccactggctctgtgaccttt

SEQ ID NO: 172769 - DNA, 20 bp, synthetic construct
  source 1..20: mol_type = other DNA
cccactggctctgtgacctt

SEQ ID NO: 172770 - DNA, 20 bp, synthetic construct
  source 1..20: mol_type = other DNA
acccactggctctgtgacct

SEQ ID NO: 172771 - DNA, 20 bp, synthetic construct
  source 1..20: mol_type = other DNA
cacccactggctctgtgacc

SEQ ID NO: 172772 - DNA, 20 bp, synthetic construct
  source 1..20: mol_type = other DNA
ccacccactggctctgtgac

SEQ ID NO: 172773 - DNA, 20 bp, synthetic construct
  source 1..20: mol_type = other DNA
accacccactggctctgtga

SEQ ID NO: 172774 - DNA, 20 bp, synthetic construct
  source 1..20: mol_type = other DNA
caccacccactggctctgtg

SEQ ID NO: 172775 - DNA, 20 bp, synthetic construct
  source 1..20: mol_type = other DNA
ccaccacccactggctctgt

SEQ ID NO: 172776 - DNA, 20 bp, synthetic construct
  source 1..20: mol_type = other DNA
tccaccacccactggctctg

SEQ ID NO: 172777 - DNA, 20 bp, synthetic construct
  source 1..20: mol_type = other DNA
ctccaccacccactggctct

SEQ ID NO: 172778 - DNA, 20 bp, synthetic construct
  source 1..20: mol_type = other DNA
gctccaccacccactggctc

SEQ ID NO: 172779 - DNA, 20 bp, synthetic construct
  source 1..20: mol_type = other DNA
agctccaccacccactggct

SEQ ID NO: 172780 - DNA, 20 bp, synthetic construct
  source 1..20: mol_type = other DNA
cagctccaccacccactggc

SEQ ID NO: 172781 - DNA, 20 bp, synthetic construct
  source 1..20: mol_type = other DNA
ccagctccaccacccactgg

SEQ ID NO: 172782 - DNA, 20 bp, synthetic construct
  source 1..20: mol_type = other DNA
accagctccaccacccactg

SEQ ID NO: 172783 - DNA, 20 bp, synthetic construct
  source 1..20: mol_type = other DNA
aaccagctccaccacccact

SEQ ID NO: 172784 - DNA, 20 bp, synthetic construct
  source 1..20: mol_type = other DNA
caaccagctccaccacccac

SEQ ID NO: 172785 - DNA, 20 bp, synthetic construct
  source 1..20: mol_type = other DNA
gcaaccagctccaccaccca

SEQ ID NO: 172786 - DNA, 20 bp, synthetic construct
  source 1..20: mol_type = other DNA
ggcaaccagctccaccaccc

SEQ ID NO: 172787 - DNA, 20 bp, synthetic construct
  source 1..20: mol_type = other DNA
aggcaaccagctccaccacc

SEQ ID NO: 172788 - DNA, 20 bp, synthetic construct
  source 1..20: mol_type = other DNA
caggcaaccagctccaccac

SEQ ID NO: 172789 - DNA, 20 bp, synthetic construct
  source 1..20: mol_type = other DNA
tcaggcaaccagctccacca

SEQ ID NO: 172790 - DNA, 20 bp, synthetic construct
  source 1..20: mol_type = other DNA
gtcaggcaaccagctccacc

SEQ ID NO: 172791 - DNA, 20 bp, synthetic construct
  source 1..20: mol_type = other DNA
tgtcaggcaaccagctccac

SEQ ID NO: 172792 - DNA, 20 bp, synthetic construct
  source 1..20: mol_type = other DNA
gtgtcaggcaaccagctcca

SEQ ID NO: 172793 - DNA, 20 bp, synthetic construct
  source 1..20: mol_type = other DNA
agtgtcaggcaaccagctcc

SEQ ID NO: 172794 - DNA, 20 bp, synthetic construct
  source 1..20: mol_type = other DNA
tagtgtcaggcaaccagctc

SEQ ID NO: 172795 - DNA, 20 bp, synthetic construct
  source 1..20: mol_type = other DNA
ctagtgtcaggcaaccagct

SEQ ID NO: 172796 - DNA, 20 bp, synthetic construct
  source 1..20: mol_type = other DNA
actagtgtcaggcaaccagc

SEQ ID NO: 172797 - DNA, 20 bp, synthetic construct
  source 1..20: mol_type = other DNA
aactagtgtcaggcaaccag

SEQ ID NO: 172798 - DNA, 20 bp, synthetic construct
  source 1..20: mol_type = other DNA
gaactagtgtcaggcaacca

SEQ ID NO: 172799 - DNA, 20 bp, synthetic construct
  source 1..20: mol_type = other DNA
ggaactagtgtcaggcaacc

SEQ ID NO: 172800 - DNA, 20 bp, synthetic construct
  source 1..20: mol_type = other DNA
gggaactagtgtcaggcaac

SEQ ID NO: 172801 - DNA, 20 bp, synthetic construct
  source 1..20: mol_type = other DNA
agggaactagtgtcaggcaa

SEQ ID NO: 172802 - DNA, 20 bp, synthetic construct
  source 1..20: mol_type = other DNA
gagggaactagtgtcaggca

SEQ ID NO: 172803 - DNA, 20 bp, synthetic construct
  source 1..20: mol_type = other DNA
ggagggaactagtgtcaggc

SEQ ID NO: 172804 - DNA, 20 bp, synthetic construct
  source 1..20: mol_type = other DNA
gggagggaactagtgtcagg

SEQ ID NO: 172805 - DNA, 20 bp, synthetic construct
  source 1..20: mol_type = other DNA
ggggagggaactagtgtcag

SEQ ID NO: 172806 - DNA, 20 bp, synthetic construct
  source 1..20: mol_type = other DNA
aggggagggaactagtgtca

SEQ ID NO: 172807 - DNA, 20 bp, synthetic construct
  source 1..20: mol_type = other DNA
gaggggagggaactagtgtc

SEQ ID NO: 172808 - DNA, 20 bp, synthetic construct
  source 1..20: mol_type = other DNA
agaggggagggaactagtgt

SEQ ID NO: 172809 - DNA, 20 bp, synthetic construct
  source 1..20: mol_type = other DNA
gagaggggagggaactagtg

SEQ ID NO: 172810 - DNA, 20 bp, synthetic construct
  source 1..20: mol_type = other DNA
tgagaggggagggaactagt

SEQ ID NO: 172811 - DNA, 20 bp, synthetic construct
  source 1..20: mol_type = other DNA
ctgagaggggagggaactag

SEQ ID NO: 172812 - DNA, 20 bp, synthetic construct
  source 1..20: mol_type = other DNA
gctgagaggggagggaacta

SEQ ID NO: 172813 - DNA, 20 bp, synthetic construct
  source 1..20: mol_type = other DNA
ggctgagaggggagggaact

SEQ ID NO: 172814 - DNA, 20 bp, synthetic construct
  source 1..20: mol_type = other DNA
tggctgagaggggagggaac

SEQ ID NO: 172815 - DNA, 20 bp, synthetic construct
  source 1..20: mol_type = other DNA
gtggctgagaggggagggaa

SEQ ID NO: 172816 - DNA, 20 bp, synthetic construct
  source 1..20: mol_type = other DNA
tgtggctgagaggggaggga

SEQ ID NO: 172817 - DNA, 20 bp, synthetic construct
  source 1..20: mol_type = other DNA
atgtggctgagaggggaggg

SEQ ID NO: 172818 - DNA, 20 bp, synthetic construct
  source 1..20: mol_type = other DNA
catgtggctgagaggggagg

SEQ ID NO: 172819 - DNA, 20 bp, synthetic construct
  source 1..20: mol_type = other DNA
acatgtggctgagaggggag

SEQ ID NO: 172820 - DNA, 20 bp, synthetic construct
  source 1..20: mol_type = other DNA
cacatgtggctgagagggga

SEQ ID NO: 172821 - DNA, 20 bp, synthetic construct
  source 1..20: mol_type = other DNA
ccacatgtggctgagagggg

SEQ ID NO: 172822 - DNA, 20 bp, synthetic construct
  source 1..20: mol_type = other DNA
cccacatgtggctgagaggg

SEQ ID NO: 172823 - DNA, 20 bp, synthetic construct
  source 1..20: mol_type = other DNA
acccacatgtggctgagagg

SEQ ID NO: 172824 - DNA, 20 bp, synthetic construct
  source 1..20: mol_type = other DNA
aacccacatgtggctgagag

SEQ ID NO: 172825 - DNA, 20 bp, synthetic construct
  source 1..20: mol_type = other DNA
aaacccacatgtggctgaga

SEQ ID NO: 172826 - DNA, 20 bp, synthetic construct
  source 1..20: mol_type = other DNA
taaacccacatgtggctgag

SEQ ID NO: 172827 - DNA, 20 bp, synthetic construct
  source 1..20: mol_type = other DNA
gtaaacccacatgtggctga

SEQ ID NO: 172828 - DNA, 20 bp, synthetic construct
  source 1..20: mol_type = other DNA
agtaaacccacatgtggctg

SEQ ID NO: 172829 - DNA, 20 bp, synthetic construct
  source 1..20: mol_type = other DNA
aagtaaacccacatgtggct

SEQ ID NO: 172830 - DNA, 20 bp, synthetic construct
  source 1..20: mol_type = other DNA
caagtaaacccacatgtggc

SEQ ID NO: 172831 - DNA, 20 bp, synthetic construct
  source 1..20: mol_type = other DNA
ccaagtaaacccacatgtgg

SEQ ID NO: 172832 - DNA, 20 bp, synthetic construct
  source 1..20: mol_type = other DNA
gccaagtaaacccacatgtg

SEQ ID NO: 172833 - DNA, 20 bp, synthetic construct
  source 1..20: mol_type = other DNA
ggccaagtaaacccacatgt

SEQ ID NO: 172834 - DNA, 20 bp, synthetic construct
  source 1..20: mol_type = other DNA
tggccaagtaaacccacatg

SEQ ID NO: 172835 - DNA, 20 bp, synthetic construct
  source 1..20: mol_type = other DNA
atggccaagtaaacccacat

SEQ ID NO: 172836 - DNA, 20 bp, synthetic construct
  source 1..20: mol_type = other DNA
aatggccaagtaaacccaca

SEQ ID NO: 172837 - DNA, 20 bp, synthetic construct
  source 1..20: mol_type = other DNA
caatggccaagtaaacccac

SEQ ID NO: 172838 - DNA, 20 bp, synthetic construct
  source 1..20: mol_type = other DNA
acaatggccaagtaaaccca

SEQ ID NO: 172839 - DNA, 20 bp, synthetic construct
  source 1..20: mol_type = other DNA
cacaatggccaagtaaaccc

SEQ ID NO: 172840 - DNA, 20 bp, synthetic construct
  source 1..20: mol_type = other DNA
ccacaatggccaagtaaacc

SEQ ID NO: 172841 - DNA, 20 bp, synthetic construct
  source 1..20: mol_type = other DNA
tccacaatggccaagtaaac

SEQ ID NO: 172842 - DNA, 20 bp, synthetic construct
  source 1..20: mol_type = other DNA
gtccacaatggccaagtaaa

SEQ ID NO: 172843 - DNA, 20 bp, synthetic construct
  source 1..20: mol_type = other DNA
agtccacaatggccaagtaa

SEQ ID NO: 172844 - DNA, 20 bp, synthetic construct
  source 1..20: mol_type = other DNA
tagtccacaatggccaagta

SEQ ID NO: 172845 - DNA, 20 bp, synthetic construct
  source 1..20: mol_type = other DNA
ctagtccacaatggccaagt

SEQ ID NO: 172846 - DNA, 20 bp, synthetic construct
  source 1..20: mol_type = other DNA
actagtccacaatggccaag

SEQ ID NO: 172847 - DNA, 20 bp, synthetic construct
  source 1..20: mol_type = other DNA
gactagtccacaatggccaa

SEQ ID NO: 172848 - DNA, 20 bp, synthetic construct
  source 1..20: mol_type = other DNA
agactagtccacaatggcca

SEQ ID NO: 172849 - DNA, 20 bp, synthetic construct
  source 1..20: mol_type = other DNA
cagactagtccacaatggcc

SEQ ID NO: 172850 - DNA, 20 bp, synthetic construct
  source 1..20: mol_type = other DNA
ccagactagtccacaatggc

SEQ ID NO: 172851 - DNA, 20 bp, synthetic construct
  source 1..20: mol_type = other DNA
cccagactagtccacaatgg

SEQ ID NO: 172852 - DNA, 20 bp, synthetic construct
  source 1..20: mol_type = other DNA
tcccagactagtccacaatg

SEQ ID NO: 172853 - DNA, 20 bp, synthetic construct
  source 1..20: mol_type = other DNA
ttcccagactagtccacaat

SEQ ID NO: 172854 - DNA, 20 bp, synthetic construct
  source 1..20: mol_type = other DNA
gttcccagactagtccacaa

SEQ ID NO: 172855 - DNA, 20 bp, synthetic construct
  source 1..20: mol_type = other DNA
ggttcccagactagtccaca

SEQ ID NO: 172856 - DNA, 20 bp, synthetic construct
  source 1..20: mol_type = other DNA
gggttcccagactagtccac

SEQ ID NO: 172857 - DNA, 20 bp, synthetic construct
  source 1..20: mol_type = other DNA
tgggttcccagactagtcca

SEQ ID NO: 172858 - DNA, 20 bp, synthetic construct
  source 1..20: mol_type = other DNA
ctgggttcccagactagtcc

SEQ ID NO: 172859 - DNA, 20 bp, synthetic construct
  source 1..20: mol_type = other DNA
tctgggttcccagactagtc

SEQ ID NO: 172860 - DNA, 20 bp, synthetic construct
  source 1..20: mol_type = other DNA
atctgggttcccagactagt

SEQ ID NO: 172861 - DNA, 20 bp, synthetic construct
  source 1..20: mol_type = other DNA
tatctgggttcccagactag

SEQ ID NO: 172862 - DNA, 20 bp, synthetic construct
  source 1..20: mol_type = other DNA
atatctgggttcccagacta

SEQ ID NO: 172863 - DNA, 20 bp, synthetic construct
  source 1..20: mol_type = other DNA
catatctgggttcccagact

SEQ ID NO: 172864 - DNA, 20 bp, synthetic construct
  source 1..20: mol_type = other DNA
tcatatctgggttcccagac

SEQ ID NO: 172865 - DNA, 20 bp, synthetic construct
  source 1..20: mol_type = other DNA
atcatatctgggttcccaga

SEQ ID NO: 172866 - DNA, 20 bp, synthetic construct
  source 1..20: mol_type = other DNA
gatcatatctgggttcccag

SEQ ID NO: 172867 - DNA, 20 bp, synthetic construct
  source 1..20: mol_type = other DNA
agatcatatctgggttccca

SEQ ID NO: 172868 - DNA, 20 bp, synthetic construct
  source 1..20: mol_type = other DNA
tagatcatatctgggttccc

SEQ ID NO: 172869 - DNA, 20 bp, synthetic construct
  source 1..20: mol_type = other DNA
atagatcatatctgggttcc

SEQ ID NO: 172870 - DNA, 20 bp, synthetic construct
  source 1..20: mol_type = other DNA
tatagatcatatctgggttc

SEQ ID NO: 172871 - DNA, 20 bp, synthetic construct
  source 1..20: mol_type = other DNA
ttatagatcatatctgggtt

SEQ ID NO: 172872 - DNA, 20 bp, synthetic construct
  source 1..20: mol_type = other DNA
gttatagatcatatctgggt

SEQ ID NO: 172873 - DNA, 20 bp, synthetic construct
  source 1..20: mol_type = other DNA
tgttatagatcatatctggg

SEQ ID NO: 172874 - DNA, 20 bp, synthetic construct
  source 1..20: mol_type = other DNA
atgttatagatcatatctgg

SEQ ID NO: 172875 - DNA, 20 bp, synthetic construct
  source 1..20: mol_type = other DNA
aatgttatagatcatatctg

SEQ ID NO: 172876 - DNA, 20 bp, synthetic construct
  source 1..20: mol_type = other DNA
caatgttatagatcatatct

SEQ ID NO: 172877 - DNA, 20 bp, synthetic construct
  source 1..20: mol_type = other DNA
tcaatgttatagatcatatc

SEQ ID NO: 172878 - DNA, 20 bp, synthetic construct
  source 1..20: mol_type = other DNA
gtcaatgttatagatcatat

SEQ ID NO: 172879 - DNA, 20 bp, synthetic construct
  source 1..20: mol_type = other DNA
ggtcaatgttatagatcata

SEQ ID NO: 172880 - DNA, 20 bp, synthetic construct
  source 1..20: mol_type = other DNA
gggtcaatgttatagatcat

SEQ ID NO: 172881 - DNA, 20 bp, synthetic construct
  source 1..20: mol_type = other DNA
tgggtcaatgttatagatca

SEQ ID NO: 172882 - DNA, 20 bp, synthetic construct
  source 1..20: mol_type = other DNA
ctgggtcaatgttatagatc

SEQ ID NO: 172883 - DNA, 20 bp, synthetic construct
  source 1..20: mol_type = other DNA
actgggtcaatgttatagat

SEQ ID NO: 172884 - DNA, 20 bp, synthetic construct
  source 1..20: mol_type = other DNA
tactgggtcaatgttataga

SEQ ID NO: 172885 - DNA, 20 bp, synthetic construct
  source 1..20: mol_type = other DNA
ctactgggtcaatgttatag

SEQ ID NO: 172886 - DNA, 20 bp, synthetic construct
  source 1..20: mol_type = other DNA
tctactgggtcaatgttata

SEQ ID NO: 172887 - DNA, 20 bp, synthetic construct
  source 1..20: mol_type = other DNA
ttctactgggtcaatgttat

SEQ ID NO: 172888 - DNA, 20 bp, synthetic construct
  source 1..20: mol_type = other DNA
attctactgggtcaatgtta

SEQ ID NO: 172889 - DNA, 20 bp, synthetic construct
  source 1..20: mol_type = other DNA
tattctactgggtcaatgtt

SEQ ID NO: 172890 - DNA, 20 bp, synthetic construct
  source 1..20: mol_type = other DNA
atattctactgggtcaatgt

SEQ ID NO: 172891 - DNA, 20 bp, synthetic construct
  source 1..20: mol_type = other DNA
aatattctactgggtcaatg

SEQ ID NO: 172892 - DNA, 20 bp, synthetic construct
  source 1..20: mol_type = other DNA
caatattctactgggtcaat

SEQ ID NO: 172893 - DNA, 20 bp, synthetic construct
  source 1..20: mol_type = other DNA
tcaatattctactgggtcaa

SEQ ID NO: 172894 - DNA, 20 bp, synthetic construct
  source 1..20: mol_type = other DNA
atcaatattctactgggtca

SEQ ID NO: 172895 - DNA, 20 bp, synthetic construct
  source 1..20: mol_type = other DNA
aatcaatattctactgggtc

SEQ ID NO: 172896 - DNA, 20 bp, synthetic construct
  source 1..20: mol_type = other DNA
gaatcaatattctactgggt

SEQ ID NO: 172897 - DNA, 20 bp, synthetic construct
  source 1..20: mol_type = other DNA
ggaatcaatattctactggg

SEQ ID NO: 172898 - DNA, 20 bp, synthetic construct
  source 1..20: mol_type = other DNA
tggaatcaatattctactgg

SEQ ID NO: 172899 - DNA, 20 bp, synthetic construct
  source 1..20: mol_type = other DNA
ttggaatcaatattctactg

SEQ ID NO: 172900 - DNA, 20 bp, synthetic construct
  source 1..20: mol_type = other DNA
tttggaatcaatattctact

SEQ ID NO: 172901 - DNA, 20 bp, synthetic construct
  source 1..20: mol_type = other DNA
ttttggaatcaatattctac

SEQ ID NO: 172902 - DNA, 20 bp, synthetic construct
  source 1..20: mol_type = other DNA
gttttggaatcaatattcta

SEQ ID NO: 172903 - DNA, 20 bp, synthetic construct
  source 1..20: mol_type = other DNA
ggttttggaatcaatattct

SEQ ID NO: 172904 - DNA, 20 bp, synthetic construct
  source 1..20: mol_type = other DNA
tggttttggaatcaatattc

SEQ ID NO: 172905 - DNA, 20 bp, synthetic construct
  source 1..20: mol_type = other DNA
gtggttttggaatcaatatt

SEQ ID NO: 172906 - DNA, 20 bp, synthetic construct
  source 1..20: mol_type = other DNA
agtggttttggaatcaatat

SEQ ID NO: 172907 - DNA, 20 bp, synthetic construct
  source 1..20: mol_type = other DNA
cagtggttttggaatcaata

SEQ ID NO: 172908 - DNA, 20 bp, synthetic construct
  source 1..20: mol_type = other DNA
acagtggttttggaatcaat

SEQ ID NO: 172909 - DNA, 20 bp, synthetic construct
  source 1..20: mol_type = other DNA
gacagtggttttggaatcaa

SEQ ID NO: 172910 - DNA, 20 bp, synthetic construct
  source 1..20: mol_type = other DNA
agacagtggttttggaatca

SEQ ID NO: 172911 - DNA, 20 bp, synthetic construct
  source 1..20: mol_type = other DNA
gagacagtggttttggaatc

SEQ ID NO: 172912 - DNA, 20 bp, synthetic construct
  source 1..20: mol_type = other DNA
tgagacagtggttttggaat

SEQ ID NO: 172913 - DNA, 20 bp, synthetic construct
  source 1..20: mol_type = other DNA
gtgagacagtggttttggaa

SEQ ID NO: 172914 - DNA, 20 bp, synthetic construct
  source 1..20: mol_type = other DNA
tgtgagacagtggttttgga

SEQ ID NO: 172915 - DNA, 20 bp, synthetic construct
  source 1..20: mol_type = other DNA
ttgtgagacagtggttttgg

SEQ ID NO: 172916 - DNA, 20 bp, synthetic construct
  source 1..20: mol_type = other DNA
tttgtgagacagtggttttg

SEQ ID NO: 172917 - DNA, 20 bp, synthetic construct
  source 1..20: mol_type = other DNA
atttgtgagacagtggtttt

SEQ ID NO: 172918 - DNA, 20 bp, synthetic construct
  source 1..20: mol_type = other DNA
catttgtgagacagtggttt

SEQ ID NO: 172919 - DNA, 20 bp, synthetic construct
  source 1..20: mol_type = other DNA
tcatttgtgagacagtggtt

SEQ ID NO: 172920 - DNA, 20 bp, synthetic construct
  source 1..20: mol_type = other DNA
ttcatttgtgagacagtggt

SEQ ID NO: 172921 - DNA, 20 bp, synthetic construct
  source 1..20: mol_type = other DNA
attcatttgtgagacagtgg

SEQ ID NO: 172922 - DNA, 20 bp, synthetic construct
  source 1..20: mol_type = other DNA
aattcatttgtgagacagtg

SEQ ID NO: 172923 - DNA, 20 bp, synthetic construct
  source 1..20: mol_type = other DNA
aaattcatttgtgagacagt

SEQ ID NO: 172924 - DNA, 20 bp, synthetic construct
  source 1..20: mol_type = other DNA
aaaattcatttgtgagacag

SEQ ID NO: 172925 - DNA, 20 bp, synthetic construct
  source 1..20: mol_type = other DNA
aaaaattcatttgtgagaca

SEQ ID NO: 172926 - DNA, 20 bp, synthetic construct
  source 1..20: mol_type = other DNA
taaaaattcatttgtgagac

SEQ ID NO: 172927 - DNA, 20 bp, synthetic construct
  source 1..20: mol_type = other DNA
gtaaaaattcatttgtgaga

SEQ ID NO: 172928 - DNA, 20 bp, synthetic construct
  source 1..20: mol_type = other DNA
tgtaaaaattcatttgtgag

SEQ ID NO: 172929 - DNA, 20 bp, synthetic construct
  source 1..20: mol_type = other DNA
ttgtaaaaattcatttgtga

SEQ ID NO: 172930 - DNA, 20 bp, synthetic construct
  source 1..20: mol_type = other DNA
cttgtaaaaattcatttgtg

SEQ ID NO: 172931 - DNA, 20 bp, synthetic construct
  source 1..20: mol_type = other DNA
tcttgtaaaaattcatttgt

SEQ ID NO: 172932 - DNA, 20 bp, synthetic construct
  source 1..20: mol_type = other DNA
ctcttgtaaaaattcatttg

SEQ ID NO: 172933 - DNA, 20 bp, synthetic construct
  source 1..20: mol_type = other DNA
actcttgtaaaaattcattt

SEQ ID NO: 172934 - DNA, 20 bp, synthetic construct
  source 1..20: mol_type = other DNA
gactcttgtaaaaattcatt

SEQ ID NO: 172935 - DNA, 20 bp, synthetic construct
  source 1..20: mol_type = other DNA
agactcttgtaaaaattcat

SEQ ID NO: 172936 - DNA, 20 bp, synthetic construct
  source 1..20: mol_type = other DNA
cagactcttgtaaaaattca

SEQ ID NO: 172937 - DNA, 20 bp, synthetic construct
  source 1..20: mol_type = other DNA
acagactcttgtaaaaattc

SEQ ID NO: 172938 - DNA, 20 bp, synthetic construct
  source 1..20: mol_type = other DNA
tacagactcttgtaaaaatt

SEQ ID NO: 172939 - DNA, 20 bp, synthetic construct
  source 1..20: mol_type = other DNA
ttacagactcttgtaaaaat

SEQ ID NO: 172940 - DNA, 20 bp, synthetic construct
  source 1..20: mol_type = other DNA
attacagactcttgtaaaaa

SEQ ID NO: 172941 - DNA, 20 bp, synthetic construct
  source 1..20: mol_type = other DNA
gattacagactcttgtaaaa

SEQ ID NO: 172942 - DNA, 20 bp, synthetic construct
  source 1..20: mol_type = other DNA
cgattacagactcttgtaaa

SEQ ID NO: 172943 - DNA, 20 bp, synthetic construct
  source 1..20: mol_type = other DNA
ccgattacagactcttgtaa

SEQ ID NO: 172944 - DNA, 20 bp, synthetic construct
  source 1..20: mol_type = other DNA
tccgattacagactcttgta

SEQ ID NO: 172945 - DNA, 20 bp, synthetic construct
  source 1..20: mol_type = other DNA
ctccgattacagactcttgt

SEQ ID NO: 172946 - DNA, 20 bp, synthetic construct
  source 1..20: mol_type = other DNA
gctccgattacagactcttg

SEQ ID NO: 172947 - DNA, 20 bp, synthetic construct
  source 1..20: mol_type = other DNA
tgctccgattacagactctt

SEQ ID NO: 172948 - DNA, 20 bp, synthetic construct
  source 1..20: mol_type = other DNA
atgctccgattacagactct

SEQ ID NO: 172949 - DNA, 20 bp, synthetic construct
  source 1..20: mol_type = other DNA
catgctccgattacagactc

SEQ ID NO: 172950 - DNA, 20 bp, synthetic construct
  source 1..20: mol_type = other DNA
tcatgctccgattacagact

SEQ ID NO: 172951 - DNA, 20 bp, synthetic construct
  source 1..20: mol_type = other DNA
gtcatgctccgattacagac

SEQ ID NO: 172952 - DNA, 20 bp, synthetic construct
  source 1..20: mol_type = other DNA
ggtcatgctccgattacaga

SEQ ID NO: 172953 - DNA, 20 bp, synthetic construct
  source 1..20: mol_type = other DNA
gggtcatgctccgattacag

SEQ ID NO: 172954 - DNA, 20 bp, synthetic construct
  source 1..20: mol_type = other DNA
tgggtcatgctccgattaca

SEQ ID NO: 172955 - DNA, 20 bp, synthetic construct
  source 1..20: mol_type = other DNA
ctgggtcatgctccgattac

SEQ ID NO: 172956 - DNA, 20 bp, synthetic construct
  source 1..20: mol_type = other DNA
tctgggtcatgctccgatta

SEQ ID NO: 172957 - DNA, 20 bp, synthetic construct
  source 1..20: mol_type = other DNA
ttctgggtcatgctccgatt

SEQ ID NO: 172958 - DNA, 20 bp, synthetic construct
  source 1..20: mol_type = other DNA
attctgggtcatgctccgat

SEQ ID NO: 172959 - DNA, 20 bp, synthetic construct
  source 1..20: mol_type = other DNA
tattctgggtcatgctccga

SEQ ID NO: 172960 - DNA, 20 bp, synthetic construct
  source 1..20: mol_type = other DNA
ttattctgggtcatgctccg

SEQ ID NO: 172961 - DNA, 20 bp, synthetic construct
  source 1..20: mol_type = other DNA
cttattctgggtcatgctcc

SEQ ID NO: 172962 - DNA, 20 bp, synthetic construct
  source 1..20: mol_type = other DNA
ccttattctgggtcatgctc

SEQ ID NO: 172963 - DNA, 20 bp, synthetic construct
  source 1..20: mol_type = other DNA
accttattctgggtcatgct

SEQ ID NO: 172964 - DNA, 20 bp, synthetic construct
  source 1..20: mol_type = other DNA
aaccttattctgggtcatgc

SEQ ID NO: 172965 - DNA, 20 bp, synthetic construct
  source 1..20: mol_type = other DNA
taaccttattctgggtcatg

SEQ ID NO: 172966 - DNA, 20 bp, synthetic construct
  source 1..20: mol_type = other DNA
ctaaccttattctgggtcat

SEQ ID NO: 172967 - DNA, 20 bp, synthetic construct
  source 1..20: mol_type = other DNA
cctaaccttattctgggtca

SEQ ID NO: 172968 - DNA, 20 bp, synthetic construct
  source 1..20: mol_type = other DNA
ccctaaccttattctgggtc

SEQ ID NO: 172969 - DNA, 20 bp, synthetic construct
  source 1..20: mol_type = other DNA
tccctaaccttattctgggt

SEQ ID NO: 172970 - DNA, 20 bp, synthetic construct
  source 1..20: mol_type = other DNA
ctccctaaccttattctggg

SEQ ID NO: 172971 - DNA, 20 bp, synthetic construct
  source 1..20: mol_type = other DNA
tctccctaaccttattctgg

SEQ ID NO: 172972 - DNA, 20 bp, synthetic construct
  source 1..20: mol_type = other DNA
atctccctaaccttattctg

SEQ ID NO: 172973 - DNA, 20 bp, synthetic construct
  source 1..20: mol_type = other DNA
catctccctaaccttattct

SEQ ID NO: 172974 - DNA, 20 bp, synthetic construct
  source 1..20: mol_type = other DNA
acatctccctaaccttattc

SEQ ID NO: 172975 - DNA, 20 bp, synthetic construct
  source 1..20: mol_type = other DNA
cacatctccctaaccttatt

SEQ ID NO: 172976 - DNA, 20 bp, synthetic construct
  source 1..20: mol_type = other DNA
ccacatctccctaaccttat

SEQ ID NO: 172977 - DNA, 20 bp, synthetic construct
  source 1..20: mol_type = other DNA
tccacatctccctaacctta

SEQ ID NO: 172978 - DNA, 20 bp, synthetic construct
  source 1..20: mol_type = other DNA
ctccacatctccctaacctt

SEQ ID NO: 172979 - DNA, 20 bp, synthetic construct
  source 1..20: mol_type = other DNA
actccacatctccctaacct

SEQ ID NO: 172980 - DNA, 20 bp, synthetic construct
  source 1..20: mol_type = other DNA
aactccacatctccctaacc

SEQ ID NO: 172981 - DNA, 20 bp, synthetic construct
  source 1..20: mol_type = other DNA
taactccacatctccctaac

SEQ ID NO: 172982 - DNA, 20 bp, synthetic construct
  source 1..20: mol_type = other DNA
ttaactccacatctccctaa

SEQ ID NO: 172983 - DNA, 20 bp, synthetic construct
  source 1..20: mol_type = other DNA
tttaactccacatctcccta

SEQ ID NO: 172984 - DNA, 20 bp, synthetic construct
  source 1..20: mol_type = other DNA
ctttaactccacatctccct

SEQ ID NO: 172985 - DNA, 20 bp, synthetic construct
  source 1..20: mol_type = other DNA
gctttaactccacatctccc

SEQ ID NO: 172986 - DNA, 20 bp, synthetic construct
  source 1..20: mol_type = other DNA
agctttaactccacatctcc

SEQ ID NO: 172987 - DNA, 20 bp, synthetic construct
  source 1..20: mol_type = other DNA
gagctttaactccacatctc

SEQ ID NO: 172988 - DNA, 20 bp, synthetic construct
  source 1..20: mol_type = other DNA
agagctttaactccacatct

SEQ ID NO: 172989 - DNA, 20 bp, synthetic construct
  source 1..20: mol_type = other DNA
gagagctttaactccacatc

SEQ ID NO: 172990 - DNA, 20 bp, synthetic construct
  source 1..20: mol_type = other DNA
tgagagctttaactccacat

SEQ ID NO: 172991 - DNA, 20 bp, synthetic construct
  source 1..20: mol_type = other DNA
ttgagagctttaactccaca

SEQ ID NO: 172992 - DNA, 20 bp, synthetic construct
  source 1..20: mol_type = other DNA
attgagagctttaactccac

SEQ ID NO: 172993 - DNA, 20 bp, synthetic construct
  source 1..20: mol_type = other DNA
aattgagagctttaactcca

SEQ ID NO: 172994 - DNA, 20 bp, synthetic construct
  source 1..20: mol_type = other DNA
aaattgagagctttaactcc

SEQ ID NO: 172995 - DNA, 20 bp, synthetic construct
  source 1..20: mol_type = other DNA
gaaattgagagctttaactc

SEQ ID NO: 172996 - DNA, 20 bp, synthetic construct
  source 1..20: mol_type = other DNA
agaaattgagagctttaact

SEQ ID NO: 172997 - DNA, 20 bp, synthetic construct
  source 1..20: mol_type = other DNA
aagaaattgagagctttaac

SEQ ID NO: 172998 - DNA, 20 bp, synthetic construct
  source 1..20: mol_type = other DNA
taagaaattgagagctttaa

SEQ ID NO: 172999 - DNA, 20 bp, synthetic construct
  source 1..20: mol_type = other DNA
ataagaaattgagagcttta

SEQ ID NO: 173000 - DNA, 20 bp, synthetic construct
  source 1..20: mol_type = other DNA
gataagaaattgagagcttt

SEQ ID NO: 173001 - DNA, 20 bp, synthetic construct
  source 1..20: mol_type = other DNA
agataagaaattgagagctt

SEQ ID NO: 173002 - DNA, 20 bp, synthetic construct
  source 1..20: mol_type = other DNA
cagataagaaattgagagct

SEQ ID NO: 173003 - DNA, 20 bp, synthetic construct
  source 1..20: mol_type = other DNA
ccagataagaaattgagagc

SEQ ID NO: 173004 - DNA, 20 bp, synthetic construct
  source 1..20: mol_type = other DNA
gccagataagaaattgagag

SEQ ID NO: 173005 - DNA, 20 bp, synthetic construct
  source 1..20: mol_type = other DNA
ggccagataagaaattgaga

SEQ ID NO: 173006 - DNA, 20 bp, synthetic construct
  source 1..20: mol_type = other DNA
gggccagataagaaattgag

SEQ ID NO: 173007 - DNA, 20 bp, synthetic construct
  source 1..20: mol_type = other DNA
ggggccagataagaaattga

SEQ ID NO: 173008 - DNA, 20 bp, synthetic construct
  source 1..20: mol_type = other DNA
cggggccagataagaaattg

SEQ ID NO: 173009 - DNA, 20 bp, synthetic construct
  source 1..20: mol_type = other DNA
tcggggccagataagaaatt

SEQ ID NO: 173010 - DNA, 20 bp, synthetic construct
  source 1..20: mol_type = other DNA
gtcggggccagataagaaat

SEQ ID NO: 173011 - DNA, 20 bp, synthetic construct
  source 1..20: mol_type = other DNA
tgtcggggccagataagaaa

SEQ ID NO: 173012 - DNA, 20 bp, synthetic construct
  source 1..20: mol_type = other DNA
gtgtcggggccagataagaa

SEQ ID NO: 173013 - DNA, 20 bp, synthetic construct
  source 1..20: mol_type = other DNA
tgtgtcggggccagataaga

SEQ ID NO: 173014 - DNA, 20 bp, synthetic construct
  source 1..20: mol_type = other DNA
ctgtgtcggggccagataag

SEQ ID NO: 173015 - DNA, 20 bp, synthetic construct
  source 1..20: mol_type = other DNA
tctgtgtcggggccagataa

SEQ ID NO: 173016 - DNA, 20 bp, synthetic construct
  source 1..20: mol_type = other DNA
ctctgtgtcggggccagata

SEQ ID NO: 173017 - DNA, 20 bp, synthetic construct
  source 1..20: mol_type = other DNA
tctctgtgtcggggccagat

SEQ ID NO: 173018 - DNA, 20 bp, synthetic construct
  source 1..20: mol_type = other DNA
ctctctgtgtcggggccaga

SEQ ID NO: 173019 - DNA, 20 bp, synthetic construct
  source 1..20: mol_type = other DNA
gctctctgtgtcggggccag

SEQ ID NO: 173020 - DNA, 20 bp, synthetic construct
  source 1..20: mol_type = other DNA
tgctctctgtgtcggggcca

SEQ ID NO: 173021 - DNA, 20 bp, synthetic construct
  source 1..20: mol_type = other DNA
ttgctctctgtgtcggggcc

SEQ ID NO: 173022 - DNA, 20 bp, synthetic construct
  source 1..20: mol_type = other DNA
cttgctctctgtgtcggggc

SEQ ID NO: 173023 - DNA, 20 bp, synthetic construct
  source 1..20: mol_type = other DNA
ccttgctctctgtgtcgggg

SEQ ID NO: 173024 - DNA, 20 bp, synthetic construct
  source 1..20: mol_type = other DNA
gccttgctctctgtgtcggg

SEQ ID NO: 173025 - DNA, 20 bp, synthetic construct
  source 1..20: mol_type = other DNA
tgccttgctctctgtgtcgg

SEQ ID NO: 173026 - DNA, 20 bp, synthetic construct
  source 1..20: mol_type = other DNA
atgccttgctctctgtgtcg

SEQ ID NO: 173027 - DNA, 20 bp, synthetic construct
  source 1..20: mol_type = other DNA
aatgccttgctctctgtgtc

SEQ ID NO: 173028 - DNA, 20 bp, synthetic construct
  source 1..20: mol_type = other DNA
aaatgccttgctctctgtgt

SEQ ID NO: 173029 - DNA, 20 bp, synthetic construct
  source 1..20: mol_type = other DNA
gaaatgccttgctctctgtg

SEQ ID NO: 173030 - DNA, 20 bp, synthetic construct
  source 1..20: mol_type = other DNA
tgaaatgccttgctctctgt

SEQ ID NO: 173031 - DNA, 20 bp, synthetic construct
  source 1..20: mol_type = other DNA
gtgaaatgccttgctctctg

SEQ ID NO: 173032 - DNA, 20 bp, synthetic construct
  source 1..20: mol_type = other DNA
agtgaaatgccttgctctct

SEQ ID NO: 173033 - DNA, 20 bp, synthetic construct
  source 1..20: mol_type = other DNA
gagtgaaatgccttgctctc

SEQ ID NO: 173034 - DNA, 20 bp, synthetic construct
  source 1..20: mol_type = other DNA
agagtgaaatgccttgctct

SEQ ID NO: 173035 - DNA, 20 bp, synthetic construct
  source 1..20: mol_type = other DNA
tagagtgaaatgccttgctc

SEQ ID NO: 173036 - DNA, 20 bp, synthetic construct
  source 1..20: mol_type = other DNA
gtagagtgaaatgccttgct

SEQ ID NO: 173037 - DNA, 20 bp, synthetic construct
  source 1..20: mol_type = other DNA
tgtagagtgaaatgccttgc

SEQ ID NO: 173038 - DNA, 20 bp, synthetic construct
  source 1..20: mol_type = other DNA
atgtagagtgaaatgccttg

SEQ ID NO: 173039 - DNA, 20 bp, synthetic construct
  source 1..20: mol_type = other DNA
aatgtagagtgaaatgcctt

SEQ ID NO: 173040 - DNA, 20 bp, synthetic construct
  source 1..20: mol_type = other DNA
caatgtagagtgaaatgcct

SEQ ID NO: 173041 - DNA, 20 bp, synthetic construct
  source 1..20: mol_type = other DNA
ccaatgtagagtgaaatgcc

SEQ ID NO: 173042 - DNA, 20 bp, synthetic construct
  source 1..20: mol_type = other DNA
accaatgtagagtgaaatgc

SEQ ID NO: 173043 - DNA, 20 bp, synthetic construct
  source 1..20: mol_type = other DNA
caccaatgtagagtgaaatg

SEQ ID NO: 173044 - DNA, 20 bp, synthetic construct
  source 1..20: mol_type = other DNA
gcaccaatgtagagtgaaat

SEQ ID NO: 173045 - DNA, 20 bp, synthetic construct
  source 1..20: mol_type = other DNA
agcaccaatgtagagtgaaa

SEQ ID NO: 173046 - DNA, 20 bp, synthetic construct
  source 1..20: mol_type = other DNA
gagcaccaatgtagagtgaa

SEQ ID NO: 173047 - DNA, 20 bp, synthetic construct
  source 1..20: mol_type = other DNA
agagcaccaatgtagagtga

SEQ ID NO: 173048 - DNA, 20 bp, synthetic construct
  source 1..20: mol_type = other DNA
cagagcaccaatgtagagtg

SEQ ID NO: 173049 - DNA, 20 bp, synthetic construct
  source 1..20: mol_type = other DNA
acagagcaccaatgtagagt

SEQ ID NO: 173050 - DNA, 20 bp, synthetic construct
  source 1..20: mol_type = other DNA
aacagagcaccaatgtagag

SEQ ID NO: 173051 - DNA, 20 bp, synthetic construct
  source 1..20: mol_type = other DNA
aaacagagcaccaatgtaga

SEQ ID NO: 173052 - DNA, 20 bp, synthetic construct
  source 1..20: mol_type = other DNA
taaacagagcaccaatgtag

SEQ ID NO: 173053 - DNA, 20 bp, synthetic construct
  source 1..20: mol_type = other DNA
ataaacagagcaccaatgta

SEQ ID NO: 173054 - DNA, 20 bp, synthetic construct
  source 1..20: mol_type = other DNA
tataaacagagcaccaatgt

SEQ ID NO: 173055 - DNA, 20 bp, synthetic construct
  source 1..20: mol_type = other DNA
ttataaacagagcaccaatg

SEQ ID NO: 173056 - DNA, 20 bp, synthetic construct
  source 1..20: mol_type = other DNA
tttataaacagagcaccaat

SEQ ID NO: 173057 - DNA, 20 bp, synthetic construct
  source 1..20: mol_type = other DNA
ttttataaacagagcaccaa

SEQ ID NO: 173058 - DNA, 20 bp, synthetic construct
  source 1..20: mol_type = other DNA
gttttataaacagagcacca

SEQ ID NO: 173059 - DNA, 20 bp, synthetic construct
  source 1..20: mol_type = other DNA
tgttttataaacagagcacc

SEQ ID NO: 173060 - DNA, 20 bp, synthetic construct
  source 1..20: mol_type = other DNA
ttgttttataaacagagcac

SEQ ID NO: 173061 - DNA, 20 bp, synthetic construct
  source 1..20: mol_type = other DNA
tttgttttataaacagagca

SEQ ID NO: 173062 - DNA, 20 bp, synthetic construct
  source 1..20: mol_type = other DNA
ctttgttttataaacagagc

SEQ ID NO: 173063 - DNA, 20 bp, synthetic construct
  source 1..20: mol_type = other DNA
tctttgttttataaacagag

SEQ ID NO: 173064 - DNA, 20 bp, synthetic construct
  source 1..20: mol_type = other DNA
ctctttgttttataaacaga

SEQ ID NO: 173065 - DNA, 20 bp, synthetic construct
  source 1..20: mol_type = other DNA
gctctttgttttataaacag

SEQ ID NO: 173066 - DNA, 20 bp, synthetic construct
  source 1..20: mol_type = other DNA
tgctctttgttttataaaca

SEQ ID NO: 173067 - DNA, 20 bp, synthetic construct
  source 1..20: mol_type = other DNA
ttgctctttgttttataaac

SEQ ID NO: 173068 - DNA, 20 bp, synthetic construct
  source 1..20: mol_type = other DNA
tttgctctttgttttataaa

SEQ ID NO: 173069 - DNA, 20 bp, synthetic construct
  source 1..20: mol_type = other DNA
atttgctctttgttttataa

SEQ ID NO: 173070 - DNA, 20 bp, synthetic construct
  source 1..20: mol_type = other DNA
tatttgctctttgttttata

SEQ ID NO: 173071 - DNA, 20 bp, synthetic construct
  source 1..20: mol_type = other DNA
atatttgctctttgttttat

SEQ ID NO: 173072 - DNA, 20 bp, synthetic construct
  source 1..20: mol_type = other DNA
gatatttgctctttgtttta

SEQ ID NO: 173073 - DNA, 20 bp, synthetic construct
  source 1..20: mol_type = other DNA
agatatttgctctttgtttt

SEQ ID NO: 173074 - DNA, 20 bp, synthetic construct
  source 1..20: mol_type = other DNA
gagatatttgctctttgttt

SEQ ID NO: 173075 - DNA, 20 bp, synthetic construct
  source 1..20: mol_type = other DNA
agagatatttgctctttgtt

SEQ ID NO: 173076 - DNA, 20 bp, synthetic construct
  source 1..20: mol_type = other DNA
aagagatatttgctctttgt

SEQ ID NO: 173077 - DNA, 20 bp, synthetic construct
  source 1..20: mol_type = other DNA
gaagagatatttgctctttg

SEQ ID NO: 173078 - DNA, 20 bp, synthetic construct
  source 1..20: mol_type = other DNA
ggaagagatatttgctcttt

SEQ ID NO: 173079 - DNA, 20 bp, synthetic construct
  source 1..20: mol_type = other DNA
aggaagagatatttgctctt

SEQ ID NO: 173080 - DNA, 20 bp, synthetic construct
  source 1..20: mol_type = other DNA
taggaagagatatttgctct

SEQ ID NO: 173081 - DNA, 20 bp, synthetic construct
  source 1..20: mol_type = other DNA
ttaggaagagatatttgctc

SEQ ID NO: 173082 - DNA, 20 bp, synthetic construct
  source 1..20: mol_type = other DNA
cttaggaagagatatttgct

SEQ ID NO: 173083 - DNA, 20 bp, synthetic construct
  source 1..20: mol_type = other DNA
ccttaggaagagatatttgc

SEQ ID NO: 173084 - DNA, 20 bp, synthetic construct
  source 1..20: mol_type = other DNA
accttaggaagagatatttg

SEQ ID NO: 173085 - DNA, 20 bp, synthetic construct
  source 1..20: mol_type = other DNA
gaccttaggaagagatattt

SEQ ID NO: 173086 - DNA, 20 bp, synthetic construct
  source 1..20: mol_type = other DNA
ggaccttaggaagagatatt

SEQ ID NO: 173087 - DNA, 20 bp, synthetic construct
  source 1..20: mol_type = other DNA
aggaccttaggaagagatat

SEQ ID NO: 173088 - DNA, 20 bp, synthetic construct
  source 1..20: mol_type = other DNA
aaggaccttaggaagagata

SEQ ID NO: 173089 - DNA, 20 bp, synthetic construct
  source 1..20: mol_type = other DNA
taaggaccttaggaagagat

SEQ ID NO: 173090 - DNA, 20 bp, synthetic construct
  source 1..20: mol_type = other DNA
ttaaggaccttaggaagaga

SEQ ID NO: 173091 - DNA, 20 bp, synthetic construct
  source 1..20: mol_type = other DNA
tttaaggaccttaggaagag

SEQ ID NO: 173092 - DNA, 20 bp, synthetic construct
  source 1..20: mol_type = other DNA
gtttaaggaccttaggaaga

SEQ ID NO: 173093 - DNA, 20 bp, synthetic construct
  source 1..20: mol_type = other DNA
ggtttaaggaccttaggaag

SEQ ID NO: 173094 - DNA, 20 bp, synthetic construct
  source 1..20: mol_type = other DNA
aggtttaaggaccttaggaa

SEQ ID NO: 173095 - DNA, 20 bp, synthetic construct
  source 1..20: mol_type = other DNA
gaggtttaaggaccttagga

SEQ ID NO: 173096 - DNA, 20 bp, synthetic construct
  source 1..20: mol_type = other DNA
agaggtttaaggaccttagg

SEQ ID NO: 173097 - DNA, 20 bp, synthetic construct
  source 1..20: mol_type = other DNA
aagaggtttaaggaccttag

SEQ ID NO: 173098 - DNA, 20 bp, synthetic construct
  source 1..20: mol_type = other DNA
gaagaggtttaaggacctta

SEQ ID NO: 173099 - DNA, 20 bp, synthetic construct
  source 1..20: mol_type = other DNA
ggaagaggtttaaggacctt

SEQ ID NO: 173100 - DNA, 20 bp, synthetic construct
  source 1..20: mol_type = other DNA
gggaagaggtttaaggacct

SEQ ID NO: 173101 - DNA, 20 bp, synthetic construct
  source 1..20: mol_type = other DNA
ggggaagaggtttaaggacc

SEQ ID NO: 173102 - DNA, 20 bp, synthetic construct
  source 1..20: mol_type = other DNA
gggggaagaggtttaaggac

SEQ ID NO: 173103 - DNA, 20 bp, synthetic construct
  source 1..20: mol_type = other DNA
tgggggaagaggtttaagga

SEQ ID NO: 173104 - DNA, 20 bp, synthetic construct
  source 1..20: mol_type = other DNA
ttgggggaagaggtttaagg

SEQ ID NO: 173105 - DNA, 20 bp, synthetic construct
  source 1..20: mol_type = other DNA
attgggggaagaggtttaag

SEQ ID NO: 173106 - DNA, 20 bp, synthetic construct
  source 1..20: mol_type = other DNA
gattgggggaagaggtttaa

SEQ ID NO: 173107 - DNA, 20 bp, synthetic construct
  source 1..20: mol_type = other DNA
ggattgggggaagaggttta

SEQ ID NO: 173108 - DNA, 20 bp, synthetic construct
  source 1..20: mol_type = other DNA
tggattgggggaagaggttt

SEQ ID NO: 173109 - DNA, 20 bp, synthetic construct
  source 1..20: mol_type = other DNA
ctggattgggggaagaggtt

SEQ ID NO: 173110 - DNA, 20 bp, synthetic construct
  source 1..20: mol_type = other DNA
cctggattgggggaagaggt

SEQ ID NO: 173111 - DNA, 20 bp, synthetic construct
  source 1..20: mol_type = other DNA
ccctggattgggggaagagg

SEQ ID NO: 173112 - DNA, 20 bp, synthetic construct
  source 1..20: mol_type = other DNA
accctggattgggggaagag

SEQ ID NO: 173113 - DNA, 20 bp, synthetic construct
  source 1..20: mol_type = other DNA
aaccctggattgggggaaga

SEQ ID NO: 173114 - DNA, 20 bp, synthetic construct
  source 1..20: mol_type = other DNA
aaaccctggattgggggaag

SEQ ID NO: 173115 - DNA, 20 bp, synthetic construct
  source 1..20: mol_type = other DNA
gaaaccctggattgggggaa

SEQ ID NO: 173116 - DNA, 20 bp, synthetic construct
  source 1..20: mol_type = other DNA
agaaaccctggattggggga

SEQ ID NO: 173117 - DNA, 20 bp, synthetic construct
  source 1..20: mol_type = other DNA
cagaaaccctggattggggg

SEQ ID NO: 173118 - DNA, 20 bp, synthetic construct
  source 1..20: mol_type = other DNA
ccagaaaccctggattgggg

SEQ ID NO: 173119 - DNA, 20 bp, synthetic construct
  source 1..20: mol_type = other DNA
tccagaaaccctggattggg

SEQ ID NO: 173120 - DNA, 20 bp, synthetic construct
  source 1..20: mol_type = other DNA
gtccagaaaccctggattgg

SEQ ID NO: 173121 - DNA, 20 bp, synthetic construct
  source 1..20: mol_type = other DNA
agtccagaaaccctggattg

SEQ ID NO: 173122 - DNA, 20 bp, synthetic construct
  source 1..20: mol_type = other DNA
cagtccagaaaccctggatt

SEQ ID NO: 173123 - DNA, 20 bp, synthetic construct
  source 1..20: mol_type = other DNA
gcagtccagaaaccctggat

SEQ ID NO: 173124 - DNA, 20 bp, synthetic construct
  source 1..20: mol_type = other DNA
agcagtccagaaaccctgga

SEQ ID NO: 173125 - DNA, 20 bp, synthetic construct
  source 1..20: mol_type = other DNA
gagcagtccagaaaccctgg

SEQ ID NO: 173126 - DNA, 20 bp, synthetic construct
  source 1..20: mol_type = other DNA
agagcagtccagaaaccctg

SEQ ID NO: 173127 - DNA, 20 bp, synthetic construct
  source 1..20: mol_type = other DNA
cagagcagtccagaaaccct

SEQ ID NO: 173128 - DNA, 20 bp, synthetic construct
  source 1..20: mol_type = other DNA
gcagagcagtccagaaaccc

SEQ ID NO: 173129 - DNA, 20 bp, synthetic construct
  source 1..20: mol_type = other DNA
ggcagagcagtccagaaacc

SEQ ID NO: 173130 - DNA, 20 bp, synthetic construct
  source 1..20: mol_type = other DNA
tggcagagcagtccagaaac

SEQ ID NO: 173131 - DNA, 20 bp, synthetic construct
  source 1..20: mol_type = other DNA
atggcagagcagtccagaaa

SEQ ID NO: 173132 - DNA, 20 bp, synthetic construct
  source 1..20: mol_type = other DNA
tatggcagagcagtccagaa

SEQ ID NO: 173133 - DNA, 20 bp, synthetic construct
  source 1..20: mol_type = other DNA
atatggcagagcagtccaga

SEQ ID NO: 173134 - DNA, 20 bp, synthetic construct
  source 1..20: mol_type = other DNA
catatggcagagcagtccag

SEQ ID NO: 173135 - DNA, 20 bp, synthetic construct
  source 1..20: mol_type = other DNA
tcatatggcagagcagtcca

SEQ ID NO: 173136 - DNA, 20 bp, synthetic construct
  source 1..20: mol_type = other DNA
gtcatatggcagagcagtcc

SEQ ID NO: 173137 - DNA, 20 bp, synthetic construct
  source 1..20: mol_type = other DNA
cgtcatatggcagagcagtc

SEQ ID NO: 173138 - DNA, 20 bp, synthetic construct
  source 1..20: mol_type = other DNA
ccgtcatatggcagagcagt

SEQ ID NO: 173139 - DNA, 20 bp, synthetic construct
  source 1..20: mol_type = other DNA
cccgtcatatggcagagcag

SEQ ID NO: 173140 - DNA, 20 bp, synthetic construct
  source 1..20: mol_type = other DNA
ccccgtcatatggcagagca

SEQ ID NO: 173141 - DNA, 20 bp, synthetic construct
  source 1..20: mol_type = other DNA
gccccgtcatatggcagagc

SEQ ID NO: 173142 - DNA, 20 bp, synthetic construct
  source 1..20: mol_type = other DNA
tgccccgtcatatggcagag

SEQ ID NO: 173143 - DNA, 20 bp, synthetic construct
  source 1..20: mol_type = other DNA
ctgccccgtcatatggcaga

SEQ ID NO: 173144 - DNA, 20 bp, synthetic construct
  source 1..20: mol_type = other DNA
gctgccccgtcatatggcag

SEQ ID NO: 173145 - DNA, 20 bp, synthetic construct
  source 1..20: mol_type = other DNA
agctgccccgtcatatggca

SEQ ID NO: 173146 - DNA, 20 bp, synthetic construct
  source 1..20: mol_type = other DNA
cagctgccccgtcatatggc

SEQ ID NO: 173147 - DNA, 20 bp, synthetic construct
  source 1..20: mol_type = other DNA
ccagctgccccgtcatatgg

SEQ ID NO: 173148 - DNA, 20 bp, synthetic construct
  source 1..20: mol_type = other DNA
accagctgccccgtcatatg

SEQ ID NO: 173149 - DNA, 20 bp, synthetic construct
  source 1..20: mol_type = other DNA
aaccagctgccccgtcatat

SEQ ID NO: 173150 - DNA, 20 bp, synthetic construct
  source 1..20: mol_type = other DNA
aaaccagctgccccgtcata

SEQ ID NO: 173151 - DNA, 20 bp, synthetic construct
  source 1..20: mol_type = other DNA
caaaccagctgccccgtcat

SEQ ID NO: 173152 - DNA, 20 bp, synthetic construct
  source 1..20: mol_type = other DNA
tcaaaccagctgccccgtca

SEQ ID NO: 173153 - DNA, 20 bp, synthetic construct
  source 1..20: mol_type = other DNA
atcaaaccagctgccccgtc

SEQ ID NO: 173154 - DNA, 20 bp, synthetic construct
  source 1..20: mol_type = other DNA
aatcaaaccagctgccccgt

SEQ ID NO: 173155 - DNA, 20 bp, synthetic construct
  source 1..20: mol_type = other DNA
caatcaaaccagctgccccg

SEQ ID NO: 173156 - DNA, 20 bp, synthetic construct
  source 1..20: mol_type = other DNA
tcaatcaaaccagctgcccc

SEQ ID NO: 173157 - DNA, 20 bp, synthetic construct
  source 1..20: mol_type = other DNA
gtcaatcaaaccagctgccc

SEQ ID NO: 173158 - DNA, 20 bp, synthetic construct
  source 1..20: mol_type = other DNA
ggtcaatcaaaccagctgcc

SEQ ID NO: 173159 - DNA, 20 bp, synthetic construct
  source 1..20: mol_type = other DNA
gggtcaatcaaaccagctgc

SEQ ID NO: 173160 - DNA, 20 bp, synthetic construct
  source 1..20: mol_type = other DNA
tgggtcaatcaaaccagctg

SEQ ID NO: 173161 - DNA, 20 bp, synthetic construct
  source 1..20: mol_type = other DNA
ctgggtcaatcaaaccagct

SEQ ID NO: 173162 - DNA, 20 bp, synthetic construct
  source 1..20: mol_type = other DNA
cctgggtcaatcaaaccagc

SEQ ID NO: 173163 - DNA, 20 bp, synthetic construct
  source 1..20: mol_type = other DNA
ccctgggtcaatcaaaccag

SEQ ID NO: 173164 - DNA, 20 bp, synthetic construct
  source 1..20: mol_type = other DNA
tccctgggtcaatcaaacca

SEQ ID NO: 173165 - DNA, 20 bp, synthetic construct
  source 1..20: mol_type = other DNA
ttccctgggtcaatcaaacc

SEQ ID NO: 173166 - DNA, 20 bp, synthetic construct
  source 1..20: mol_type = other DNA
cttccctgggtcaatcaaac

SEQ ID NO: 173167 - DNA, 20 bp, synthetic construct
  source 1..20: mol_type = other DNA
ccttccctgggtcaatcaaa

SEQ ID NO: 173168 - DNA, 20 bp, synthetic construct
  source 1..20: mol_type = other DNA
gccttccctgggtcaatcaa

SEQ ID NO: 173169 - DNA, 20 bp, synthetic construct
  source 1..20: mol_type = other DNA
agccttccctgggtcaatca

SEQ ID NO: 173170 - DNA, 20 bp, synthetic construct
  source 1..20: mol_type = other DNA
cagccttccctgggtcaatc

SEQ ID NO: 173171 - DNA, 20 bp, synthetic construct
  source 1..20: mol_type = other DNA
ccagccttccctgggtcaat

SEQ ID NO: 173172 - DNA, 20 bp, synthetic construct
  source 1..20: mol_type = other DNA
tccagccttccctgggtcaa

SEQ ID NO: 173173 - DNA, 20 bp, synthetic construct
  source 1..20: mol_type = other DNA
ttccagccttccctgggtca

SEQ ID NO: 173174 - DNA, 20 bp, synthetic construct
  source 1..20: mol_type = other DNA
tttccagccttccctgggtc

SEQ ID NO: 173175 - DNA, 20 bp, synthetic construct
  source 1..20: mol_type = other DNA
atttccagccttccctgggt

SEQ ID NO: 173176 - DNA, 20 bp, synthetic construct
  source 1..20: mol_type = other DNA
gatttccagccttccctggg

SEQ ID NO: 173177 - DNA, 20 bp, synthetic construct
  source 1..20: mol_type = other DNA
tgatttccagccttccctgg

SEQ ID NO: 173178 - DNA, 20 bp, synthetic construct
  source 1..20: mol_type = other DNA
ttgatttccagccttccctg

SEQ ID NO: 173179 - DNA, 20 bp, synthetic construct
  source 1..20: mol_type = other DNA
cttgatttccagccttccct

SEQ ID NO: 173180 - DNA, 20 bp, synthetic construct
  source 1..20: mol_type = other DNA
tcttgatttccagccttccc

SEQ ID NO: 173181 - DNA, 20 bp, synthetic construct
  source 1..20: mol_type = other DNA
gtcttgatttccagccttcc

SEQ ID NO: 173182 - DNA, 20 bp, synthetic construct
  source 1..20: mol_type = other DNA
agtcttgatttccagccttc

SEQ ID NO: 173183 - DNA, 20 bp, synthetic construct
  source 1..20: mol_type = other DNA
cagtcttgatttccagcctt

SEQ ID NO: 173184 - DNA, 20 bp, synthetic construct
  source 1..20: mol_type = other DNA
ccagtcttgatttccagcct

SEQ ID NO: 173185 - DNA, 20 bp, synthetic construct
  source 1..20: mol_type = other DNA
cccagtcttgatttccagcc

SEQ ID NO: 173186 - DNA, 20 bp, synthetic construct
  source 1..20: mol_type = other DNA
ccccagtcttgatttccagc

SEQ ID NO: 173187 - DNA, 20 bp, synthetic construct
  source 1..20: mol_type = other DNA
cccccagtcttgatttccag

SEQ ID NO: 173188 - DNA, 20 bp, synthetic construct
  source 1..20: mol_type = other DNA
tcccccagtcttgatttcca

SEQ ID NO: 173189 - DNA, 20 bp, synthetic construct
  source 1..20: mol_type = other DNA
atcccccagtcttgatttcc

SEQ ID NO: 173190 - DNA, 20 bp, synthetic construct
  source 1..20: mol_type = other DNA
gatcccccagtcttgatttc

SEQ ID NO: 173191 - DNA, 20 bp, synthetic construct
  source 1..20: mol_type = other DNA
tgatcccccagtcttgattt

SEQ ID NO: 173192 - DNA, 20 bp, synthetic construct
  source 1..20: mol_type = other DNA
ttgatcccccagtcttgatt

SEQ ID NO: 173193 - DNA, 20 bp, synthetic construct
  source 1..20: mol_type = other DNA
cttgatcccccagtcttgat

SEQ ID NO: 173194 - DNA, 20 bp, synthetic construct
  source 1..20: mol_type = other DNA
tcttgatcccccagtcttga

SEQ ID NO: 173195 - DNA, 20 bp, synthetic construct
  source 1..20: mol_type = other DNA
gtcttgatcccccagtcttg

SEQ ID NO: 173196 - DNA, 20 bp, synthetic construct
  source 1..20: mol_type = other DNA
cgtcttgatcccccagtctt

SEQ ID NO: 173197 - DNA, 20 bp, synthetic construct
  source 1..20: mol_type = other DNA
acgtcttgatcccccagtct

SEQ ID NO: 173198 - DNA, 20 bp, synthetic construct
  source 1..20: mol_type = other DNA
tacgtcttgatcccccagtc

SEQ ID NO: 173199 - DNA, 20 bp, synthetic construct
  source 1..20: mol_type = other DNA
ctacgtcttgatcccccagt

SEQ ID NO: 173200 - DNA, 20 bp, synthetic construct
  source 1..20: mol_type = other DNA
tctacgtcttgatcccccag

SEQ ID NO: 173201 - DNA, 20 bp, synthetic construct
  source 1..20: mol_type = other DNA
atctacgtcttgatccccca

SEQ ID NO: 173202 - DNA, 20 bp, synthetic construct
  source 1..20: mol_type = other DNA
aatctacgtcttgatccccc

SEQ ID NO: 173203 - DNA, 20 bp, synthetic construct
  source 1..20: mol_type = other DNA
gaatctacgtcttgatcccc

SEQ ID NO: 173204 - DNA, 20 bp, synthetic construct
  source 1..20: mol_type = other DNA
tgaatctacgtcttgatccc

SEQ ID NO: 173205 - DNA, 20 bp, synthetic construct
  source 1..20: mol_type = other DNA
ctgaatctacgtcttgatcc

SEQ ID NO: 173206 - DNA, 20 bp, synthetic construct
  source 1..20: mol_type = other DNA
actgaatctacgtcttgatc

SEQ ID NO: 173207 - DNA, 20 bp, synthetic construct
  source 1..20: mol_type = other DNA
cactgaatctacgtcttgat

SEQ ID NO: 173208 - DNA, 20 bp, synthetic construct
  source 1..20: mol_type = other DNA
acactgaatctacgtcttga

SEQ ID NO: 173209 - DNA, 20 bp, synthetic construct
  source 1..20: mol_type = other DNA
cacactgaatctacgtcttg

SEQ ID NO: 173210 - DNA, 20 bp, synthetic construct
  source 1..20: mol_type = other DNA
ccacactgaatctacgtctt

SEQ ID NO: 173211 - DNA, 20 bp, synthetic construct
  source 1..20: mol_type = other DNA
gccacactgaatctacgtct

SEQ ID NO: 173212 - DNA, 20 bp, synthetic construct
  source 1..20: mol_type = other DNA
ggccacactgaatctacgtc

SEQ ID NO: 173213 - DNA, 20 bp, synthetic construct
  source 1..20: mol_type = other DNA
tggccacactgaatctacgt

SEQ ID NO: 173214 - DNA, 20 bp, synthetic construct
  source 1..20: mol_type = other DNA
ttggccacactgaatctacg

SEQ ID NO: 173215 - DNA, 20 bp, synthetic construct
  source 1..20: mol_type = other DNA
cttggccacactgaatctac

SEQ ID NO: 173216 - DNA, 20 bp, synthetic construct
  source 1..20: mol_type = other DNA
ccttggccacactgaatcta

SEQ ID NO: 173217 - DNA, 20 bp, synthetic construct
  source 1..20: mol_type = other DNA
accttggccacactgaatct

SEQ ID NO: 173218 - DNA, 20 bp, synthetic construct
  source 1..20: mol_type = other DNA
gaccttggccacactgaatc

SEQ ID NO: 173219 - DNA, 20 bp, synthetic construct
  source 1..20: mol_type = other DNA
tgaccttggccacactgaat

SEQ ID NO: 173220 - DNA, 20 bp, synthetic construct
  source 1..20: mol_type = other DNA
ttgaccttggccacactgaa

SEQ ID NO: 173221 - DNA, 20 bp, synthetic construct
  source 1..20: mol_type = other DNA
cttgaccttggccacactga

SEQ ID NO: 173222 - DNA, 20 bp, synthetic construct
  source 1..20: mol_type = other DNA
acttgaccttggccacactg

SEQ ID NO: 173223 - DNA, 20 bp, synthetic construct
  source 1..20: mol_type = other DNA
gacttgaccttggccacact

SEQ ID NO: 173224 - DNA, 20 bp, synthetic construct
  source 1..20: mol_type = other DNA
agacttgaccttggccacac

SEQ ID NO: 173225 - DNA, 20 bp, synthetic construct
  source 1..20: mol_type = other DNA
gagacttgaccttggccaca

SEQ ID NO: 173226 - DNA, 20 bp, synthetic construct
  source 1..20: mol_type = other DNA
agagacttgaccttggccac

SEQ ID NO: 173227 - DNA, 20 bp, synthetic construct
  source 1..20: mol_type = other DNA
cagagacttgaccttggcca

SEQ ID NO: 173228 - DNA, 20 bp, synthetic construct
  source 1..20: mol_type = other DNA
tcagagacttgaccttggcc

SEQ ID NO: 173229 - DNA, 20 bp, synthetic construct
  source 1..20: mol_type = other DNA
ctcagagacttgaccttggc

SEQ ID NO: 173230 - DNA, 20 bp, synthetic construct
  source 1..20: mol_type = other DNA
cctcagagacttgaccttgg

SEQ ID NO: 173231 - DNA, 20 bp, synthetic construct
  source 1..20: mol_type = other DNA
acctcagagacttgaccttg

SEQ ID NO: 173232 - DNA, 20 bp, synthetic construct
  source 1..20: mol_type = other DNA
aacctcagagacttgacctt

SEQ ID NO: 173233 - DNA, 20 bp, synthetic construct
  source 1..20: mol_type = other DNA
aaacctcagagacttgacct

SEQ ID NO: 173234 - DNA, 20 bp, synthetic construct
  source 1..20: mol_type = other DNA
taaacctcagagacttgacc

SEQ ID NO: 173235 - DNA, 20 bp, synthetic construct
  source 1..20: mol_type = other DNA
ctaaacctcagagacttgac

SEQ ID NO: 173236 - DNA, 20 bp, synthetic construct
  source 1..20: mol_type = other DNA
cctaaacctcagagacttga

SEQ ID NO: 173237 - DNA, 20 bp, synthetic construct
  source 1..20: mol_type = other DNA
ccctaaacctcagagacttg

SEQ ID NO: 173238 - DNA, 20 bp, synthetic construct
  source 1..20: mol_type = other DNA
tccctaaacctcagagactt

SEQ ID NO: 173239 - DNA, 20 bp, synthetic construct
  source 1..20: mol_type = other DNA
gtccctaaacctcagagact

SEQ ID NO: 173240 - DNA, 20 bp, synthetic construct
  source 1..20: mol_type = other DNA
tgtccctaaacctcagagac

SEQ ID NO: 173241 - DNA, 20 bp, synthetic construct
  source 1..20: mol_type = other DNA
atgtccctaaacctcagaga

SEQ ID NO: 173242 - DNA, 20 bp, synthetic construct
  source 1..20: mol_type = other DNA
gatgtccctaaacctcagag

SEQ ID NO: 173243 - DNA, 20 bp, synthetic construct
  source 1..20: mol_type = other DNA
tgatgtccctaaacctcaga

SEQ ID NO: 173244 - DNA, 20 bp, synthetic construct
  source 1..20: mol_type = other DNA
ctgatgtccctaaacctcag

SEQ ID NO: 173245 - DNA, 20 bp, synthetic construct
  source 1..20: mol_type = other DNA
tctgatgtccctaaacctca

SEQ ID NO: 173246 - DNA, 20 bp, synthetic construct
  source 1..20: mol_type = other DNA
atctgatgtccctaaacctc

SEQ ID NO: 173247 - DNA, 20 bp, synthetic construct
  source 1..20: mol_type = other DNA
gatctgatgtccctaaacct

SEQ ID NO: 173248 - DNA, 20 bp, synthetic construct
  source 1..20: mol_type = other DNA
ggatctgatgtccctaaacc

SEQ ID NO: 173249 - DNA, 20 bp, synthetic construct
  source 1..20: mol_type = other DNA
gggatctgatgtccctaaac

SEQ ID NO: 173250 - DNA, 20 bp, synthetic construct
  source 1..20: mol_type = other DNA
ggggatctgatgtccctaaa

SEQ ID NO: 173251 - DNA, 20 bp, synthetic construct
  source 1..20: mol_type = other DNA
tggggatctgatgtccctaa

SEQ ID NO: 173252 - DNA, 20 bp, synthetic construct
  source 1..20: mol_type = other DNA
ctggggatctgatgtcccta

SEQ ID NO: 173253 - DNA, 20 bp, synthetic construct
  source 1..20: mol_type = other DNA
gctggggatctgatgtccct

SEQ ID NO: 173254 - DNA, 20 bp, synthetic construct
  source 1..20: mol_type = other DNA
agctggggatctgatgtccc

SEQ ID NO: 173255 - DNA, 20 bp, synthetic construct
  source 1..20: mol_type = other DNA
aagctggggatctgatgtcc

SEQ ID NO: 173256 - DNA, 20 bp, synthetic construct
  source 1..20: mol_type = other DNA
taagctggggatctgatgtc

SEQ ID NO: 173257 - DNA, 20 bp, synthetic construct
  source 1..20: mol_type = other DNA
ctaagctggggatctgatgt

SEQ ID NO: 173258 - DNA, 20 bp, synthetic construct
  source 1..20: mol_type = other DNA
cctaagctggggatctgatg

SEQ ID NO: 173259 - DNA, 20 bp, synthetic construct
  source 1..20: mol_type = other DNA
acctaagctggggatctgat

SEQ ID NO: 173260 - DNA, 20 bp, synthetic construct
  source 1..20: mol_type = other DNA
aacctaagctggggatctga

SEQ ID NO: 173261 - DNA, 20 bp, synthetic construct
  source 1..20: mol_type = other DNA
gaacctaagctggggatctg

SEQ ID NO: 173262 - DNA, 20 bp, synthetic construct
  source 1..20: mol_type = other DNA
agaacctaagctggggatct

SEQ ID NO: 173263 - DNA, 20 bp, synthetic construct
  source 1..20: mol_type = other DNA
cagaacctaagctggggatc

SEQ ID NO: 173264 - DNA, 20 bp, synthetic construct
  source 1..20: mol_type = other DNA
acagaacctaagctggggat

SEQ ID NO: 173265 - DNA, 20 bp, synthetic construct
  source 1..20: mol_type = other DNA
tacagaacctaagctgggga

SEQ ID NO: 173266 - DNA, 20 bp, synthetic construct
  source 1..20: mol_type = other DNA
gtacagaacctaagctgggg

SEQ ID NO: 173267 - DNA, 20 bp, synthetic construct
  source 1..20: mol_type = other DNA
ggtacagaacctaagctggg

SEQ ID NO: 173268 - DNA, 20 bp, synthetic construct
  source 1..20: mol_type = other DNA
aggtacagaacctaagctgg

SEQ ID NO: 173269 - DNA, 20 bp, synthetic construct
  source 1..20: mol_type = other DNA
gaggtacagaacctaagctg

SEQ ID NO: 173270 - DNA, 20 bp, synthetic construct
  source 1..20: mol_type = other DNA
cgaggtacagaacctaagct

SEQ ID NO: 173271 - DNA, 20 bp, synthetic construct
  source 1..20: mol_type = other DNA
ccgaggtacagaacctaagc

SEQ ID NO: 173272 - DNA, 20 bp, synthetic construct
  source 1..20: mol_type = other DNA
gccgaggtacagaacctaag

SEQ ID NO: 173273 - DNA, 20 bp, synthetic construct
  source 1..20: mol_type = other DNA
tgccgaggtacagaacctaa

SEQ ID NO: 173274 - DNA, 20 bp, synthetic construct
  source 1..20: mol_type = other DNA
ttgccgaggtacagaaccta

SEQ ID NO: 173275 - DNA, 20 bp, synthetic construct
  source 1..20: mol_type = other DNA
cttgccgaggtacagaacct

SEQ ID NO: 173276 - DNA, 20 bp, synthetic construct
  source 1..20: mol_type = other DNA
ccttgccgaggtacagaacc

SEQ ID NO: 173277 - DNA, 20 bp, synthetic construct
  source 1..20: mol_type = other DNA
accttgccgaggtacagaac

SEQ ID NO: 173278 - DNA, 20 bp, synthetic construct
  source 1..20: mol_type = other DNA
caccttgccgaggtacagaa

SEQ ID NO: 173279 - DNA, 20 bp, synthetic construct
  source 1..20: mol_type = other DNA
tcaccttgccgaggtacaga

SEQ ID NO: 173280 - DNA, 20 bp, synthetic construct
  source 1..20: mol_type = other DNA
ttcaccttgccgaggtacag

SEQ ID NO: 173281 - DNA, 20 bp, synthetic construct
  source 1..20: mol_type = other DNA
tttcaccttgccgaggtaca

SEQ ID NO: 173282 - DNA, 20 bp, synthetic construct
  source 1..20: mol_type = other DNA
ctttcaccttgccgaggtac

SEQ ID NO: 173283 - DNA, 20 bp, synthetic construct
  source 1..20: mol_type = other DNA
gctttcaccttgccgaggta

SEQ ID NO: 173284 - DNA, 20 bp, synthetic construct
  source 1..20: mol_type = other DNA
cgctttcaccttgccgaggt

SEQ ID NO: 173285 - DNA, 20 bp, synthetic construct
  source 1..20: mol_type = other DNA
acgctttcaccttgccgagg

SEQ ID NO: 173286 - DNA, 20 bp, synthetic construct
  source 1..20: mol_type = other DNA
aacgctttcaccttgccgag

SEQ ID NO: 173287 - DNA, 20 bp, synthetic construct
  source 1..20: mol_type = other DNA
caacgctttcaccttgccga

SEQ ID NO: 173288 - DNA, 20 bp, synthetic construct
  source 1..20: mol_type = other DNA
ccaacgctttcaccttgccg

SEQ ID NO: 173289 - DNA, 20 bp, synthetic construct
  source 1..20: mol_type = other DNA
gccaacgctttcaccttgcc

SEQ ID NO: 173290 - DNA, 20 bp, synthetic construct
  source 1..20: mol_type = other DNA
cgccaacgctttcaccttgc

SEQ ID NO: 173291 - DNA, 20 bp, synthetic construct
  source 1..20: mol_type = other DNA
gcgccaacgctttcaccttg

SEQ ID NO: 173292 - DNA, 20 bp, synthetic construct
  source 1..20: mol_type = other DNA
ggcgccaacgctttcacctt

SEQ ID NO: 173293 - DNA, 20 bp, synthetic construct
  source 1..20: mol_type = other DNA
gggcgccaacgctttcacct

SEQ ID NO: 173294 - DNA, 20 bp, synthetic construct
  source 1..20: mol_type = other DNA
tgggcgccaacgctttcacc

SEQ ID NO: 173295 - DNA, 20 bp, synthetic construct
  source 1..20: mol_type = other DNA
gtgggcgccaacgctttcac

SEQ ID NO: 173296 - DNA, 20 bp, synthetic construct
  source 1..20: mol_type = other DNA
agtgggcgccaacgctttca

SEQ ID NO: 173297 - DNA, 20 bp, synthetic construct
  source 1..20: mol_type = other DNA
cagtgggcgccaacgctttc

SEQ ID NO: 173298 - DNA, 20 bp, synthetic construct
  source 1..20: mol_type = other DNA
tcagtgggcgccaacgcttt

SEQ ID NO: 173299 - DNA, 20 bp, synthetic construct
  source 1..20: mol_type = other DNA
atcagtgggcgccaacgctt

SEQ ID NO: 173300 - DNA, 20 bp, synthetic construct
  source 1..20: mol_type = other DNA
catcagtgggcgccaacgct

SEQ ID NO: 173301 - DNA, 20 bp, synthetic construct
  source 1..20: mol_type = other DNA
tcatcagtgggcgccaacgc

SEQ ID NO: 173302 - DNA, 20 bp, synthetic construct
  source 1..20: mol_type = other DNA
ctcatcagtgggcgccaacg

SEQ ID NO: 173303 - DNA, 20 bp, synthetic construct
  source 1..20: mol_type = other DNA
cctcatcagtgggcgccaac

SEQ ID NO: 173304 - DNA, 20 bp, synthetic construct
  source 1..20: mol_type = other DNA
gcctcatcagtgggcgccaa

SEQ ID NO: 173305 - DNA, 20 bp, synthetic construct
  source 1..20: mol_type = other DNA
ggcctcatcagtgggcgcca

SEQ ID NO: 173306 - DNA, 20 bp, synthetic construct
  source 1..20: mol_type = other DNA
aggcctcatcagtgggcgcc

SEQ ID NO: 173307 - DNA, 20 bp, synthetic construct
  source 1..20: mol_type = other DNA
caggcctcatcagtgggcgc

SEQ ID NO: 173308 - DNA, 20 bp, synthetic construct
  source 1..20: mol_type = other DNA
gcaggcctcatcagtgggcg

SEQ ID NO: 173309 - DNA, 20 bp, synthetic construct
  source 1..20: mol_type = other DNA
agcaggcctcatcagtgggc

SEQ ID NO: 173310 - DNA, 20 bp, synthetic construct
  source 1..20: mol_type = other DNA
gagcaggcctcatcagtggg

SEQ ID NO: 173311 - DNA, 20 bp, synthetic construct
  source 1..20: mol_type = other DNA
agagcaggcctcatcagtgg

SEQ ID NO: 173312 - DNA, 20 bp, synthetic construct
  source 1..20: mol_type = other DNA
cagagcaggcctcatcagtg

SEQ ID NO: 173313 - DNA, 20 bp, synthetic construct
  source 1..20: mol_type = other DNA
tcagagcaggcctcatcagt

SEQ ID NO: 173314 - DNA, 20 bp, synthetic construct
  source 1..20: mol_type = other DNA
ctcagagcaggcctcatcag

SEQ ID NO: 173315 - DNA, 20 bp, synthetic construct
  source 1..20: mol_type = other DNA
tctcagagcaggcctcatca

SEQ ID NO: 173316 - DNA, 20 bp, synthetic construct
  source 1..20: mol_type = other DNA
atctcagagcaggcctcatc

SEQ ID NO: 173317 - DNA, 20 bp, synthetic construct
  source 1..20: mol_type = other DNA
aatctcagagcaggcctcat

SEQ ID NO: 173318 - DNA, 20 bp, synthetic construct
  source 1..20: mol_type = other DNA
caatctcagagcaggcctca

SEQ ID NO: 173319 - DNA, 20 bp, synthetic construct
  source 1..20: mol_type = other DNA
acaatctcagagcaggcctc

SEQ ID NO: 173320 - DNA, 20 bp, synthetic construct
  source 1..20: mol_type = other DNA
cacaatctcagagcaggcct

SEQ ID NO: 173321 - DNA, 20 bp, synthetic construct
  source 1..20: mol_type = other DNA
ccacaatctcagagcaggcc

SEQ ID NO: 173322 - DNA, 20 bp, synthetic construct
  source 1..20: mol_type = other DNA
cccacaatctcagagcaggc

SEQ ID NO: 173323 - DNA, 20 bp, synthetic construct
  source 1..20: mol_type = other DNA
acccacaatctcagagcagg

SEQ ID NO: 173324 - DNA, 20 bp, synthetic construct
  source 1..20: mol_type = other DNA
cacccacaatctcagagcag

SEQ ID NO: 173325 - DNA, 20 bp, synthetic construct
  source 1..20: mol_type = other DNA
acacccacaatctcagagca

SEQ ID NO: 173326 - DNA, 20 bp, synthetic construct
  source 1..20: mol_type = other DNA
cacacccacaatctcagagc

SEQ ID NO: 173327 - DNA, 20 bp, synthetic construct
  source 1..20: mol_type = other DNA
ccacacccacaatctcagag

SEQ ID NO: 173328 - DNA, 20 bp, synthetic construct
  source 1..20: mol_type = other DNA
cccacacccacaatctcaga

SEQ ID NO: 173329 - DNA, 20 bp, synthetic construct
  source 1..20: mol_type = other DNA
acccacacccacaatctcag

SEQ ID NO: 173330 - DNA, 20 bp, synthetic construct
  source 1..20: mol_type = other DNA
aacccacacccacaatctca

SEQ ID NO: 173331 - DNA, 20 bp, synthetic construct
  source 1..20: mol_type = other DNA
caacccacacccacaatctc

SEQ ID NO: 173332 - DNA, 20 bp, synthetic construct
  source 1..20: mol_type = other DNA
tcaacccacacccacaatct

SEQ ID NO: 173333 - DNA, 20 bp, synthetic construct
  source 1..20: mol_type = other DNA
ctcaacccacacccacaatc

SEQ ID NO: 173334 - DNA, 20 bp, synthetic construct
  source 1..20: mol_type = other DNA
actcaacccacacccacaat

SEQ ID NO: 173335 - DNA, 20 bp, synthetic construct
  source 1..20: mol_type = other DNA
aactcaacccacacccacaa

SEQ ID NO: 173336 - DNA, 20 bp, synthetic construct
  source 1..20: mol_type = other DNA
caactcaacccacacccaca

SEQ ID NO: 173337 - DNA, 20 bp, synthetic construct
  source 1..20: mol_type = other DNA
ccaactcaacccacacccac

SEQ ID NO: 173338 - DNA, 20 bp, synthetic construct
  source 1..20: mol_type = other DNA
cccaactcaacccacaccca

SEQ ID NO: 173339 - DNA, 20 bp, synthetic construct
  source 1..20: mol_type = other DNA
acccaactcaacccacaccc

SEQ ID NO: 173340 - DNA, 20 bp, synthetic construct
  source 1..20: mol_type = other DNA
cacccaactcaacccacacc

SEQ ID NO: 173341 - DNA, 20 bp, synthetic construct
  source 1..20: mol_type = other DNA
ccacccaactcaacccacac

SEQ ID NO: 173342 - DNA, 20 bp, synthetic construct
  source 1..20: mol_type = other DNA
cccacccaactcaacccaca

SEQ ID NO: 173343 - DNA, 20 bp, synthetic construct
  source 1..20: mol_type = other DNA
gcccacccaactcaacccac

SEQ ID NO: 173344 - DNA, 20 bp, synthetic construct
  source 1..20: mol_type = other DNA
tgcccacccaactcaaccca

SEQ ID NO: 173345 - DNA, 20 bp, synthetic construct
  source 1..20: mol_type = other DNA
atgcccacccaactcaaccc

SEQ ID NO: 173346 - DNA, 20 bp, synthetic construct
  source 1..20: mol_type = other DNA
tatgcccacccaactcaacc

SEQ ID NO: 173347 - DNA, 20 bp, synthetic construct
  source 1..20: mol_type = other DNA
ctatgcccacccaactcaac

SEQ ID NO: 173348 - DNA, 20 bp, synthetic construct
  source 1..20: mol_type = other DNA
cctatgcccacccaactcaa

SEQ ID NO: 173349 - DNA, 20 bp, synthetic construct
  source 1..20: mol_type = other DNA
gcctatgcccacccaactca

SEQ ID NO: 173350 - DNA, 20 bp, synthetic construct
  source 1..20: mol_type = other DNA
tgcctatgcccacccaactc

SEQ ID NO: 173351 - DNA, 20 bp, synthetic construct
  source 1..20: mol_type = other DNA
ttgcctatgcccacccaact

SEQ ID NO: 173352 - DNA, 20 bp, synthetic construct
  source 1..20: mol_type = other DNA
cttgcctatgcccacccaac

SEQ ID NO: 173353 - DNA, 20 bp, synthetic construct
  source 1..20: mol_type = other DNA
acttgcctatgcccacccaa

SEQ ID NO: 173354 - DNA, 20 bp, synthetic construct
  source 1..20: mol_type = other DNA
gacttgcctatgcccaccca

SEQ ID NO: 173355 - DNA, 20 bp, synthetic construct
  source 1..20: mol_type = other DNA
ggacttgcctatgcccaccc

SEQ ID NO: 173356 - DNA, 20 bp, synthetic construct
  source 1..20: mol_type = other DNA
aggacttgcctatgcccacc

SEQ ID NO: 173357 - DNA, 20 bp, synthetic construct
  source 1..20: mol_type = other DNA
gaggacttgcctatgcccac

SEQ ID NO: 173358 - DNA, 20 bp, synthetic construct
  source 1..20: mol_type = other DNA
agaggacttgcctatgccca

SEQ ID NO: 173359 - DNA, 20 bp, synthetic construct
  source 1..20: mol_type = other DNA
aagaggacttgcctatgccc

SEQ ID NO: 173360 - DNA, 20 bp, synthetic construct
  source 1..20: mol_type = other DNA
caagaggacttgcctatgcc

SEQ ID NO: 173361 - DNA, 20 bp, synthetic construct
  source 1..20: mol_type = other DNA
acaagaggacttgcctatgc

SEQ ID NO: 173362 - DNA, 20 bp, synthetic construct
  source 1..20: mol_type = other DNA
tacaagaggacttgcctatg

SEQ ID NO: 173363 - DNA, 20 bp, synthetic construct
  source 1..20: mol_type = other DNA
ttacaagaggacttgcctat

SEQ ID NO: 173364 - DNA, 20 bp, synthetic construct
  source 1..20: mol_type = other DNA
cttacaagaggacttgccta

SEQ ID NO: 173365 - DNA, 20 bp, synthetic construct
  source 1..20: mol_type = other DNA
tcttacaagaggacttgcct

SEQ ID NO: 173366 - DNA, 20 bp, synthetic construct
  source 1..20: mol_type = other DNA
ttcttacaagaggacttgcc

SEQ ID NO: 173367 - DNA, 20 bp, synthetic construct
  source 1..20: mol_type = other DNA
attcttacaagaggacttgc

SEQ ID NO: 173368 - DNA, 20 bp, synthetic construct
  source 1..20: mol_type = other DNA
gattcttacaagaggacttg

SEQ ID NO: 173369 - DNA, 20 bp, synthetic construct
  source 1..20: mol_type = other DNA
agattcttacaagaggactt

SEQ ID NO: 173370 - DNA, 20 bp, synthetic construct
  source 1..20: mol_type = other DNA
aagattcttacaagaggact

SEQ ID NO: 173371 - DNA, 20 bp, synthetic construct
  source 1..20: mol_type = other DNA
aaagattcttacaagaggac

SEQ ID NO: 173372 - DNA, 20 bp, synthetic construct
  source 1..20: mol_type = other DNA
aaaagattcttacaagagga

SEQ ID NO: 173373 - DNA, 20 bp, synthetic construct
  source 1..20: mol_type = other DNA
caaaagattcttacaagagg

SEQ ID NO: 173374 - DNA, 20 bp, synthetic construct
  source 1..20: mol_type = other DNA
ccaaaagattcttacaagag

SEQ ID NO: 173375 - DNA, 20 bp, synthetic construct
  source 1..20: mol_type = other DNA
gccaaaagattcttacaaga

SEQ ID NO: 173376 - DNA, 20 bp, synthetic construct
  source 1..20: mol_type = other DNA
tgccaaaagattcttacaag

SEQ ID NO: 173377 - DNA, 20 bp, synthetic construct
  source 1..20: mol_type = other DNA
ttgccaaaagattcttacaa

SEQ ID NO: 173378 - DNA, 20 bp, synthetic construct
  source 1..20: mol_type = other DNA
tttgccaaaagattcttaca

SEQ ID NO: 173379 - DNA, 20 bp, synthetic construct
  source 1..20: mol_type = other DNA
ctttgccaaaagattcttac

SEQ ID NO: 173380 - DNA, 20 bp, synthetic construct
  source 1..20: mol_type = other DNA
tctttgccaaaagattctta

SEQ ID NO: 173381 - DNA, 20 bp, synthetic construct
  source 1..20: mol_type = other DNA
atctttgccaaaagattctt

SEQ ID NO: 173382 - DNA, 20 bp, synthetic construct
  source 1..20: mol_type = other DNA
catctttgccaaaagattct

SEQ ID NO: 173383 - DNA, 20 bp, synthetic construct
  source 1..20: mol_type = other DNA
ccatctttgccaaaagattc

SEQ ID NO: 173384 - DNA, 20 bp, synthetic construct
  source 1..20: mol_type = other DNA
cccatctttgccaaaagatt

SEQ ID NO: 173385 - DNA, 20 bp, synthetic construct
  source 1..20: mol_type = other DNA
gcccatctttgccaaaagat

SEQ ID NO: 173386 - DNA, 20 bp, synthetic construct
  source 1..20: mol_type = other DNA
ggcccatctttgccaaaaga

SEQ ID NO: 173387 - DNA, 20 bp, synthetic construct
  source 1..20: mol_type = other DNA
aggcccatctttgccaaaag

SEQ ID NO: 173388 - DNA, 20 bp, synthetic construct
  source 1..20: mol_type = other DNA
caggcccatctttgccaaaa

SEQ ID NO: 173389 - DNA, 20 bp, synthetic construct
  source 1..20: mol_type = other DNA
ccaggcccatctttgccaaa

SEQ ID NO: 173390 - DNA, 20 bp, synthetic construct
  source 1..20: mol_type = other DNA
cccaggcccatctttgccaa

SEQ ID NO: 173391 - DNA, 20 bp, synthetic construct
  source 1..20: mol_type = other DNA
tcccaggcccatctttgcca

SEQ ID NO: 173392 - DNA, 20 bp, synthetic construct
  source 1..20: mol_type = other DNA
ctcccaggcccatctttgcc

SEQ ID NO: 173393 - DNA, 20 bp, synthetic construct
  source 1..20: mol_type = other DNA
cctcccaggcccatctttgc

SEQ ID NO: 173394 - DNA, 20 bp, synthetic construct
  source 1..20: mol_type = other DNA
gcctcccaggcccatctttg

SEQ ID NO: 173395 - DNA, 20 bp, synthetic construct
  source 1..20: mol_type = other DNA
agcctcccaggcccatcttt

SEQ ID NO: 173396 - DNA, 20 bp, synthetic construct
  source 1..20: mol_type = other DNA
aagcctcccaggcccatctt

SEQ ID NO: 173397 - DNA, 20 bp, synthetic construct
  source 1..20: mol_type = other DNA
aaagcctcccaggcccatct

SEQ ID NO: 173398 - DNA, 20 bp, synthetic construct
  source 1..20: mol_type = other DNA
aaaagcctcccaggcccatc

SEQ ID NO: 173399 - DNA, 20 bp, synthetic construct
  source 1..20: mol_type = other DNA
gaaaagcctcccaggcccat

SEQ ID NO: 173400 - DNA, 20 bp, synthetic construct
  source 1..20: mol_type = other DNA
agaaaagcctcccaggccca

SEQ ID NO: 173401 - DNA, 20 bp, synthetic construct
  source 1..20: mol_type = other DNA
gagaaaagcctcccaggccc

SEQ ID NO: 173402 - DNA, 20 bp, synthetic construct
  source 1..20: mol_type = other DNA
tgagaaaagcctcccaggcc

SEQ ID NO: 173403 - DNA, 20 bp, synthetic construct
  source 1..20: mol_type = other DNA
gtgagaaaagcctcccaggc

SEQ ID NO: 173404 - DNA, 20 bp, synthetic construct
  source 1..20: mol_type = other DNA
agtgagaaaagcctcccagg

SEQ ID NO: 173405 - DNA, 20 bp, synthetic construct
  source 1..20: mol_type = other DNA
aagtgagaaaagcctcccag

SEQ ID NO: 173406 - DNA, 20 bp, synthetic construct
  source 1..20: mol_type = other DNA
gaagtgagaaaagcctccca

SEQ ID NO: 173407 - DNA, 20 bp, synthetic construct
  source 1..20: mol_type = other DNA
ggaagtgagaaaagcctccc

SEQ ID NO: 173408 - DNA, 20 bp, synthetic construct
  source 1..20: mol_type = other DNA
aggaagtgagaaaagcctcc

SEQ ID NO: 173409 - DNA, 20 bp, synthetic construct
  source 1..20: mol_type = other DNA
caggaagtgagaaaagcctc

SEQ ID NO: 173410 - DNA, 20 bp, synthetic construct
  source 1..20: mol_type = other DNA
ccaggaagtgagaaaagcct

SEQ ID NO: 173411 - DNA, 20 bp, synthetic construct
  source 1..20: mol_type = other DNA
cccaggaagtgagaaaagcc

SEQ ID NO: 173412 - DNA, 20 bp, synthetic construct
  source 1..20: mol_type = other DNA
ccccaggaagtgagaaaagc

SEQ ID NO: 173413 - DNA, 20 bp, synthetic construct
  source 1..20: mol_type = other DNA
gccccaggaagtgagaaaag

SEQ ID NO: 173414 - DNA, 20 bp, synthetic construct
  source 1..20: mol_type = other DNA
ggccccaggaagtgagaaaa

SEQ ID NO: 173415 - DNA, 20 bp, synthetic construct
  source 1..20: mol_type = other DNA
gggccccaggaagtgagaaa

SEQ ID NO: 173416 - DNA, 20 bp, synthetic construct
  source 1..20: mol_type = other DNA
tgggccccaggaagtgagaa

SEQ ID NO: 173417 - DNA, 20 bp, synthetic construct
  source 1..20: mol_type = other DNA
ctgggccccaggaagtgaga

SEQ ID NO: 173418 - DNA, 20 bp, synthetic construct
  source 1..20: mol_type = other DNA
cctgggccccaggaagtgag

SEQ ID NO: 173419 - DNA, 20 bp, synthetic construct
  source 1..20: mol_type = other DNA
gcctgggccccaggaagtga

SEQ ID NO: 173420 - DNA, 20 bp, synthetic construct
  source 1..20: mol_type = other DNA
agcctgggccccaggaagtg

SEQ ID NO: 173421 - DNA, 20 bp, synthetic construct
  source 1..20: mol_type = other DNA
aagcctgggccccaggaagt

SEQ ID NO: 173422 - DNA, 20 bp, synthetic construct
  source 1..20: mol_type = other DNA
aaagcctgggccccaggaag

SEQ ID NO: 173423 - DNA, 20 bp, synthetic construct
  source 1..20: mol_type = other DNA
caaagcctgggccccaggaa

SEQ ID NO: 173424 - DNA, 20 bp, synthetic construct
  source 1..20: mol_type = other DNA
gcaaagcctgggccccagga

SEQ ID NO: 173425 - DNA, 20 bp, synthetic construct
  source 1..20: mol_type = other DNA
tgcaaagcctgggccccagg

SEQ ID NO: 173426 - DNA, 20 bp, synthetic construct
  source 1..20: mol_type = other DNA
ttgcaaagcctgggccccag

SEQ ID NO: 173427 - DNA, 20 bp, synthetic construct
  source 1..20: mol_type = other DNA
attgcaaagcctgggcccca

SEQ ID NO: 173428 - DNA, 20 bp, synthetic construct
  source 1..20: mol_type = other DNA
tattgcaaagcctgggcccc

SEQ ID NO: 173429 - DNA, 20 bp, synthetic construct
  source 1..20: mol_type = other DNA
ttattgcaaagcctgggccc

SEQ ID NO: 173430 - DNA, 20 bp, synthetic construct
  source 1..20: mol_type = other DNA
cttattgcaaagcctgggcc

SEQ ID NO: 173431 - DNA, 20 bp, synthetic construct
  source 1..20: mol_type = other DNA
acttattgcaaagcctgggc

SEQ ID NO: 173432 - DNA, 20 bp, synthetic construct
  source 1..20: mol_type = other DNA
tacttattgcaaagcctggg

SEQ ID NO: 173433 - DNA, 20 bp, synthetic construct
  source 1..20: mol_type = other DNA
atacttattgcaaagcctgg

SEQ ID NO: 173434 - DNA, 20 bp, synthetic construct
  source 1..20: mol_type = other DNA
aatacttattgcaaagcctg

SEQ ID NO: 173435 - DNA, 20 bp, synthetic construct
  source 1..20: mol_type = other DNA
gaatacttattgcaaagcct

SEQ ID NO: 173436 - DNA, 20 bp, synthetic construct
  source 1..20: mol_type = other DNA
ggaatacttattgcaaagcc

SEQ ID NO: 173437 - DNA, 20 bp, synthetic construct
  source 1..20: mol_type = other DNA
tggaatacttattgcaaagc

SEQ ID NO: 173438 - DNA, 20 bp, synthetic construct
  source 1..20: mol_type = other DNA
atggaatacttattgcaaag

SEQ ID NO: 173439 - DNA, 20 bp, synthetic construct
  source 1..20: mol_type = other DNA
aatggaatacttattgcaaa

SEQ ID NO: 173440 - DNA, 20 bp, synthetic construct
  source 1..20: mol_type = other DNA
taatggaatacttattgcaa

SEQ ID NO: 173441 - DNA, 20 bp, synthetic construct
  source 1..20: mol_type = other DNA
ataatggaatacttattgca

SEQ ID NO: 173442 - DNA, 20 bp, synthetic construct
  source 1..20: mol_type = other DNA
tataatggaatacttattgc

SEQ ID NO: 173443 - DNA, 20 bp, synthetic construct
  source 1..20: mol_type = other DNA
gtataatggaatacttattg

SEQ ID NO: 173444 - DNA, 20 bp, synthetic construct
  source 1..20: mol_type = other DNA
agtataatggaatacttatt

SEQ ID NO: 173445 - DNA, 20 bp, synthetic construct
  source 1..20: mol_type = other DNA
cagtataatggaatacttat

SEQ ID NO: 173446 - DNA, 20 bp, synthetic construct
  source 1..20: mol_type = other DNA
acagtataatggaatactta

SEQ ID NO: 173447 - DNA, 20 bp, synthetic construct
  source 1..20: mol_type = other DNA
cacagtataatggaatactt

SEQ ID NO: 173448 - DNA, 20 bp, synthetic construct
  source 1..20: mol_type = other DNA
ccacagtataatggaatact

SEQ ID NO: 173449 - DNA, 20 bp, synthetic construct
  source 1..20: mol_type = other DNA
accacagtataatggaatac

SEQ ID NO: 173450 - DNA, 20 bp, synthetic construct
  source 1..20: mol_type = other DNA
taccacagtataatggaata

SEQ ID NO: 173451 - DNA, 20 bp, synthetic construct
  source 1..20: mol_type = other DNA
gtaccacagtataatggaat

SEQ ID NO: 173452 - DNA, 20 bp, synthetic construct
  source 1..20: mol_type = other DNA
ggtaccacagtataatggaa

SEQ ID NO: 173453 - DNA, 20 bp, synthetic construct
  source 1..20: mol_type = other DNA
aggtaccacagtataatgga

SEQ ID NO: 173454 - DNA, 20 bp, synthetic construct
  source 1..20: mol_type = other DNA
aaggtaccacagtataatgg

SEQ ID NO: 173455 - DNA, 20 bp, synthetic construct
  source 1..20: mol_type = other DNA
caaggtaccacagtataatg

SEQ ID NO: 173456 - DNA, 20 bp, synthetic construct
  source 1..20: mol_type = other DNA
ccaaggtaccacagtataat

SEQ ID NO: 173457 - DNA, 20 bp, synthetic construct
  source 1..20: mol_type = other DNA
cccaaggtaccacagtataa

SEQ ID NO: 173458 - DNA, 20 bp, synthetic construct
  source 1..20: mol_type = other DNA
ccccaaggtaccacagtata

SEQ ID NO: 173459 - DNA, 20 bp, synthetic construct
  source 1..20: mol_type = other DNA
gccccaaggtaccacagtat

SEQ ID NO: 173460 - DNA, 20 bp, synthetic construct
  source 1..20: mol_type = other DNA
agccccaaggtaccacagta

SEQ ID NO: 173461 - DNA, 20 bp, synthetic construct
  source 1..20: mol_type = other DNA
tagccccaaggtaccacagt

SEQ ID NO: 173462 - DNA, 20 bp, synthetic construct
  source 1..20: mol_type = other DNA
gtagccccaaggtaccacag

SEQ ID NO: 173463 - DNA, 20 bp, synthetic construct
  source 1..20: mol_type = other DNA
ggtagccccaaggtaccaca

SEQ ID NO: 173464 - DNA, 20 bp, synthetic construct
  source 1..20: mol_type = other DNA
aggtagccccaaggtaccac

SEQ ID NO: 173465 - DNA, 20 bp, synthetic construct
  source 1..20: mol_type = other DNA
caggtagccccaaggtacca

SEQ ID NO: 173466 - DNA, 20 bp, synthetic construct
  source 1..20: mol_type = other DNA
tcaggtagccccaaggtacc

SEQ ID NO: 173467 - DNA, 20 bp, synthetic construct
  source 1..20: mol_type = other DNA
ctcaggtagccccaaggtac

SEQ ID NO: 173468 - DNA, 20 bp, synthetic construct
  source 1..20: mol_type = other DNA
tctcaggtagccccaaggta

SEQ ID NO: 173469 - DNA, 20 bp, synthetic construct
  source 1..20: mol_type = other DNA
ttctcaggtagccccaaggt

SEQ ID NO: 173470 - DNA, 20 bp, synthetic construct
  source 1..20: mol_type = other DNA
attctcaggtagccccaagg

SEQ ID NO: 173471 - DNA, 20 bp, synthetic construct
  source 1..20: mol_type = other DNA
gattctcaggtagccccaag

SEQ ID NO: 173472 - DNA, 20 bp, synthetic construct
  source 1..20: mol_type = other DNA
ggattctcaggtagccccaa

SEQ ID NO: 173473 - DNA, 20 bp, synthetic construct
  source 1..20: mol_type = other DNA
aggattctcaggtagcccca

SEQ ID NO: 173474 - DNA, 20 bp, synthetic construct
  source 1..20: mol_type = other DNA
gaggattctcaggtagcccc

SEQ ID NO: 173475 - DNA, 20 bp, synthetic construct
  source 1..20: mol_type = other DNA
agaggattctcaggtagccc

SEQ ID NO: 173476 - DNA, 20 bp, synthetic construct
  source 1..20: mol_type = other DNA
cagaggattctcaggtagcc

SEQ ID NO: 173477 - DNA, 20 bp, synthetic construct
  source 1..20: mol_type = other DNA
acagaggattctcaggtagc

SEQ ID NO: 173478 - DNA, 20 bp, synthetic construct
  source 1..20: mol_type = other DNA
gacagaggattctcaggtag

SEQ ID NO: 173479 - DNA, 20 bp, synthetic construct
  source 1..20: mol_type = other DNA
agacagaggattctcaggta

SEQ ID NO: 173480 - DNA, 20 bp, synthetic construct
  source 1..20: mol_type = other DNA
gagacagaggattctcaggt

SEQ ID NO: 173481 - DNA, 20 bp, synthetic construct
  source 1..20: mol_type = other DNA
cgagacagaggattctcagg

SEQ ID NO: 173482 - DNA, 20 bp, synthetic construct
  source 1..20: mol_type = other DNA
gcgagacagaggattctcag

SEQ ID NO: 173483 - DNA, 20 bp, synthetic construct
  source 1..20: mol_type = other DNA
ggcgagacagaggattctca

SEQ ID NO: 173484 - DNA, 20 bp, synthetic construct
  source 1..20: mol_type = other DNA
gggcgagacagaggattctc

SEQ ID NO: 173485 - DNA, 20 bp, synthetic construct
  source 1..20: mol_type = other DNA
ggggcgagacagaggattct

SEQ ID NO: 173486 - DNA, 20 bp, synthetic construct
  source 1..20: mol_type = other DNA
aggggcgagacagaggattc

SEQ ID NO: 173487 - DNA, 20 bp, synthetic construct
  source 1..20: mol_type = other DNA
caggggcgagacagaggatt

SEQ ID NO: 173488 - DNA, 20 bp, synthetic construct
  source 1..20: mol_type = other DNA
acaggggcgagacagaggat

SEQ ID NO: 173489 - DNA, 20 bp, synthetic construct
  source 1..20: mol_type = other DNA
aacaggggcgagacagagga

SEQ ID NO: 173490 - DNA, 20 bp, synthetic construct
  source 1..20: mol_type = other DNA
caacaggggcgagacagagg

SEQ ID NO: 173491 - DNA, 20 bp, synthetic construct
  source 1..20: mol_type = other DNA
gcaacaggggcgagacagag

SEQ ID NO: 173492 - DNA, 20 bp, synthetic construct
  source 1..20: mol_type = other DNA
ggcaacaggggcgagacaga

SEQ ID NO: 173493 - DNA, 20 bp, synthetic construct
  source 1..20: mol_type = other DNA
aggcaacaggggcgagacag

SEQ ID NO: 173494 - DNA, 20 bp, synthetic construct
  source 1..20: mol_type = other DNA
aaggcaacaggggcgagaca

SEQ ID NO: 173495 - DNA, 20 bp, synthetic construct
  source 1..20: mol_type = other DNA
caaggcaacaggggcgagac

SEQ ID NO: 173496 - DNA, 20 bp, synthetic construct
  source 1..20: mol_type = other DNA
gcaaggcaacaggggcgaga

SEQ ID NO: 173497 - DNA, 20 bp, synthetic construct
  source 1..20: mol_type = other DNA
ggcaaggcaacaggggcgag

SEQ ID NO: 173498 - DNA, 20 bp, synthetic construct
  source 1..20: mol_type = other DNA
tggcaaggcaacaggggcga

SEQ ID NO: 173499 - DNA, 20 bp, synthetic construct
  source 1..20: mol_type = other DNA
ttggcaaggcaacaggggcg

SEQ ID NO: 173500 - DNA, 20 bp, synthetic construct
  source 1..20: mol_type = other DNA
tttggcaaggcaacaggggc

SEQ ID NO: 173501 - DNA, 20 bp, synthetic construct
  source 1..20: mol_type = other DNA
ctttggcaaggcaacagggg

SEQ ID NO: 173502 - DNA, 20 bp, synthetic construct
  source 1..20: mol_type = other DNA
tctttggcaaggcaacaggg

SEQ ID NO: 173503 - DNA, 20 bp, synthetic construct
  source 1..20: mol_type = other DNA
ctctttggcaaggcaacagg

SEQ ID NO: 173504 - DNA, 20 bp, synthetic construct
  source 1..20: mol_type = other DNA
actctttggcaaggcaacag

SEQ ID NO: 173505 - DNA, 20 bp, synthetic construct
  source 1..20: mol_type = other DNA
aactctttggcaaggcaaca

SEQ ID NO: 173506 - DNA, 20 bp, synthetic construct
  source 1..20: mol_type = other DNA
aaactctttggcaaggcaac

SEQ ID NO: 173507 - DNA, 20 bp, synthetic construct
  source 1..20: mol_type = other DNA
caaactctttggcaaggcaa

SEQ ID NO: 173508 - DNA, 20 bp, synthetic construct
  source 1..20: mol_type = other DNA
gcaaactctttggcaaggca

SEQ ID NO: 173509 - DNA, 20 bp, synthetic construct
  source 1..20: mol_type = other DNA
agcaaactctttggcaaggc

SEQ ID NO: 173510 - DNA, 20 bp, synthetic construct
  source 1..20: mol_type = other DNA
cagcaaactctttggcaagg

SEQ ID NO: 173511 - DNA, 20 bp, synthetic construct
  source 1..20: mol_type = other DNA
acagcaaactctttggcaag

SEQ ID NO: 173512 - DNA, 20 bp, synthetic construct
  source 1..20: mol_type = other DNA
gacagcaaactctttggcaa

SEQ ID NO: 173513 - DNA, 20 bp, synthetic construct
  source 1..20: mol_type = other DNA
ggacagcaaactctttggca

SEQ ID NO: 173514 - DNA, 20 bp, synthetic construct
  source 1..20: mol_type = other DNA
tggacagcaaactctttggc

SEQ ID NO: 173515 - DNA, 20 bp, synthetic construct
  source 1..20: mol_type = other DNA
ttggacagcaaactctttgg

SEQ ID NO: 173516 - DNA, 20 bp, synthetic construct
  source 1..20: mol_type = other DNA
cttggacagcaaactctttg

SEQ ID NO: 173517 - DNA, 20 bp, synthetic construct
  source 1..20: mol_type = other DNA
tcttggacagcaaactcttt

SEQ ID NO: 173518 - DNA, 20 bp, synthetic construct
  source 1..20: mol_type = other DNA
ttcttggacagcaaactctt

SEQ ID NO: 173519 - DNA, 20 bp, synthetic construct
  source 1..20: mol_type = other DNA
attcttggacagcaaactct

SEQ ID NO: 173520 - DNA, 20 bp, synthetic construct
  source 1..20: mol_type = other DNA
aattcttggacagcaaactc

SEQ ID NO: 173521 - DNA, 20 bp, synthetic construct
  source 1..20: mol_type = other DNA
gaattcttggacagcaaact

SEQ ID NO: 173522 - DNA, 20 bp, synthetic construct
  source 1..20: mol_type = other DNA
ggaattcttggacagcaaac

SEQ ID NO: 173523 - DNA, 20 bp, synthetic construct
  source 1..20: mol_type = other DNA
aggaattcttggacagcaaa

SEQ ID NO: 173524 - DNA, 20 bp, synthetic construct
  source 1..20: mol_type = other DNA
aaggaattcttggacagcaa

SEQ ID NO: 173525 - DNA, 20 bp, synthetic construct
  source 1..20: mol_type = other DNA
aaaggaattcttggacagca

SEQ ID NO: 173526 - DNA, 20 bp, synthetic construct
  source 1..20: mol_type = other DNA
gaaaggaattcttggacagc

SEQ ID NO: 173527 - DNA, 20 bp, synthetic construct
  source 1..20: mol_type = other DNA
ggaaaggaattcttggacag

SEQ ID NO: 173528 - DNA, 20 bp, synthetic construct
  source 1..20: mol_type = other DNA
aggaaaggaattcttggaca

SEQ ID NO: 173529 - DNA, 20 bp, synthetic construct
  source 1..20: mol_type = other DNA
caggaaaggaattcttggac

SEQ ID NO: 173530 - DNA, 20 bp, synthetic construct
  source 1..20: mol_type = other DNA
acaggaaaggaattcttgga

SEQ ID NO: 173531 - DNA, 20 bp, synthetic construct
  source 1..20: mol_type = other DNA
gacaggaaaggaattcttgg

SEQ ID NO: 173532 - DNA, 20 bp, synthetic construct
  source 1..20: mol_type = other DNA
agacaggaaaggaattcttg

SEQ ID NO: 173533 - DNA, 20 bp, synthetic construct
  source 1..20: mol_type = other DNA
gagacaggaaaggaattctt

SEQ ID NO: 173534 - DNA, 20 bp, synthetic construct
  source 1..20: mol_type = other DNA
ggagacaggaaaggaattct

SEQ ID NO: 173535 - DNA, 20 bp, synthetic construct
  source 1..20: mol_type = other DNA
tggagacaggaaaggaattc

SEQ ID NO: 173536 - DNA, 20 bp, synthetic construct
  source 1..20: mol_type = other DNA
ctggagacaggaaaggaatt

SEQ ID NO: 173537 - DNA, 20 bp, synthetic construct
  source 1..20: mol_type = other DNA
cctggagacaggaaaggaat

SEQ ID NO: 173538 - DNA, 20 bp, synthetic construct
  source 1..20: mol_type = other DNA
acctggagacaggaaaggaa

SEQ ID NO: 173539 - DNA, 20 bp, synthetic construct
  source 1..20: mol_type = other DNA
cacctggagacaggaaagga

SEQ ID NO: 173540 - DNA, 20 bp, synthetic construct
  source 1..20: mol_type = other DNA
gcacctggagacaggaaagg

SEQ ID NO: 173541 - DNA, 20 bp, synthetic construct
  source 1..20: mol_type = other DNA
ggcacctggagacaggaaag

SEQ ID NO: 173542 - DNA, 20 bp, synthetic construct
  source 1..20: mol_type = other DNA
tggcacctggagacaggaaa

SEQ ID NO: 173543 - DNA, 20 bp, synthetic construct
  source 1..20: mol_type = other DNA
atggcacctggagacaggaa

SEQ ID NO: 173544 - DNA, 20 bp, synthetic construct
  source 1..20: mol_type = other DNA
catggcacctggagacagga

SEQ ID NO: 173545 - DNA, 20 bp, synthetic construct
  source 1..20: mol_type = other DNA
gcatggcacctggagacagg

SEQ ID NO: 173546 - DNA, 20 bp, synthetic construct
  source 1..20: mol_type = other DNA
agcatggcacctggagacag

SEQ ID NO: 173547 - DNA, 20 bp, synthetic construct
  source 1..20: mol_type = other DNA
gagcatggcacctggagaca

SEQ ID NO: 173548 - DNA, 20 bp, synthetic construct
  source 1..20: mol_type = other DNA
ggagcatggcacctggagac

SEQ ID NO: 173549 - DNA, 20 bp, synthetic construct
  source 1..20: mol_type = other DNA
aggagcatggcacctggaga

SEQ ID NO: 173550 - DNA, 20 bp, synthetic construct
  source 1..20: mol_type = other DNA
caggagcatggcacctggag

SEQ ID NO: 173551 - DNA, 20 bp, synthetic construct
  source 1..20: mol_type = other DNA
gcaggagcatggcacctgga

SEQ ID NO: 173552 - DNA, 20 bp, synthetic construct
  source 1..20: mol_type = other DNA
ggcaggagcatggcacctgg

SEQ ID NO: 173553 - DNA, 20 bp, synthetic construct
  source 1..20: mol_type = other DNA
tggcaggagcatggcacctg

SEQ ID NO: 173554 - DNA, 20 bp, synthetic construct
  source 1..20: mol_type = other DNA
gtggcaggagcatggcacct

SEQ ID NO: 173555 - DNA, 20 bp, synthetic construct
  source 1..20: mol_type = other DNA
ggtggcaggagcatggcacc

SEQ ID NO: 173556 - DNA, 20 bp, synthetic construct
  source 1..20: mol_type = other DNA
aggtggcaggagcatggcac

SEQ ID NO: 173557 - DNA, 20 bp, synthetic construct
  source 1..20: mol_type = other DNA
gaggtggcaggagcatggca

SEQ ID NO: 173558 - DNA, 20 bp, synthetic construct
  source 1..20: mol_type = other DNA
agaggtggcaggagcatggc

SEQ ID NO: 173559 - DNA, 20 bp, synthetic construct
  source 1..20: mol_type = other DNA
cagaggtggcaggagcatgg

SEQ ID NO: 173560 - DNA, 20 bp, synthetic construct
  source 1..20: mol_type = other DNA
gcagaggtggcaggagcatg

SEQ ID NO: 173561 - DNA, 20 bp, synthetic construct
  source 1..20: mol_type = other DNA
ggcagaggtggcaggagcat

SEQ ID NO: 173562 - DNA, 20 bp, synthetic construct
  source 1..20: mol_type = other DNA
tggcagaggtggcaggagca

SEQ ID NO: 173563 - DNA, 20 bp, synthetic construct
  source 1..20: mol_type = other DNA
ctggcagaggtggcaggagc

SEQ ID NO: 173564 - DNA, 20 bp, synthetic construct
  source 1..20: mol_type = other DNA
cctggcagaggtggcaggag

SEQ ID NO: 173565 - DNA, 20 bp, synthetic construct
  source 1..20: mol_type = other DNA
acctggcagaggtggcagga

SEQ ID NO: 173566 - DNA, 20 bp, synthetic construct
  source 1..20: mol_type = other DNA
aacctggcagaggtggcagg

SEQ ID NO: 173567 - DNA, 20 bp, synthetic construct
  source 1..20: mol_type = other DNA
gaacctggcagaggtggcag

SEQ ID NO: 173568 - DNA, 20 bp, synthetic construct
  source 1..20: mol_type = other DNA
ggaacctggcagaggtggca

SEQ ID NO: 173569 - DNA, 20 bp, synthetic construct
  source 1..20: mol_type = other DNA
gggaacctggcagaggtggc

SEQ ID NO: 173570 - DNA, 20 bp, synthetic construct
  source 1..20: mol_type = other DNA
agggaacctggcagaggtgg

SEQ ID NO: 173571 - DNA, 20 bp, synthetic construct
  source 1..20: mol_type = other DNA
cagggaacctggcagaggtg

SEQ ID NO: 173572 - DNA, 20 bp, synthetic construct
  source 1..20: mol_type = other DNA
gcagggaacctggcagaggt

SEQ ID NO: 173573 - DNA, 20 bp, synthetic construct
  source 1..20: mol_type = other DNA
ggcagggaacctggcagagg

SEQ ID NO: 173574 - DNA, 20 bp, synthetic construct
  source 1..20: mol_type = other DNA
aggcagggaacctggcagag

SEQ ID NO: 173575 - DNA, 20 bp, synthetic construct
  source 1..20: mol_type = other DNA
caggcagggaacctggcaga

SEQ ID NO: 173576 - DNA, 20 bp, synthetic construct
  source 1..20: mol_type = other DNA
gcaggcagggaacctggcag

SEQ ID NO: 173577 - DNA, 20 bp, synthetic construct
  source 1..20: mol_type = other DNA
ggcaggcagggaacctggca

SEQ ID NO: 173578 - DNA, 20 bp, synthetic construct
  source 1..20: mol_type = other DNA
gggcaggcagggaacctggc

SEQ ID NO: 173579 - DNA, 20 bp, synthetic construct
  source 1..20: mol_type = other DNA
tgggcaggcagggaacctgg

SEQ ID NO: 173580 - DNA, 20 bp, synthetic construct
  source 1..20: mol_type = other DNA
ctgggcaggcagggaacctg

SEQ ID NO: 173581 - DNA, 20 bp, synthetic construct
  source 1..20: mol_type = other DNA
tctgggcaggcagggaacct

SEQ ID NO: 173582 - DNA, 20 bp, synthetic construct
  source 1..20: mol_type = other DNA
atctgggcaggcagggaacc

SEQ ID NO: 173583 - DNA, 20 bp, synthetic construct
  source 1..20: mol_type = other DNA
catctgggcaggcagggaac

SEQ ID NO: 173584 - DNA, 20 bp, synthetic construct
  source 1..20: mol_type = other DNA
ccatctgggcaggcagggaa

SEQ ID NO: 173585 - DNA, 20 bp, synthetic construct
  source 1..20: mol_type = other DNA
gccatctgggcaggcaggga

SEQ ID NO: 173586 - DNA, 20 bp, synthetic construct
  source 1..20: mol_type = other DNA
agccatctgggcaggcaggg

SEQ ID NO: 173587 - DNA, 20 bp, synthetic construct
  source 1..20: mol_type = other DNA
gagccatctgggcaggcagg

SEQ ID NO: 173588 - DNA, 20 bp, synthetic construct
  source 1..20: mol_type = other DNA
ggagccatctgggcaggcag

SEQ ID NO: 173589 - DNA, 20 bp, synthetic construct
  source 1..20: mol_type = other DNA
gggagccatctgggcaggca

SEQ ID NO: 173590 - DNA, 20 bp, synthetic construct
  source 1..20: mol_type = other DNA
tgggagccatctgggcaggc

SEQ ID NO: 173591 - DNA, 20 bp, synthetic construct
  source 1..20: mol_type = other DNA
ttgggagccatctgggcagg

SEQ ID NO: 173592 - DNA, 20 bp, synthetic construct
  source 1..20: mol_type = other DNA
gttgggagccatctgggcag

SEQ ID NO: 173593 - DNA, 20 bp, synthetic construct
  source 1..20: mol_type = other DNA
agttgggagccatctgggca

SEQ ID NO: 173594 - DNA, 20 bp, synthetic construct
  source 1..20: mol_type = other DNA
cagttgggagccatctgggc

SEQ ID NO: 173595 - DNA, 20 bp, synthetic construct
  source 1..20: mol_type = other DNA
tcagttgggagccatctggg

SEQ ID NO: 173596 - DNA, 20 bp, synthetic construct
  source 1..20: mol_type = other DNA
ctcagttgggagccatctgg

SEQ ID NO: 173597 - DNA, 20 bp, synthetic construct
  source 1..20: mol_type = other DNA
actcagttgggagccatctg

SEQ ID NO: 173598 - DNA, 20 bp, synthetic construct
  source 1..20: mol_type = other DNA
cactcagttgggagccatct

SEQ ID NO: 173599 - DNA, 20 bp, synthetic construct
  source 1..20: mol_type = other DNA
acactcagttgggagccatc

SEQ ID NO: 173600 - DNA, 20 bp, synthetic construct
  source 1..20: mol_type = other DNA
cacactcagttgggagccat

SEQ ID NO: 173601 - DNA, 20 bp, synthetic construct
  source 1..20: mol_type = other DNA
tcacactcagttgggagcca

SEQ ID NO: 173602 - DNA, 20 bp, synthetic construct
  source 1..20: mol_type = other DNA
ctcacactcagttgggagcc

SEQ ID NO: 173603 - DNA, 20 bp, synthetic construct
  source 1..20: mol_type = other DNA
cctcacactcagttgggagc

SEQ ID NO: 173604 - DNA, 20 bp, synthetic construct
  source 1..20: mol_type = other DNA
tcctcacactcagttgggag

SEQ ID NO: 173605 - DNA, 20 bp, synthetic construct
  source 1..20: mol_type = other DNA
ctcctcacactcagttggga

SEQ ID NO: 173606 - DNA, 20 bp, synthetic construct
  source 1..20: mol_type = other DNA
cctcctcacactcagttggg

SEQ ID NO: 173607 - DNA, 20 bp, synthetic construct
  source 1..20: mol_type = other DNA
tcctcctcacactcagttgg

SEQ ID NO: 173608 - DNA, 20 bp, synthetic construct
  source 1..20: mol_type = other DNA
ttcctcctcacactcagttg

SEQ ID NO: 173609 - DNA, 20 bp, synthetic construct
  source 1..20: mol_type = other DNA
attcctcctcacactcagtt

SEQ ID NO: 173610 - DNA, 20 bp, synthetic construct
  source 1..20: mol_type = other DNA
aattcctcctcacactcagt

SEQ ID NO: 173611 - DNA, 20 bp, synthetic construct
  source 1..20: mol_type = other DNA
aaattcctcctcacactcag

SEQ ID NO: 173612 - DNA, 20 bp, synthetic construct
  source 1..20: mol_type = other DNA
caaattcctcctcacactca

SEQ ID NO: 173613 - DNA, 20 bp, synthetic construct
  source 1..20: mol_type = other DNA
tcaaattcctcctcacactc

SEQ ID NO: 173614 - DNA, 20 bp, synthetic construct
  source 1..20: mol_type = other DNA
ctcaaattcctcctcacact

SEQ ID NO: 173615 - DNA, 20 bp, synthetic construct
  source 1..20: mol_type = other DNA
tctcaaattcctcctcacac

SEQ ID NO: 173616 - DNA, 20 bp, synthetic construct
  source 1..20: mol_type = other DNA
gtctcaaattcctcctcaca

SEQ ID NO: 173617 - DNA, 20 bp, synthetic construct
  source 1..20: mol_type = other DNA
tgtctcaaattcctcctcac

SEQ ID NO: 173618 - DNA, 20 bp, synthetic construct
  source 1..20: mol_type = other DNA
ctgtctcaaattcctcctca

SEQ ID NO: 173619 - DNA, 20 bp, synthetic construct
  source 1..20: mol_type = other DNA
cctgtctcaaattcctcctc

SEQ ID NO: 173620 - DNA, 20 bp, synthetic construct
  source 1..20: mol_type = other DNA
acctgtctcaaattcctcct

SEQ ID NO: 173621 - DNA, 20 bp, synthetic construct
  source 1..20: mol_type = other DNA
aacctgtctcaaattcctcc

SEQ ID NO: 173622 - DNA, 20 bp, synthetic construct
  source 1..20: mol_type = other DNA
aaacctgtctcaaattcctc

SEQ ID NO: 173623 - DNA, 20 bp, synthetic construct
  source 1..20: mol_type = other DNA
aaaacctgtctcaaattcct

SEQ ID NO: 173624 - DNA, 20 bp, synthetic construct
  source 1..20: mol_type = other DNA
caaaacctgtctcaaattcc

SEQ ID NO: 173625 - DNA, 20 bp, synthetic construct
  source 1..20: mol_type = other DNA
tcaaaacctgtctcaaattc

SEQ ID NO: 173626 - DNA, 20 bp, synthetic construct
  source 1..20: mol_type = other DNA
ctcaaaacctgtctcaaatt

SEQ ID NO: 173627 - DNA, 20 bp, synthetic construct
  source 1..20: mol_type = other DNA
gctcaaaacctgtctcaaat

SEQ ID NO: 173628 - DNA, 20 bp, synthetic construct
  source 1..20: mol_type = other DNA
agctcaaaacctgtctcaaa

SEQ ID NO: 173629 - DNA, 20 bp, synthetic construct
  source 1..20: mol_type = other DNA
aagctcaaaacctgtctcaa

SEQ ID NO: 173630 - DNA, 20 bp, synthetic construct
  source 1..20: mol_type = other DNA
aaagctcaaaacctgtctca

SEQ ID NO: 173631 - DNA, 20 bp, synthetic construct
  source 1..20: mol_type = other DNA
gaaagctcaaaacctgtctc

SEQ ID NO: 173632 - DNA, 20 bp, synthetic construct
  source 1..20: mol_type = other DNA
agaaagctcaaaacctgtct

SEQ ID NO: 173633 - DNA, 20 bp, synthetic construct
  source 1..20: mol_type = other DNA
cagaaagctcaaaacctgtc

SEQ ID NO: 173634 - DNA, 20 bp, synthetic construct
  source 1..20: mol_type = other DNA
ccagaaagctcaaaacctgt

SEQ ID NO: 173635 - DNA, 20 bp, synthetic construct
  source 1..20: mol_type = other DNA
cccagaaagctcaaaacctg

SEQ ID NO: 173636 - DNA, 20 bp, synthetic construct
  source 1..20: mol_type = other DNA
acccagaaagctcaaaacct

SEQ ID NO: 173637 - DNA, 20 bp, synthetic construct
  source 1..20: mol_type = other DNA
aacccagaaagctcaaaacc

SEQ ID NO: 173638 - DNA, 20 bp, synthetic construct
  source 1..20: mol_type = other DNA
gaacccagaaagctcaaaac

SEQ ID NO: 173639 - DNA, 20 bp, synthetic construct
  source 1..20: mol_type = other DNA
agaacccagaaagctcaaaa

SEQ ID NO: 173640 - DNA, 20 bp, synthetic construct
  source 1..20: mol_type = other DNA
gagaacccagaaagctcaaa

SEQ ID NO: 173641 - DNA, 20 bp, synthetic construct
  source 1..20: mol_type = other DNA
ggagaacccagaaagctcaa

SEQ ID NO: 173642 - DNA, 20 bp, synthetic construct
  source 1..20: mol_type = other DNA
tggagaacccagaaagctca

SEQ ID NO: 173643 - DNA, 20 bp, synthetic construct
  source 1..20: mol_type = other DNA
ctggagaacccagaaagctc

SEQ ID NO: 173644 - DNA, 20 bp, synthetic construct
  source 1..20: mol_type = other DNA
actggagaacccagaaagct

SEQ ID NO: 173645 - DNA, 20 bp, synthetic construct
  source 1..20: mol_type = other DNA
aactggagaacccagaaagc

SEQ ID NO: 173646 - DNA, 20 bp, synthetic construct
  source 1..20: mol_type = other DNA
taactggagaacccagaaag

SEQ ID NO: 173647 - DNA, 20 bp, synthetic construct
  source 1..20: mol_type = other DNA
ctaactggagaacccagaaa

SEQ ID NO: 173648 - DNA, 20 bp, synthetic construct
  source 1..20: mol_type = other DNA
cctaactggagaacccagaa

SEQ ID NO: 173649 - DNA, 20 bp, synthetic construct
  source 1..20: mol_type = other DNA
tcctaactggagaacccaga

SEQ ID NO: 173650 - DNA, 20 bp, synthetic construct
  source 1..20: mol_type = other DNA
ttcctaactggagaacccag

SEQ ID NO: 173651 - DNA, 20 bp, synthetic construct
  source 1..20: mol_type = other DNA
tttcctaactggagaaccca

SEQ ID NO: 173652 - DNA, 20 bp, synthetic construct
  source 1..20: mol_type = other DNA
gtttcctaactggagaaccc

SEQ ID NO: 173653 - DNA, 20 bp, synthetic construct
  source 1..20: mol_type = other DNA
agtttcctaactggagaacc

SEQ ID NO: 173654 - DNA, 20 bp, synthetic construct
  source 1..20: mol_type = other DNA
aagtttcctaactggagaac

SEQ ID NO: 173655 - DNA, 20 bp, synthetic construct
  source 1..20: mol_type = other DNA
aaagtttcctaactggagaa

SEQ ID NO: 173656 - DNA, 20 bp, synthetic construct
  source 1..20: mol_type = other DNA
gaaagtttcctaactggaga

SEQ ID NO: 173657 - DNA, 20 bp, synthetic construct
  source 1..20: mol_type = other DNA
agaaagtttcctaactggag

SEQ ID NO: 173658 - DNA, 20 bp, synthetic construct
  source 1..20: mol_type = other DNA
cagaaagtttcctaactgga

SEQ ID NO: 173659 - DNA, 20 bp, synthetic construct
  source 1..20: mol_type = other DNA
acagaaagtttcctaactgg

SEQ ID NO: 173660 - DNA, 20 bp, synthetic construct
  source 1..20: mol_type = other DNA
tacagaaagtttcctaactg

SEQ ID NO: 173661 - DNA, 20 bp, synthetic construct
  source 1..20: mol_type = other DNA
ttacagaaagtttcctaact

SEQ ID NO: 173662 - DNA, 20 bp, synthetic construct
  source 1..20: mol_type = other DNA
cttacagaaagtttcctaac

SEQ ID NO: 173663 - DNA, 20 bp, synthetic construct
  source 1..20: mol_type = other DNA
gcttacagaaagtttcctaa

SEQ ID NO: 173664 - DNA, 20 bp, synthetic construct
  source 1..20: mol_type = other DNA
tgcttacagaaagtttccta

SEQ ID NO: 173665 - DNA, 20 bp, synthetic construct
  source 1..20: mol_type = other DNA
atgcttacagaaagtttcct

SEQ ID NO: 173666 - DNA, 20 bp, synthetic construct
  source 1..20: mol_type = other DNA
catgcttacagaaagtttcc

SEQ ID NO: 173667 - DNA, 20 bp, synthetic construct
  source 1..20: mol_type = other DNA
gcatgcttacagaaagtttc

SEQ ID NO: 173668 - DNA, 20 bp, synthetic construct
  source 1..20: mol_type = other DNA
tgcatgcttacagaaagttt

SEQ ID NO: 173669 - DNA, 20 bp, synthetic construct
  source 1..20: mol_type = other DNA
ctgcatgcttacagaaagtt

SEQ ID NO: 173670 - DNA, 20 bp, synthetic construct
  source 1..20: mol_type = other DNA
tctgcatgcttacagaaagt

SEQ ID NO: 173671 - DNA, 20 bp, synthetic construct
  source 1..20: mol_type = other DNA
atctgcatgcttacagaaag

SEQ ID NO: 173672 - DNA, 20 bp, synthetic construct
  source 1..20: mol_type = other DNA
tatctgcatgcttacagaaa

SEQ ID NO: 173673 - DNA, 20 bp, synthetic construct
  source 1..20: mol_type = other DNA
ctatctgcatgcttacagaa

SEQ ID NO: 173674 - DNA, 20 bp, synthetic construct
  source 1..20: mol_type = other DNA
tctatctgcatgcttacaga

SEQ ID NO: 173675 - DNA, 20 bp, synthetic construct
  source 1..20: mol_type = other DNA
ttctatctgcatgcttacag

SEQ ID NO: 173676 - DNA, 20 bp, synthetic construct
  source 1..20: mol_type = other DNA
attctatctgcatgcttaca

SEQ ID NO: 173677 - DNA, 20 bp, synthetic construct
  source 1..20: mol_type = other DNA
cattctatctgcatgcttac

SEQ ID NO: 173678 - DNA, 20 bp, synthetic construct
  source 1..20: mol_type = other DNA
ccattctatctgcatgctta

SEQ ID NO: 173679 - DNA, 20 bp, synthetic construct
  source 1..20: mol_type = other DNA
cccattctatctgcatgctt

SEQ ID NO: 173680 - DNA, 20 bp, synthetic construct
  source 1..20: mol_type = other DNA
gcccattctatctgcatgct

SEQ ID NO: 173681 - DNA, 20 bp, synthetic construct
  source 1..20: mol_type = other DNA
agcccattctatctgcatgc

SEQ ID NO: 173682 - DNA, 20 bp, synthetic construct
  source 1..20: mol_type = other DNA
aagcccattctatctgcatg

SEQ ID NO: 173683 - DNA, 20 bp, synthetic construct
  source 1..20: mol_type = other DNA
gaagcccattctatctgcat

SEQ ID NO: 173684 - DNA, 20 bp, synthetic construct
  source 1..20: mol_type = other DNA
tgaagcccattctatctgca

SEQ ID NO: 173685 - DNA, 20 bp, synthetic construct
  source 1..20: mol_type = other DNA
ctgaagcccattctatctgc

SEQ ID NO: 173686 - DNA, 20 bp, synthetic construct
  source 1..20: mol_type = other DNA
gctgaagcccattctatctg

SEQ ID NO: 173687 - DNA, 20 bp, synthetic construct
  source 1..20: mol_type = other DNA
tgctgaagcccattctatct

SEQ ID NO: 173688 - DNA, 20 bp, synthetic construct
  source 1..20: mol_type = other DNA
ttgctgaagcccattctatc

SEQ ID NO: 173689 - DNA, 20 bp, synthetic construct
  source 1..20: mol_type = other DNA
tttgctgaagcccattctat

SEQ ID NO: 173690 - DNA, 20 bp, synthetic construct
  source 1..20: mol_type = other DNA
ttttgctgaagcccattcta

SEQ ID NO: 173691 - DNA, 20 bp, synthetic construct
  source 1..20: mol_type = other DNA
attttgctgaagcccattct

SEQ ID NO: 173692 - DNA, 20 bp, synthetic construct
  source 1..20: mol_type = other DNA
tattttgctgaagcccattc

SEQ ID NO: 173693 - DNA, 20 bp, synthetic construct
  source 1..20: mol_type = other DNA
gtattttgctgaagcccatt

SEQ ID NO: 173694 - DNA, 20 bp, synthetic construct
  source 1..20: mol_type = other DNA
tgtattttgctgaagcccat

SEQ ID NO: 173695 - DNA, 20 bp, synthetic construct
  source 1..20: mol_type = other DNA
ttgtattttgctgaagccca

SEQ ID NO: 173696 - DNA, 20 bp, synthetic construct
  source 1..20: mol_type = other DNA
tttgtattttgctgaagccc

SEQ ID NO: 173697 - DNA, 20 bp, synthetic construct
  source 1..20: mol_type = other DNA
gtttgtattttgctgaagcc

SEQ ID NO: 173698 - DNA, 20 bp, synthetic construct
  source 1..20: mol_type = other DNA
agtttgtattttgctgaagc

SEQ ID NO: 173699 - DNA, 20 bp, synthetic construct
  source 1..20: mol_type = other DNA
gagtttgtattttgctgaag

SEQ ID NO: 173700 - DNA, 20 bp, synthetic construct
  source 1..20: mol_type = other DNA
cgagtttgtattttgctgaa

SEQ ID NO: 173701 - DNA, 20 bp, synthetic construct
  source 1..20: mol_type = other DNA
tcgagtttgtattttgctga

SEQ ID NO: 173702 - DNA, 20 bp, synthetic construct
  source 1..20: mol_type = other DNA
ttcgagtttgtattttgctg

SEQ ID NO: 173703 - DNA, 20 bp, synthetic construct
  source 1..20: mol_type = other DNA
gttcgagtttgtattttgct

SEQ ID NO: 173704 - DNA, 20 bp, synthetic construct
  source 1..20: mol_type = other DNA
tgttcgagtttgtattttgc

SEQ ID NO: 173705 - DNA, 20 bp, synthetic construct
  source 1..20: mol_type = other DNA
ttgttcgagtttgtattttg

SEQ ID NO: 173706 - DNA, 20 bp, synthetic construct
  source 1..20: mol_type = other DNA
gttgttcgagtttgtatttt

SEQ ID NO: 173707 - DNA, 20 bp, synthetic construct
  source 1..20: mol_type = other DNA
agttgttcgagtttgtattt

SEQ ID NO: 173708 - DNA, 20 bp, synthetic construct
  source 1..20: mol_type = other DNA
aagttgttcgagtttgtatt

SEQ ID NO: 173709 - DNA, 20 bp, synthetic construct
  source 1..20: mol_type = other DNA
gaagttgttcgagtttgtat

SEQ ID NO: 173710 - DNA, 20 bp, synthetic construct
  source 1..20: mol_type = other DNA
ggaagttgttcgagtttgta

SEQ ID NO: 173711 - DNA, 20 bp, synthetic construct
  source 1..20: mol_type = other DNA
tggaagttgttcgagtttgt

SEQ ID NO: 173712 - DNA, 20 bp, synthetic construct
  source 1..20: mol_type = other DNA
atggaagttgttcgagtttg

SEQ ID NO: 173713 - DNA, 20 bp, synthetic construct
  source 1..20: mol_type = other DNA
catggaagttgttcgagttt

SEQ ID NO: 173714 - DNA, 20 bp, synthetic construct
  source 1..20: mol_type = other DNA
acatggaagttgttcgagtt

SEQ ID NO: 173715 - DNA, 20 bp, synthetic construct
  source 1..20: mol_type = other DNA
tacatggaagttgttcgagt

SEQ ID NO: 173716 - DNA, 20 bp, synthetic construct
  source 1..20: mol_type = other DNA
atacatggaagttgttcgag

SEQ ID NO: 173717 - DNA, 20 bp, synthetic construct
  source 1..20: mol_type = other DNA
tatacatggaagttgttcga

SEQ ID NO: 173718 - DNA, 20 bp, synthetic construct
  source 1..20: mol_type = other DNA
ctatacatggaagttgttcg

SEQ ID NO: 173719 - DNA, 20 bp, synthetic construct
  source 1..20: mol_type = other DNA
actatacatggaagttgttc

SEQ ID NO: 173720 - DNA, 20 bp, synthetic construct
  source 1..20: mol_type = other DNA
gactatacatggaagttgtt

SEQ ID NO: 173721 - DNA, 20 bp, synthetic construct
  source 1..20: mol_type = other DNA
ggactatacatggaagttgt

SEQ ID NO: 173722 - DNA, 20 bp, synthetic construct
  source 1..20: mol_type = other DNA
gggactatacatggaagttg

SEQ ID NO: 173723 - DNA, 20 bp, synthetic construct
  source 1..20: mol_type = other DNA
agggactatacatggaagtt

SEQ ID NO: 173724 - DNA, 20 bp, synthetic construct
  source 1..20: mol_type = other DNA
aagggactatacatggaagt

SEQ ID NO: 173725 - DNA, 20 bp, synthetic construct
  source 1..20: mol_type = other DNA
taagggactatacatggaag

SEQ ID NO: 173726 - DNA, 20 bp, synthetic construct
  source 1..20: mol_type = other DNA
ttaagggactatacatggaa

SEQ ID NO: 173727 - DNA, 20 bp, synthetic construct
  source 1..20: mol_type = other DNA
attaagggactatacatgga

SEQ ID NO: 173728 - DNA, 20 bp, synthetic construct
  source 1..20: mol_type = other DNA
aattaagggactatacatgg

SEQ ID NO: 173729 - DNA, 20 bp, synthetic construct
  source 1..20: mol_type = other DNA
aaattaagggactatacatg

SEQ ID NO: 173730 - DNA, 20 bp, synthetic construct
  source 1..20: mol_type = other DNA
aaaattaagggactatacat

SEQ ID NO: 173731 - DNA, 20 bp, synthetic construct
  source 1..20: mol_type = other DNA
gaaaattaagggactataca

SEQ ID NO: 173732 - DNA, 20 bp, synthetic construct
  source 1..20: mol_type = other DNA
agaaaattaagggactatac

SEQ ID NO: 173733 - DNA, 20 bp, synthetic construct
  source 1..20: mol_type = other DNA
aagaaaattaagggactata

SEQ ID NO: 173734 - DNA, 20 bp, synthetic construct
  source 1..20: mol_type = other DNA
aaagaaaattaagggactat

SEQ ID NO: 173735 - DNA, 20 bp, synthetic construct
  source 1..20: mol_type = other DNA
caaagaaaattaagggacta

SEQ ID NO: 173736 - DNA, 20 bp, synthetic construct
  source 1..20: mol_type = other DNA
gcaaagaaaattaagggact

SEQ ID NO: 173737 - DNA, 20 bp, synthetic construct
  source 1..20: mol_type = other DNA
agcaaagaaaattaagggac

SEQ ID NO: 173738 - DNA, 20 bp, synthetic construct
  source 1..20: mol_type = other DNA
aagcaaagaaaattaaggga

SEQ ID NO: 173739 - DNA, 20 bp, synthetic construct
  source 1..20: mol_type = other DNA
aaagcaaagaaaattaaggg

SEQ ID NO: 173740 - DNA, 20 bp, synthetic construct
  source 1..20: mol_type = other DNA
aaaagcaaagaaaattaagg

SEQ ID NO: 173741 - DNA, 20 bp, synthetic construct
  source 1..20: mol_type = other DNA
aaaaagcaaagaaaattaag

SEQ ID NO: 173742 - DNA, 20 bp, synthetic construct
  source 1..20: mol_type = other DNA
aaaaaagcaaagaaaattaa

SEQ ID NO: 173743 - DNA, 20 bp, synthetic construct
  source 1..20: mol_type = other DNA
gaaaaaagcaaagaaaatta

SEQ ID NO: 173744 - DNA, 20 bp, synthetic construct
  source 1..20: mol_type = other DNA
tgaaaaaagcaaagaaaatt

SEQ ID NO: 173745 - DNA, 20 bp, synthetic construct
  source 1..20: mol_type = other DNA
atgaaaaaagcaaagaaaat

SEQ ID NO: 173746 - DNA, 20 bp, synthetic construct
  source 1..20: mol_type = other DNA
tatgaaaaaagcaaagaaaa

SEQ ID NO: 173747 - DNA, 20 bp, synthetic construct
  source 1..20: mol_type = other DNA
atatgaaaaaagcaaagaaa

SEQ ID NO: 173748 - DNA, 20 bp, synthetic construct
  source 1..20: mol_type = other DNA
aatatgaaaaaagcaaagaa

SEQ ID NO: 173749 - DNA, 20 bp, synthetic construct
  source 1..20: mol_type = other DNA
aaatatgaaaaaagcaaaga

SEQ ID NO: 173750 - DNA, 20 bp, synthetic construct
  source 1..20: mol_type = other DNA
gaaatatgaaaaaagcaaag

SEQ ID NO: 173751 - DNA, 20 bp, synthetic construct
  source 1..20: mol_type = other DNA
tgaaatatgaaaaaagcaaa

SEQ ID NO: 173752 - DNA, 20 bp, synthetic construct
  source 1..20: mol_type = other DNA
atgaaatatgaaaaaagcaa

SEQ ID NO: 173753 - DNA, 20 bp, synthetic construct
  source 1..20: mol_type = other DNA
gatgaaatatgaaaaaagca

SEQ ID NO: 173754 - DNA, 20 bp, synthetic construct
  source 1..20: mol_type = other DNA
tgatgaaatatgaaaaaagc

SEQ ID NO: 173755 - DNA, 20 bp, synthetic construct
  source 1..20: mol_type = other DNA
ctgatgaaatatgaaaaaag

SEQ ID NO: 173756 - DNA, 20 bp, synthetic construct
  source 1..20: mol_type = other DNA
cctgatgaaatatgaaaaaa

SEQ ID NO: 173757 - DNA, 20 bp, synthetic construct
  source 1..20: mol_type = other DNA
gcctgatgaaatatgaaaaa

SEQ ID NO: 173758 - DNA, 20 bp, synthetic construct
  source 1..20: mol_type = other DNA
agcctgatgaaatatgaaaa

SEQ ID NO: 173759 - DNA, 20 bp, synthetic construct
  source 1..20: mol_type = other DNA
gagcctgatgaaatatgaaa

SEQ ID NO: 173760 - DNA, 20 bp, synthetic construct
  source 1..20: mol_type = other DNA
ggagcctgatgaaatatgaa

SEQ ID NO: 173761 - DNA, 20 bp, synthetic construct
  source 1..20: mol_type = other DNA
tggagcctgatgaaatatga

SEQ ID NO: 173762 - DNA, 20 bp, synthetic construct
  source 1..20: mol_type = other DNA
atggagcctgatgaaatatg

SEQ ID NO: 173763 - DNA, 20 bp, synthetic construct
  source 1..20: mol_type = other DNA
catggagcctgatgaaatat

SEQ ID NO: 173764 - DNA, 20 bp, synthetic construct
  source 1..20: mol_type = other DNA
gcatggagcctgatgaaata

SEQ ID NO: 173765 - DNA, 20 bp, synthetic construct
  source 1..20: mol_type = other DNA
agcatggagcctgatgaaat

SEQ ID NO: 173766 - DNA, 20 bp, synthetic construct
  source 1..20: mol_type = other DNA
cagcatggagcctgatgaaa

SEQ ID NO: 173767 - DNA, 20 bp, synthetic construct
  source 1..20: mol_type = other DNA
tcagcatggagcctgatgaa

SEQ ID NO: 173768 - DNA, 20 bp, synthetic construct
  source 1..20: mol_type = other DNA
ctcagcatggagcctgatga

SEQ ID NO: 173769 - DNA, 20 bp, synthetic construct
  source 1..20: mol_type = other DNA
gctcagcatggagcctgatg

SEQ ID NO: 173770 - DNA, 20 bp, synthetic construct
  source 1..20: mol_type = other DNA
ggctcagcatggagcctgat

SEQ ID NO: 173771 - DNA, 20 bp, synthetic construct
  source 1..20: mol_type = other DNA
gggctcagcatggagcctga

SEQ ID NO: 173772 - DNA, 20 bp, synthetic construct
  source 1..20: mol_type = other DNA
tgggctcagcatggagcctg

SEQ ID NO: 173773 - DNA, 20 bp, synthetic construct
  source 1..20: mol_type = other DNA
ttgggctcagcatggagcct

SEQ ID NO: 173774 - DNA, 20 bp, synthetic construct
  source 1..20: mol_type = other DNA
attgggctcagcatggagcc

SEQ ID NO: 173775 - DNA, 20 bp, synthetic construct
  source 1..20: mol_type = other DNA
gattgggctcagcatggagc

SEQ ID NO: 173776 - DNA, 20 bp, synthetic construct
  source 1..20: mol_type = other DNA
tgattgggctcagcatggag

SEQ ID NO: 173777 - DNA, 20 bp, synthetic construct
  source 1..20: mol_type = other DNA
ctgattgggctcagcatgga

SEQ ID NO: 173778 - DNA, 20 bp, synthetic construct
  source 1..20: mol_type = other DNA
cctgattgggctcagcatgg

SEQ ID NO: 173779 - DNA, 20 bp, synthetic construct
  source 1..20: mol_type = other DNA
ccctgattgggctcagcatg

SEQ ID NO: 173780 - DNA, 20 bp, synthetic construct
  source 1..20: mol_type = other DNA
tccctgattgggctcagcat

SEQ ID NO: 173781 - DNA, 20 bp, synthetic construct
  source 1..20: mol_type = other DNA
gtccctgattgggctcagca

SEQ ID NO: 173782 - DNA, 20 bp, synthetic construct
  source 1..20: mol_type = other DNA
ggtccctgattgggctcagc

SEQ ID NO: 173783 - DNA, 20 bp, synthetic construct
  source 1..20: mol_type = other DNA
gggtccctgattgggctcag

SEQ ID NO: 173784 - DNA, 20 bp, synthetic construct
  source 1..20: mol_type = other DNA
cgggtccctgattgggctca

SEQ ID NO: 173785 - DNA, 20 bp, synthetic construct
  source 1..20: mol_type = other DNA
tcgggtccctgattgggctc

SEQ ID NO: 173786 - DNA, 20 bp, synthetic construct
  source 1..20: mol_type = other DNA
atcgggtccctgattgggct

SEQ ID NO: 173787 - DNA, 20 bp, synthetic construct
  source 1..20: mol_type = other DNA
tatcgggtccctgattgggc

SEQ ID NO: 173788 - DNA, 20 bp, synthetic construct
  source 1..20: mol_type = other DNA
ctatcgggtccctgattggg

SEQ ID NO: 173789 - DNA, 20 bp, synthetic construct
  source 1..20: mol_type = other DNA
tctatcgggtccctgattgg

SEQ ID NO: 173790 - DNA, 20 bp, synthetic construct
  source 1..20: mol_type = other DNA
ttctatcgggtccctgattg

SEQ ID NO: 173791 - DNA, 20 bp, synthetic construct
  source 1..20: mol_type = other DNA
tttctatcgggtccctgatt

SEQ ID NO: 173792 - DNA, 20 bp, synthetic construct
  source 1..20: mol_type = other DNA
atttctatcgggtccctgat

SEQ ID NO: 173793 - DNA, 20 bp, synthetic construct
  source 1..20: mol_type = other DNA
gatttctatcgggtccctga

SEQ ID NO: 173794 - DNA, 20 bp, synthetic construct
  source 1..20: mol_type = other DNA
ggatttctatcgggtccctg

SEQ ID NO: 173795 - DNA, 20 bp, synthetic construct
  source 1..20: mol_type = other DNA
tggatttctatcgggtccct

SEQ ID NO: 173796 - DNA, 20 bp, synthetic construct
  source 1..20: mol_type = other DNA
ttggatttctatcgggtccc

SEQ ID NO: 173797 - DNA, 20 bp, synthetic construct
  source 1..20: mol_type = other DNA
tttggatttctatcgggtcc

SEQ ID NO: 173798 - DNA, 20 bp, synthetic construct
  source 1..20: mol_type = other DNA
gtttggatttctatcgggtc

SEQ ID NO: 173799 - DNA, 20 bp, synthetic construct
  source 1..20: mol_type = other DNA
tgtttggatttctatcgggt

SEQ ID NO: 173800 - DNA, 20 bp, synthetic construct
  source 1..20: mol_type = other DNA
gtgtttggatttctatcggg

SEQ ID NO: 173801 - DNA, 20 bp, synthetic construct
  source 1..20: mol_type = other DNA
ggtgtttggatttctatcgg

SEQ ID NO: 173802 - DNA, 20 bp, synthetic construct
  source 1..20: mol_type = other DNA
tggtgtttggatttctatcg

SEQ ID NO: 173803 - DNA, 20 bp, synthetic construct
  source 1..20: mol_type = other DNA
atggtgtttggatttctatc

SEQ ID NO: 173804 - DNA, 20 bp, synthetic construct
  source 1..20: mol_type = other DNA
catggtgtttggatttctat

SEQ ID NO: 173805 - DNA, 20 bp, synthetic construct
  source 1..20: mol_type = other DNA
acatggtgtttggatttcta

SEQ ID NO: 173806 - DNA, 20 bp, synthetic construct
  source 1..20: mol_type = other DNA
gacatggtgtttggatttct

SEQ ID NO: 173807 - DNA, 20 bp, synthetic construct
  source 1..20: mol_type = other DNA
tgacatggtgtttggatttc

SEQ ID NO: 173808 - DNA, 20 bp, synthetic construct
  source 1..20: mol_type = other DNA
ctgacatggtgtttggattt

SEQ ID NO: 173809 - DNA, 20 bp, synthetic construct
  source 1..20: mol_type = other DNA
gctgacatggtgtttggatt

SEQ ID NO: 173810 - DNA, 20 bp, synthetic construct
  source 1..20: mol_type = other DNA
cgctgacatggtgtttggat

SEQ ID NO: 173811 - DNA, 20 bp, synthetic construct
  source 1..20: mol_type = other DNA
tcgctgacatggtgtttgga

SEQ ID NO: 173812 - DNA, 20 bp, synthetic construct
  source 1..20: mol_type = other DNA
ctcgctgacatggtgtttgg

SEQ ID NO: 173813 - DNA, 20 bp, synthetic construct
  source 1..20: mol_type = other DNA
actcgctgacatggtgtttg

SEQ ID NO: 173814 - DNA, 20 bp, synthetic construct
  source 1..20: mol_type = other DNA
gactcgctgacatggtgttt

SEQ ID NO: 173815 - DNA, 20 bp, synthetic construct
  source 1..20: mol_type = other DNA
ggactcgctgacatggtgtt

SEQ ID NO: 173816 - DNA, 20 bp, synthetic construct
  source 1..20: mol_type = other DNA
gggactcgctgacatggtgt

SEQ ID NO: 173817 - DNA, 20 bp, synthetic construct
  source 1..20: mol_type = other DNA
ggggactcgctgacatggtg

SEQ ID NO: 173818 - DNA, 20 bp, synthetic construct
  source 1..20: mol_type = other DNA
tggggactcgctgacatggt

SEQ ID NO: 173819 - DNA, 20 bp, synthetic construct
  source 1..20: mol_type = other DNA
ttggggactcgctgacatgg

SEQ ID NO: 173820 - DNA, 20 bp, synthetic construct
  source 1..20: mol_type = other DNA
cttggggactcgctgacatg

SEQ ID NO: 173821 - DNA, 20 bp, synthetic construct
  source 1..20: mol_type = other DNA
tcttggggactcgctgacat

SEQ ID NO: 173822 - DNA, 20 bp, synthetic construct
  source 1..20: mol_type = other DNA
ttcttggggactcgctgaca

SEQ ID NO: 173823 - DNA, 20 bp, synthetic construct
  source 1..20: mol_type = other DNA
tttcttggggactcgctgac

SEQ ID NO: 173824 - DNA, 20 bp, synthetic construct
  source 1..20: mol_type = other DNA
atttcttggggactcgctga

SEQ ID NO: 173825 - DNA, 20 bp, synthetic construct
  source 1..20: mol_type = other DNA
catttcttggggactcgctg

SEQ ID NO: 173826 - DNA, 20 bp, synthetic construct
  source 1..20: mol_type = other DNA
gcatttcttggggactcgct

SEQ ID NO: 173827 - DNA, 20 bp, synthetic construct
  source 1..20: mol_type = other DNA
tgcatttcttggggactcgc

SEQ ID NO: 173828 - DNA, 20 bp, synthetic construct
  source 1..20: mol_type = other DNA
atgcatttcttggggactcg

SEQ ID NO: 173829 - DNA, 20 bp, synthetic construct
  source 1..20: mol_type = other DNA
aatgcatttcttggggactc

SEQ ID NO: 173830 - DNA, 20 bp, synthetic construct
  source 1..20: mol_type = other DNA
aaatgcatttcttggggact

SEQ ID NO: 173831 - DNA, 20 bp, synthetic construct
  source 1..20: mol_type = other DNA
aaaatgcatttcttggggac

SEQ ID NO: 173832 - DNA, 20 bp, synthetic construct
  source 1..20: mol_type = other DNA
caaaatgcatttcttgggga

SEQ ID NO: 173833 - DNA, 20 bp, synthetic construct
  source 1..20: mol_type = other DNA
acaaaatgcatttcttgggg

SEQ ID NO: 173834 - DNA, 20 bp, synthetic construct
  source 1..20: mol_type = other DNA
cacaaaatgcatttcttggg

SEQ ID NO: 173835 - DNA, 20 bp, synthetic construct
  source 1..20: mol_type = other DNA
gcacaaaatgcatttcttgg

SEQ ID NO: 173836 - DNA, 20 bp, synthetic construct
  source 1..20: mol_type = other DNA
ggcacaaaatgcatttcttg

SEQ ID NO: 173837 - DNA, 20 bp, synthetic construct
  source 1..20: mol_type = other DNA
tggcacaaaatgcatttctt

SEQ ID NO: 173838 - DNA, 20 bp, synthetic construct
  source 1..20: mol_type = other DNA
ttggcacaaaatgcatttct

SEQ ID NO: 173839 - DNA, 20 bp, synthetic construct
  source 1..20: mol_type = other DNA
cttggcacaaaatgcatttc

SEQ ID NO: 173840 - DNA, 20 bp, synthetic construct
  source 1..20: mol_type = other DNA
ccttggcacaaaatgcattt

SEQ ID NO: 173841 - DNA, 20 bp, synthetic construct
  source 1..20: mol_type = other DNA
gccttggcacaaaatgcatt

SEQ ID NO: 173842 - DNA, 20 bp, synthetic construct
  source 1..20: mol_type = other DNA
agccttggcacaaaatgcat

SEQ ID NO: 173843 - DNA, 20 bp, synthetic construct
  source 1..20: mol_type = other DNA
tagccttggcacaaaatgca

SEQ ID NO: 173844 - DNA, 20 bp, synthetic construct
  source 1..20: mol_type = other DNA
atagccttggcacaaaatgc

SEQ ID NO: 173845 - DNA, 20 bp, synthetic construct
  source 1..20: mol_type = other DNA
aatagccttggcacaaaatg

SEQ ID NO: 173846 - DNA, 20 bp, synthetic construct
  source 1..20: mol_type = other DNA
gaatagccttggcacaaaat

SEQ ID NO: 173847 - DNA, 20 bp, synthetic construct
  source 1..20: mol_type = other DNA
tgaatagccttggcacaaaa

SEQ ID NO: 173848 - DNA, 20 bp, synthetic construct
  source 1..20: mol_type = other DNA
ttgaatagccttggcacaaa

SEQ ID NO: 173849 - DNA, 20 bp, synthetic construct
  source 1..20: mol_type = other DNA
cttgaatagccttggcacaa

SEQ ID NO: 173850 - DNA, 20 bp, synthetic construct
  source 1..20: mol_type = other DNA
ccttgaatagccttggcaca

SEQ ID NO: 173851 - DNA, 20 bp, synthetic construct
  source 1..20: mol_type = other DNA
tccttgaatagccttggcac

SEQ ID NO: 173852 - DNA, 20 bp, synthetic construct
  source 1..20: mol_type = other DNA
ttccttgaatagccttggca

SEQ ID NO: 173853 - DNA, 20 bp, synthetic construct
  source 1..20: mol_type = other DNA
cttccttgaatagccttggc

SEQ ID NO: 173854 - DNA, 20 bp, synthetic construct
  source 1..20: mol_type = other DNA
ccttccttgaatagccttgg

SEQ ID NO: 173855 - DNA, 20 bp, synthetic construct
  source 1..20: mol_type = other DNA
accttccttgaatagccttg

SEQ ID NO: 173856 - DNA, 20 bp, synthetic construct
  source 1..20: mol_type = other DNA
aaccttccttgaatagcctt

SEQ ID NO: 173857 - DNA, 20 bp, synthetic construct
  source 1..20: mol_type = other DNA
aaaccttccttgaatagcct

SEQ ID NO: 173858 - DNA, 20 bp, synthetic construct
  source 1..20: mol_type = other DNA
caaaccttccttgaatagcc

SEQ ID NO: 173859 - DNA, 20 bp, synthetic construct
  source 1..20: mol_type = other DNA
ccaaaccttccttgaatagc

SEQ ID NO: 173860 - DNA, 20 bp, synthetic construct
  source 1..20: mol_type = other DNA
cccaaaccttccttgaatag

SEQ ID NO: 173861 - DNA, 20 bp, synthetic construct
  source 1..20: mol_type = other DNA
tcccaaaccttccttgaata

SEQ ID NO: 173862 - DNA, 20 bp, synthetic construct
  source 1..20: mol_type = other DNA
ctcccaaaccttccttgaat

SEQ ID NO: 173863 - DNA, 20 bp, synthetic construct
  source 1..20: mol_type = other DNA
gctcccaaaccttccttgaa

SEQ ID NO: 173864 - DNA, 20 bp, synthetic construct
  source 1..20: mol_type = other DNA
tgctcccaaaccttccttga

SEQ ID NO: 173865 - DNA, 20 bp, synthetic construct
  source 1..20: mol_type = other DNA
ctgctcccaaaccttccttg

SEQ ID NO: 173866 - DNA, 20 bp, synthetic construct
  source 1..20: mol_type = other DNA
gctgctcccaaaccttcctt

SEQ ID NO: 173867 - DNA, 20 bp, synthetic construct
  source 1..20: mol_type = other DNA
agctgctcccaaaccttcct

SEQ ID NO: 173868 - DNA, 20 bp, synthetic construct
  source 1..20: mol_type = other DNA
gagctgctcccaaaccttcc

SEQ ID NO: 173869 - DNA, 20 bp, synthetic construct
  source 1..20: mol_type = other DNA
tgagctgctcccaaaccttc

SEQ ID NO: 173870 - DNA, 20 bp, synthetic construct
  source 1..20: mol_type = other DNA
ttgagctgctcccaaacctt

SEQ ID NO: 173871 - DNA, 20 bp, synthetic construct
  source 1..20: mol_type = other DNA
cttgagctgctcccaaacct

SEQ ID NO: 173872 - DNA, 20 bp, synthetic construct
  source 1..20: mol_type = other DNA
ccttgagctgctcccaaacc

SEQ ID NO: 173873 - DNA, 20 bp, synthetic construct
  source 1..20: mol_type = other DNA
cccttgagctgctcccaaac

SEQ ID NO: 173874 - DNA, 20 bp, synthetic construct
  source 1..20: mol_type = other DNA
gcccttgagctgctcccaaa

SEQ ID NO: 173875 - DNA, 20 bp, synthetic construct
  source 1..20: mol_type = other DNA
tgcccttgagctgctcccaa

SEQ ID NO: 173876 - DNA, 20 bp, synthetic construct
  source 1..20: mol_type = other DNA
ctgcccttgagctgctccca

SEQ ID NO: 173877 - DNA, 20 bp, synthetic construct
  source 1..20: mol_type = other DNA
tctgcccttgagctgctccc

SEQ ID NO: 173878 - DNA, 20 bp, synthetic construct
  source 1..20: mol_type = other DNA
gtctgcccttgagctgctcc

SEQ ID NO: 173879 - DNA, 20 bp, synthetic construct
  source 1..20: mol_type = other DNA
tgtctgcccttgagctgctc

SEQ ID NO: 173880 - DNA, 20 bp, synthetic construct
  source 1..20: mol_type = other DNA
gtgtctgcccttgagctgct

SEQ ID NO: 173881 - DNA, 20 bp, synthetic construct
  source 1..20: mol_type = other DNA
agtgtctgcccttgagctgc

SEQ ID NO: 173882 - DNA, 20 bp, synthetic construct
  source 1..20: mol_type = other DNA
cagtgtctgcccttgagctg

SEQ ID NO: 173883 - DNA, 20 bp, synthetic construct
  source 1..20: mol_type = other DNA
acagtgtctgcccttgagct

SEQ ID NO: 173884 - DNA, 20 bp, synthetic construct
  source 1..20: mol_type = other DNA
aacagtgtctgcccttgagc

SEQ ID NO: 173885 - DNA, 20 bp, synthetic construct
  source 1..20: mol_type = other DNA
taacagtgtctgcccttgag

SEQ ID NO: 173886 - DNA, 20 bp, synthetic construct
  source 1..20: mol_type = other DNA
gtaacagtgtctgcccttga

SEQ ID NO: 173887 - DNA, 20 bp, synthetic construct
  source 1..20: mol_type = other DNA
ggtaacagtgtctgcccttg

SEQ ID NO: 173888 - DNA, 20 bp, synthetic construct
  source 1..20: mol_type = other DNA
gggtaacagtgtctgccctt

SEQ ID NO: 173889 - DNA, 20 bp, synthetic construct
  source 1..20: mol_type = other DNA
agggtaacagtgtctgccct

SEQ ID NO: 173890 - DNA, 20 bp, synthetic construct
  source 1..20: mol_type = other DNA
gagggtaacagtgtctgccc

SEQ ID NO: 173891 - DNA, 20 bp, synthetic construct
  source 1..20: mol_type = other DNA
ggagggtaacagtgtctgcc

SEQ ID NO: 173892 - DNA, 20 bp, synthetic construct
  source 1..20: mol_type = other DNA
gggagggtaacagtgtctgc

SEQ ID NO: 173893 - DNA, 20 bp, synthetic construct
  source 1..20: mol_type = other DNA
ggggagggtaacagtgtctg

SEQ ID NO: 173894 - DNA, 20 bp, synthetic construct
  source 1..20: mol_type = other DNA
gggggagggtaacagtgtct

SEQ ID NO: 173895 - DNA, 20 bp, synthetic construct
  source 1..20: mol_type = other DNA
tgggggagggtaacagtgtc

SEQ ID NO: 173896 - DNA, 20 bp, synthetic construct
  source 1..20: mol_type = other DNA
ctgggggagggtaacagtgt

SEQ ID NO: 173897 - DNA, 20 bp, synthetic construct
  source 1..20: mol_type = other DNA
cctgggggagggtaacagtg

SEQ ID NO: 173898 - DNA, 20 bp, synthetic construct
  source 1..20: mol_type = other DNA
acctgggggagggtaacagt

SEQ ID NO: 173899 - DNA, 20 bp, synthetic construct
  source 1..20: mol_type = other DNA
gacctgggggagggtaacag

SEQ ID NO: 173900 - DNA, 20 bp, synthetic construct
  source 1..20: mol_type = other DNA
ggacctgggggagggtaaca

SEQ ID NO: 173901 - DNA, 20 bp, synthetic construct
  source 1..20: mol_type = other DNA
gggacctgggggagggtaac

SEQ ID NO: 173902 - DNA, 20 bp, synthetic construct
  source 1..20: mol_type = other DNA
ggggacctgggggagggtaa

SEQ ID NO: 173903 - DNA, 20 bp, synthetic construct
  source 1..20: mol_type = other DNA
tggggacctgggggagggta

SEQ ID NO: 173904 - DNA, 20 bp, synthetic construct
  source 1..20: mol_type = other DNA
ctggggacctgggggagggt

SEQ ID NO: 173905 - DNA, 20 bp, synthetic construct
  source 1..20: mol_type = other DNA
actggggacctgggggaggg

SEQ ID NO: 173906 - DNA, 20 bp, synthetic construct
  source 1..20: mol_type = other DNA
cactggggacctgggggagg

SEQ ID NO: 173907 - DNA, 20 bp, synthetic construct
  source 1..20: mol_type = other DNA
gcactggggacctgggggag

SEQ ID NO: 173908 - DNA, 20 bp, synthetic construct
  source 1..20: mol_type = other DNA
tgcactggggacctggggga

SEQ ID NO: 173909 - DNA, 20 bp, synthetic construct
  source 1..20: mol_type = other DNA
ctgcactggggacctggggg

SEQ ID NO: 173910 - DNA, 20 bp, synthetic construct
  source 1..20: mol_type = other DNA
cctgcactggggacctgggg

SEQ ID NO: 173911 - DNA, 20 bp, synthetic construct
  source 1..20: mol_type = other DNA
ccctgcactggggacctggg

SEQ ID NO: 173912 - DNA, 20 bp, synthetic construct
  source 1..20: mol_type = other DNA
gccctgcactggggacctgg

SEQ ID NO: 173913 - DNA, 20 bp, synthetic construct
  source 1..20: mol_type = other DNA
tgccctgcactggggacctg

SEQ ID NO: 173914 - DNA, 20 bp, synthetic construct
  source 1..20: mol_type = other DNA
ctgccctgcactggggacct

SEQ ID NO: 173915 - DNA, 20 bp, synthetic construct
  source 1..20: mol_type = other DNA
actgccctgcactggggacc

SEQ ID NO: 173916 - DNA, 20 bp, synthetic construct
  source 1..20: mol_type = other DNA
cactgccctgcactggggac

SEQ ID NO: 173917 - DNA, 20 bp, synthetic construct
  source 1..20: mol_type = other DNA
acactgccctgcactgggga

SEQ ID NO: 173918 - DNA, 20 bp, synthetic construct
  source 1..20: mol_type = other DNA
aacactgccctgcactgggg

SEQ ID NO: 173919 - DNA, 20 bp, synthetic construct
  source 1..20: mol_type = other DNA
gaacactgccctgcactggg

SEQ ID NO: 173920 - DNA, 20 bp, synthetic construct
  source 1..20: mol_type = other DNA
agaacactgccctgcactgg

SEQ ID NO: 173921 - DNA, 20 bp, synthetic construct
  source 1..20: mol_type = other DNA
cagaacactgccctgcactg

SEQ ID NO: 173922 - DNA, 20 bp, synthetic construct
  source 1..20: mol_type = other DNA
gcagaacactgccctgcact

SEQ ID NO: 173923 - DNA, 20 bp, synthetic construct
  source 1..20: mol_type = other DNA
tgcagaacactgccctgcac

SEQ ID NO: 173924 - DNA, 20 bp, synthetic construct
  source 1..20: mol_type = other DNA
atgcagaacactgccctgca

SEQ ID NO: 173925 - DNA, 20 bp, synthetic construct
  source 1..20: mol_type = other DNA
catgcagaacactgccctgc

SEQ ID NO: 173926 - DNA, 20 bp, synthetic construct
  source 1..20: mol_type = other DNA
acatgcagaacactgccctg

SEQ ID NO: 173927 - DNA, 20 bp, synthetic construct
  source 1..20: mol_type = other DNA
cacatgcagaacactgccct

SEQ ID NO: 173928 - DNA, 20 bp, synthetic construct
  source 1..20: mol_type = other DNA
ccacatgcagaacactgccc

SEQ ID NO: 173929 - DNA, 20 bp, synthetic construct
  source 1..20: mol_type = other DNA
tccacatgcagaacactgcc

SEQ ID NO: 173930 - DNA, 20 bp, synthetic construct
  source 1..20: mol_type = other DNA
ctccacatgcagaacactgc

SEQ ID NO: 173931 - DNA, 20 bp, synthetic construct
  source 1..20: mol_type = other DNA
cctccacatgcagaacactg

SEQ ID NO: 173932 - DNA, 20 bp, synthetic construct
  source 1..20: mol_type = other DNA
gcctccacatgcagaacact

SEQ ID NO: 173933 - DNA, 20 bp, synthetic construct
  source 1..20: mol_type = other DNA
tgcctccacatgcagaacac

SEQ ID NO: 173934 - DNA, 20 bp, synthetic construct
  source 1..20: mol_type = other DNA
ctgcctccacatgcagaaca

SEQ ID NO: 173935 - DNA, 20 bp, synthetic construct
  source 1..20: mol_type = other DNA
actgcctccacatgcagaac

SEQ ID NO: 173936 - DNA, 20 bp, synthetic construct
  source 1..20: mol_type = other DNA
aactgcctccacatgcagaa

SEQ ID NO: 173937 - DNA, 20 bp, synthetic construct
  source 1..20: mol_type = other DNA
aaactgcctccacatgcaga

SEQ ID NO: 173938 - DNA, 20 bp, synthetic construct
  source 1..20: mol_type = other DNA
caaactgcctccacatgcag

SEQ ID NO: 173939 - DNA, 20 bp, synthetic construct
  source 1..20: mol_type = other DNA
ccaaactgcctccacatgca

SEQ ID NO: 173940 - DNA, 20 bp, synthetic construct
  source 1..20: mol_type = other DNA
gccaaactgcctccacatgc

SEQ ID NO: 173941 - DNA, 20 bp, synthetic construct
  source 1..20: mol_type = other DNA
ggccaaactgcctccacatg

SEQ ID NO: 173942 - DNA, 20 bp, synthetic construct
  source 1..20: mol_type = other DNA
aggccaaactgcctccacat

SEQ ID NO: 173943 - DNA, 20 bp, synthetic construct
  source 1..20: mol_type = other DNA
taggccaaactgcctccaca

SEQ ID NO: 173944 - DNA, 20 bp, synthetic construct
  source 1..20: mol_type = other DNA
ttaggccaaactgcctccac

SEQ ID NO: 173945 - DNA, 20 bp, synthetic construct
  source 1..20: mol_type = other DNA
attaggccaaactgcctcca

SEQ ID NO: 173946 - DNA, 20 bp, synthetic construct
  source 1..20: mol_type = other DNA
cattaggccaaactgcctcc

SEQ ID NO: 173947 - DNA, 20 bp, synthetic construct
  source 1..20: mol_type = other DNA
ccattaggccaaactgcctc

SEQ ID NO: 173948 - DNA, 20 bp, synthetic construct
  source 1..20: mol_type = other DNA
accattaggccaaactgcct

SEQ ID NO: 173949 - DNA, 20 bp, synthetic construct
  source 1..20: mol_type = other DNA
aaccattaggccaaactgcc

SEQ ID NO: 173950 - DNA, 20 bp, synthetic construct
  source 1..20: mol_type = other DNA
taaccattaggccaaactgc

SEQ ID NO: 173951 - DNA, 20 bp, synthetic construct
  source 1..20: mol_type = other DNA
ttaaccattaggccaaactg

SEQ ID NO: 173952 - DNA, 20 bp, synthetic construct
  source 1..20: mol_type = other DNA
cttaaccattaggccaaact

SEQ ID NO: 173953 - DNA, 20 bp, synthetic construct
  source 1..20: mol_type = other DNA
ccttaaccattaggccaaac

SEQ ID NO: 173954 - DNA, 20 bp, synthetic construct
  source 1..20: mol_type = other DNA
tccttaaccattaggccaaa

SEQ ID NO: 173955 - DNA, 20 bp, synthetic construct
  source 1..20: mol_type = other DNA
ctccttaaccattaggccaa

SEQ ID NO: 173956 - DNA, 20 bp, synthetic construct
  source 1..20: mol_type = other DNA
cctccttaaccattaggcca

SEQ ID NO: 173957 - DNA, 20 bp, synthetic construct
  source 1..20: mol_type = other DNA
acctccttaaccattaggcc

SEQ ID NO: 173958 - DNA, 20 bp, synthetic construct
  source 1..20: mol_type = other DNA
tacctccttaaccattaggc

SEQ ID NO: 173959 - DNA, 20 bp, synthetic construct
  source 1..20: mol_type = other DNA
ctacctccttaaccattagg

SEQ ID NO: 173960 - DNA, 20 bp, synthetic construct
  source 1..20: mol_type = other DNA
cctacctccttaaccattag

SEQ ID NO: 173961 - DNA, 20 bp, synthetic construct
  source 1..20: mol_type = other DNA
gcctacctccttaaccatta

SEQ ID NO: 173962 - DNA, 20 bp, synthetic construct
  source 1..20: mol_type = other DNA
agcctacctccttaaccatt

SEQ ID NO: 173963 - DNA, 20 bp, synthetic construct
  source 1..20: mol_type = other DNA
gagcctacctccttaaccat

SEQ ID NO: 173964 - DNA, 20 bp, synthetic construct
  source 1..20: mol_type = other DNA
agagcctacctccttaacca

SEQ ID NO: 173965 - DNA, 20 bp, synthetic construct
  source 1..20: mol_type = other DNA
cagagcctacctccttaacc

SEQ ID NO: 173966 - DNA, 20 bp, synthetic construct
  source 1..20: mol_type = other DNA
tcagagcctacctccttaac

SEQ ID NO: 173967 - DNA, 20 bp, synthetic construct
  source 1..20: mol_type = other DNA
atcagagcctacctccttaa

SEQ ID NO: 173968 - DNA, 20 bp, synthetic construct
  source 1..20: mol_type = other DNA
gatcagagcctacctcctta

SEQ ID NO: 173969 - DNA, 20 bp, synthetic construct
  source 1..20: mol_type = other DNA
cgatcagagcctacctcctt

SEQ ID NO: 173970 - DNA, 20 bp, synthetic construct
  source 1..20: mol_type = other DNA
ccgatcagagcctacctcct

SEQ ID NO: 173971 - DNA, 20 bp, synthetic construct
  source 1..20: mol_type = other DNA
cccgatcagagcctacctcc

SEQ ID NO: 173972 - DNA, 20 bp, synthetic construct
  source 1..20: mol_type = other DNA
gcccgatcagagcctacctc

SEQ ID NO: 173973 - DNA, 20 bp, synthetic construct
  source 1..20: mol_type = other DNA
ggcccgatcagagcctacct

SEQ ID NO: 173974 - DNA, 20 bp, synthetic construct
  source 1..20: mol_type = other DNA
aggcccgatcagagcctacc

SEQ ID NO: 173975 - DNA, 20 bp, synthetic construct
  source 1..20: mol_type = other DNA
gaggcccgatcagagcctac

SEQ ID NO: 173976 - DNA, 20 bp, synthetic construct
  source 1..20: mol_type = other DNA
ggaggcccgatcagagccta

SEQ ID NO: 173977 - DNA, 20 bp, synthetic construct
  source 1..20: mol_type = other DNA
aggaggcccgatcagagcct

SEQ ID NO: 173978 - DNA, 20 bp, synthetic construct
  source 1..20: mol_type = other DNA
caggaggcccgatcagagcc

SEQ ID NO: 173979 - DNA, 20 bp, synthetic construct
  source 1..20: mol_type = other DNA
ccaggaggcccgatcagagc

SEQ ID NO: 173980 - DNA, 20 bp, synthetic construct
  source 1..20: mol_type = other DNA
cccaggaggcccgatcagag

SEQ ID NO: 173981 - DNA, 20 bp, synthetic construct
  source 1..20: mol_type = other DNA
gcccaggaggcccgatcaga

SEQ ID NO: 173982 - DNA, 20 bp, synthetic construct
  source 1..20: mol_type = other DNA
tgcccaggaggcccgatcag

SEQ ID NO: 173983 - DNA, 20 bp, synthetic construct
  source 1..20: mol_type = other DNA
gtgcccaggaggcccgatca

SEQ ID NO: 173984 - DNA, 20 bp, synthetic construct
  source 1..20: mol_type = other DNA
tgtgcccaggaggcccgatc

SEQ ID NO: 173985 - DNA, 20 bp, synthetic construct
  source 1..20: mol_type = other DNA
ttgtgcccaggaggcccgat

SEQ ID NO: 173986 - DNA, 20 bp, synthetic construct
  source 1..20: mol_type = other DNA
tttgtgcccaggaggcccga

SEQ ID NO: 173987 - DNA, 20 bp, synthetic construct
  source 1..20: mol_type = other DNA
atttgtgcccaggaggcccg

SEQ ID NO: 173988 - DNA, 20 bp, synthetic construct
  source 1..20: mol_type = other DNA
gatttgtgcccaggaggccc

SEQ ID NO: 173989 - DNA, 20 bp, synthetic construct
  source 1..20: mol_type = other DNA
ggatttgtgcccaggaggcc

SEQ ID NO: 173990 - DNA, 20 bp, synthetic construct
  source 1..20: mol_type = other DNA
gggatttgtgcccaggaggc

SEQ ID NO: 173991 - DNA, 20 bp, synthetic construct
  source 1..20: mol_type = other DNA
tgggatttgtgcccaggagg

SEQ ID NO: 173992 - DNA, 20 bp, synthetic construct
  source 1..20: mol_type = other DNA
ctgggatttgtgcccaggag

SEQ ID NO: 173993 - DNA, 20 bp, synthetic construct
  source 1..20: mol_type = other DNA
gctgggatttgtgcccagga

SEQ ID NO: 173994 - DNA, 20 bp, synthetic construct
  source 1..20: mol_type = other DNA
agctgggatttgtgcccagg

SEQ ID NO: 173995 - DNA, 20 bp, synthetic construct
  source 1..20: mol_type = other DNA
gagctgggatttgtgcccag

SEQ ID NO: 173996 - DNA, 20 bp, synthetic construct
  source 1..20: mol_type = other DNA
ggagctgggatttgtgccca

SEQ ID NO: 173997 - DNA, 20 bp, synthetic construct
  source 1..20: mol_type = other DNA
gggagctgggatttgtgccc

SEQ ID NO: 173998 - DNA, 20 bp, synthetic construct
  source 1..20: mol_type = other DNA
agggagctgggatttgtgcc

SEQ ID NO: 173999 - DNA, 20 bp, synthetic construct
  source 1..20: mol_type = other DNA
cagggagctgggatttgtgc

SEQ ID NO: 174000 - DNA, 20 bp, synthetic construct
  source 1..20: mol_type = other DNA
gcagggagctgggatttgtg

SEQ ID NO: 174001 - DNA, 20 bp, synthetic construct
  source 1..20: mol_type = other DNA
agcagggagctgggatttgt

SEQ ID NO: 174002 - DNA, 20 bp, synthetic construct
  source 1..20: mol_type = other DNA
gagcagggagctgggatttg

SEQ ID NO: 174003 - DNA, 20 bp, synthetic construct
  source 1..20: mol_type = other DNA
tgagcagggagctgggattt

SEQ ID NO: 174004 - DNA, 20 bp, synthetic construct
  source 1..20: mol_type = other DNA
gtgagcagggagctgggatt

SEQ ID NO: 174005 - DNA, 20 bp, synthetic construct
  source 1..20: mol_type = other DNA
agtgagcagggagctgggat

SEQ ID NO: 174006 - DNA, 20 bp, synthetic construct
  source 1..20: mol_type = other DNA
cagtgagcagggagctggga

SEQ ID NO: 174007 - DNA, 20 bp, synthetic construct
  source 1..20: mol_type = other DNA
acagtgagcagggagctggg

SEQ ID NO: 174008 - DNA, 20 bp, synthetic construct
  source 1..20: mol_type = other DNA
cacagtgagcagggagctgg

SEQ ID NO: 174009 - DNA, 20 bp, synthetic construct
  source 1..20: mol_type = other DNA
tcacagtgagcagggagctg

SEQ ID NO: 174010 - DNA, 20 bp, synthetic construct
  source 1..20: mol_type = other DNA
ctcacagtgagcagggagct

SEQ ID NO: 174011 - DNA, 20 bp, synthetic construct
  source 1..20: mol_type = other DNA
tctcacagtgagcagggagc

SEQ ID NO: 174012 - DNA, 20 bp, synthetic construct
  source 1..20: mol_type = other DNA
gtctcacagtgagcagggag

SEQ ID NO: 174013 - DNA, 20 bp, synthetic construct
  source 1..20: mol_type = other DNA
ggtctcacagtgagcaggga

SEQ ID NO: 174014 - DNA, 20 bp, synthetic construct
  source 1..20: mol_type = other DNA
aggtctcacagtgagcaggg

SEQ ID NO: 174015 - DNA, 20 bp, synthetic construct
  source 1..20: mol_type = other DNA
taggtctcacagtgagcagg

SEQ ID NO: 174016 - DNA, 20 bp, synthetic construct
  source 1..20: mol_type = other DNA
ttaggtctcacagtgagcag

SEQ ID NO: 174017 - DNA, 20 bp, synthetic construct
  source 1..20: mol_type = other DNA
cttaggtctcacagtgagca

SEQ ID NO: 174018 - DNA, 20 bp, synthetic construct
  source 1..20: mol_type = other DNA
gcttaggtctcacagtgagc

SEQ ID NO: 174019 - DNA, 20 bp, synthetic construct
  source 1..20: mol_type = other DNA
ggcttaggtctcacagtgag

SEQ ID NO: 174020 - DNA, 20 bp, synthetic construct
  source 1..20: mol_type = other DNA
tggcttaggtctcacagtga

SEQ ID NO: 174021 - DNA, 20 bp, synthetic construct
  source 1..20: mol_type = other DNA
atggcttaggtctcacagtg

SEQ ID NO: 174022 - DNA, 20 bp, synthetic construct
  source 1..20: mol_type = other DNA
tatggcttaggtctcacagt

SEQ ID NO: 174023 - DNA, 20 bp, synthetic construct
  source 1..20: mol_type = other DNA
atatggcttaggtctcacag

SEQ ID NO: 174024 - DNA, 20 bp, synthetic construct
  source 1..20: mol_type = other DNA
aatatggcttaggtctcaca

SEQ ID NO: 174025 - DNA, 20 bp, synthetic construct
  source 1..20: mol_type = other DNA
caatatggcttaggtctcac

SEQ ID NO: 174026 - DNA, 20 bp, synthetic construct
  source 1..20: mol_type = other DNA
acaatatggcttaggtctca

SEQ ID NO: 174027 - DNA, 20 bp, synthetic construct
  source 1..20: mol_type = other DNA
aacaatatggcttaggtctc

SEQ ID NO: 174028 - DNA, 20 bp, synthetic construct
  source 1..20: mol_type = other DNA
aaacaatatggcttaggtct

SEQ ID NO: 174029 - DNA, 20 bp, synthetic construct
  source 1..20: mol_type = other DNA
taaacaatatggcttaggtc

SEQ ID NO: 174030 - DNA, 20 bp, synthetic construct
  source 1..20: mol_type = other DNA
ctaaacaatatggcttaggt

SEQ ID NO: 174031 - DNA, 20 bp, synthetic construct
  source 1..20: mol_type = other DNA
gctaaacaatatggcttagg

SEQ ID NO: 174032 - DNA, 20 bp, synthetic construct
  source 1..20: mol_type = other DNA
agctaaacaatatggcttag

SEQ ID NO: 174033 - DNA, 20 bp, synthetic construct
  source 1..20: mol_type = other DNA
cagctaaacaatatggctta

SEQ ID NO: 174034 - DNA, 20 bp, synthetic construct
  source 1..20: mol_type = other DNA
gcagctaaacaatatggctt

SEQ ID NO: 174035 - DNA, 20 bp, synthetic construct
  source 1..20: mol_type = other DNA
agcagctaaacaatatggct

SEQ ID NO: 174036 - DNA, 20 bp, synthetic construct
  source 1..20: mol_type = other DNA
aagcagctaaacaatatggc

SEQ ID NO: 174037 - DNA, 20 bp, synthetic construct
  source 1..20: mol_type = other DNA
caagcagctaaacaatatgg

SEQ ID NO: 174038 - DNA, 20 bp, synthetic construct
  source 1..20: mol_type = other DNA
ccaagcagctaaacaatatg

SEQ ID NO: 174039 - DNA, 20 bp, synthetic construct
  source 1..20: mol_type = other DNA
tccaagcagctaaacaatat

SEQ ID NO: 174040 - DNA, 20 bp, synthetic construct
  source 1..20: mol_type = other DNA
ctccaagcagctaaacaata

SEQ ID NO: 174041 - DNA, 20 bp, synthetic construct
  source 1..20: mol_type = other DNA
tctccaagcagctaaacaat

SEQ ID NO: 174042 - DNA, 20 bp, synthetic construct
  source 1..20: mol_type = other DNA
ctctccaagcagctaaacaa

SEQ ID NO: 174043 - DNA, 20 bp, synthetic construct
  source 1..20: mol_type = other DNA
actctccaagcagctaaaca

SEQ ID NO: 174044 - DNA, 20 bp, synthetic construct
  source 1..20: mol_type = other DNA
aactctccaagcagctaaac

SEQ ID NO: 174045 - DNA, 20 bp, synthetic construct
  source 1..20: mol_type = other DNA
aaactctccaagcagctaaa

SEQ ID NO: 174046 - DNA, 20 bp, synthetic construct
  source 1..20: mol_type = other DNA
aaaactctccaagcagctaa

SEQ ID NO: 174047 - DNA, 20 bp, synthetic construct
  source 1..20: mol_type = other DNA
aaaaactctccaagcagcta

SEQ ID NO: 174048 - DNA, 20 bp, synthetic construct
  source 1..20: mol_type = other DNA
aaaaaactctccaagcagct

SEQ ID NO: 174049 - DNA, 20 bp, synthetic construct
  source 1..20: mol_type = other DNA
caaaaaactctccaagcagc

SEQ ID NO: 174050 - DNA, 20 bp, synthetic construct
  source 1..20: mol_type = other DNA
acaaaaaactctccaagcag

SEQ ID NO: 174051 - DNA, 20 bp, synthetic construct
  source 1..20: mol_type = other DNA
gacaaaaaactctccaagca

SEQ ID NO: 174052 - DNA, 20 bp, synthetic construct
  source 1..20: mol_type = other DNA
tgacaaaaaactctccaagc

SEQ ID NO: 174053 - DNA, 20 bp, synthetic construct
  source 1..20: mol_type = other DNA
atgacaaaaaactctccaag

SEQ ID NO: 174054 - DNA, 20 bp, synthetic construct
  source 1..20: mol_type = other DNA
gatgacaaaaaactctccaa

SEQ ID NO: 174055 - DNA, 20 bp, synthetic construct
  source 1..20: mol_type = other DNA
ggatgacaaaaaactctcca

SEQ ID NO: 174056 - DNA, 20 bp, synthetic construct
  source 1..20: mol_type = other DNA
tggatgacaaaaaactctcc

SEQ ID NO: 174057 - DNA, 20 bp, synthetic construct
  source 1..20: mol_type = other DNA
gtggatgacaaaaaactctc

SEQ ID NO: 174058 - DNA, 20 bp, synthetic construct
  source 1..20: mol_type = other DNA
tgtggatgacaaaaaactct

SEQ ID NO: 174059 - DNA, 20 bp, synthetic construct
  source 1..20: mol_type = other DNA
ttgtggatgacaaaaaactc

SEQ ID NO: 174060 - DNA, 20 bp, synthetic construct
  source 1..20: mol_type = other DNA
gttgtggatgacaaaaaact

SEQ ID NO: 174061 - DNA, 20 bp, synthetic construct
  source 1..20: mol_type = other DNA
agttgtggatgacaaaaaac

SEQ ID NO: 174062 - DNA, 20 bp, synthetic construct
  source 1..20: mol_type = other DNA
aagttgtggatgacaaaaaa

SEQ ID NO: 174063 - DNA, 20 bp, synthetic construct
  source 1..20: mol_type = other DNA
caagttgtggatgacaaaaa

SEQ ID NO: 174064 - DNA, 20 bp, synthetic construct
  source 1..20: mol_type = other DNA
ccaagttgtggatgacaaaa

SEQ ID NO: 174065 - DNA, 20 bp, synthetic construct
  source 1..20: mol_type = other DNA
tccaagttgtggatgacaaa

SEQ ID NO: 174066 - DNA, 20 bp, synthetic construct
  source 1..20: mol_type = other DNA
ctccaagttgtggatgacaa

SEQ ID NO: 174067 - DNA, 20 bp, synthetic construct
  source 1..20: mol_type = other DNA
actccaagttgtggatgaca

SEQ ID NO: 174068 - DNA, 20 bp, synthetic construct
  source 1..20: mol_type = other DNA
tactccaagttgtggatgac

SEQ ID NO: 174069 - DNA, 20 bp, synthetic construct
  source 1..20: mol_type = other DNA
atactccaagttgtggatga

SEQ ID NO: 174070 - DNA, 20 bp, synthetic construct
  source 1..20: mol_type = other DNA
catactccaagttgtggatg

SEQ ID NO: 174071 - DNA, 20 bp, synthetic construct
  source 1..20: mol_type = other DNA
tcatactccaagttgtggat

SEQ ID NO: 174072 - DNA, 20 bp, synthetic construct
  source 1..20: mol_type = other DNA
atcatactccaagttgtgga

SEQ ID NO: 174073 - DNA, 20 bp, synthetic construct
  source 1..20: mol_type = other DNA
catcatactccaagttgtgg

SEQ ID NO: 174074 - DNA, 20 bp, synthetic construct
  source 1..20: mol_type = other DNA
ccatcatactccaagttgtg

SEQ ID NO: 174075 - DNA, 20 bp, synthetic construct
  source 1..20: mol_type = other DNA
accatcatactccaagttgt

SEQ ID NO: 174076 - DNA, 20 bp, synthetic construct
  source 1..20: mol_type = other DNA
taccatcatactccaagttg

SEQ ID NO: 174077 - DNA, 20 bp, synthetic construct
  source 1..20: mol_type = other DNA
gtaccatcatactccaagtt

SEQ ID NO: 174078 - DNA, 20 bp, synthetic construct
  source 1..20: mol_type = other DNA
ggtaccatcatactccaagt

SEQ ID NO: 174079 - DNA, 20 bp, synthetic construct
  source 1..20: mol_type = other DNA
aggtaccatcatactccaag

SEQ ID NO: 174080 - DNA, 20 bp, synthetic construct
  source 1..20: mol_type = other DNA
caggtaccatcatactccaa

SEQ ID NO: 174081 - DNA, 20 bp, synthetic construct
  source 1..20: mol_type = other DNA
acaggtaccatcatactcca

SEQ ID NO: 174082 - DNA, 20 bp, synthetic construct
  source 1..20: mol_type = other DNA
gacaggtaccatcatactcc

SEQ ID NO: 174083 - DNA, 20 bp, synthetic construct
  source 1..20: mol_type = other DNA
agacaggtaccatcatactc

SEQ ID NO: 174084 - DNA, 20 bp, synthetic construct
  source 1..20: mol_type = other DNA
gagacaggtaccatcatact

SEQ ID NO: 174085 - DNA, 20 bp, synthetic construct
  source 1..20: mol_type = other DNA
tgagacaggtaccatcatac

SEQ ID NO: 174086 - DNA, 20 bp, synthetic construct
  source 1..20: mol_type = other DNA
gtgagacaggtaccatcata

SEQ ID NO: 174087 - DNA, 20 bp, synthetic construct
  source 1..20: mol_type = other DNA
cgtgagacaggtaccatcat

SEQ ID NO: 174088 - DNA, 20 bp, synthetic construct
  source 1..20: mol_type = other DNA
ccgtgagacaggtaccatca

SEQ ID NO: 174089 - DNA, 20 bp, synthetic construct
  source 1..20: mol_type = other DNA
cccgtgagacaggtaccatc

SEQ ID NO: 174090 - DNA, 20 bp, synthetic construct
  source 1..20: mol_type = other DNA
acccgtgagacaggtaccat

SEQ ID NO: 174091 - DNA, 20 bp, synthetic construct
  source 1..20: mol_type = other DNA
aacccgtgagacaggtacca

SEQ ID NO: 174092 - DNA, 20 bp, synthetic construct
  source 1..20: mol_type = other DNA
caacccgtgagacaggtacc

SEQ ID NO: 174093 - DNA, 20 bp, synthetic construct
  source 1..20: mol_type = other DNA
gcaacccgtgagacaggtac

SEQ ID NO: 174094 - DNA, 20 bp, synthetic construct
  source 1..20: mol_type = other DNA
ggcaacccgtgagacaggta

SEQ ID NO: 174095 - DNA, 20 bp, synthetic construct
  source 1..20: mol_type = other DNA
tggcaacccgtgagacaggt

SEQ ID NO: 174096 - DNA, 20 bp, synthetic construct
  source 1..20: mol_type = other DNA
atggcaacccgtgagacagg

SEQ ID NO: 174097 - DNA, 20 bp, synthetic construct
  source 1..20: mol_type = other DNA
catggcaacccgtgagacag

SEQ ID NO: 174098 - DNA, 20 bp, synthetic construct
  source 1..20: mol_type = other DNA
ccatggcaacccgtgagaca

SEQ ID NO: 174099 - DNA, 20 bp, synthetic construct
  source 1..20: mol_type = other DNA
cccatggcaacccgtgagac

SEQ ID NO: 174100 - DNA, 20 bp, synthetic construct
  source 1..20: mol_type = other DNA
ccccatggcaacccgtgaga

SEQ ID NO: 174101 - DNA, 20 bp, synthetic construct
  source 1..20: mol_type = other DNA
accccatggcaacccgtgag

SEQ ID NO: 174102 - DNA, 20 bp, synthetic construct
  source 1..20: mol_type = other DNA
aaccccatggcaacccgtga

SEQ ID NO: 174103 - DNA, 20 bp, synthetic construct
  source 1..20: mol_type = other DNA
gaaccccatggcaacccgtg

SEQ ID NO: 174104 - DNA, 20 bp, synthetic construct
  source 1..20: mol_type = other DNA
tgaaccccatggcaacccgt

SEQ ID NO: 174105 - DNA, 20 bp, synthetic construct
  source 1..20: mol_type = other DNA
gtgaaccccatggcaacccg

SEQ ID NO: 174106 - DNA, 20 bp, synthetic construct
  source 1..20: mol_type = other DNA
tgtgaaccccatggcaaccc

SEQ ID NO: 174107 - DNA, 20 bp, synthetic construct
  source 1..20: mol_type = other DNA
gtgtgaaccccatggcaacc

SEQ ID NO: 174108 - DNA, 20 bp, synthetic construct
  source 1..20: mol_type = other DNA
tgtgtgaaccccatggcaac

SEQ ID NO: 174109 - DNA, 20 bp, synthetic construct
  source 1..20: mol_type = other DNA
ttgtgtgaaccccatggcaa

SEQ ID NO: 174110 - DNA, 20 bp, synthetic construct
  source 1..20: mol_type = other DNA
cttgtgtgaaccccatggca

SEQ ID NO: 174111 - DNA, 20 bp, synthetic construct
  source 1..20: mol_type = other DNA
gcttgtgtgaaccccatggc

SEQ ID NO: 174112 - DNA, 20 bp, synthetic construct
  source 1..20: mol_type = other DNA
agcttgtgtgaaccccatgg

SEQ ID NO: 174113 - DNA, 20 bp, synthetic construct
  source 1..20: mol_type = other DNA
tagcttgtgtgaaccccatg

SEQ ID NO: 174114 - DNA, 20 bp, synthetic construct
  source 1..20: mol_type = other DNA
ttagcttgtgtgaaccccat

SEQ ID NO: 174115 - DNA, 20 bp, synthetic construct
  source 1..20: mol_type = other DNA
gttagcttgtgtgaacccca

SEQ ID NO: 174116 - DNA, 20 bp, synthetic construct
  source 1..20: mol_type = other DNA
ggttagcttgtgtgaacccc

SEQ ID NO: 174117 - DNA, 20 bp, synthetic construct
  source 1..20: mol_type = other DNA
gggttagcttgtgtgaaccc

SEQ ID NO: 174118 - DNA, 20 bp, synthetic construct
  source 1..20: mol_type = other DNA
cgggttagcttgtgtgaacc

SEQ ID NO: 174119 - DNA, 20 bp, synthetic construct
  source 1..20: mol_type = other DNA
ccgggttagcttgtgtgaac

SEQ ID NO: 174120 - DNA, 20 bp, synthetic construct
  source 1..20: mol_type = other DNA
accgggttagcttgtgtgaa

SEQ ID NO: 174121 - DNA, 20 bp, synthetic construct
  source 1..20: mol_type = other DNA
taccgggttagcttgtgtga

SEQ ID NO: 174122 - DNA, 20 bp, synthetic construct
  source 1..20: mol_type = other DNA
gtaccgggttagcttgtgtg

SEQ ID NO: 174123 - DNA, 20 bp, synthetic construct
  source 1..20: mol_type = other DNA
agtaccgggttagcttgtgt

SEQ ID NO: 174124 - DNA, 20 bp, synthetic construct
  source 1..20: mol_type = other DNA
gagtaccgggttagcttgtg

SEQ ID NO: 174125 - DNA, 20 bp, synthetic construct
  source 1..20: mol_type = other DNA
tgagtaccgggttagcttgt

SEQ ID NO: 174126 - DNA, 20 bp, synthetic construct
  source 1..20: mol_type = other DNA
gtgagtaccgggttagcttg

SEQ ID NO: 174127 - DNA, 20 bp, synthetic construct
  source 1..20: mol_type = other DNA
agtgagtaccgggttagctt

SEQ ID NO: 174128 - DNA, 20 bp, synthetic construct
  source 1..20: mol_type = other DNA
tagtgagtaccgggttagct

SEQ ID NO: 174129 - DNA, 20 bp, synthetic construct
  source 1..20: mol_type = other DNA
ctagtgagtaccgggttagc

SEQ ID NO: 174130 - DNA, 20 bp, synthetic construct
  source 1..20: mol_type = other DNA
cctagtgagtaccgggttag

SEQ ID NO: 174131 - DNA, 20 bp, synthetic construct
  source 1..20: mol_type = other DNA
ccctagtgagtaccgggtta

SEQ ID NO: 174132 - DNA, 20 bp, synthetic construct
  source 1..20: mol_type = other DNA
gccctagtgagtaccgggtt

SEQ ID NO: 174133 - DNA, 20 bp, synthetic construct
  source 1..20: mol_type = other DNA
ggccctagtgagtaccgggt

SEQ ID NO: 174134 - DNA, 20 bp, synthetic construct
  source 1..20: mol_type = other DNA
tggccctagtgagtaccggg

SEQ ID NO: 174135 - DNA, 20 bp, synthetic construct
  source 1..20: mol_type = other DNA
ttggccctagtgagtaccgg

SEQ ID NO: 174136 - DNA, 20 bp, synthetic construct
  source 1..20: mol_type = other DNA
cttggccctagtgagtaccg

SEQ ID NO: 174137 - DNA, 20 bp, synthetic construct
  source 1..20: mol_type = other DNA
gcttggccctagtgagtacc

SEQ ID NO: 174138 - DNA, 20 bp, synthetic construct
  source 1..20: mol_type = other DNA
tgcttggccctagtgagtac

SEQ ID NO: 174139 - DNA, 20 bp, synthetic construct
  source 1..20: mol_type = other DNA
gtgcttggccctagtgagta

SEQ ID NO: 174140 - DNA, 20 bp, synthetic construct
  source 1..20: mol_type = other DNA
tgtgcttggccctagtgagt

SEQ ID NO: 174141 - DNA, 20 bp, synthetic construct
  source 1..20: mol_type = other DNA
atgtgcttggccctagtgag

SEQ ID NO: 174142 - DNA, 20 bp, synthetic construct
  source 1..20: mol_type = other DNA
tatgtgcttggccctagtga

SEQ ID NO: 174143 - DNA, 20 bp, synthetic construct
  source 1..20: mol_type = other DNA
ctatgtgcttggccctagtg

SEQ ID NO: 174144 - DNA, 20 bp, synthetic construct
  source 1..20: mol_type = other DNA
actatgtgcttggccctagt

SEQ ID NO: 174145 - DNA, 20 bp, synthetic construct
  source 1..20: mol_type = other DNA
tactatgtgcttggccctag

SEQ ID NO: 174146 - DNA, 20 bp, synthetic construct
  source 1..20: mol_type = other DNA
ttactatgtgcttggcccta

SEQ ID NO: 174147 - DNA, 20 bp, synthetic construct
  source 1..20: mol_type = other DNA
gttactatgtgcttggccct

SEQ ID NO: 174148 - DNA, 20 bp, synthetic construct
  source 1..20: mol_type = other DNA
agttactatgtgcttggccc

SEQ ID NO: 174149 - DNA, 20 bp, synthetic construct
  source 1..20: mol_type = other DNA
cagttactatgtgcttggcc

SEQ ID NO: 174150 - DNA, 20 bp, synthetic construct
  source 1..20: mol_type = other DNA
gcagttactatgtgcttggc

SEQ ID NO: 174151 - DNA, 20 bp, synthetic construct
  source 1..20: mol_type = other DNA
agcagttactatgtgcttgg

SEQ ID NO: 174152 - DNA, 20 bp, synthetic construct
  source 1..20: mol_type = other DNA
gagcagttactatgtgcttg

SEQ ID NO: 174153 - DNA, 20 bp, synthetic construct
  source 1..20: mol_type = other DNA
tgagcagttactatgtgctt

SEQ ID NO: 174154 - DNA, 20 bp, synthetic construct
  source 1..20: mol_type = other DNA
ctgagcagttactatgtgct

SEQ ID NO: 174155 - DNA, 20 bp, synthetic construct
  source 1..20: mol_type = other DNA
actgagcagttactatgtgc

SEQ ID NO: 174156 - DNA, 20 bp, synthetic construct
  source 1..20: mol_type = other DNA
tactgagcagttactatgtg

SEQ ID NO: 174157 - DNA, 20 bp, synthetic construct
  source 1..20: mol_type = other DNA
ttactgagcagttactatgt

SEQ ID NO: 174158 - DNA, 20 bp, synthetic construct
  source 1..20: mol_type = other DNA
tttactgagcagttactatg

SEQ ID NO: 174159 - DNA, 20 bp, synthetic construct
  source 1..20: mol_type = other DNA
atttactgagcagttactat

SEQ ID NO: 174160 - DNA, 20 bp, synthetic construct
  source 1..20: mol_type = other DNA
catttactgagcagttacta

SEQ ID NO: 174161 - DNA, 20 bp, synthetic construct
  source 1..20: mol_type = other DNA
ccatttactgagcagttact

SEQ ID NO: 174162 - DNA, 20 bp, synthetic construct
  source 1..20: mol_type = other DNA
gccatttactgagcagttac

SEQ ID NO: 174163 - DNA, 20 bp, synthetic construct
  source 1..20: mol_type = other DNA
tgccatttactgagcagtta

SEQ ID NO: 174164 - DNA, 20 bp, synthetic construct
  source 1..20: mol_type = other DNA
atgccatttactgagcagtt

SEQ ID NO: 174165 - DNA, 20 bp, synthetic construct
  source 1..20: mol_type = other DNA
gatgccatttactgagcagt

SEQ ID NO: 174166 - DNA, 20 bp, synthetic construct
  source 1..20: mol_type = other DNA
tgatgccatttactgagcag

SEQ ID NO: 174167 - DNA, 20 bp, synthetic construct
  source 1..20: mol_type = other DNA
atgatgccatttactgagca

SEQ ID NO: 174168 - DNA, 20 bp, synthetic construct
  source 1..20: mol_type = other DNA
gatgatgccatttactgagc

SEQ ID NO: 174169 - DNA, 20 bp, synthetic construct
  source 1..20: mol_type = other DNA
cgatgatgccatttactgag

SEQ ID NO: 174170 - DNA, 20 bp, synthetic construct
  source 1..20: mol_type = other DNA
ccgatgatgccatttactga

SEQ ID NO: 174171 - DNA, 20 bp, synthetic construct
  source 1..20: mol_type = other DNA
gccgatgatgccatttactg

SEQ ID NO: 174172 - DNA, 20 bp, synthetic construct
  source 1..20: mol_type = other DNA
cgccgatgatgccatttact

SEQ ID NO: 174173 - DNA, 20 bp, synthetic construct
  source 1..20: mol_type = other DNA
ccgccgatgatgccatttac

SEQ ID NO: 174174 - DNA, 20 bp, synthetic construct
  source 1..20: mol_type = other DNA
accgccgatgatgccattta

SEQ ID NO: 174175 - DNA, 20 bp, synthetic construct
  source 1..20: mol_type = other DNA
caccgccgatgatgccattt

SEQ ID NO: 174176 - DNA, 20 bp, synthetic construct
  source 1..20: mol_type = other DNA
acaccgccgatgatgccatt

SEQ ID NO: 174177 - DNA, 20 bp, synthetic construct
  source 1..20: mol_type = other DNA
gacaccgccgatgatgccat

SEQ ID NO: 174178 - DNA, 20 bp, synthetic construct
  source 1..20: mol_type = other DNA
ggacaccgccgatgatgcca

SEQ ID NO: 174179 - DNA, 20 bp, synthetic construct
  source 1..20: mol_type = other DNA
aggacaccgccgatgatgcc

SEQ ID NO: 174180 - DNA, 20 bp, synthetic construct
  source 1..20: mol_type = other DNA
caggacaccgccgatgatgc

SEQ ID NO: 174181 - DNA, 20 bp, synthetic construct
  source 1..20: mol_type = other DNA
acaggacaccgccgatgatg

SEQ ID NO: 174182 - DNA, 20 bp, synthetic construct
  source 1..20: mol_type = other DNA
cacaggacaccgccgatgat

SEQ ID NO: 174183 - DNA, 20 bp, synthetic construct
  source 1..20: mol_type = other DNA
ccacaggacaccgccgatga

SEQ ID NO: 174184 - DNA, 20 bp, synthetic construct
  source 1..20: mol_type = other DNA
tccacaggacaccgccgatg

SEQ ID NO: 174185 - DNA, 20 bp, synthetic construct
  source 1..20: mol_type = other DNA
atccacaggacaccgccgat

SEQ ID NO: 174186 - DNA, 20 bp, synthetic construct
  source 1..20: mol_type = other DNA
catccacaggacaccgccga

SEQ ID NO: 174187 - DNA, 20 bp, synthetic construct
  source 1..20: mol_type = other DNA
tcatccacaggacaccgccg

SEQ ID NO: 174188 - DNA, 20 bp, synthetic construct
  source 1..20: mol_type = other DNA
ctcatccacaggacaccgcc

SEQ ID NO: 174189 - DNA, 20 bp, synthetic construct
  source 1..20: mol_type = other DNA
actcatccacaggacaccgc

SEQ ID NO: 174190 - DNA, 20 bp, synthetic construct
  source 1..20: mol_type = other DNA
cactcatccacaggacaccg

SEQ ID NO: 174191 - DNA, 20 bp, synthetic construct
  source 1..20: mol_type = other DNA
gcactcatccacaggacacc

SEQ ID NO: 174192 - DNA, 20 bp, synthetic construct
  source 1..20: mol_type = other DNA
agcactcatccacaggacac

SEQ ID NO: 174193 - DNA, 20 bp, synthetic construct
  source 1..20: mol_type = other DNA
aagcactcatccacaggaca

SEQ ID NO: 174194 - DNA, 20 bp, synthetic construct
  source 1..20: mol_type = other DNA
caagcactcatccacaggac

SEQ ID NO: 174195 - DNA, 20 bp, synthetic construct
  source 1..20: mol_type = other DNA
acaagcactcatccacagga

SEQ ID NO: 174196 - DNA, 20 bp, synthetic construct
  source 1..20: mol_type = other DNA
cacaagcactcatccacagg

SEQ ID NO: 174197 - DNA, 20 bp, synthetic construct
  source 1..20: mol_type = other DNA
tcacaagcactcatccacag

SEQ ID NO: 174198 - DNA, 20 bp, synthetic construct
  source 1..20: mol_type = other DNA
atcacaagcactcatccaca

SEQ ID NO: 174199 - DNA, 20 bp, synthetic construct
  source 1..20: mol_type = other DNA
aatcacaagcactcatccac

SEQ ID NO: 174200 - DNA, 20 bp, synthetic construct
  source 1..20: mol_type = other DNA
caatcacaagcactcatcca

SEQ ID NO: 174201 - DNA, 20 bp, synthetic construct
  source 1..20: mol_type = other DNA
ccaatcacaagcactcatcc

SEQ ID NO: 174202 - DNA, 20 bp, synthetic construct
  source 1..20: mol_type = other DNA
gccaatcacaagcactcatc

SEQ ID NO: 174203 - DNA, 20 bp, synthetic construct
  source 1..20: mol_type = other DNA
agccaatcacaagcactcat

SEQ ID NO: 174204 - DNA, 20 bp, synthetic construct
  source 1..20: mol_type = other DNA
cagccaatcacaagcactca

SEQ ID NO: 174205 - DNA, 20 bp, synthetic construct
  source 1..20: mol_type = other DNA
tcagccaatcacaagcactc

SEQ ID NO: 174206 - DNA, 20 bp, synthetic construct
  source 1..20: mol_type = other DNA
ttcagccaatcacaagcact

SEQ ID NO: 174207 - DNA, 20 bp, synthetic construct
  source 1..20: mol_type = other DNA
attcagccaatcacaagcac

SEQ ID NO: 174208 - DNA, 20 bp, synthetic construct
  source 1..20: mol_type = other DNA
cattcagccaatcacaagca

SEQ ID NO: 174209 - DNA, 20 bp, synthetic construct
  source 1..20: mol_type = other DNA
tcattcagccaatcacaagc

SEQ ID NO: 174210 - DNA, 20 bp, synthetic construct
  source 1..20: mol_type = other DNA
gtcattcagccaatcacaag

SEQ ID NO: 174211 - DNA, 20 bp, synthetic construct
  source 1..20: mol_type = other DNA
ggtcattcagccaatcacaa

SEQ ID NO: 174212 - DNA, 20 bp, synthetic construct
  source 1..20: mol_type = other DNA
tggtcattcagccaatcaca

SEQ ID NO: 174213 - DNA, 20 bp, synthetic construct
  source 1..20: mol_type = other DNA
ctggtcattcagccaatcac

SEQ ID NO: 174214 - DNA, 20 bp, synthetic construct
  source 1..20: mol_type = other DNA
tctggtcattcagccaatca

SEQ ID NO: 174215 - DNA, 20 bp, synthetic construct
  source 1..20: mol_type = other DNA
ctctggtcattcagccaatc

SEQ ID NO: 174216 - DNA, 20 bp, synthetic construct
  source 1..20: mol_type = other DNA
cctctggtcattcagccaat

SEQ ID NO: 174217 - DNA, 20 bp, synthetic construct
  source 1..20: mol_type = other DNA
ccctctggtcattcagccaa

SEQ ID NO: 174218 - DNA, 20 bp, synthetic construct
  source 1..20: mol_type = other DNA
cccctctggtcattcagcca

SEQ ID NO: 174219 - DNA, 20 bp, synthetic construct
  source 1..20: mol_type = other DNA
acccctctggtcattcagcc

SEQ ID NO: 174220 - DNA, 20 bp, synthetic construct
  source 1..20: mol_type = other DNA
gacccctctggtcattcagc

SEQ ID NO: 174221 - DNA, 20 bp, synthetic construct
  source 1..20: mol_type = other DNA
agacccctctggtcattcag

SEQ ID NO: 174222 - DNA, 20 bp, synthetic construct
  source 1..20: mol_type = other DNA
tagacccctctggtcattca

SEQ ID NO: 174223 - DNA, 20 bp, synthetic construct
  source 1..20: mol_type = other DNA
ttagacccctctggtcattc

SEQ ID NO: 174224 - DNA, 20 bp, synthetic construct
  source 1..20: mol_type = other DNA
tttagacccctctggtcatt

SEQ ID NO: 174225 - DNA, 20 bp, synthetic construct
  source 1..20: mol_type = other DNA
ctttagacccctctggtcat

SEQ ID NO: 174226 - DNA, 20 bp, synthetic construct
  source 1..20: mol_type = other DNA
tctttagacccctctggtca

SEQ ID NO: 174227 - DNA, 20 bp, synthetic construct
  source 1..20: mol_type = other DNA
atctttagacccctctggtc

SEQ ID NO: 174228 - DNA, 20 bp, synthetic construct
  source 1..20: mol_type = other DNA
gatctttagacccctctggt

SEQ ID NO: 174229 - DNA, 20 bp, synthetic construct
  source 1..20: mol_type = other DNA
ggatctttagacccctctgg

SEQ ID NO: 174230 - DNA, 20 bp, synthetic construct
  source 1..20: mol_type = other DNA
aggatctttagacccctctg

SEQ ID NO: 174231 - DNA, 20 bp, synthetic construct
  source 1..20: mol_type = other DNA
caggatctttagacccctct

SEQ ID NO: 174232 - DNA, 20 bp, synthetic construct
  source 1..20: mol_type = other DNA
ccaggatctttagacccctc

SEQ ID NO: 174233 - DNA, 20 bp, synthetic construct
  source 1..20: mol_type = other DNA
accaggatctttagacccct

SEQ ID NO: 174234 - DNA, 20 bp, synthetic construct
  source 1..20: mol_type = other DNA
caccaggatctttagacccc

SEQ ID NO: 174235 - DNA, 20 bp, synthetic construct
  source 1..20: mol_type = other DNA
tcaccaggatctttagaccc

SEQ ID NO: 174236 - DNA, 20 bp, synthetic construct
  source 1..20: mol_type = other DNA
atcaccaggatctttagacc

SEQ ID NO: 174237 - DNA, 20 bp, synthetic construct
  source 1..20: mol_type = other DNA
catcaccaggatctttagac

SEQ ID NO: 174238 - DNA, 20 bp, synthetic construct
  source 1..20: mol_type = other DNA
ccatcaccaggatctttaga

SEQ ID NO: 174239 - DNA, 20 bp, synthetic construct
  source 1..20: mol_type = other DNA
tccatcaccaggatctttag

SEQ ID NO: 174240 - DNA, 20 bp, synthetic construct
  source 1..20: mol_type = other DNA
ttccatcaccaggatcttta

SEQ ID NO: 174241 - DNA, 20 bp, synthetic construct
  source 1..20: mol_type = other DNA
attccatcaccaggatcttt

SEQ ID NO: 174242 - DNA, 20 bp, synthetic construct
  source 1..20: mol_type = other DNA
gattccatcaccaggatctt

SEQ ID NO: 174243 - DNA, 20 bp, synthetic construct
  source 1..20: mol_type = other DNA
tgattccatcaccaggatct

SEQ ID NO: 174244 - DNA, 20 bp, synthetic construct
  source 1..20: mol_type = other DNA
ctgattccatcaccaggatc

SEQ ID NO: 174245 - DNA, 20 bp, synthetic construct
  source 1..20: mol_type = other DNA
actgattccatcaccaggat

SEQ ID NO: 174246 - DNA, 20 bp, synthetic construct
  source 1..20: mol_type = other DNA
aactgattccatcaccagga

SEQ ID NO: 174247 - DNA, 20 bp, synthetic construct
  source 1..20: mol_type = other DNA
caactgattccatcaccagg

SEQ ID NO: 174248 - DNA, 20 bp, synthetic construct
  source 1..20: mol_type = other DNA
acaactgattccatcaccag

SEQ ID NO: 174249 - DNA, 20 bp, synthetic construct
  source 1..20: mol_type = other DNA
tacaactgattccatcacca

SEQ ID NO: 174250 - DNA, 20 bp, synthetic construct
  source 1..20: mol_type = other DNA
gtacaactgattccatcacc

SEQ ID NO: 174251 - DNA, 20 bp, synthetic construct
  source 1..20: mol_type = other DNA
tgtacaactgattccatcac

SEQ ID NO: 174252 - DNA, 20 bp, synthetic construct
  source 1..20: mol_type = other DNA
ctgtacaactgattccatca

SEQ ID NO: 174253 - DNA, 20 bp, synthetic construct
  source 1..20: mol_type = other DNA
tctgtacaactgattccatc

SEQ ID NO: 174254 - DNA, 20 bp, synthetic construct
  source 1..20: mol_type = other DNA
atctgtacaactgattccat

SEQ ID NO: 174255 - DNA, 20 bp, synthetic construct
  source 1..20: mol_type = other DNA
tatctgtacaactgattcca

SEQ ID NO: 174256 - DNA, 20 bp, synthetic construct
  source 1..20: mol_type = other DNA
ttatctgtacaactgattcc

SEQ ID NO: 174257 - DNA, 20 bp, synthetic construct
  source 1..20: mol_type = other DNA
tttatctgtacaactgattc

SEQ ID NO: 174258 - DNA, 20 bp, synthetic construct
  source 1..20: mol_type = other DNA
atttatctgtacaactgatt

SEQ ID NO: 174259 - DNA, 20 bp, synthetic construct
  source 1..20: mol_type = other DNA
aatttatctgtacaactgat

SEQ ID NO: 174260 - DNA, 20 bp, synthetic construct
  source 1..20: mol_type = other DNA
caatttatctgtacaactga

SEQ ID NO: 174261 - DNA, 20 bp, synthetic construct
  source 1..20: mol_type = other DNA
acaatttatctgtacaactg

SEQ ID NO: 174262 - DNA, 20 bp, synthetic construct
  source 1..20: mol_type = other DNA
aacaatttatctgtacaact

SEQ ID NO: 174263 - DNA, 20 bp, synthetic construct
  source 1..20: mol_type = other DNA
taacaatttatctgtacaac

SEQ ID NO: 174264 - DNA, 20 bp, synthetic construct
  source 1..20: mol_type = other DNA
gtaacaatttatctgtacaa

SEQ ID NO: 174265 - DNA, 20 bp, synthetic construct
  source 1..20: mol_type = other DNA
tgtaacaatttatctgtaca

SEQ ID NO: 174266 - DNA, 20 bp, synthetic construct
  source 1..20: mol_type = other DNA
gtgtaacaatttatctgtac

SEQ ID NO: 174267 - DNA, 20 bp, synthetic construct
  source 1..20: mol_type = other DNA
agtgtaacaatttatctgta

SEQ ID NO: 174268 - DNA, 20 bp, synthetic construct
  source 1..20: mol_type = other DNA
cagtgtaacaatttatctgt

SEQ ID NO: 174269 - DNA, 20 bp, synthetic construct
  source 1..20: mol_type = other DNA
tcagtgtaacaatttatctg

SEQ ID NO: 174270 - DNA, 20 bp, synthetic construct
  source 1..20: mol_type = other DNA
ctcagtgtaacaatttatct

SEQ ID NO: 174271 - DNA, 20 bp, synthetic construct
  source 1..20: mol_type = other DNA
actcagtgtaacaatttatc

SEQ ID NO: 174272 - DNA, 20 bp, synthetic construct
  source 1..20: mol_type = other DNA
tactcagtgtaacaatttat

SEQ ID NO: 174273 - DNA, 20 bp, synthetic construct
  source 1..20: mol_type = other DNA
ctactcagtgtaacaattta

SEQ ID NO: 174274 - DNA, 20 bp, synthetic construct
  source 1..20: mol_type = other DNA
cctactcagtgtaacaattt

SEQ ID NO: 174275 - DNA, 20 bp, synthetic construct
  source 1..20: mol_type = other DNA
ccctactcagtgtaacaatt

SEQ ID NO: 174276 - DNA, 20 bp, synthetic construct
  source 1..20: mol_type = other DNA
tccctactcagtgtaacaat

SEQ ID NO: 174277 - DNA, 20 bp, synthetic construct
  source 1..20: mol_type = other DNA
atccctactcagtgtaacaa

SEQ ID NO: 174278 - DNA, 20 bp, synthetic construct
  source 1..20: mol_type = other DNA
gatccctactcagtgtaaca

SEQ ID NO: 174279 - DNA, 20 bp, synthetic construct
  source 1..20: mol_type = other DNA
tgatccctactcagtgtaac

SEQ ID NO: 174280 - DNA, 20 bp, synthetic construct
  source 1..20: mol_type = other DNA
ttgatccctactcagtgtaa

SEQ ID NO: 174281 - DNA, 20 bp, synthetic construct
  source 1..20: mol_type = other DNA
cttgatccctactcagtgta

SEQ ID NO: 174282 - DNA, 20 bp, synthetic construct
  source 1..20: mol_type = other DNA
tcttgatccctactcagtgt

SEQ ID NO: 174283 - DNA, 20 bp, synthetic construct
  source 1..20: mol_type = other DNA
atcttgatccctactcagtg

SEQ ID NO: 174284 - DNA, 20 bp, synthetic construct
  source 1..20: mol_type = other DNA
tatcttgatccctactcagt

SEQ ID NO: 174285 - DNA, 20 bp, synthetic construct
  source 1..20: mol_type = other DNA
ctatcttgatccctactcag

SEQ ID NO: 174286 - DNA, 20 bp, synthetic construct
  source 1..20: mol_type = other DNA
cctatcttgatccctactca

SEQ ID NO: 174287 - DNA, 20 bp, synthetic construct
  source 1..20: mol_type = other DNA
tcctatcttgatccctactc

SEQ ID NO: 174288 - DNA, 20 bp, synthetic construct
  source 1..20: mol_type = other DNA
ttcctatcttgatccctact

SEQ ID NO: 174289 - DNA, 20 bp, synthetic construct
  source 1..20: mol_type = other DNA
tttcctatcttgatccctac

SEQ ID NO: 174290 - DNA, 20 bp, synthetic construct
  source 1..20: mol_type = other DNA
ttttcctatcttgatcccta

SEQ ID NO: 174291 - DNA, 20 bp, synthetic construct
  source 1..20: mol_type = other DNA
cttttcctatcttgatccct

SEQ ID NO: 174292 - DNA, 20 bp, synthetic construct
  source 1..20: mol_type = other DNA
acttttcctatcttgatccc

SEQ ID NO: 174293 - DNA, 20 bp, synthetic construct
  source 1..20: mol_type = other DNA
gacttttcctatcttgatcc

SEQ ID NO: 174294 - DNA, 20 bp, synthetic construct
  source 1..20: mol_type = other DNA
cgacttttcctatcttgatc

SEQ ID NO: 174295 - DNA, 20 bp, synthetic construct
  source 1..20: mol_type = other DNA
ccgacttttcctatcttgat

SEQ ID NO: 174296 - DNA, 20 bp, synthetic construct
  source 1..20: mol_type = other DNA
gccgacttttcctatcttga

SEQ ID NO: 174297 - DNA, 20 bp, synthetic construct
  source 1..20: mol_type = other DNA
tgccgacttttcctatcttg

SEQ ID NO: 174298 - DNA, 20 bp, synthetic construct
  source 1..20: mol_type = other DNA
ttgccgacttttcctatctt

SEQ ID NO: 174299 - DNA, 20 bp, synthetic construct
  source 1..20: mol_type = other DNA
gttgccgacttttcctatct

SEQ ID NO: 174300 - DNA, 20 bp, synthetic construct
  source 1..20: mol_type = other DNA
agttgccgacttttcctatc

SEQ ID NO: 174301 - DNA, 20 bp, synthetic construct
  source 1..20: mol_type = other DNA
tagttgccgacttttcctat

SEQ ID NO: 174302 - DNA, 20 bp, synthetic construct
  source 1..20: mol_type = other DNA
gtagttgccgacttttccta

SEQ ID NO: 174303 - DNA, 20 bp, synthetic construct
  source 1..20: mol_type = other DNA
ggtagttgccgacttttcct

SEQ ID NO: 174304 - DNA, 20 bp, synthetic construct
  source 1..20: mol_type = other DNA
gggtagttgccgacttttcc

SEQ ID NO: 174305 - DNA, 20 bp, synthetic construct
  source 1..20: mol_type = other DNA
tgggtagttgccgacttttc

SEQ ID NO: 174306 - DNA, 20 bp, synthetic construct
  source 1..20: mol_type = other DNA
ctgggtagttgccgactttt

SEQ ID NO: 174307 - DNA, 20 bp, synthetic construct
  source 1..20: mol_type = other DNA
gctgggtagttgccgacttt

SEQ ID NO: 174308 - DNA, 20 bp, synthetic construct
  source 1..20: mol_type = other DNA
agctgggtagttgccgactt

SEQ ID NO: 174309 - DNA, 20 bp, synthetic construct
  source 1..20: mol_type = other DNA
gagctgggtagttgccgact

SEQ ID NO: 174310 - DNA, 20 bp, synthetic construct
  source 1..20: mol_type = other DNA
ggagctgggtagttgccgac

SEQ ID NO: 174311 - DNA, 20 bp, synthetic construct
  source 1..20: mol_type = other DNA
gggagctgggtagttgccga

SEQ ID NO: 174312 - DNA, 20 bp, synthetic construct
  source 1..20: mol_type = other DNA
ggggagctgggtagttgccg

SEQ ID NO: 174313 - DNA, 20 bp, synthetic construct
  source 1..20: mol_type = other DNA
aggggagctgggtagttgcc

SEQ ID NO: 174314 - DNA, 20 bp, synthetic construct
  source 1..20: mol_type = other DNA
caggggagctgggtagttgc

SEQ ID NO: 174315 - DNA, 20 bp, synthetic construct
  source 1..20: mol_type = other DNA
gcaggggagctgggtagttg

SEQ ID NO: 174316 - DNA, 20 bp, synthetic construct
  source 1..20: mol_type = other DNA
tgcaggggagctgggtagtt

SEQ ID NO: 174317 - DNA, 20 bp, synthetic construct
  source 1..20: mol_type = other DNA
gtgcaggggagctgggtagt

SEQ ID NO: 174318 - DNA, 20 bp, synthetic construct
  source 1..20: mol_type = other DNA
ggtgcaggggagctgggtag

SEQ ID NO: 174319 - DNA, 20 bp, synthetic construct
  source 1..20: mol_type = other DNA
tggtgcaggggagctgggta

SEQ ID NO: 174320 - DNA, 20 bp, synthetic construct
  source 1..20: mol_type = other DNA
ttggtgcaggggagctgggt

SEQ ID NO: 174321 - DNA, 20 bp, synthetic construct
  source 1..20: mol_type = other DNA
tttggtgcaggggagctggg

SEQ ID NO: 174322 - DNA, 20 bp, synthetic construct
  source 1..20: mol_type = other DNA
gtttggtgcaggggagctgg

SEQ ID NO: 174323 - DNA, 20 bp, synthetic construct
  source 1..20: mol_type = other DNA
agtttggtgcaggggagctg

SEQ ID NO: 174324 - DNA, 20 bp, synthetic construct
  source 1..20: mol_type = other DNA
cagtttggtgcaggggagct

SEQ ID NO: 174325 - DNA, 20 bp, synthetic construct
  source 1..20: mol_type = other DNA
ccagtttggtgcaggggagc

SEQ ID NO: 174326 - DNA, 20 bp, synthetic construct
  source 1..20: mol_type = other DNA
cccagtttggtgcaggggag

SEQ ID NO: 174327 - DNA, 20 bp, synthetic construct
  source 1..20: mol_type = other DNA
gcccagtttggtgcagggga

SEQ ID NO: 174328 - DNA, 20 bp, synthetic construct
  source 1..20: mol_type = other DNA
tgcccagtttggtgcagggg

SEQ ID NO: 174329 - DNA, 20 bp, synthetic construct
  source 1..20: mol_type = other DNA
ctgcccagtttggtgcaggg

SEQ ID NO: 174330 - DNA, 20 bp, synthetic construct
  source 1..20: mol_type = other DNA
tctgcccagtttggtgcagg

SEQ ID NO: 174331 - DNA, 20 bp, synthetic construct
  source 1..20: mol_type = other DNA
ttctgcccagtttggtgcag

SEQ ID NO: 174332 - DNA, 20 bp, synthetic construct
  source 1..20: mol_type = other DNA
cttctgcccagtttggtgca

SEQ ID NO: 174333 - DNA, 20 bp, synthetic construct
  source 1..20: mol_type = other DNA
acttctgcccagtttggtgc

SEQ ID NO: 174334 - DNA, 20 bp, synthetic construct
  source 1..20: mol_type = other DNA
cacttctgcccagtttggtg

SEQ ID NO: 174335 - DNA, 20 bp, synthetic construct
  source 1..20: mol_type = other DNA
ccacttctgcccagtttggt

SEQ ID NO: 174336 - DNA, 20 bp, synthetic construct
  source 1..20: mol_type = other DNA
tccacttctgcccagtttgg

SEQ ID NO: 174337 - DNA, 20 bp, synthetic construct
  source 1..20: mol_type = other DNA
atccacttctgcccagtttg

SEQ ID NO: 174338 - DNA, 20 bp, synthetic construct
  source 1..20: mol_type = other DNA
gatccacttctgcccagttt

SEQ ID NO: 174339 - DNA, 20 bp, synthetic construct
  source 1..20: mol_type = other DNA
ggatccacttctgcccagtt

SEQ ID NO: 174340 - DNA, 20 bp, synthetic construct
  source 1..20: mol_type = other DNA
aggatccacttctgcccagt

SEQ ID NO: 174341 - DNA, 20 bp, synthetic construct
  source 1..20: mol_type = other DNA
gaggatccacttctgcccag

SEQ ID NO: 174342 - DNA, 20 bp, synthetic construct
  source 1..20: mol_type = other DNA
agaggatccacttctgccca

SEQ ID NO: 174343 - DNA, 20 bp, synthetic construct
  source 1..20: mol_type = other DNA
cagaggatccacttctgccc

SEQ ID NO: 174344 - DNA, 20 bp, synthetic construct
  source 1..20: mol_type = other DNA
tcagaggatccacttctgcc

SEQ ID NO: 174345 - DNA, 20 bp, synthetic construct
  source 1..20: mol_type = other DNA
ttcagaggatccacttctgc

SEQ ID NO: 174346 - DNA, 20 bp, synthetic construct
  source 1..20: mol_type = other DNA
tttcagaggatccacttctg

SEQ ID NO: 174347 - DNA, 20 bp, synthetic construct
  source 1..20: mol_type = other DNA
ttttcagaggatccacttct

SEQ ID NO: 174348 - DNA, 20 bp, synthetic construct
  source 1..20: mol_type = other DNA
attttcagaggatccacttc

SEQ ID NO: 174349 - DNA, 20 bp, synthetic construct
  source 1..20: mol_type = other DNA
aattttcagaggatccactt

SEQ ID NO: 174350 - DNA, 20 bp, synthetic construct
  source 1..20: mol_type = other DNA
caattttcagaggatccact

SEQ ID NO: 174351 - DNA, 20 bp, synthetic construct
  source 1..20: mol_type = other DNA
gcaattttcagaggatccac

SEQ ID NO: 174352 - DNA, 20 bp, synthetic construct
  source 1..20: mol_type = other DNA
tgcaattttcagaggatcca

SEQ ID NO: 174353 - DNA, 20 bp, synthetic construct
  source 1..20: mol_type = other DNA
gtgcaattttcagaggatcc

SEQ ID NO: 174354 - DNA, 20 bp, synthetic construct
  source 1..20: mol_type = other DNA
tgtgcaattttcagaggatc

SEQ ID NO: 174355 - DNA, 20 bp, synthetic construct
  source 1..20: mol_type = other DNA
gtgtgcaattttcagaggat

SEQ ID NO: 174356 - DNA, 20 bp, synthetic construct
  source 1..20: mol_type = other DNA
tgtgtgcaattttcagagga

SEQ ID NO: 174357 - DNA, 20 bp, synthetic construct
  source 1..20: mol_type = other DNA
gtgtgtgcaattttcagagg

SEQ ID NO: 174358 - DNA, 20 bp, synthetic construct
  source 1..20: mol_type = other DNA
ggtgtgtgcaattttcagag

SEQ ID NO: 174359 - DNA, 20 bp, synthetic construct
  source 1..20: mol_type = other DNA
gggtgtgtgcaattttcaga

SEQ ID NO: 174360 - DNA, 20 bp, synthetic construct
  source 1..20: mol_type = other DNA
tgggtgtgtgcaattttcag

SEQ ID NO: 174361 - DNA, 20 bp, synthetic construct
  source 1..20: mol_type = other DNA
atgggtgtgtgcaattttca

SEQ ID NO: 174362 - DNA, 20 bp, synthetic construct
  source 1..20: mol_type = other DNA
catgggtgtgtgcaattttc

SEQ ID NO: 174363 - DNA, 20 bp, synthetic construct
  source 1..20: mol_type = other DNA
acatgggtgtgtgcaatttt

SEQ ID NO: 174364 - DNA, 20 bp, synthetic construct
  source 1..20: mol_type = other DNA
aacatgggtgtgtgcaattt

SEQ ID NO: 174365 - DNA, 20 bp, synthetic construct
  source 1..20: mol_type = other DNA
aaacatgggtgtgtgcaatt

SEQ ID NO: 174366 - DNA, 20 bp, synthetic construct
  source 1..20: mol_type = other DNA
taaacatgggtgtgtgcaat

SEQ ID NO: 174367 - DNA, 20 bp, synthetic construct
  source 1..20: mol_type = other DNA
ttaaacatgggtgtgtgcaa

SEQ ID NO: 174368 - DNA, 20 bp, synthetic construct
  source 1..20: mol_type = other DNA
tttaaacatgggtgtgtgca

SEQ ID NO: 174369 - DNA, 20 bp, synthetic construct
  source 1..20: mol_type = other DNA
atttaaacatgggtgtgtgc

SEQ ID NO: 174370 - DNA, 20 bp, synthetic construct
  source 1..20: mol_type = other DNA
catttaaacatgggtgtgtg

SEQ ID NO: 174371 - DNA, 20 bp, synthetic construct
  source 1..20: mol_type = other DNA
acatttaaacatgggtgtgt

SEQ ID NO: 174372 - DNA, 20 bp, synthetic construct
  source 1..20: mol_type = other DNA
tacatttaaacatgggtgtg

SEQ ID NO: 174373 - DNA, 20 bp, synthetic construct
  source 1..20: mol_type = other DNA
gtacatttaaacatgggtgt

SEQ ID NO: 174374 - DNA, 20 bp, synthetic construct
  source 1..20: mol_type = other DNA
tgtacatttaaacatgggtg

SEQ ID NO: 174375 - DNA, 20 bp, synthetic construct
  source 1..20: mol_type = other DNA
gtgtacatttaaacatgggt

SEQ ID NO: 174376 - DNA, 20 bp, synthetic construct
  source 1..20: mol_type = other DNA
tgtgtacatttaaacatggg

SEQ ID NO: 174377 - DNA, 20 bp, synthetic construct
  source 1..20: mol_type = other DNA
gtgtgtacatttaaacatgg

SEQ ID NO: 174378 - DNA, 20 bp, synthetic construct
  source 1..20: mol_type = other DNA
tgtgtgtacatttaaacatg

SEQ ID NO: 174379 - DNA, 20 bp, synthetic construct
  source 1..20: mol_type = other DNA
ctgtgtgtacatttaaacat

SEQ ID NO: 174380 - DNA, 20 bp, synthetic construct
  source 1..20: mol_type = other DNA
tctgtgtgtacatttaaaca

SEQ ID NO: 174381 - DNA, 20 bp, synthetic construct
  source 1..20: mol_type = other DNA
ttctgtgtgtacatttaaac

SEQ ID NO: 174382 - DNA, 20 bp, synthetic construct
  source 1..20: mol_type = other DNA
gttctgtgtgtacatttaaa

SEQ ID NO: 174383 - DNA, 20 bp, synthetic construct
  source 1..20: mol_type = other DNA
agttctgtgtgtacatttaa

SEQ ID NO: 174384 - DNA, 20 bp, synthetic construct
  source 1..20: mol_type = other DNA
gagttctgtgtgtacattta

SEQ ID NO: 174385 - DNA, 20 bp, synthetic construct
  source 1..20: mol_type = other DNA
agagttctgtgtgtacattt

SEQ ID NO: 174386 - DNA, 20 bp, synthetic construct
  source 1..20: mol_type = other DNA
aagagttctgtgtgtacatt

SEQ ID NO: 174387 - DNA, 20 bp, synthetic construct
  source 1..20: mol_type = other DNA
caagagttctgtgtgtacat

SEQ ID NO: 174388 - DNA, 20 bp, synthetic construct
  source 1..20: mol_type = other DNA
gcaagagttctgtgtgtaca

SEQ ID NO: 174389 - DNA, 20 bp, synthetic construct
  source 1..20: mol_type = other DNA
ggcaagagttctgtgtgtac

SEQ ID NO: 174390 - DNA, 20 bp, synthetic construct
  source 1..20: mol_type = other DNA
tggcaagagttctgtgtgta

SEQ ID NO: 174391 - DNA, 20 bp, synthetic construct
  source 1..20: mol_type = other DNA
gtggcaagagttctgtgtgt

SEQ ID NO: 174392 - DNA, 20 bp, synthetic construct
  source 1..20: mol_type = other DNA
tgtggcaagagttctgtgtg

SEQ ID NO: 174393 - DNA, 20 bp, synthetic construct
  source 1..20: mol_type = other DNA
ctgtggcaagagttctgtgt

SEQ ID NO: 174394 - DNA, 20 bp, synthetic construct
  source 1..20: mol_type = other DNA
cctgtggcaagagttctgtg

SEQ ID NO: 174395 - DNA, 20 bp, synthetic construct
  source 1..20: mol_type = other DNA
gcctgtggcaagagttctgt

SEQ ID NO: 174396 - DNA, 20 bp, synthetic construct
  source 1..20: mol_type = other DNA
tgcctgtggcaagagttctg

SEQ ID NO: 174397 - DNA, 20 bp, synthetic construct
  source 1..20: mol_type = other DNA
ttgcctgtggcaagagttct

SEQ ID NO: 174398 - DNA, 20 bp, synthetic construct
  source 1..20: mol_type = other DNA
cttgcctgtggcaagagttc

SEQ ID NO: 174399 - DNA, 20 bp, synthetic construct
  source 1..20: mol_type = other DNA
gcttgcctgtggcaagagtt

SEQ ID NO: 174400 - DNA, 20 bp, synthetic construct
  source 1..20: mol_type = other DNA
cgcttgcctgtggcaagagt

SEQ ID NO: 174401 - DNA, 20 bp, synthetic construct
  source 1..20: mol_type = other DNA
ccgcttgcctgtggcaagag

SEQ ID NO: 174402 - DNA, 20 bp, synthetic construct
  source 1..20: mol_type = other DNA
tccgcttgcctgtggcaaga

SEQ ID NO: 174403 - DNA, 20 bp, synthetic construct
  source 1..20: mol_type = other DNA
ctccgcttgcctgtggcaag

SEQ ID NO: 174404 - DNA, 20 bp, synthetic construct
  source 1..20: mol_type = other DNA
tctccgcttgcctgtggcaa

SEQ ID NO: 174405 - DNA, 20 bp, synthetic construct
  source 1..20: mol_type = other DNA
atctccgcttgcctgtggca

SEQ ID NO: 174406 - DNA, 20 bp, synthetic construct
  source 1..20: mol_type = other DNA
aatctccgcttgcctgtggc

SEQ ID NO: 174407 - DNA, 20 bp, synthetic construct
  source 1..20: mol_type = other DNA
aaatctccgcttgcctgtgg

SEQ ID NO: 174408 - DNA, 20 bp, synthetic construct
  source 1..20: mol_type = other DNA
caaatctccgcttgcctgtg

SEQ ID NO: 174409 - DNA, 20 bp, synthetic construct
  source 1..20: mol_type = other DNA
acaaatctccgcttgcctgt

SEQ ID NO: 174410 - DNA, 20 bp, synthetic construct
  source 1..20: mol_type = other DNA
gacaaatctccgcttgcctg

SEQ ID NO: 174411 - DNA, 20 bp, synthetic construct
  source 1..20: mol_type = other DNA
tgacaaatctccgcttgcct

SEQ ID NO: 174412 - DNA, 20 bp, synthetic construct
  source 1..20: mol_type = other DNA
atgacaaatctccgcttgcc

SEQ ID NO: 174413 - DNA, 20 bp, synthetic construct
  source 1..20: mol_type = other DNA
gatgacaaatctccgcttgc

SEQ ID NO: 174414 - DNA, 20 bp, synthetic construct
  source 1..20: mol_type = other DNA
agatgacaaatctccgcttg

SEQ ID NO: 174415 - DNA, 20 bp, synthetic construct
  source 1..20: mol_type = other DNA
cagatgacaaatctccgctt

SEQ ID NO: 174416 - DNA, 20 bp, synthetic construct
  source 1..20: mol_type = other DNA
gcagatgacaaatctccgct

SEQ ID NO: 174417 - DNA, 20 bp, synthetic construct
  source 1..20: mol_type = other DNA
agcagatgacaaatctccgc

SEQ ID NO: 174418 - DNA, 20 bp, synthetic construct
  source 1..20: mol_type = other DNA
cagcagatgacaaatctccg

SEQ ID NO: 174419 - DNA, 20 bp, synthetic construct
  source 1..20: mol_type = other DNA
acagcagatgacaaatctcc

SEQ ID NO: 174420 - DNA, 20 bp, synthetic construct
  source 1..20: mol_type = other DNA
gacagcagatgacaaatctc

SEQ ID NO: 174421 - DNA, 20 bp, synthetic construct
  source 1..20: mol_type = other DNA
ggacagcagatgacaaatct

SEQ ID NO: 174422 - DNA, 20 bp, synthetic construct
  source 1..20: mol_type = other DNA
gggacagcagatgacaaatc

SEQ ID NO: 174423 - DNA, 20 bp, synthetic construct
  source 1..20: mol_type = other DNA
agggacagcagatgacaaat

SEQ ID NO: 174424 - DNA, 20 bp, synthetic construct
  source 1..20: mol_type = other DNA
cagggacagcagatgacaaa

SEQ ID NO: 174425 - DNA, 20 bp, synthetic construct
  source 1..20: mol_type = other DNA
gcagggacagcagatgacaa

SEQ ID NO: 174426 - DNA, 20 bp, synthetic construct
  source 1..20: mol_type = other DNA
ggcagggacagcagatgaca

SEQ ID NO: 174427 - DNA, 20 bp, synthetic construct
  source 1..20: mol_type = other DNA
aggcagggacagcagatgac

SEQ ID NO: 174428 - DNA, 20 bp, synthetic construct
  source 1..20: mol_type = other DNA
gaggcagggacagcagatga

SEQ ID NO: 174429 - DNA, 20 bp, synthetic construct
  source 1..20: mol_type = other DNA
tgaggcagggacagcagatg

SEQ ID NO: 174430 - DNA, 20 bp, synthetic construct
  source 1..20: mol_type = other DNA
atgaggcagggacagcagat

SEQ ID NO: 174431 - DNA, 20 bp, synthetic construct
  source 1..20: mol_type = other DNA
gatgaggcagggacagcaga

SEQ ID NO: 174432 - DNA, 20 bp, synthetic construct
  source 1..20: mol_type = other DNA
agatgaggcagggacagcag

SEQ ID NO: 174433 - DNA, 20 bp, synthetic construct
  source 1..20: mol_type = other DNA
aagatgaggcagggacagca

SEQ ID NO: 174434 - DNA, 20 bp, synthetic construct
  source 1..20: mol_type = other DNA
gaagatgaggcagggacagc

SEQ ID NO: 174435 - DNA, 20 bp, synthetic construct
  source 1..20: mol_type = other DNA
agaagatgaggcagggacag

SEQ ID NO: 174436 - DNA, 20 bp, synthetic construct
  source 1..20: mol_type = other DNA
aagaagatgaggcagggaca

SEQ ID NO: 174437 - DNA, 20 bp, synthetic construct
  source 1..20: mol_type = other DNA
gaagaagatgaggcagggac

SEQ ID NO: 174438 - DNA, 20 bp, synthetic construct
  source 1..20: mol_type = other DNA
ggaagaagatgaggcaggga

SEQ ID NO: 174439 - DNA, 20 bp, synthetic construct
  source 1..20: mol_type = other DNA
aggaagaagatgaggcaggg

SEQ ID NO: 174440 - DNA, 20 bp, synthetic construct
  source 1..20: mol_type = other DNA
caggaagaagatgaggcagg

SEQ ID NO: 174441 - DNA, 20 bp, synthetic construct
  source 1..20: mol_type = other DNA
tcaggaagaagatgaggcag

SEQ ID NO: 174442 - DNA, 20 bp, synthetic construct
  source 1..20: mol_type = other DNA
ttcaggaagaagatgaggca

SEQ ID NO: 174443 - DNA, 20 bp, synthetic construct
  source 1..20: mol_type = other DNA
tttcaggaagaagatgaggc

SEQ ID NO: 174444 - DNA, 20 bp, synthetic construct
  source 1..20: mol_type = other DNA
atttcaggaagaagatgagg

SEQ ID NO: 174445 - DNA, 20 bp, synthetic construct
  source 1..20: mol_type = other DNA
gatttcaggaagaagatgag

SEQ ID NO: 174446 - DNA, 20 bp, synthetic construct
  source 1..20: mol_type = other DNA
ggatttcaggaagaagatga

SEQ ID NO: 174447 - DNA, 20 bp, synthetic construct
  source 1..20: mol_type = other DNA
tggatttcaggaagaagatg

SEQ ID NO: 174448 - DNA, 20 bp, synthetic construct
  source 1..20: mol_type = other DNA
gtggatttcaggaagaagat

SEQ ID NO: 174449 - DNA, 20 bp, synthetic construct
  source 1..20: mol_type = other DNA
agtggatttcaggaagaaga

SEQ ID NO: 174450 - DNA, 20 bp, synthetic construct
  source 1..20: mol_type = other DNA
gagtggatttcaggaagaag

SEQ ID NO: 174451 - DNA, 20 bp, synthetic construct
  source 1..20: mol_type = other DNA
ggagtggatttcaggaagaa

SEQ ID NO: 174452 - DNA, 20 bp, synthetic construct
  source 1..20: mol_type = other DNA
tggagtggatttcaggaaga

SEQ ID NO: 174453 - DNA, 20 bp, synthetic construct
  source 1..20: mol_type = other DNA
atggagtggatttcaggaag

SEQ ID NO: 174454 - DNA, 20 bp, synthetic construct
  source 1..20: mol_type = other DNA
catggagtggatttcaggaa

SEQ ID NO: 174455 - DNA, 20 bp, synthetic construct
  source 1..20: mol_type = other DNA
gcatggagtggatttcagga

SEQ ID NO: 174456 - DNA, 20 bp, synthetic construct
  source 1..20: mol_type = other DNA
ggcatggagtggatttcagg

SEQ ID NO: 174457 - DNA, 20 bp, synthetic construct
  source 1..20: mol_type = other DNA
tggcatggagtggatttcag

SEQ ID NO: 174458 - DNA, 20 bp, synthetic construct
  source 1..20: mol_type = other DNA
ctggcatggagtggatttca

SEQ ID NO: 174459 - DNA, 20 bp, synthetic construct
  source 1..20: mol_type = other DNA
cctggcatggagtggatttc

SEQ ID NO: 174460 - DNA, 20 bp, synthetic construct
  source 1..20: mol_type = other DNA
tcctggcatggagtggattt

SEQ ID NO: 174461 - DNA, 20 bp, synthetic construct
  source 1..20: mol_type = other DNA
ttcctggcatggagtggatt

SEQ ID NO: 174462 - DNA, 20 bp, synthetic construct
  source 1..20: mol_type = other DNA
attcctggcatggagtggat

SEQ ID NO: 174463 - DNA, 20 bp, synthetic construct
  source 1..20: mol_type = other DNA
tattcctggcatggagtgga

SEQ ID NO: 174464 - DNA, 20 bp, synthetic construct
  source 1..20: mol_type = other DNA
ttattcctggcatggagtgg

SEQ ID NO: 174465 - DNA, 20 bp, synthetic construct
  source 1..20: mol_type = other DNA
tttattcctggcatggagtg

SEQ ID NO: 174466 - DNA, 20 bp, synthetic construct
  source 1..20: mol_type = other DNA
gtttattcctggcatggagt

SEQ ID NO: 174467 - DNA, 20 bp, synthetic construct
  source 1..20: mol_type = other DNA
agtttattcctggcatggag

SEQ ID NO: 174468 - DNA, 20 bp, synthetic construct
  source 1..20: mol_type = other DNA
cagtttattcctggcatgga

SEQ ID NO: 174469 - DNA, 20 bp, synthetic construct
  source 1..20: mol_type = other DNA
gcagtttattcctggcatgg

SEQ ID NO: 174470 - DNA, 20 bp, synthetic construct
  source 1..20: mol_type = other DNA
tgcagtttattcctggcatg

SEQ ID NO: 174471 - DNA, 20 bp, synthetic construct
  source 1..20: mol_type = other DNA
atgcagtttattcctggcat

SEQ ID NO: 174472 - DNA, 20 bp, synthetic construct
  source 1..20: mol_type = other DNA
catgcagtttattcctggca

SEQ ID NO: 174473 - DNA, 20 bp, synthetic construct
  source 1..20: mol_type = other DNA
gcatgcagtttattcctggc

SEQ ID NO: 174474 - DNA, 20 bp, synthetic construct
  source 1..20: mol_type = other DNA
agcatgcagtttattcctgg

SEQ ID NO: 174475 - DNA, 20 bp, synthetic construct
  source 1..20: mol_type = other DNA
gagcatgcagtttattcctg

SEQ ID NO: 174476 - DNA, 20 bp, synthetic construct
  source 1..20: mol_type = other DNA
agagcatgcagtttattcct

SEQ ID NO: 174477 - DNA, 20 bp, synthetic construct
  source 1..20: mol_type = other DNA
gagagcatgcagtttattcc

SEQ ID NO: 174478 - DNA, 20 bp, synthetic construct
  source 1..20: mol_type = other DNA
ggagagcatgcagtttattc

SEQ ID NO: 174479 - DNA, 20 bp, synthetic construct
  source 1..20: mol_type = other DNA
tggagagcatgcagtttatt

SEQ ID NO: 174480 - DNA, 20 bp, synthetic construct
  source 1..20: mol_type = other DNA
gtggagagcatgcagtttat

SEQ ID NO: 174481 - DNA, 20 bp, synthetic construct
  source 1..20: mol_type = other DNA
ggtggagagcatgcagttta

SEQ ID NO: 174482 - DNA, 20 bp, synthetic construct
  source 1..20: mol_type = other DNA
tggtggagagcatgcagttt

SEQ ID NO: 174483 - DNA, 20 bp, synthetic construct
  source 1..20: mol_type = other DNA
ctggtggagagcatgcagtt

SEQ ID NO: 174484 - DNA, 20 bp, synthetic construct
  source 1..20: mol_type = other DNA
gctggtggagagcatgcagt

SEQ ID NO: 174485 - DNA, 20 bp, synthetic construct
  source 1..20: mol_type = other DNA
ggctggtggagagcatgcag

SEQ ID NO: 174486 - DNA, 20 bp, synthetic construct
  source 1..20: mol_type = other DNA
gggctggtggagagcatgca

SEQ ID NO: 174487 - DNA, 20 bp, synthetic construct
  source 1..20: mol_type = other DNA
tgggctggtggagagcatgc

SEQ ID NO: 174488 - DNA, 20 bp, synthetic construct
  source 1..20: mol_type = other DNA
ttgggctggtggagagcatg

SEQ ID NO: 174489 - DNA, 20 bp, synthetic construct
  source 1..20: mol_type = other DNA
tttgggctggtggagagcat

SEQ ID NO: 174490 - DNA, 20 bp, synthetic construct
  source 1..20: mol_type = other DNA
gtttgggctggtggagagca

SEQ ID NO: 174491 - DNA, 20 bp, synthetic construct
  source 1..20: mol_type = other DNA
agtttgggctggtggagagc

SEQ ID NO: 174492 - DNA, 20 bp, synthetic construct
  source 1..20: mol_type = other DNA
cagtttgggctggtggagag

SEQ ID NO: 174493 - DNA, 20 bp, synthetic construct
  source 1..20: mol_type = other DNA
tcagtttgggctggtggaga

SEQ ID NO: 174494 - DNA, 20 bp, synthetic construct
  source 1..20: mol_type = other DNA
gtcagtttgggctggtggag

SEQ ID NO: 174495 - DNA, 20 bp, synthetic construct
  source 1..20: mol_type = other DNA
ggtcagtttgggctggtgga

SEQ ID NO: 174496 - DNA, 20 bp, synthetic construct
  source 1..20: mol_type = other DNA
aggtcagtttgggctggtgg

SEQ ID NO: 174497 - DNA, 20 bp, synthetic construct
  source 1..20: mol_type = other DNA
caggtcagtttgggctggtg

SEQ ID NO: 174498 - DNA, 20 bp, synthetic construct
  source 1..20: mol_type = other DNA
gcaggtcagtttgggctggt

SEQ ID NO: 174499 - DNA, 20 bp, synthetic construct
  source 1..20: mol_type = other DNA
ggcaggtcagtttgggctgg

SEQ ID NO: 174500 - DNA, 20 bp, synthetic construct
  source 1..20: mol_type = other DNA
aggcaggtcagtttgggctg

SEQ ID NO: 174501 - DNA, 20 bp, synthetic construct
  source 1..20: mol_type = other DNA
aaggcaggtcagtttgggct

SEQ ID NO: 174502 - DNA, 20 bp, synthetic construct
  source 1..20: mol_type = other DNA
gaaggcaggtcagtttgggc

SEQ ID NO: 174503 - DNA, 20 bp, synthetic construct
  source 1..20: mol_type = other DNA
ggaaggcaggtcagtttggg

SEQ ID NO: 174504 - DNA, 20 bp, synthetic construct
  source 1..20: mol_type = other DNA
gggaaggcaggtcagtttgg

SEQ ID NO: 174505 - DNA, 20 bp, synthetic construct
  source 1..20: mol_type = other DNA
cgggaaggcaggtcagtttg

SEQ ID NO: 174506 - DNA, 20 bp, synthetic construct
  source 1..20: mol_type = other DNA
gcgggaaggcaggtcagttt

SEQ ID NO: 174507 - DNA, 20 bp, synthetic construct
  source 1..20: mol_type = other DNA
ggcgggaaggcaggtcagtt

SEQ ID NO: 174508 - DNA, 20 bp, synthetic construct
  source 1..20: mol_type = other DNA
tggcgggaaggcaggtcagt

SEQ ID NO: 174509 - DNA, 20 bp, synthetic construct
  source 1..20: mol_type = other DNA
ctggcgggaaggcaggtcag

SEQ ID NO: 174510 - DNA, 20 bp, synthetic construct
  source 1..20: mol_type = other DNA
gctggcgggaaggcaggtca

SEQ ID NO: 174511 - DNA, 20 bp, synthetic construct
  source 1..20: mol_type = other DNA
ggctggcgggaaggcaggtc

SEQ ID NO: 174512 - DNA, 20 bp, synthetic construct
  source 1..20: mol_type = other DNA
tggctggcgggaaggcaggt

SEQ ID NO: 174513 - DNA, 20 bp, synthetic construct
  source 1..20: mol_type = other DNA
atggctggcgggaaggcagg

SEQ ID NO: 174514 - DNA, 20 bp, synthetic construct
  source 1..20: mol_type = other DNA
gatggctggcgggaaggcag

SEQ ID NO: 174515 - DNA, 20 bp, synthetic construct
  source 1..20: mol_type = other DNA
ggatggctggcgggaaggca

SEQ ID NO: 174516 - DNA, 20 bp, synthetic construct
  source 1..20: mol_type = other DNA
gggatggctggcgggaaggc

SEQ ID NO: 174517 - DNA, 20 bp, synthetic construct
  source 1..20: mol_type = other DNA
cgggatggctggcgggaagg

SEQ ID NO: 174518 - DNA, 20 bp, synthetic construct
  source 1..20: mol_type = other DNA
ccgggatggctggcgggaag

SEQ ID NO: 174519 - DNA, 20 bp, synthetic construct
  source 1..20: mol_type = other DNA
cccgggatggctggcgggaa

SEQ ID NO: 174520 - DNA, 20 bp, synthetic construct
  source 1..20: mol_type = other DNA
gcccgggatggctggcggga

SEQ ID NO: 174521 - DNA, 20 bp, synthetic construct
  source 1..20: mol_type = other DNA
tgcccgggatggctggcggg

SEQ ID NO: 174522 - DNA, 20 bp, synthetic construct
  source 1..20: mol_type = other DNA
ctgcccgggatggctggcgg

SEQ ID NO: 174523 - DNA, 20 bp, synthetic construct
  source 1..20: mol_type = other DNA
cctgcccgggatggctggcg

SEQ ID NO: 174524 - DNA, 20 bp, synthetic construct
  source 1..20: mol_type = other DNA
ccctgcccgggatggctggc

SEQ ID NO: 174525 - DNA, 20 bp, synthetic construct
  source 1..20: mol_type = other DNA
accctgcccgggatggctgg

SEQ ID NO: 174526 - DNA, 20 bp, synthetic construct
  source 1..20: mol_type = other DNA
caccctgcccgggatggctg

SEQ ID NO: 174527 - DNA, 20 bp, synthetic construct
  source 1..20: mol_type = other DNA
tcaccctgcccgggatggct

SEQ ID NO: 174528 - DNA, 20 bp, synthetic construct
  source 1..20: mol_type = other DNA
gtcaccctgcccgggatggc

SEQ ID NO: 174529 - DNA, 20 bp, synthetic construct
  source 1..20: mol_type = other DNA
ggtcaccctgcccgggatgg

SEQ ID NO: 174530 - DNA, 20 bp, synthetic construct
  source 1..20: mol_type = other DNA
aggtcaccctgcccgggatg

SEQ ID NO: 174531 - DNA, 20 bp, synthetic construct
  source 1..20: mol_type = other DNA
caggtcaccctgcccgggat

SEQ ID NO: 174532 - DNA, 20 bp, synthetic construct
  source 1..20: mol_type = other DNA
ccaggtcaccctgcccggga

SEQ ID NO: 174533 - DNA, 20 bp, synthetic construct
  source 1..20: mol_type = other DNA
gccaggtcaccctgcccggg

SEQ ID NO: 174534 - DNA, 20 bp, synthetic construct
  source 1..20: mol_type = other DNA
agccaggtcaccctgcccgg

SEQ ID NO: 174535 - DNA, 20 bp, synthetic construct
  source 1..20: mol_type = other DNA
aagccaggtcaccctgcccg

SEQ ID NO: 174536 - DNA, 20 bp, synthetic construct
  source 1..20: mol_type = other DNA
taagccaggtcaccctgccc

SEQ ID NO: 174537 - DNA, 20 bp, synthetic construct
  source 1..20: mol_type = other DNA
ctaagccaggtcaccctgcc

SEQ ID NO: 174538 - DNA, 20 bp, synthetic construct
  source 1..20: mol_type = other DNA
actaagccaggtcaccctgc

SEQ ID NO: 174539 - DNA, 20 bp, synthetic construct
  source 1..20: mol_type = other DNA
tactaagccaggtcaccctg

SEQ ID NO: 174540 - DNA, 20 bp, synthetic construct
  source 1..20: mol_type = other DNA
gtactaagccaggtcaccct

SEQ ID NO: 174541 - DNA, 20 bp, synthetic construct
  source 1..20: mol_type = other DNA
tgtactaagccaggtcaccc

SEQ ID NO: 174542 - DNA, 20 bp, synthetic construct
  source 1..20: mol_type = other DNA
atgtactaagccaggtcacc

SEQ ID NO: 174543 - DNA, 20 bp, synthetic construct
  source 1..20: mol_type = other DNA
gatgtactaagccaggtcac

SEQ ID NO: 174544 - DNA, 20 bp, synthetic construct
  source 1..20: mol_type = other DNA
cgatgtactaagccaggtca

SEQ ID NO: 174545 - DNA, 20 bp, synthetic construct
  source 1..20: mol_type = other DNA
ccgatgtactaagccaggtc

SEQ ID NO: 174546 - DNA, 20 bp, synthetic construct
  source 1..20: mol_type = other DNA
cccgatgtactaagccaggt

SEQ ID NO: 174547 - DNA, 20 bp, synthetic construct
  source 1..20: mol_type = other DNA
acccgatgtactaagccagg

SEQ ID NO: 174548 - DNA, 20 bp, synthetic construct
  source 1..20: mol_type = other DNA
aacccgatgtactaagccag

SEQ ID NO: 174549 - DNA, 20 bp, synthetic construct
  source 1..20: mol_type = other DNA
gaacccgatgtactaagcca

SEQ ID NO: 174550 - DNA, 20 bp, synthetic construct
  source 1..20: mol_type = other DNA
tgaacccgatgtactaagcc

SEQ ID NO: 174551 - DNA, 20 bp, synthetic construct
  source 1..20: mol_type = other DNA
ctgaacccgatgtactaagc

SEQ ID NO: 174552 - DNA, 20 bp, synthetic construct
  source 1..20: mol_type = other DNA
tctgaacccgatgtactaag

SEQ ID NO: 174553 - DNA, 20 bp, synthetic construct
  source 1..20: mol_type = other DNA
ctctgaacccgatgtactaa

SEQ ID NO: 174554 - DNA, 20 bp, synthetic construct
  source 1..20: mol_type = other DNA
tctctgaacccgatgtacta

SEQ ID NO: 174555 - DNA, 20 bp, synthetic construct
  source 1..20: mol_type = other DNA
atctctgaacccgatgtact

SEQ ID NO: 174556 - DNA, 20 bp, synthetic construct
  source 1..20: mol_type = other DNA
gatctctgaacccgatgtac

SEQ ID NO: 174557 - DNA, 20 bp, synthetic construct
  source 1..20: mol_type = other DNA
agatctctgaacccgatgta

SEQ ID NO: 174558 - DNA, 20 bp, synthetic construct
  source 1..20: mol_type = other DNA
aagatctctgaacccgatgt

SEQ ID NO: 174559 - DNA, 20 bp, synthetic construct
  source 1..20: mol_type = other DNA
aaagatctctgaacccgatg

SEQ ID NO: 174560 - DNA, 20 bp, synthetic construct
  source 1..20: mol_type = other DNA
gaaagatctctgaacccgat

SEQ ID NO: 174561 - DNA, 20 bp, synthetic construct
  source 1..20: mol_type = other DNA
ggaaagatctctgaacccga

SEQ ID NO: 174562 - DNA, 20 bp, synthetic construct
  source 1..20: mol_type = other DNA
tggaaagatctctgaacccg

SEQ ID NO: 174563 - DNA, 20 bp, synthetic construct
  source 1..20: mol_type = other DNA
ctggaaagatctctgaaccc

SEQ ID NO: 174564 - DNA, 20 bp, synthetic construct
  source 1..20: mol_type = other DNA
actggaaagatctctgaacc

SEQ ID NO: 174565 - DNA, 20 bp, synthetic construct
  source 1..20: mol_type = other DNA
aactggaaagatctctgaac

SEQ ID NO: 174566 - DNA, 20 bp, synthetic construct
  source 1..20: mol_type = other DNA
aaactggaaagatctctgaa

SEQ ID NO: 174567 - DNA, 20 bp, synthetic construct
  source 1..20: mol_type = other DNA
taaactggaaagatctctga

SEQ ID NO: 174568 - DNA, 20 bp, synthetic construct
  source 1..20: mol_type = other DNA
gtaaactggaaagatctctg

SEQ ID NO: 174569 - DNA, 20 bp, synthetic construct
  source 1..20: mol_type = other DNA
agtaaactggaaagatctct

SEQ ID NO: 174570 - DNA, 20 bp, synthetic construct
  source 1..20: mol_type = other DNA
gagtaaactggaaagatctc

SEQ ID NO: 174571 - DNA, 20 bp, synthetic construct
  source 1..20: mol_type = other DNA
cgagtaaactggaaagatct

SEQ ID NO: 174572 - DNA, 20 bp, synthetic construct
  source 1..20: mol_type = other DNA
acgagtaaactggaaagatc

SEQ ID NO: 174573 - DNA, 20 bp, synthetic construct
  source 1..20: mol_type = other DNA
aacgagtaaactggaaagat

SEQ ID NO: 174574 - DNA, 20 bp, synthetic construct
  source 1..20: mol_type = other DNA
caacgagtaaactggaaaga

SEQ ID NO: 174575 - DNA, 20 bp, synthetic construct
  source 1..20: mol_type = other DNA
tcaacgagtaaactggaaag

SEQ ID NO: 174576 - DNA, 20 bp, synthetic construct
  source 1..20: mol_type = other DNA
ttcaacgagtaaactggaaa

SEQ ID NO: 174577 - DNA, 20 bp, synthetic construct
  source 1..20: mol_type = other DNA
attcaacgagtaaactggaa

SEQ ID NO: 174578 - DNA, 20 bp, synthetic construct
  source 1..20: mol_type = other DNA
tattcaacgagtaaactgga

SEQ ID NO: 174579 - DNA, 20 bp, synthetic construct
  source 1..20: mol_type = other DNA
ttattcaacgagtaaactgg

SEQ ID NO: 174580 - DNA, 20 bp, synthetic construct
  source 1..20: mol_type = other DNA
tttattcaacgagtaaactg

SEQ ID NO: 174581 - DNA, 20 bp, synthetic construct
  source 1..20: mol_type = other DNA
ttttattcaacgagtaaact

SEQ ID NO: 174582 - DNA, 20 bp, synthetic construct
  source 1..20: mol_type = other DNA
tttttattcaacgagtaaac

SEQ ID NO: 174583 - DNA, 20 bp, synthetic construct
  source 1..20: mol_type = other DNA
ctttttattcaacgagtaaa

SEQ ID NO: 174584 - DNA, 20 bp, synthetic construct
  source 1..20: mol_type = other DNA
actttttattcaacgagtaa

SEQ ID NO: 174585 - DNA, 20 bp, synthetic construct
  source 1..20: mol_type = other DNA
cactttttattcaacgagta

SEQ ID NO: 174586 - DNA, 20 bp, synthetic construct
  source 1..20: mol_type = other DNA
tcactttttattcaacgagt

SEQ ID NO: 174587 - DNA, 20 bp, synthetic construct
  source 1..20: mol_type = other DNA
ctcactttttattcaacgag

SEQ ID NO: 174588 - DNA, 20 bp, synthetic construct
  source 1..20: mol_type = other DNA
cctcactttttattcaacga

SEQ ID NO: 174589 - DNA, 20 bp, synthetic construct
  source 1..20: mol_type = other DNA
ccctcactttttattcaacg

SEQ ID NO: 174590 - DNA, 20 bp, synthetic construct
  source 1..20: mol_type = other DNA
gccctcactttttattcaac

SEQ ID NO: 174591 - DNA, 20 bp, synthetic construct
  source 1..20: mol_type = other DNA
agccctcactttttattcaa

SEQ ID NO: 174592 - DNA, 20 bp, synthetic construct
  source 1..20: mol_type = other DNA
cagccctcactttttattca

SEQ ID NO: 174593 - DNA, 20 bp, synthetic construct
  source 1..20: mol_type = other DNA
tcagccctcactttttattc

SEQ ID NO: 174594 - DNA, 20 bp, synthetic construct
  source 1..20: mol_type = other DNA
atcagccctcactttttatt

SEQ ID NO: 174595 - DNA, 20 bp, synthetic construct
  source 1..20: mol_type = other DNA
gatcagccctcactttttat

SEQ ID NO: 174596 - DNA, 20 bp, synthetic construct
  source 1..20: mol_type = other DNA
cgatcagccctcacttttta

SEQ ID NO: 174597 - DNA, 20 bp, synthetic construct
  source 1..20: mol_type = other DNA
tcgatcagccctcacttttt

SEQ ID NO: 174598 - DNA, 20 bp, synthetic construct
  source 1..20: mol_type = other DNA
ctcgatcagccctcactttt

SEQ ID NO: 174599 - DNA, 20 bp, synthetic construct
  source 1..20: mol_type = other DNA
tctcgatcagccctcacttt

SEQ ID NO: 174600 - DNA, 20 bp, synthetic construct
  source 1..20: mol_type = other DNA
ttctcgatcagccctcactt

SEQ ID NO: 174601 - DNA, 20 bp, synthetic construct
  source 1..20: mol_type = other DNA
tttctcgatcagccctcact

SEQ ID NO: 174602 - DNA, 20 bp, synthetic construct
  source 1..20: mol_type = other DNA
ctttctcgatcagccctcac

SEQ ID NO: 174603 - DNA, 20 bp, synthetic construct
  source 1..20: mol_type = other DNA
actttctcgatcagccctca

SEQ ID NO: 174604 - DNA, 20 bp, synthetic construct
  source 1..20: mol_type = other DNA
tactttctcgatcagccctc

SEQ ID NO: 174605 - DNA, 20 bp, synthetic construct
  source 1..20: mol_type = other DNA
ttactttctcgatcagccct

SEQ ID NO: 174606 - DNA, 20 bp, synthetic construct
  source 1..20: mol_type = other DNA
attactttctcgatcagccc

SEQ ID NO: 174607 - DNA, 20 bp, synthetic construct
  source 1..20: mol_type = other DNA
cattactttctcgatcagcc

SEQ ID NO: 174608 - DNA, 20 bp, synthetic construct
  source 1..20: mol_type = other DNA
ccattactttctcgatcagc

SEQ ID NO: 174609 - DNA, 20 bp, synthetic construct
  source 1..20: mol_type = other DNA
gccattactttctcgatcag

SEQ ID NO: 174610 - DNA, 20 bp, synthetic construct
  source 1..20: mol_type = other DNA
tgccattactttctcgatca

SEQ ID NO: 174611 - DNA, 20 bp, synthetic construct
  source 1..20: mol_type = other DNA
ctgccattactttctcgatc

SEQ ID NO: 174612 - DNA, 20 bp, synthetic construct
  source 1..20: mol_type = other DNA
actgccattactttctcgat

SEQ ID NO: 174613 - DNA, 20 bp, synthetic construct
  source 1..20: mol_type = other DNA
gactgccattactttctcga

SEQ ID NO: 174614 - DNA, 20 bp, synthetic construct
  source 1..20: mol_type = other DNA
tgactgccattactttctcg

SEQ ID NO: 174615 - DNA, 20 bp, synthetic construct
  source 1..20: mol_type = other DNA
ctgactgccattactttctc

SEQ ID NO: 174616 - DNA, 20 bp, synthetic construct
  source 1..20: mol_type = other DNA
cctgactgccattactttct

SEQ ID NO: 174617 - DNA, 20 bp, synthetic construct
  source 1..20: mol_type = other DNA
ccctgactgccattactttc

SEQ ID NO: 174618 - DNA, 20 bp, synthetic construct
  source 1..20: mol_type = other DNA
tccctgactgccattacttt

SEQ ID NO: 174619 - DNA, 20 bp, synthetic construct
  source 1..20: mol_type = other DNA
ttccctgactgccattactt

SEQ ID NO: 174620 - DNA, 20 bp, synthetic construct
  source 1..20: mol_type = other DNA
cttccctgactgccattact

SEQ ID NO: 174621 - DNA, 20 bp, synthetic construct
  source 1..20: mol_type = other DNA
ccttccctgactgccattac

SEQ ID NO: 174622 - DNA, 20 bp, synthetic construct
  source 1..20: mol_type = other DNA
gccttccctgactgccatta

SEQ ID NO: 174623 - DNA, 20 bp, synthetic construct
  source 1..20: mol_type = other DNA
cgccttccctgactgccatt

SEQ ID NO: 174624 - DNA, 20 bp, synthetic construct
  source 1..20: mol_type = other DNA
tcgccttccctgactgccat

SEQ ID NO: 174625 - DNA, 20 bp, synthetic construct
  source 1..20: mol_type = other DNA
ttcgccttccctgactgcca

SEQ ID NO: 174626 - DNA, 20 bp, synthetic construct
  source 1..20: mol_type = other DNA
cttcgccttccctgactgcc

SEQ ID NO: 174627 - DNA, 20 bp, synthetic construct
  source 1..20: mol_type = other DNA
ccttcgccttccctgactgc

SEQ ID NO: 174628 - DNA, 20 bp, synthetic construct
  source 1..20: mol_type = other DNA
tccttcgccttccctgactg

SEQ ID NO: 174629 - DNA, 20 bp, synthetic construct
  source 1..20: mol_type = other DNA
ctccttcgccttccctgact

SEQ ID NO: 174630 - DNA, 20 bp, synthetic construct
  source 1..20: mol_type = other DNA
cctccttcgccttccctgac

SEQ ID NO: 174631 - DNA, 20 bp, synthetic construct
  source 1..20: mol_type = other DNA
acctccttcgccttccctga

SEQ ID NO: 174632 - DNA, 20 bp, synthetic construct
  source 1..20: mol_type = other DNA
tacctccttcgccttccctg

SEQ ID NO: 174633 - DNA, 20 bp, synthetic construct
  source 1..20: mol_type = other DNA
ttacctccttcgccttccct

SEQ ID NO: 174634 - DNA, 20 bp, synthetic construct
  source 1..20: mol_type = other DNA
tttacctccttcgccttccc

SEQ ID NO: 174635 - DNA, 20 bp, synthetic construct
  source 1..20: mol_type = other DNA
ctttacctccttcgccttcc

SEQ ID NO: 174636 - DNA, 20 bp, synthetic construct
  source 1..20: mol_type = other DNA
tctttacctccttcgccttc

SEQ ID NO: 174637 - DNA, 20 bp, synthetic construct
  source 1..20: mol_type = other DNA
ttctttacctccttcgcctt

SEQ ID NO: 174638 - DNA, 20 bp, synthetic construct
  source 1..20: mol_type = other DNA
cttctttacctccttcgcct

SEQ ID NO: 174639 - DNA, 20 bp, synthetic construct
  source 1..20: mol_type = other DNA
tcttctttacctccttcgcc

SEQ ID NO: 174640 - DNA, 20 bp, synthetic construct
  source 1..20: mol_type = other DNA
ctcttctttacctccttcgc

SEQ ID NO: 174641 - DNA, 20 bp, synthetic construct
  source 1..20: mol_type = other DNA
tctcttctttacctccttcg

SEQ ID NO: 174642 - DNA, 20 bp, synthetic construct
  source 1..20: mol_type = other DNA
atctcttctttacctccttc

SEQ ID NO: 174643 - DNA, 20 bp, synthetic construct
  source 1..20: mol_type = other DNA
aatctcttctttacctcctt

SEQ ID NO: 174644 - DNA, 20 bp, synthetic construct
  source 1..20: mol_type = other DNA
aaatctcttctttacctcct

SEQ ID NO: 174645 - DNA, 20 bp, synthetic construct
  source 1..20: mol_type = other DNA
aaaatctcttctttacctcc

SEQ ID NO: 174646 - DNA, 20 bp, synthetic construct
  source 1..20: mol_type = other DNA
taaaatctcttctttacctc

SEQ ID NO: 174647 - DNA, 20 bp, synthetic construct
  source 1..20: mol_type = other DNA
gtaaaatctcttctttacct

SEQ ID NO: 174648 - DNA, 20 bp, synthetic construct
  source 1..20: mol_type = other DNA
tgtaaaatctcttctttacc

SEQ ID NO: 174649 - DNA, 20 bp, synthetic construct
  source 1..20: mol_type = other DNA
ttgtaaaatctcttctttac

SEQ ID NO: 174650 - DNA, 20 bp, synthetic construct
  source 1..20: mol_type = other DNA
tttgtaaaatctcttcttta

SEQ ID NO: 174651 - DNA, 20 bp, synthetic construct
  source 1..20: mol_type = other DNA
atttgtaaaatctcttcttt

SEQ ID NO: 174652 - DNA, 20 bp, synthetic construct
  source 1..20: mol_type = other DNA
catttgtaaaatctcttctt

SEQ ID NO: 174653 - DNA, 20 bp, synthetic construct
  source 1..20: mol_type = other DNA
tcatttgtaaaatctcttct

SEQ ID NO: 174654 - DNA, 20 bp, synthetic construct
  source 1..20: mol_type = other DNA
ttcatttgtaaaatctcttc

SEQ ID NO: 174655 - DNA, 20 bp, synthetic construct
  source 1..20: mol_type = other DNA
cttcatttgtaaaatctctt

SEQ ID NO: 174656 - DNA, 20 bp, synthetic construct
  source 1..20: mol_type = other DNA
acttcatttgtaaaatctct

SEQ ID NO: 174657 - DNA, 20 bp, synthetic construct
  source 1..20: mol_type = other DNA
tacttcatttgtaaaatctc

SEQ ID NO: 174658 - DNA, 20 bp, synthetic construct
  source 1..20: mol_type = other DNA
ttacttcatttgtaaaatct

SEQ ID NO: 174659 - DNA, 20 bp, synthetic construct
  source 1..20: mol_type = other DNA
attacttcatttgtaaaatc

SEQ ID NO: 174660 - DNA, 20 bp, synthetic construct
  source 1..20: mol_type = other DNA
aattacttcatttgtaaaat

SEQ ID NO: 174661 - DNA, 20 bp, synthetic construct
  source 1..20: mol_type = other DNA
gaattacttcatttgtaaaa

SEQ ID NO: 174662 - DNA, 20 bp, synthetic construct
  source 1..20: mol_type = other DNA
tgaattacttcatttgtaaa

SEQ ID NO: 174663 - DNA, 20 bp, synthetic construct
  source 1..20: mol_type = other DNA
ttgaattacttcatttgtaa

SEQ ID NO: 174664 - DNA, 20 bp, synthetic construct
  source 1..20: mol_type = other DNA
gttgaattacttcatttgta

SEQ ID NO: 174665 - DNA, 20 bp, synthetic construct
  source 1..20: mol_type = other DNA
tgttgaattacttcatttgt

SEQ ID NO: 174666 - DNA, 20 bp, synthetic construct
  source 1..20: mol_type = other DNA
ctgttgaattacttcatttg

SEQ ID NO: 174667 - DNA, 20 bp, synthetic construct
  source 1..20: mol_type = other DNA
tctgttgaattacttcattt

SEQ ID NO: 174668 - DNA, 20 bp, synthetic construct
  source 1..20: mol_type = other DNA
ctctgttgaattacttcatt

SEQ ID NO: 174669 - DNA, 20 bp, synthetic construct
  source 1..20: mol_type = other DNA
actctgttgaattacttcat

SEQ ID NO: 174670 - DNA, 20 bp, synthetic construct
  source 1..20: mol_type = other DNA
cactctgttgaattacttca

SEQ ID NO: 174671 - DNA, 20 bp, synthetic construct
  source 1..20: mol_type = other DNA
gcactctgttgaattacttc

SEQ ID NO: 174672 - DNA, 20 bp, synthetic construct
  source 1..20: mol_type = other DNA
agcactctgttgaattactt

SEQ ID NO: 174673 - DNA, 20 bp, synthetic construct
  source 1..20: mol_type = other DNA
cagcactctgttgaattact

SEQ ID NO: 174674 - DNA, 20 bp, synthetic construct
  source 1..20: mol_type = other DNA
tcagcactctgttgaattac

SEQ ID NO: 174675 - DNA, 20 bp, synthetic construct
  source 1..20: mol_type = other DNA
gtcagcactctgttgaatta

SEQ ID NO: 174676 - DNA, 20 bp, synthetic construct
  source 1..20: mol_type = other DNA
tgtcagcactctgttgaatt

SEQ ID NO: 174677 - DNA, 20 bp, synthetic construct
  source 1..20: mol_type = other DNA
atgtcagcactctgttgaat

SEQ ID NO: 174678 - DNA, 20 bp, synthetic construct
  source 1..20: mol_type = other DNA
aatgtcagcactctgttgaa

SEQ ID NO: 174679 - DNA, 20 bp, synthetic construct
  source 1..20: mol_type = other DNA
caatgtcagcactctgttga

SEQ ID NO: 174680 - DNA, 20 bp, synthetic construct
  source 1..20: mol_type = other DNA
ccaatgtcagcactctgttg

SEQ ID NO: 174681 - DNA, 20 bp, synthetic construct
  source 1..20: mol_type = other DNA
accaatgtcagcactctgtt

SEQ ID NO: 174682 - DNA, 20 bp, synthetic construct
  source 1..20: mol_type = other DNA
taccaatgtcagcactctgt

SEQ ID NO: 174683 - DNA, 20 bp, synthetic construct
  source 1..20: mol_type = other DNA
ttaccaatgtcagcactctg

SEQ ID NO: 174684 - DNA, 20 bp, synthetic construct
  source 1..20: mol_type = other DNA
tttaccaatgtcagcactct

SEQ ID NO: 174685 - DNA, 20 bp, synthetic construct
  source 1..20: mol_type = other DNA
gtttaccaatgtcagcactc

SEQ ID NO: 174686 - DNA, 20 bp, synthetic construct
  source 1..20: mol_type = other DNA
agtttaccaatgtcagcact

SEQ ID NO: 174687 - DNA, 20 bp, synthetic construct
  source 1..20: mol_type = other DNA
cagtttaccaatgtcagcac

SEQ ID NO: 174688 - DNA, 20 bp, synthetic construct
  source 1..20: mol_type = other DNA
ccagtttaccaatgtcagca

SEQ ID NO: 174689 - DNA, 20 bp, synthetic construct
  source 1..20: mol_type = other DNA
gccagtttaccaatgtcagc

SEQ ID NO: 174690 - DNA, 20 bp, synthetic construct
  source 1..20: mol_type = other DNA
tgccagtttaccaatgtcag

SEQ ID NO: 174691 - DNA, 20 bp, synthetic construct
  source 1..20: mol_type = other DNA
ttgccagtttaccaatgtca

SEQ ID NO: 174692 - DNA, 20 bp, synthetic construct
  source 1..20: mol_type = other DNA
tttgccagtttaccaatgtc

SEQ ID NO: 174693 - DNA, 20 bp, synthetic construct
  source 1..20: mol_type = other DNA
gtttgccagtttaccaatgt

SEQ ID NO: 174694 - DNA, 20 bp, synthetic construct
  source 1..20: mol_type = other DNA
tgtttgccagtttaccaatg

SEQ ID NO: 174695 - DNA, 20 bp, synthetic construct
  source 1..20: mol_type = other DNA
ctgtttgccagtttaccaat

SEQ ID NO: 174696 - DNA, 20 bp, synthetic construct
  source 1..20: mol_type = other DNA
tctgtttgccagtttaccaa

SEQ ID NO: 174697 - DNA, 20 bp, synthetic construct
  source 1..20: mol_type = other DNA
atctgtttgccagtttacca

SEQ ID NO: 174698 - DNA, 20 bp, synthetic construct
  source 1..20: mol_type = other DNA
aatctgtttgccagtttacc

SEQ ID NO: 174699 - DNA, 20 bp, synthetic construct
  source 1..20: mol_type = other DNA
aaatctgtttgccagtttac

SEQ ID NO: 174700 - DNA, 20 bp, synthetic construct
  source 1..20: mol_type = other DNA
gaaatctgtttgccagttta

SEQ ID NO: 174701 - DNA, 20 bp, synthetic construct
  source 1..20: mol_type = other DNA
tgaaatctgtttgccagttt

SEQ ID NO: 174702 - DNA, 20 bp, synthetic construct
  source 1..20: mol_type = other DNA
ctgaaatctgtttgccagtt

SEQ ID NO: 174703 - DNA, 20 bp, synthetic construct
  source 1..20: mol_type = other DNA
cctgaaatctgtttgccagt

SEQ ID NO: 174704 - DNA, 20 bp, synthetic construct
  source 1..20: mol_type = other DNA
ccctgaaatctgtttgccag

SEQ ID NO: 174705 - DNA, 20 bp, synthetic construct
  source 1..20: mol_type = other DNA
accctgaaatctgtttgcca

SEQ ID NO: 174706 - DNA, 20 bp, synthetic construct
  source 1..20: mol_type = other DNA
caccctgaaatctgtttgcc

SEQ ID NO: 174707 - DNA, 20 bp, synthetic construct
  source 1..20: mol_type = other DNA
ccaccctgaaatctgtttgc

SEQ ID NO: 174708 - DNA, 20 bp, synthetic construct
  source 1..20: mol_type = other DNA
accaccctgaaatctgtttg

SEQ ID NO: 174709 - DNA, 20 bp, synthetic construct
  source 1..20: mol_type = other DNA
aaccaccctgaaatctgttt

SEQ ID NO: 174710 - DNA, 20 bp, synthetic construct
  source 1..20: mol_type = other DNA
caaccaccctgaaatctgtt

SEQ ID NO: 174711 - DNA, 20 bp, synthetic construct
  source 1..20: mol_type = other DNA
ccaaccaccctgaaatctgt

SEQ ID NO: 174712 - DNA, 20 bp, synthetic construct
  source 1..20: mol_type = other DNA
accaaccaccctgaaatctg

SEQ ID NO: 174713 - DNA, 20 bp, synthetic construct
  source 1..20: mol_type = other DNA
aaccaaccaccctgaaatct

SEQ ID NO: 174714 - DNA, 20 bp, synthetic construct
  source 1..20: mol_type = other DNA
caaccaaccaccctgaaatc

SEQ ID NO: 174715 - DNA, 20 bp, synthetic construct
  source 1..20: mol_type = other DNA
tcaaccaaccaccctgaaat

SEQ ID NO: 174716 - DNA, 20 bp, synthetic construct
  source 1..20: mol_type = other DNA
ctcaaccaaccaccctgaaa

SEQ ID NO: 174717 - DNA, 20 bp, synthetic construct
  source 1..20: mol_type = other DNA
tctcaaccaaccaccctgaa

SEQ ID NO: 174718 - DNA, 20 bp, synthetic construct
  source 1..20: mol_type = other DNA
ctctcaaccaaccaccctga

SEQ ID NO: 174719 - DNA, 20 bp, synthetic construct
  source 1..20: mol_type = other DNA
actctcaaccaaccaccctg

SEQ ID NO: 174720 - DNA, 20 bp, synthetic construct
  source 1..20: mol_type = other DNA
tactctcaaccaaccaccct

SEQ ID NO: 174721 - DNA, 20 bp, synthetic construct
  source 1..20: mol_type = other DNA
ctactctcaaccaaccaccc

SEQ ID NO: 174722 - DNA, 20 bp, synthetic construct
  source 1..20: mol_type = other DNA
tctactctcaaccaaccacc

SEQ ID NO: 174723 - DNA, 20 bp, synthetic construct
  source 1..20: mol_type = other DNA
ctctactctcaaccaaccac

SEQ ID NO: 174724 - DNA, 20 bp, synthetic construct
  source 1..20: mol_type = other DNA
actctactctcaaccaacca

SEQ ID NO: 174725 - DNA, 20 bp, synthetic construct
  source 1..20: mol_type = other DNA
tactctactctcaaccaacc

SEQ ID NO: 174726 - DNA, 20 bp, synthetic construct
  source 1..20: mol_type = other DNA
ctactctactctcaaccaac

SEQ ID NO: 174727 - DNA, 20 bp, synthetic construct
  source 1..20: mol_type = other DNA
tctactctactctcaaccaa

SEQ ID NO: 174728 - DNA, 20 bp, synthetic construct
  source 1..20: mol_type = other DNA
ttctactctactctcaacca

SEQ ID NO: 174729 - DNA, 20 bp, synthetic construct
  source 1..20: mol_type = other DNA
tttctactctactctcaacc

SEQ ID NO: 174730 - DNA, 20 bp, synthetic construct
  source 1..20: mol_type = other DNA
ttttctactctactctcaac

SEQ ID NO: 174731 - DNA, 20 bp, synthetic construct
  source 1..20: mol_type = other DNA
cttttctactctactctcaa

SEQ ID NO: 174732 - DNA, 20 bp, synthetic construct
  source 1..20: mol_type = other DNA
ccttttctactctactctca

SEQ ID NO: 174733 - DNA, 20 bp, synthetic construct
  source 1..20: mol_type = other DNA
tccttttctactctactctc

SEQ ID NO: 174734 - DNA, 20 bp, synthetic construct
  source 1..20: mol_type = other DNA
atccttttctactctactct

SEQ ID NO: 174735 - DNA, 20 bp, synthetic construct
  source 1..20: mol_type = other DNA
aatccttttctactctactc

SEQ ID NO: 174736 - DNA, 20 bp, synthetic construct
  source 1..20: mol_type = other DNA
taatccttttctactctact

SEQ ID NO: 174737 - DNA, 20 bp, synthetic construct
  source 1..20: mol_type = other DNA
ttaatccttttctactctac

SEQ ID NO: 174738 - DNA, 20 bp, synthetic construct
  source 1..20: mol_type = other DNA
tttaatccttttctactcta

SEQ ID NO: 174739 - DNA, 20 bp, synthetic construct
  source 1..20: mol_type = other DNA
atttaatccttttctactct

SEQ ID NO: 174740 - DNA, 20 bp, synthetic construct
  source 1..20: mol_type = other DNA
tatttaatccttttctactc

SEQ ID NO: 174741 - DNA, 20 bp, synthetic construct
  source 1..20: mol_type = other DNA
ttatttaatccttttctact

SEQ ID NO: 174742 - DNA, 20 bp, synthetic construct
  source 1..20: mol_type = other DNA
tttatttaatccttttctac

SEQ ID NO: 174743 - DNA, 20 bp, synthetic construct
  source 1..20: mol_type = other DNA
ctttatttaatccttttcta

SEQ ID NO: 174744 - DNA, 20 bp, synthetic construct
  source 1..20: mol_type = other DNA
gctttatttaatccttttct

SEQ ID NO: 174745 - DNA, 20 bp, synthetic construct
  source 1..20: mol_type = other DNA
tgctttatttaatccttttc

SEQ ID NO: 174746 - DNA, 20 bp, synthetic construct
  source 1..20: mol_type = other DNA
ttgctttatttaatcctttt

SEQ ID NO: 174747 - DNA, 20 bp, synthetic construct
  source 1..20: mol_type = other DNA
tttgctttatttaatccttt

SEQ ID NO: 174748 - DNA, 20 bp, synthetic construct
  source 1..20: mol_type = other DNA
gtttgctttatttaatcctt

SEQ ID NO: 174749 - DNA, 20 bp, synthetic construct
  source 1..20: mol_type = other DNA
agtttgctttatttaatcct

SEQ ID NO: 174750 - DNA, 20 bp, synthetic construct
  source 1..20: mol_type = other DNA
aagtttgctttatttaatcc

SEQ ID NO: 174751 - DNA, 20 bp, synthetic construct
  source 1..20: mol_type = other DNA
caagtttgctttatttaatc

SEQ ID NO: 174752 - DNA, 20 bp, synthetic construct
  source 1..20: mol_type = other DNA
acaagtttgctttatttaat

SEQ ID NO: 174753 - DNA, 20 bp, synthetic construct
  source 1..20: mol_type = other DNA
cacaagtttgctttatttaa

SEQ ID NO: 174754 - DNA, 20 bp, synthetic construct
  source 1..20: mol_type = other DNA
ccacaagtttgctttattta

SEQ ID NO: 174755 - DNA, 20 bp, synthetic construct
  source 1..20: mol_type = other DNA
accacaagtttgctttattt

SEQ ID NO: 174756 - DNA, 20 bp, synthetic construct
  source 1..20: mol_type = other DNA
caccacaagtttgctttatt

SEQ ID NO: 174757 - DNA, 20 bp, synthetic construct
  source 1..20: mol_type = other DNA
acaccacaagtttgctttat

SEQ ID NO: 174758 - DNA, 20 bp, synthetic construct
  source 1..20: mol_type = other DNA
tacaccacaagtttgcttta

SEQ ID NO: 174759 - DNA, 20 bp, synthetic construct
  source 1..20: mol_type = other DNA
gtacaccacaagtttgcttt

SEQ ID NO: 174760 - DNA, 20 bp, synthetic construct
  source 1..20: mol_type = other DNA
agtacaccacaagtttgctt

SEQ ID NO: 174761 - DNA, 20 bp, synthetic construct
  source 1..20: mol_type = other DNA
cagtacaccacaagtttgct

SEQ ID NO: 174762 - DNA, 20 bp, synthetic construct
  source 1..20: mol_type = other DNA
tcagtacaccacaagtttgc

SEQ ID NO: 174763 - DNA, 20 bp, synthetic construct
  source 1..20: mol_type = other DNA
ttcagtacaccacaagtttg

SEQ ID NO: 174764 - DNA, 20 bp, synthetic construct
  source 1..20: mol_type = other DNA
attcagtacaccacaagttt

SEQ ID NO: 174765 - DNA, 20 bp, synthetic construct
  source 1..20: mol_type = other DNA
gattcagtacaccacaagtt

SEQ ID NO: 174766 - DNA, 20 bp, synthetic construct
  source 1..20: mol_type = other DNA
agattcagtacaccacaagt

SEQ ID NO: 174767 - DNA, 20 bp, synthetic construct
  source 1..20: mol_type = other DNA
aagattcagtacaccacaag

SEQ ID NO: 174768 - DNA, 20 bp, synthetic construct
  source 1..20: mol_type = other DNA
taagattcagtacaccacaa

SEQ ID NO: 174769 - DNA, 20 bp, synthetic construct
  source 1..20: mol_type = other DNA
ctaagattcagtacaccaca

SEQ ID NO: 174770 - DNA, 20 bp, synthetic construct
  source 1..20: mol_type = other DNA
cctaagattcagtacaccac

SEQ ID NO: 174771 - DNA, 20 bp, synthetic construct
  source 1..20: mol_type = other DNA
tcctaagattcagtacacca

SEQ ID NO: 174772 - DNA, 20 bp, synthetic construct
  source 1..20: mol_type = other DNA
ttcctaagattcagtacacc

SEQ ID NO: 174773 - DNA, 20 bp, synthetic construct
  source 1..20: mol_type = other DNA
attcctaagattcagtacac

SEQ ID NO: 174774 - DNA, 20 bp, synthetic construct
  source 1..20: mol_type = other DNA
aattcctaagattcagtaca

SEQ ID NO: 174775 - DNA, 20 bp, synthetic construct
  source 1..20: mol_type = other DNA
gaattcctaagattcagtac

SEQ ID NO: 174776 - DNA, 20 bp, synthetic construct
  source 1..20: mol_type = other DNA
ggaattcctaagattcagta

SEQ ID NO: 174777 - DNA, 20 bp, synthetic construct
  source 1..20: mol_type = other DNA
tggaattcctaagattcagt

SEQ ID NO: 174778 - DNA, 20 bp, synthetic construct
  source 1..20: mol_type = other DNA
atggaattcctaagattcag

SEQ ID NO: 174779 - DNA, 20 bp, synthetic construct
  source 1..20: mol_type = other DNA
catggaattcctaagattca

SEQ ID NO: 174780 - DNA, 20 bp, synthetic construct
  source 1..20: mol_type = other DNA
acatggaattcctaagattc

SEQ ID NO: 174781 - DNA, 20 bp, synthetic construct
  source 1..20: mol_type = other DNA
tacatggaattcctaagatt

SEQ ID NO: 174782 - DNA, 20 bp, synthetic construct
  source 1..20: mol_type = other DNA
atacatggaattcctaagat

SEQ ID NO: 174783 - DNA, 20 bp, synthetic construct
  source 1..20: mol_type = other DNA
gatacatggaattcctaaga

SEQ ID NO: 174784 - DNA, 20 bp, synthetic construct
  source 1..20: mol_type = other DNA
ggatacatggaattcctaag

SEQ ID NO: 174785 - DNA, 20 bp, synthetic construct
  source 1..20: mol_type = other DNA
tggatacatggaattcctaa

SEQ ID NO: 174786 - DNA, 20 bp, synthetic construct
  source 1..20: mol_type = other DNA
ttggatacatggaattccta

SEQ ID NO: 174787 - DNA, 20 bp, synthetic construct
  source 1..20: mol_type = other DNA
attggatacatggaattcct

SEQ ID NO: 174788 - DNA, 20 bp, synthetic construct
  source 1..20: mol_type = other DNA
tattggatacatggaattcc

SEQ ID NO: 174789 - DNA, 20 bp, synthetic construct
  source 1..20: mol_type = other DNA
ttattggatacatggaattc

SEQ ID NO: 174790 - DNA, 20 bp, synthetic construct
  source 1..20: mol_type = other DNA
cttattggatacatggaatt

SEQ ID NO: 174791 - DNA, 20 bp, synthetic construct
  source 1..20: mol_type = other DNA
acttattggatacatggaat

SEQ ID NO: 174792 - DNA, 20 bp, synthetic construct
  source 1..20: mol_type = other DNA
tacttattggatacatggaa

SEQ ID NO: 174793 - DNA, 20 bp, synthetic construct
  source 1..20: mol_type = other DNA
atacttattggatacatgga

SEQ ID NO: 174794 - DNA, 20 bp, synthetic construct
  source 1..20: mol_type = other DNA
tatacttattggatacatgg

SEQ ID NO: 174795 - DNA, 20 bp, synthetic construct
  source 1..20: mol_type = other DNA
ctatacttattggatacatg

SEQ ID NO: 174796 - DNA, 20 bp, synthetic construct
  source 1..20: mol_type = other DNA
actatacttattggatacat

SEQ ID NO: 174797 - DNA, 20 bp, synthetic construct
  source 1..20: mol_type = other DNA
gactatacttattggataca

SEQ ID NO: 174798 - DNA, 20 bp, synthetic construct
  source 1..20: mol_type = other DNA
tgactatacttattggatac

SEQ ID NO: 174799 - DNA, 20 bp, synthetic construct
  source 1..20: mol_type = other DNA
atgactatacttattggata

SEQ ID NO: 174800 - DNA, 20 bp, synthetic construct
  source 1..20: mol_type = other DNA
aatgactatacttattggat

SEQ ID NO: 174801 - DNA, 20 bp, synthetic construct
  source 1..20: mol_type = other DNA
aaatgactatacttattgga

SEQ ID NO: 174802 - DNA, 20 bp, synthetic construct
  source 1..20: mol_type = other DNA
taaatgactatacttattgg

SEQ ID NO: 174803 - DNA, 20 bp, synthetic construct
  source 1..20: mol_type = other DNA
ataaatgactatacttattg

SEQ ID NO: 174804 - DNA, 20 bp, synthetic construct
  source 1..20: mol_type = other DNA
cataaatgactatacttatt

SEQ ID NO: 174805 - DNA, 20 bp, synthetic construct
  source 1..20: mol_type = other DNA
tcataaatgactatacttat

SEQ ID NO: 174806 - DNA, 20 bp, synthetic construct
  source 1..20: mol_type = other DNA
ttcataaatgactatactta

SEQ ID NO: 174807 - DNA, 20 bp, synthetic construct
  source 1..20: mol_type = other DNA
attcataaatgactatactt

SEQ ID NO: 174808 - DNA, 20 bp, synthetic construct
  source 1..20: mol_type = other DNA
aattcataaatgactatact

SEQ ID NO: 174809 - DNA, 20 bp, synthetic construct
  source 1..20: mol_type = other DNA
taattcataaatgactatac

SEQ ID NO: 174810 - DNA, 20 bp, synthetic construct
  source 1..20: mol_type = other DNA
ttaattcataaatgactata

SEQ ID NO: 174811 - DNA, 20 bp, synthetic construct
  source 1..20: mol_type = other DNA
attaattcataaatgactat

SEQ ID NO: 174812 - DNA, 20 bp, synthetic construct
  source 1..20: mol_type = other DNA
tattaattcataaatgacta

SEQ ID NO: 174813 - DNA, 20 bp, synthetic construct
  source 1..20: mol_type = other DNA
ttattaattcataaatgact

SEQ ID NO: 174814 - DNA, 20 bp, synthetic construct
  source 1..20: mol_type = other DNA
tttattaattcataaatgac

SEQ ID NO: 174815 - DNA, 20 bp, synthetic construct
  source 1..20: mol_type = other DNA
atttattaattcataaatga

SEQ ID NO: 174816 - DNA, 20 bp, synthetic construct
  source 1..20: mol_type = other DNA
aatttattaattcataaatg

SEQ ID NO: 174817 - DNA, 20 bp, synthetic construct
  source 1..20: mol_type = other DNA
gaatttattaattcataaat

SEQ ID NO: 174818 - DNA, 20 bp, synthetic construct
  source 1..20: mol_type = other DNA
cgaatttattaattcataaa

SEQ ID NO: 174819 - DNA, 20 bp, synthetic construct
  source 1..20: mol_type = other DNA
ccgaatttattaattcataa

SEQ ID NO: 174820 - DNA, 20 bp, synthetic construct
  source 1..20: mol_type = other DNA
gccgaatttattaattcata

SEQ ID NO: 174821 - DNA, 20 bp, synthetic construct
  source 1..20: mol_type = other DNA
ggccgaatttattaattcat

SEQ ID NO: 174822 - DNA, 20 bp, synthetic construct
  source 1..20: mol_type = other DNA
aggccgaatttattaattca

SEQ ID NO: 174823 - DNA, 20 bp, synthetic construct
  source 1..20: mol_type = other DNA
taggccgaatttattaattc

SEQ ID NO: 174824 - DNA, 20 bp, synthetic construct
  source 1..20: mol_type = other DNA
ttaggccgaatttattaatt

SEQ ID NO: 174825 - DNA, 20 bp, synthetic construct
  source 1..20: mol_type = other DNA
cttaggccgaatttattaat

SEQ ID NO: 174826 - DNA, 20 bp, synthetic construct
  source 1..20: mol_type = other DNA
tcttaggccgaatttattaa

SEQ ID NO: 174827 - DNA, 20 bp, synthetic construct
  source 1..20: mol_type = other DNA
ttcttaggccgaatttatta

SEQ ID NO: 174828 - DNA, 20 bp, synthetic construct
  source 1..20: mol_type = other DNA
cttcttaggccgaatttatt

SEQ ID NO: 174829 - DNA, 20 bp, synthetic construct
  source 1..20: mol_type = other DNA
gcttcttaggccgaatttat

SEQ ID NO: 174830 - DNA, 20 bp, synthetic construct
  source 1..20: mol_type = other DNA
ggcttcttaggccgaattta

SEQ ID NO: 174831 - DNA, 20 bp, synthetic construct
  source 1..20: mol_type = other DNA
aggcttcttaggccgaattt

SEQ ID NO: 174832 - DNA, 20 bp, synthetic construct
  source 1..20: mol_type = other DNA
aaggcttcttaggccgaatt

SEQ ID NO: 174833 - DNA, 20 bp, synthetic construct
  source 1..20: mol_type = other DNA
gaaggcttcttaggccgaat

SEQ ID NO: 174834 - DNA, 20 bp, synthetic construct
  source 1..20: mol_type = other DNA
agaaggcttcttaggccgaa

SEQ ID NO: 174835 - DNA, 20 bp, synthetic construct
  source 1..20: mol_type = other DNA
aagaaggcttcttaggccga

SEQ ID NO: 174836 - DNA, 20 bp, synthetic construct
  source 1..20: mol_type = other DNA
taagaaggcttcttaggccg

SEQ ID NO: 174837 - DNA, 20 bp, synthetic construct
  source 1..20: mol_type = other DNA
ataagaaggcttcttaggcc

SEQ ID NO: 174838 - DNA, 20 bp, synthetic construct
  source 1..20: mol_type = other DNA
gataagaaggcttcttaggc

SEQ ID NO: 174839 - DNA, 20 bp, synthetic construct
  source 1..20: mol_type = other DNA
cgataagaaggcttcttagg

SEQ ID NO: 174840 - DNA, 20 bp, synthetic construct
  source 1..20: mol_type = other DNA
gcgataagaaggcttcttag

SEQ ID NO: 174841 - DNA, 20 bp, synthetic construct
  source 1..20: mol_type = other DNA
agcgataagaaggcttctta

SEQ ID NO: 174842 - DNA, 20 bp, synthetic construct
  source 1..20: mol_type = other DNA
aagcgataagaaggcttctt

SEQ ID NO: 174843 - DNA, 20 bp, synthetic construct
  source 1..20: mol_type = other DNA
taagcgataagaaggcttct

SEQ ID NO: 174844 - DNA, 20 bp, synthetic construct
  source 1..20: mol_type = other DNA
ttaagcgataagaaggcttc

SEQ ID NO: 174845 - DNA, 20 bp, synthetic construct
  source 1..20: mol_type = other DNA
tttaagcgataagaaggctt

SEQ ID NO: 174846 - DNA, 20 bp, synthetic construct
  source 1..20: mol_type = other DNA
atttaagcgataagaaggct

SEQ ID NO: 174847 - DNA, 20 bp, synthetic construct
  source 1..20: mol_type = other DNA
gatttaagcgataagaaggc

SEQ ID NO: 174848 - DNA, 20 bp, synthetic construct
  source 1..20: mol_type = other DNA
tgatttaagcgataagaagg

SEQ ID NO: 174849 - DNA, 20 bp, synthetic construct
  source 1..20: mol_type = other DNA
ttgatttaagcgataagaag

SEQ ID NO: 174850 - DNA, 20 bp, synthetic construct
  source 1..20: mol_type = other DNA
cttgatttaagcgataagaa

SEQ ID NO: 174851 - DNA, 20 bp, synthetic construct
  source 1..20: mol_type = other DNA
tcttgatttaagcgataaga

SEQ ID NO: 174852 - DNA, 20 bp, synthetic construct
  source 1..20: mol_type = other DNA
gtcttgatttaagcgataag

SEQ ID NO: 174853 - DNA, 20 bp, synthetic construct
  source 1..20: mol_type = other DNA
agtcttgatttaagcgataa

SEQ ID NO: 174854 - DNA, 20 bp, synthetic construct
  source 1..20: mol_type = other DNA
tagtcttgatttaagcgata

SEQ ID NO: 174855 - DNA, 20 bp, synthetic construct
  source 1..20: mol_type = other DNA
ttagtcttgatttaagcgat

SEQ ID NO: 174856 - DNA, 20 bp, synthetic construct
  source 1..20: mol_type = other DNA
cttagtcttgatttaagcga

SEQ ID NO: 174857 - DNA, 20 bp, synthetic construct
  source 1..20: mol_type = other DNA
acttagtcttgatttaagcg

SEQ ID NO: 174858 - DNA, 20 bp, synthetic construct
  source 1..20: mol_type = other DNA
tacttagtcttgatttaagc

SEQ ID NO: 174859 - DNA, 20 bp, synthetic construct
  source 1..20: mol_type = other DNA
ttacttagtcttgatttaag

SEQ ID NO: 174860 - DNA, 20 bp, synthetic construct
  source 1..20: mol_type = other DNA
gttacttagtcttgatttaa

SEQ ID NO: 174861 - DNA, 20 bp, synthetic construct
  source 1..20: mol_type = other DNA
tgttacttagtcttgattta

SEQ ID NO: 174862 - DNA, 20 bp, synthetic construct
  source 1..20: mol_type = other DNA
ttgttacttagtcttgattt

SEQ ID NO: 174863 - DNA, 20 bp, synthetic construct
  source 1..20: mol_type = other DNA
attgttacttagtcttgatt

SEQ ID NO: 174864 - DNA, 20 bp, synthetic construct
  source 1..20: mol_type = other DNA
tattgttacttagtcttgat

SEQ ID NO: 174865 - DNA, 20 bp, synthetic construct
  source 1..20: mol_type = other DNA
atattgttacttagtcttga

SEQ ID NO: 174866 - DNA, 20 bp, synthetic construct
  source 1..20: mol_type = other DNA
tatattgttacttagtcttg

SEQ ID NO: 174867 - DNA, 20 bp, synthetic construct
  source 1..20: mol_type = other DNA
atatattgttacttagtctt

SEQ ID NO: 174868 - DNA, 20 bp, synthetic construct
  source 1..20: mol_type = other DNA
gatatattgttacttagtct

SEQ ID NO: 174869 - DNA, 20 bp, synthetic construct
  source 1..20: mol_type = other DNA
tgatatattgttacttagtc

SEQ ID NO: 174870 - DNA, 20 bp, synthetic construct
  source 1..20: mol_type = other DNA
ctgatatattgttacttagt

SEQ ID NO: 174871 - DNA, 20 bp, synthetic construct
  source 1..20: mol_type = other DNA
actgatatattgttacttag

SEQ ID NO: 174872 - DNA, 20 bp, synthetic construct
  source 1..20: mol_type = other DNA
aactgatatattgttactta

SEQ ID NO: 174873 - DNA, 20 bp, synthetic construct
  source 1..20: mol_type = other DNA
aaactgatatattgttactt

SEQ ID NO: 174874 - DNA, 20 bp, synthetic construct
  source 1..20: mol_type = other DNA
aaaactgatatattgttact

SEQ ID NO: 174875 - DNA, 20 bp, synthetic construct
  source 1..20: mol_type = other DNA
taaaactgatatattgttac

SEQ ID NO: 174876 - DNA, 20 bp, synthetic construct
  source 1..20: mol_type = other DNA
ttaaaactgatatattgtta

SEQ ID NO: 174877 - DNA, 20 bp, synthetic construct
  source 1..20: mol_type = other DNA
tttaaaactgatatattgtt

SEQ ID NO: 174878 - DNA, 20 bp, synthetic construct
  source 1..20: mol_type = other DNA
ttttaaaactgatatattgt

SEQ ID NO: 174879 - DNA, 20 bp, synthetic construct
  source 1..20: mol_type = other DNA
tttttaaaactgatatattg

SEQ ID NO: 174880 - DNA, 20 bp, synthetic construct
  source 1..20: mol_type = other DNA
ctttttaaaactgatatatt

SEQ ID NO: 174881 - DNA, 20 bp, synthetic construct
  source 1..20: mol_type = other DNA
actttttaaaactgatatat

SEQ ID NO: 174882 - DNA, 20 bp, synthetic construct
  source 1..20: mol_type = other DNA
gactttttaaaactgatata

SEQ ID NO: 174883 - DNA, 20 bp, synthetic construct
  source 1..20: mol_type = other DNA
tgactttttaaaactgatat

SEQ ID NO: 174884 - DNA, 20 bp, synthetic construct
  source 1..20: mol_type = other DNA
atgactttttaaaactgata

SEQ ID NO: 174885 - DNA, 20 bp, synthetic construct
  source 1..20: mol_type = other DNA
aatgactttttaaaactgat

SEQ ID NO: 174886 - DNA, 20 bp, synthetic construct
  source 1..20: mol_type = other DNA
taatgactttttaaaactga

SEQ ID NO: 174887 - DNA, 20 bp, synthetic construct
  source 1..20: mol_type = other DNA
ataatgactttttaaaactg

SEQ ID NO: 174888 - DNA, 20 bp, synthetic construct
  source 1..20: mol_type = other DNA
tataatgactttttaaaact

SEQ ID NO: 174889 - DNA, 20 bp, synthetic construct
  source 1..20: mol_type = other DNA
atataatgactttttaaaac

SEQ ID NO: 174890 - DNA, 20 bp, synthetic construct
  source 1..20: mol_type = other DNA
gatataatgactttttaaaa

SEQ ID NO: 174891 - DNA, 20 bp, synthetic construct
  source 1..20: mol_type = other DNA
tgatataatgactttttaaa

SEQ ID NO: 174892 - DNA, 20 bp, synthetic construct
  source 1..20: mol_type = other DNA
ctgatataatgactttttaa

SEQ ID NO: 174893 - DNA, 20 bp, synthetic construct
  source 1..20: mol_type = other DNA
tctgatataatgacttttta

SEQ ID NO: 174894 - DNA, 20 bp, synthetic construct
  source 1..20: mol_type = other DNA
ttctgatataatgacttttt

SEQ ID NO: 174895 - DNA, 20 bp, synthetic construct
  source 1..20: mol_type = other DNA
tttctgatataatgactttt

SEQ ID NO: 174896 - DNA, 20 bp, synthetic construct
  source 1..20: mol_type = other DNA
ttttctgatataatgacttt

SEQ ID NO: 174897 - DNA, 20 bp, synthetic construct
  source 1..20: mol_type = other DNA
attttctgatataatgactt

SEQ ID NO: 174898 - DNA, 20 bp, synthetic construct
  source 1..20: mol_type = other DNA
gattttctgatataatgact

SEQ ID NO: 174899 - DNA, 20 bp, synthetic construct
  source 1..20: mol_type = other DNA
tgattttctgatataatgac

SEQ ID NO: 174900 - DNA, 20 bp, synthetic construct
  source 1..20: mol_type = other DNA
atgattttctgatataatga

SEQ ID NO: 174901 - DNA, 20 bp, synthetic construct
  source 1..20: mol_type = other DNA
aatgattttctgatataatg

SEQ ID NO: 174902 - DNA, 20 bp, synthetic construct
  source 1..20: mol_type = other DNA
aaatgattttctgatataat

SEQ ID NO: 174903 - DNA, 20 bp, synthetic construct
  source 1..20: mol_type = other DNA
taaatgattttctgatataa

SEQ ID NO: 174904 - DNA, 20 bp, synthetic construct
  source 1..20: mol_type = other DNA
ttaaatgattttctgatata

SEQ ID NO: 174905 - DNA, 20 bp, synthetic construct
  source 1..20: mol_type = other DNA
tttaaatgattttctgatat

SEQ ID NO: 174906 - DNA, 20 bp, synthetic construct
  source 1..20: mol_type = other DNA
atttaaatgattttctgata

SEQ ID NO: 174907 - DNA, 20 bp, synthetic construct
  source 1..20: mol_type = other DNA
catttaaatgattttctgat

SEQ ID NO: 174908 - DNA, 20 bp, synthetic construct
  source 1..20: mol_type = other DNA
tcatttaaatgattttctga

SEQ ID NO: 174909 - DNA, 20 bp, synthetic construct
  source 1..20: mol_type = other DNA
atcatttaaatgattttctg

SEQ ID NO: 174910 - DNA, 20 bp, synthetic construct
  source 1..20: mol_type = other DNA
tatcatttaaatgattttct

SEQ ID NO: 174911 - DNA, 20 bp, synthetic construct
  source 1..20: mol_type = other DNA
gtatcatttaaatgattttc

SEQ ID NO: 174912 - DNA, 20 bp, synthetic construct
  source 1..20: mol_type = other DNA
tgtatcatttaaatgatttt

SEQ ID NO: 174913 - DNA, 20 bp, synthetic construct
  source 1..20: mol_type = other DNA
gtgtatcatttaaatgattt

SEQ ID NO: 174914 - DNA, 20 bp, synthetic construct
  source 1..20: mol_type = other DNA
tgtgtatcatttaaatgatt

SEQ ID NO: 174915 - DNA, 20 bp, synthetic construct
  source 1..20: mol_type = other DNA
atgtgtatcatttaaatgat

SEQ ID NO: 174916 - DNA, 20 bp, synthetic construct
  source 1..20: mol_type = other DNA
tatgtgtatcatttaaatga

SEQ ID NO: 174917 - DNA, 20 bp, synthetic construct
  source 1..20: mol_type = other DNA
ctatgtgtatcatttaaatg

SEQ ID NO: 174918 - DNA, 20 bp, synthetic construct
  source 1..20: mol_type = other DNA
tctatgtgtatcatttaaat

SEQ ID NO: 174919 - DNA, 20 bp, synthetic construct
  source 1..20: mol_type = other DNA
atctatgtgtatcatttaaa

SEQ ID NO: 174920 - DNA, 20 bp, synthetic construct
  source 1..20: mol_type = other DNA
aatctatgtgtatcatttaa

SEQ ID NO: 174921 - DNA, 20 bp, synthetic construct
  source 1..20: mol_type = other DNA
aaatctatgtgtatcattta

SEQ ID NO: 174922 - DNA, 20 bp, synthetic construct
  source 1..20: mol_type = other DNA
gaaatctatgtgtatcattt

SEQ ID NO: 174923 - DNA, 20 bp, synthetic construct
  source 1..20: mol_type = other DNA
ggaaatctatgtgtatcatt

SEQ ID NO: 174924 - DNA, 20 bp, synthetic construct
  source 1..20: mol_type = other DNA
tggaaatctatgtgtatcat

SEQ ID NO: 174925 - DNA, 20 bp, synthetic construct
  source 1..20: mol_type = other DNA
ttggaaatctatgtgtatca

SEQ ID NO: 174926 - DNA, 20 bp, synthetic construct
  source 1..20: mol_type = other DNA
cttggaaatctatgtgtatc

SEQ ID NO: 174927 - DNA, 20 bp, synthetic construct
  source 1..20: mol_type = other DNA
tcttggaaatctatgtgtat

SEQ ID NO: 174928 - DNA, 20 bp, synthetic construct
  source 1..20: mol_type = other DNA
atcttggaaatctatgtgta

SEQ ID NO: 174929 - DNA, 20 bp, synthetic construct
  source 1..20: mol_type = other DNA
aatcttggaaatctatgtgt

SEQ ID NO: 174930 - DNA, 20 bp, synthetic construct
  source 1..20: mol_type = other DNA
aaatcttggaaatctatgtg

SEQ ID NO: 174931 - DNA, 20 bp, synthetic construct
  source 1..20: mol_type = other DNA
aaaatcttggaaatctatgt

SEQ ID NO: 174932 - DNA, 20 bp, synthetic construct
  source 1..20: mol_type = other DNA
taaaatcttggaaatctatg

SEQ ID NO: 174933 - DNA, 20 bp, synthetic construct
  source 1..20: mol_type = other DNA
gtaaaatcttggaaatctat

SEQ ID NO: 174934 - DNA, 20 bp, synthetic construct
  source 1..20: mol_type = other DNA
agtaaaatcttggaaatcta

SEQ ID NO: 174935 - DNA, 20 bp, synthetic construct
  source 1..20: mol_type = other DNA
aagtaaaatcttggaaatct

SEQ ID NO: 174936 - DNA, 20 bp, synthetic construct
  source 1..20: mol_type = other DNA
aaagtaaaatcttggaaatc

SEQ ID NO: 174937 - DNA, 20 bp, synthetic construct
  source 1..20: mol_type = other DNA
taaagtaaaatcttggaaat

SEQ ID NO: 174938 - DNA, 20 bp, synthetic construct
  source 1..20: mol_type = other DNA
ttaaagtaaaatcttggaaa

SEQ ID NO: 174939 - DNA, 20 bp, synthetic construct
  source 1..20: mol_type = other DNA
gttaaagtaaaatcttggaa

SEQ ID NO: 174940 - DNA, 20 bp, synthetic construct
  source 1..20: mol_type = other DNA
ggttaaagtaaaatcttgga

SEQ ID NO: 174941 - DNA, 20 bp, synthetic construct
  source 1..20: mol_type = other DNA
cggttaaagtaaaatcttgg

SEQ ID NO: 174942 - DNA, 20 bp, synthetic construct
  source 1..20: mol_type = other DNA
tcggttaaagtaaaatcttg

SEQ ID NO: 174943 - DNA, 20 bp, synthetic construct
  source 1..20: mol_type = other DNA
ttcggttaaagtaaaatctt

SEQ ID NO: 174944 - DNA, 20 bp, synthetic construct
  source 1..20: mol_type = other DNA
tttcggttaaagtaaaatct

SEQ ID NO: 174945 - DNA, 20 bp, synthetic construct
  source 1..20: mol_type = other DNA
gtttcggttaaagtaaaatc

SEQ ID NO: 174946 - DNA, 20 bp, synthetic construct
  source 1..20: mol_type = other DNA
agtttcggttaaagtaaaat

SEQ ID NO: 174947 - DNA, 20 bp, synthetic construct
  source 1..20: mol_type = other DNA
tagtttcggttaaagtaaaa

SEQ ID NO: 174948 - DNA, 20 bp, synthetic construct
  source 1..20: mol_type = other DNA
atagtttcggttaaagtaaa

SEQ ID NO: 174949 - DNA, 20 bp, synthetic construct
  source 1..20: mol_type = other DNA
tatagtttcggttaaagtaa

SEQ ID NO: 174950 - DNA, 20 bp, synthetic construct
  source 1..20: mol_type = other DNA
atatagtttcggttaaagta

SEQ ID NO: 174951 - DNA, 20 bp, synthetic construct
  source 1..20: mol_type = other DNA
tatatagtttcggttaaagt

SEQ ID NO: 174952 - DNA, 20 bp, synthetic construct
  source 1..20: mol_type = other DNA
ttatatagtttcggttaaag

SEQ ID NO: 174953 - DNA, 20 bp, synthetic construct
  source 1..20: mol_type = other DNA
tttatatagtttcggttaaa

SEQ ID NO: 174954 - DNA, 20 bp, synthetic construct
  source 1..20: mol_type = other DNA
atttatatagtttcggttaa

SEQ ID NO: 174955 - DNA, 20 bp, synthetic construct
  source 1..20: mol_type = other DNA
catttatatagtttcggtta

SEQ ID NO: 174956 - DNA, 20 bp, synthetic construct
  source 1..20: mol_type = other DNA
acatttatatagtttcggtt

SEQ ID NO: 174957 - DNA, 20 bp, synthetic construct
  source 1..20: mol_type = other DNA
cacatttatatagtttcggt

SEQ ID NO: 174958 - DNA, 20 bp, synthetic construct
  source 1..20: mol_type = other DNA
tcacatttatatagtttcgg

SEQ ID NO: 174959 - DNA, 20 bp, synthetic construct
  source 1..20: mol_type = other DNA
ttcacatttatatagtttcg

SEQ ID NO: 174960 - DNA, 20 bp, synthetic construct
  source 1..20: mol_type = other DNA
attcacatttatatagtttc

SEQ ID NO: 174961 - DNA, 20 bp, synthetic construct
  source 1..20: mol_type = other DNA
aattcacatttatatagttt

SEQ ID NO: 174962 - DNA, 20 bp, synthetic construct
  source 1..20: mol_type = other DNA
aaattcacatttatatagtt

SEQ ID NO: 174963 - DNA, 20 bp, synthetic construct
  source 1..20: mol_type = other DNA
caaattcacatttatatagt

SEQ ID NO: 174964 - DNA, 20 bp, synthetic construct
  source 1..20: mol_type = other DNA
acaaattcacatttatatag

SEQ ID NO: 174965 - DNA, 20 bp, synthetic construct
  source 1..20: mol_type = other DNA
aacaaattcacatttatata

SEQ ID NO: 174966 - DNA, 20 bp, synthetic construct
  source 1..20: mol_type = other DNA
gaacaaattcacatttatat

SEQ ID NO: 174967 - DNA, 20 bp, synthetic construct
  source 1..20: mol_type = other DNA
tgaacaaattcacatttata

SEQ ID NO: 174968 - DNA, 20 bp, synthetic construct
  source 1..20: mol_type = other DNA
gtgaacaaattcacatttat

SEQ ID NO: 174969 - DNA, 20 bp, synthetic construct
  source 1..20: mol_type = other DNA
ggtgaacaaattcacattta

SEQ ID NO: 174970 - DNA, 20 bp, synthetic construct
  source 1..20: mol_type = other DNA
gggtgaacaaattcacattt

SEQ ID NO: 174971 - DNA, 20 bp, synthetic construct
  source 1..20: mol_type = other DNA
tgggtgaacaaattcacatt

SEQ ID NO: 174972 - DNA, 20 bp, synthetic construct
  source 1..20: mol_type = other DNA
atgggtgaacaaattcacat

SEQ ID NO: 174973 - DNA, 20 bp, synthetic construct
  source 1..20: mol_type = other DNA
gatgggtgaacaaattcaca

SEQ ID NO: 174974 - DNA, 20 bp, synthetic construct
  source 1..20: mol_type = other DNA
agatgggtgaacaaattcac

SEQ ID NO: 174975 - DNA, 20 bp, synthetic construct
  source 1..20: mol_type = other DNA
aagatgggtgaacaaattca

SEQ ID NO: 174976 - DNA, 20 bp, synthetic construct
  source 1..20: mol_type = other DNA
aaagatgggtgaacaaattc

SEQ ID NO: 174977 - DNA, 20 bp, synthetic construct
  source 1..20: mol_type = other DNA
aaaagatgggtgaacaaatt

SEQ ID NO: 174978 - DNA, 20 bp, synthetic construct
  source 1..20: mol_type = other DNA
caaaagatgggtgaacaaat

SEQ ID NO: 174979 - DNA, 20 bp, synthetic construct
  source 1..20: mol_type = other DNA
tcaaaagatgggtgaacaaa

SEQ ID NO: 174980 - DNA, 20 bp, synthetic construct
  source 1..20: mol_type = other DNA
gtcaaaagatgggtgaacaa

SEQ ID NO: 174981 - DNA, 20 bp, synthetic construct
  source 1..20: mol_type = other DNA
tgtcaaaagatgggtgaaca

SEQ ID NO: 174982 - DNA, 20 bp, synthetic construct
  source 1..20: mol_type = other DNA
gtgtcaaaagatgggtgaac

SEQ ID NO: 174983 - DNA, 20 bp, synthetic construct
  source 1..20: mol_type = other DNA
tgtgtcaaaagatgggtgaa

SEQ ID NO: 174984 - DNA, 20 bp, synthetic construct
  source 1..20: mol_type = other DNA
ctgtgtcaaaagatgggtga

SEQ ID NO: 174985 - DNA, 20 bp, synthetic construct
  source 1..20: mol_type = other DNA
cctgtgtcaaaagatgggtg

SEQ ID NO: 174986 - DNA, 20 bp, synthetic construct
  source 1..20: mol_type = other DNA
ccctgtgtcaaaagatgggt

SEQ ID NO: 174987 - DNA, 20 bp, synthetic construct
  source 1..20: mol_type = other DNA
gccctgtgtcaaaagatggg

SEQ ID NO: 174988 - DNA, 20 bp, synthetic construct
  source 1..20: mol_type = other DNA
agccctgtgtcaaaagatgg

SEQ ID NO: 174989 - DNA, 20 bp, synthetic construct
  source 1..20: mol_type = other DNA
gagccctgtgtcaaaagatg

SEQ ID NO: 174990 - DNA, 20 bp, synthetic construct
  source 1..20: mol_type = other DNA
tgagccctgtgtcaaaagat

SEQ ID NO: 174991 - DNA, 20 bp, synthetic construct
  source 1..20: mol_type = other DNA
ctgagccctgtgtcaaaaga

SEQ ID NO: 174992 - DNA, 20 bp, synthetic construct
  source 1..20: mol_type = other DNA
cctgagccctgtgtcaaaag

SEQ ID NO: 174993 - DNA, 20 bp, synthetic construct
  source 1..20: mol_type = other DNA
acctgagccctgtgtcaaaa

SEQ ID NO: 174994 - DNA, 20 bp, synthetic construct
  source 1..20: mol_type = other DNA
gacctgagccctgtgtcaaa

SEQ ID NO: 174995 - DNA, 20 bp, synthetic construct
  source 1..20: mol_type = other DNA
agacctgagccctgtgtcaa

SEQ ID NO: 174996 - DNA, 20 bp, synthetic construct
  source 1..20: mol_type = other DNA
aagacctgagccctgtgtca

SEQ ID NO: 174997 - DNA, 20 bp, synthetic construct
  source 1..20: mol_type = other DNA
gaagacctgagccctgtgtc

SEQ ID NO: 174998 - DNA, 20 bp, synthetic construct
  source 1..20: mol_type = other DNA
agaagacctgagccctgtgt

SEQ ID NO: 174999 - DNA, 20 bp, synthetic construct
  source 1..20: mol_type = other DNA
gagaagacctgagccctgtg

SEQ ID NO: 175000 - DNA, 20 bp, synthetic construct
  source 1..20: mol_type = other DNA
agagaagacctgagccctgt

SEQ ID NO: 175001 - DNA, 20 bp, synthetic construct
  source 1..20: mol_type = other DNA
aagagaagacctgagccctg

SEQ ID NO: 175002 - DNA, 20 bp, synthetic construct
  source 1..20: mol_type = other DNA
caagagaagacctgagccct

SEQ ID NO: 175003 - DNA, 20 bp, synthetic construct
  source 1..20: mol_type = other DNA
ccaagagaagacctgagccc

SEQ ID NO: 175004 - DNA, 20 bp, synthetic construct
  source 1..20: mol_type = other DNA
accaagagaagacctgagcc

SEQ ID NO: 175005 - DNA, 20 bp, synthetic construct
  source 1..20: mol_type = other DNA
caccaagagaagacctgagc

SEQ ID NO: 175006 - DNA, 20 bp, synthetic construct
  source 1..20: mol_type = other DNA
acaccaagagaagacctgag

SEQ ID NO: 175007 - DNA, 20 bp, synthetic construct
  source 1..20: mol_type = other DNA
gacaccaagagaagacctga

SEQ ID NO: 175008 - DNA, 20 bp, synthetic construct
  source 1..20: mol_type = other DNA
agacaccaagagaagacctg

SEQ ID NO: 175009 - DNA, 20 bp, synthetic construct
  source 1..20: mol_type = other DNA
cagacaccaagagaagacct

SEQ ID NO: 175010 - DNA, 20 bp, synthetic construct
  source 1..20: mol_type = other DNA
ccagacaccaagagaagacc

SEQ ID NO: 175011 - DNA, 20 bp, synthetic construct
  source 1..20: mol_type = other DNA
tccagacaccaagagaagac

SEQ ID NO: 175012 - DNA, 20 bp, synthetic construct
  source 1..20: mol_type = other DNA
atccagacaccaagagaaga

SEQ ID NO: 175013 - DNA, 20 bp, synthetic construct
  source 1..20: mol_type = other DNA
gatccagacaccaagagaag

SEQ ID NO: 175014 - DNA, 20 bp, synthetic construct
  source 1..20: mol_type = other DNA
tgatccagacaccaagagaa

SEQ ID NO: 175015 - DNA, 20 bp, synthetic construct
  source 1..20: mol_type = other DNA
ctgatccagacaccaagaga

SEQ ID NO: 175016 - DNA, 20 bp, synthetic construct
  source 1..20: mol_type = other DNA
gctgatccagacaccaagag

SEQ ID NO: 175017 - DNA, 20 bp, synthetic construct
  source 1..20: mol_type = other DNA
ggctgatccagacaccaaga

SEQ ID NO: 175018 - DNA, 20 bp, synthetic construct
  source 1..20: mol_type = other DNA
tggctgatccagacaccaag

SEQ ID NO: 175019 - DNA, 20 bp, synthetic construct
  source 1..20: mol_type = other DNA
ctggctgatccagacaccaa

SEQ ID NO: 175020 - DNA, 20 bp, synthetic construct
  source 1..20: mol_type = other DNA
actggctgatccagacacca

SEQ ID NO: 175021 - DNA, 20 bp, synthetic construct
  source 1..20: mol_type = other DNA
aactggctgatccagacacc

SEQ ID NO: 175022 - DNA, 20 bp, synthetic construct
  source 1..20: mol_type = other DNA
caactggctgatccagacac

SEQ ID NO: 175023 - DNA, 20 bp, synthetic construct
  source 1..20: mol_type = other DNA
tcaactggctgatccagaca

SEQ ID NO: 175024 - DNA, 20 bp, synthetic construct
  source 1..20: mol_type = other DNA
ttcaactggctgatccagac

SEQ ID NO: 175025 - DNA, 20 bp, synthetic construct
  source 1..20: mol_type = other DNA
tttcaactggctgatccaga

SEQ ID NO: 175026 - DNA, 20 bp, synthetic construct
  source 1..20: mol_type = other DNA
atttcaactggctgatccag

SEQ ID NO: 175027 - DNA, 20 bp, synthetic construct
  source 1..20: mol_type = other DNA
aatttcaactggctgatcca

SEQ ID NO: 175028 - DNA, 20 bp, synthetic construct
  source 1..20: mol_type = other DNA
aaatttcaactggctgatcc

SEQ ID NO: 175029 - DNA, 20 bp, synthetic construct
  source 1..20: mol_type = other DNA
gaaatttcaactggctgatc

SEQ ID NO: 175030 - DNA, 20 bp, synthetic construct
  source 1..20: mol_type = other DNA
agaaatttcaactggctgat

SEQ ID NO: 175031 - DNA, 20 bp, synthetic construct
  source 1..20: mol_type = other DNA
aagaaatttcaactggctga

SEQ ID NO: 175032 - DNA, 20 bp, synthetic construct
  source 1..20: mol_type = other DNA
caagaaatttcaactggctg

SEQ ID NO: 175033 - DNA, 20 bp, synthetic construct
  source 1..20: mol_type = other DNA
acaagaaatttcaactggct

SEQ ID NO: 175034 - DNA, 20 bp, synthetic construct
  source 1..20: mol_type = other DNA
gacaagaaatttcaactggc

SEQ ID NO: 175035 - DNA, 20 bp, synthetic construct
  source 1..20: mol_type = other DNA
agacaagaaatttcaactgg

SEQ ID NO: 175036 - DNA, 20 bp, synthetic construct
  source 1..20: mol_type = other DNA
cagacaagaaatttcaactg

SEQ ID NO: 175037 - DNA, 20 bp, synthetic construct
  source 1..20: mol_type = other DNA
acagacaagaaatttcaact

SEQ ID NO: 175038 - DNA, 20 bp, synthetic construct
  source 1..20: mol_type = other DNA
aacagacaagaaatttcaac

SEQ ID NO: 175039 - DNA, 20 bp, synthetic construct
  source 1..20: mol_type = other DNA
aaacagacaagaaatttcaa

SEQ ID NO: 175040 - DNA, 20 bp, synthetic construct
  source 1..20: mol_type = other DNA
aaaacagacaagaaatttca

SEQ ID NO: 175041 - DNA, 20 bp, synthetic construct
  source 1..20: mol_type = other DNA
caaaacagacaagaaatttc

SEQ ID NO: 175042 - DNA, 20 bp, synthetic construct
  source 1..20: mol_type = other DNA
gcaaaacagacaagaaattt

SEQ ID NO: 175043 - DNA, 20 bp, synthetic construct
  source 1..20: mol_type = other DNA
ggcaaaacagacaagaaatt

SEQ ID NO: 175044 - DNA, 20 bp, synthetic construct
  source 1..20: mol_type = other DNA
aggcaaaacagacaagaaat

SEQ ID NO: 175045 - DNA, 20 bp, synthetic construct
  source 1..20: mol_type = other DNA
taggcaaaacagacaagaaa

SEQ ID NO: 175046 - DNA, 20 bp, synthetic construct
  source 1..20: mol_type = other DNA
ataggcaaaacagacaagaa

SEQ ID NO: 175047 - DNA, 20 bp, synthetic construct
  source 1..20: mol_type = other DNA
cataggcaaaacagacaaga

SEQ ID NO: 175048 - DNA, 20 bp, synthetic construct
  source 1..20: mol_type = other DNA
gcataggcaaaacagacaag

SEQ ID NO: 175049 - DNA, 20 bp, synthetic construct
  source 1..20: mol_type = other DNA
ggcataggcaaaacagacaa

SEQ ID NO: 175050 - DNA, 20 bp, synthetic construct
  source 1..20: mol_type = other DNA
tggcataggcaaaacagaca

SEQ ID NO: 175051 - DNA, 20 bp, synthetic construct
  source 1..20: mol_type = other DNA
gtggcataggcaaaacagac

SEQ ID NO: 175052 - DNA, 20 bp, synthetic construct
  source 1..20: mol_type = other DNA
tgtggcataggcaaaacaga

SEQ ID NO: 175053 - DNA, 20 bp, synthetic construct
  source 1..20: mol_type = other DNA
atgtggcataggcaaaacag

SEQ ID NO: 175054 - DNA, 20 bp, synthetic construct
  source 1..20: mol_type = other DNA
aatgtggcataggcaaaaca

SEQ ID NO: 175055 - DNA, 20 bp, synthetic construct
  source 1..20: mol_type = other DNA
taatgtggcataggcaaaac

SEQ ID NO: 175056 - DNA, 20 bp, synthetic construct
  source 1..20: mol_type = other DNA
ttaatgtggcataggcaaaa

SEQ ID NO: 175057 - DNA, 20 bp, synthetic construct
  source 1..20: mol_type = other DNA
attaatgtggcataggcaaa

SEQ ID NO: 175058 - DNA, 20 bp, synthetic construct
  source 1..20: mol_type = other DNA
tattaatgtggcataggcaa

SEQ ID NO: 175059 - DNA, 20 bp, synthetic construct
  source 1..20: mol_type = other DNA
ttattaatgtggcataggca

SEQ ID NO: 175060 - DNA, 20 bp, synthetic construct
  source 1..20: mol_type = other DNA
attattaatgtggcataggc

SEQ ID NO: 175061 - DNA, 20 bp, synthetic construct
  source 1..20: mol_type = other DNA
cattattaatgtggcatagg

SEQ ID NO: 175062 - DNA, 20 bp, synthetic construct
  source 1..20: mol_type = other DNA
gcattattaatgtggcatag

SEQ ID NO: 175063 - DNA, 20 bp, synthetic construct
  source 1..20: mol_type = other DNA
tgcattattaatgtggcata

SEQ ID NO: 175064 - DNA, 20 bp, synthetic construct
  source 1..20: mol_type = other DNA
gtgcattattaatgtggcat

SEQ ID NO: 175065 - DNA, 20 bp, synthetic construct
  source 1..20: mol_type = other DNA
agtgcattattaatgtggca

SEQ ID NO: 175066 - DNA, 20 bp, synthetic construct
  source 1..20: mol_type = other DNA
cagtgcattattaatgtggc

SEQ ID NO: 175067 - DNA, 20 bp, synthetic construct
  source 1..20: mol_type = other DNA
acagtgcattattaatgtgg

SEQ ID NO: 175068 - DNA, 20 bp, synthetic construct
  source 1..20: mol_type = other DNA
gacagtgcattattaatgtg

SEQ ID NO: 175069 - DNA, 20 bp, synthetic construct
  source 1..20: mol_type = other DNA
agacagtgcattattaatgt

SEQ ID NO: 175070 - DNA, 20 bp, synthetic construct
  source 1..20: mol_type = other DNA
cagacagtgcattattaatg

SEQ ID NO: 175071 - DNA, 20 bp, synthetic construct
  source 1..20: mol_type = other DNA
ccagacagtgcattattaat

SEQ ID NO: 175072 - DNA, 20 bp, synthetic construct
  source 1..20: mol_type = other DNA
cccagacagtgcattattaa

SEQ ID NO: 175073 - DNA, 20 bp, synthetic construct
  source 1..20: mol_type = other DNA
acccagacagtgcattatta

SEQ ID NO: 175074 - DNA, 20 bp, synthetic construct
  source 1..20: mol_type = other DNA
gacccagacagtgcattatt

SEQ ID NO: 175075 - DNA, 20 bp, synthetic construct
  source 1..20: mol_type = other DNA
ggacccagacagtgcattat

SEQ ID NO: 175076 - DNA, 20 bp, synthetic construct
  source 1..20: mol_type = other DNA
aggacccagacagtgcatta

SEQ ID NO: 175077 - DNA, 20 bp, synthetic construct
  source 1..20: mol_type = other DNA
gaggacccagacagtgcatt

SEQ ID NO: 175078 - DNA, 20 bp, synthetic construct
  source 1..20: mol_type = other DNA
ggaggacccagacagtgcat

SEQ ID NO: 175079 - DNA, 20 bp, synthetic construct
  source 1..20: mol_type = other DNA
cggaggacccagacagtgca

SEQ ID NO: 175080 - DNA, 20 bp, synthetic construct
  source 1..20: mol_type = other DNA
tcggaggacccagacagtgc

SEQ ID NO: 175081 - DNA, 20 bp, synthetic construct
  source 1..20: mol_type = other DNA
atcggaggacccagacagtg

SEQ ID NO: 175082 - DNA, 20 bp, synthetic construct
  source 1..20: mol_type = other DNA
aatcggaggacccagacagt

SEQ ID NO: 175083 - DNA, 20 bp, synthetic construct
  source 1..20: mol_type = other DNA
aaatcggaggacccagacag

SEQ ID NO: 175084 - DNA, 20 bp, synthetic construct
  source 1..20: mol_type = other DNA
gaaatcggaggacccagaca

SEQ ID NO: 175085 - DNA, 20 bp, synthetic construct
  source 1..20: mol_type = other DNA
tgaaatcggaggacccagac

SEQ ID NO: 175086 - DNA, 20 bp, synthetic construct
  source 1..20: mol_type = other DNA
ctgaaatcggaggacccaga

SEQ ID NO: 175087 - DNA, 20 bp, synthetic construct
  source 1..20: mol_type = other DNA
actgaaatcggaggacccag

SEQ ID NO: 175088 - DNA, 20 bp, synthetic construct
  source 1..20: mol_type = other DNA
aactgaaatcggaggaccca

SEQ ID NO: 175089 - DNA, 20 bp, synthetic construct
  source 1..20: mol_type = other DNA
aaactgaaatcggaggaccc

SEQ ID NO: 175090 - DNA, 20 bp, synthetic construct
  source 1..20: mol_type = other DNA
caaactgaaatcggaggacc

SEQ ID NO: 175091 - DNA, 20 bp, synthetic construct
  source 1..20: mol_type = other DNA
ccaaactgaaatcggaggac

SEQ ID NO: 175092 - DNA, 20 bp, synthetic construct
  source 1..20: mol_type = other DNA
tccaaactgaaatcggagga

SEQ ID NO: 175093 - DNA, 20 bp, synthetic construct
  source 1..20: mol_type = other DNA
atccaaactgaaatcggagg

SEQ ID NO: 175094 - DNA, 20 bp, synthetic construct
  source 1..20: mol_type = other DNA
aatccaaactgaaatcggag

SEQ ID NO: 175095 - DNA, 20 bp, synthetic construct
  source 1..20: mol_type = other DNA
aaatccaaactgaaatcgga

SEQ ID NO: 175096 - DNA, 20 bp, synthetic construct
  source 1..20: mol_type = other DNA
aaaatccaaactgaaatcgg

SEQ ID NO: 175097 - DNA, 20 bp, synthetic construct
  source 1..20: mol_type = other DNA
caaaatccaaactgaaatcg

SEQ ID NO: 175098 - DNA, 20 bp, synthetic construct
  source 1..20: mol_type = other DNA
ccaaaatccaaactgaaatc

SEQ ID NO: 175099 - DNA, 20 bp, synthetic construct
  source 1..20: mol_type = other DNA
cccaaaatccaaactgaaat

SEQ ID NO: 175100 - DNA, 20 bp, synthetic construct
  source 1..20: mol_type = other DNA
acccaaaatccaaactgaaa

SEQ ID NO: 175101 - DNA, 20 bp, synthetic construct
  source 1..20: mol_type = other DNA
aacccaaaatccaaactgaa

SEQ ID NO: 175102 - DNA, 20 bp, synthetic construct
  source 1..20: mol_type = other DNA
aaacccaaaatccaaactga

SEQ ID NO: 175103 - DNA, 20 bp, synthetic construct
  source 1..20: mol_type = other DNA
taaacccaaaatccaaactg

SEQ ID NO: 175104 - DNA, 20 bp, synthetic construct
  source 1..20: mol_type = other DNA
gtaaacccaaaatccaaact

SEQ ID NO: 175105 - DNA, 20 bp, synthetic construct
  source 1..20: mol_type = other DNA
tgtaaacccaaaatccaaac

SEQ ID NO: 175106 - DNA, 20 bp, synthetic construct
  source 1..20: mol_type = other DNA
atgtaaacccaaaatccaaa

SEQ ID NO: 175107 - DNA, 20 bp, synthetic construct
  source 1..20: mol_type = other DNA
aatgtaaacccaaaatccaa

SEQ ID NO: 175108 - DNA, 20 bp, synthetic construct
  source 1..20: mol_type = other DNA
caatgtaaacccaaaatcca

SEQ ID NO: 175109 - DNA, 20 bp, synthetic construct
  source 1..20: mol_type = other DNA
acaatgtaaacccaaaatcc

SEQ ID NO: 175110 - DNA, 20 bp, synthetic construct
  source 1..20: mol_type = other DNA
cacaatgtaaacccaaaatc

SEQ ID NO: 175111 - DNA, 20 bp, synthetic construct
  source 1..20: mol_type = other DNA
ccacaatgtaaacccaaaat

SEQ ID NO: 175112 - DNA, 20 bp, synthetic construct
  source 1..20: mol_type = other DNA
tccacaatgtaaacccaaaa

SEQ ID NO: 175113 - DNA, 20 bp, synthetic construct
  source 1..20: mol_type = other DNA
ctccacaatgtaaacccaaa

SEQ ID NO: 175114 - DNA, 20 bp, synthetic construct
  source 1..20: mol_type = other DNA
actccacaatgtaaacccaa

SEQ ID NO: 175115 - DNA, 20 bp, synthetic construct
  source 1..20: mol_type = other DNA
gactccacaatgtaaaccca

SEQ ID NO: 175116 - DNA, 20 bp, synthetic construct
  source 1..20: mol_type = other DNA
tgactccacaatgtaaaccc

SEQ ID NO: 175117 - DNA, 20 bp, synthetic construct
  source 1..20: mol_type = other DNA
atgactccacaatgtaaacc

SEQ ID NO: 175118 - DNA, 20 bp, synthetic construct
  source 1..20: mol_type = other DNA
gatgactccacaatgtaaac

SEQ ID NO: 175119 - DNA, 20 bp, synthetic construct
  source 1..20: mol_type = other DNA
agatgactccacaatgtaaa

SEQ ID NO: 175120 - DNA, 20 bp, synthetic construct
  source 1..20: mol_type = other DNA
cagatgactccacaatgtaa

SEQ ID NO: 175121 - DNA, 20 bp, synthetic construct
  source 1..20: mol_type = other DNA
tcagatgactccacaatgta

SEQ ID NO: 175122 - DNA, 20 bp, synthetic construct
  source 1..20: mol_type = other DNA
ttcagatgactccacaatgt

SEQ ID NO: 175123 - DNA, 20 bp, synthetic construct
  source 1..20: mol_type = other DNA
attcagatgactccacaatg

SEQ ID NO: 175124 - DNA, 20 bp, synthetic construct
  source 1..20: mol_type = other DNA
cattcagatgactccacaat

SEQ ID NO: 175125 - DNA, 20 bp, synthetic construct
  source 1..20: mol_type = other DNA
gcattcagatgactccacaa

SEQ ID NO: 175126 - DNA, 20 bp, synthetic construct
  source 1..20: mol_type = other DNA
tgcattcagatgactccaca

SEQ ID NO: 175127 - DNA, 20 bp, synthetic construct
  source 1..20: mol_type = other DNA
ctgcattcagatgactccac

SEQ ID NO: 175128 - DNA, 20 bp, synthetic construct
  source 1..20: mol_type = other DNA
tctgcattcagatgactcca

SEQ ID NO: 175129 - DNA, 20 bp, synthetic construct
  source 1..20: mol_type = other DNA
ttctgcattcagatgactcc

SEQ ID NO: 175130 - DNA, 20 bp, synthetic construct
  source 1..20: mol_type = other DNA
attctgcattcagatgactc

SEQ ID NO: 175131 - DNA, 20 bp, synthetic construct
  source 1..20: mol_type = other DNA
gattctgcattcagatgact

SEQ ID NO: 175132 - DNA, 20 bp, synthetic construct
  source 1..20: mol_type = other DNA
ggattctgcattcagatgac

SEQ ID NO: 175133 - DNA, 20 bp, synthetic construct
  source 1..20: mol_type = other DNA
aggattctgcattcagatga

SEQ ID NO: 175134 - DNA, 20 bp, synthetic construct
  source 1..20: mol_type = other DNA
aaggattctgcattcagatg

SEQ ID NO: 175135 - DNA, 20 bp, synthetic construct
  source 1..20: mol_type = other DNA
gaaggattctgcattcagat

SEQ ID NO: 175136 - DNA, 20 bp, synthetic construct
  source 1..20: mol_type = other DNA
tgaaggattctgcattcaga

SEQ ID NO: 175137 - DNA, 20 bp, synthetic construct
  source 1..20: mol_type = other DNA
ctgaaggattctgcattcag

SEQ ID NO: 175138 - DNA, 20 bp, synthetic construct
  source 1..20: mol_type = other DNA
cctgaaggattctgcattca

SEQ ID NO: 175139 - DNA, 20 bp, synthetic construct
  source 1..20: mol_type = other DNA
ccctgaaggattctgcattc

SEQ ID NO: 175140 - DNA, 20 bp, synthetic construct
  source 1..20: mol_type = other DNA
tccctgaaggattctgcatt

SEQ ID NO: 175141 - DNA, 20 bp, synthetic construct
  source 1..20: mol_type = other DNA
atccctgaaggattctgcat

SEQ ID NO: 175142 - DNA, 20 bp, synthetic construct
  source 1..20: mol_type = other DNA
aatccctgaaggattctgca

SEQ ID NO: 175143 - DNA, 20 bp, synthetic construct
  source 1..20: mol_type = other DNA
aaatccctgaaggattctgc

SEQ ID NO: 175144 - DNA, 20 bp, synthetic construct
  source 1..20: mol_type = other DNA
aaaatccctgaaggattctg

SEQ ID NO: 175145 - DNA, 20 bp, synthetic construct
  source 1..20: mol_type = other DNA
taaaatccctgaaggattct

SEQ ID NO: 175146 - DNA, 20 bp, synthetic construct
  source 1..20: mol_type = other DNA
gtaaaatccctgaaggattc

SEQ ID NO: 175147 - DNA, 20 bp, synthetic construct
  source 1..20: mol_type = other DNA
agtaaaatccctgaaggatt

SEQ ID NO: 175148 - DNA, 20 bp, synthetic construct
  source 1..20: mol_type = other DNA
aagtaaaatccctgaaggat

SEQ ID NO: 175149 - DNA, 20 bp, synthetic construct
  source 1..20: mol_type = other DNA
aaagtaaaatccctgaagga

SEQ ID NO: 175150 - DNA, 20 bp, synthetic construct
  source 1..20: mol_type = other DNA
aaaagtaaaatccctgaagg

SEQ ID NO: 175151 - DNA, 20 bp, synthetic construct
  source 1..20: mol_type = other DNA
aaaaagtaaaatccctgaag

SEQ ID NO: 175152 - DNA, 20 bp, synthetic construct
  source 1..20: mol_type = other DNA
aaaaaagtaaaatccctgaa

SEQ ID NO: 175153 - DNA, 20 bp, synthetic construct
  source 1..20: mol_type = other DNA
aaaaaaagtaaaatccctga

SEQ ID NO: 175154 - DNA, 20 bp, synthetic construct
  source 1..20: mol_type = other DNA
aaaaaaaagtaaaatccctg

SEQ ID NO: 175155 - DNA, 20 bp, synthetic construct
  source 1..20: mol_type = other DNA
aaaaaaaaagtaaaatccct

SEQ ID NO: 175156 - DNA, 20 bp, synthetic construct
  source 1..20: mol_type = other DNA
aaaaaaaaaagtaaaatccc

SEQ ID NO: 175157 - DNA, 20 bp, synthetic construct
  source 1..20: mol_type = other DNA
aaaaaaaaaaagtaaaatcc

SEQ ID NO: 175158 - DNA, 20 bp, synthetic construct
  source 1..20: mol_type = other DNA
aaaaaaaaaaaagtaaaatc

SEQ ID NO: 175159 - DNA, 20 bp, synthetic construct
  source 1..20: mol_type = other DNA
aaaaaaaaaaaaagtaaaat

SEQ ID NO: 175160 - DNA, 20 bp, synthetic construct
  source 1..20: mol_type = other DNA
aaaaaaaaaaaaaagtaaaa

SEQ ID NO: 175161 - DNA, 20 bp, synthetic construct
  source 1..20: mol_type = other DNA
aaaaaaaaaaaaaaagtaaa

SEQ ID NO: 175162 - DNA, 20 bp, synthetic construct
  source 1..20: mol_type = other DNA
aaaaaaaaaaaaaaaagtaa

SEQ ID NO: 175163 - DNA, 20 bp, synthetic construct
  source 1..20: mol_type = other DNA
gaaaaaaaaaaaaaaaagta

SEQ ID NO: 175164 - DNA, 20 bp, synthetic construct
  source 1..20: mol_type = other DNA
tgaaaaaaaaaaaaaaaagt

SEQ ID NO: 175165 - DNA, 20 bp, synthetic construct
  source 1..20: mol_type = other DNA
atgaaaaaaaaaaaaaaaag

SEQ ID NO: 175166 - DNA, 20 bp, synthetic construct
  source 1..20: mol_type = other DNA
catgaaaaaaaaaaaaaaaa

SEQ ID NO: 175167 - DNA, 20 bp, synthetic construct
  source 1..20: mol_type = other DNA
ccatgaaaaaaaaaaaaaaa

SEQ ID NO: 175168 - DNA, 20 bp, synthetic construct
  source 1..20: mol_type = other DNA
accatgaaaaaaaaaaaaaa

SEQ ID NO: 175169 - DNA, 20 bp, synthetic construct
  source 1..20: mol_type = other DNA
gaccatgaaaaaaaaaaaaa

SEQ ID NO: 175170 - DNA, 20 bp, synthetic construct
  source 1..20: mol_type = other DNA
agaccatgaaaaaaaaaaaa

SEQ ID NO: 175171 - DNA, 20 bp, synthetic construct
  source 1..20: mol_type = other DNA
aagaccatgaaaaaaaaaaa

SEQ ID NO: 175172 - DNA, 20 bp, synthetic construct
  source 1..20: mol_type = other DNA
aaagaccatgaaaaaaaaaa

SEQ ID NO: 175173 - DNA, 20 bp, synthetic construct
  source 1..20: mol_type = other DNA
taaagaccatgaaaaaaaaa

SEQ ID NO: 175174 - DNA, 20 bp, synthetic construct
  source 1..20: mol_type = other DNA
gtaaagaccatgaaaaaaaa

SEQ ID NO: 175175 - DNA, 20 bp, synthetic construct
  source 1..20: mol_type = other DNA
ggtaaagaccatgaaaaaaa

SEQ ID NO: 175176 - DNA, 20 bp, synthetic construct
  source 1..20: mol_type = other DNA
tggtaaagaccatgaaaaaa

SEQ ID NO: 175177 - DNA, 20 bp, synthetic construct
  source 1..20: mol_type = other DNA
atggtaaagaccatgaaaaa

SEQ ID NO: 175178 - DNA, 20 bp, synthetic construct
  source 1..20: mol_type = other DNA
gatggtaaagaccatgaaaa

SEQ ID NO: 175179 - DNA, 20 bp, synthetic construct
  source 1..20: mol_type = other DNA
ggatggtaaagaccatgaaa

SEQ ID NO: 175180 - DNA, 20 bp, synthetic construct
  source 1..20: mol_type = other DNA
gggatggtaaagaccatgaa

SEQ ID NO: 175181 - DNA, 20 bp, synthetic construct
  source 1..20: mol_type = other DNA
tgggatggtaaagaccatga

SEQ ID NO: 175182 - DNA, 20 bp, synthetic construct
  source 1..20: mol_type = other DNA
atgggatggtaaagaccatg

SEQ ID NO: 175183 - DNA, 20 bp, synthetic construct
  source 1..20: mol_type = other DNA
aatgggatggtaaagaccat

SEQ ID NO: 175184 - DNA, 20 bp, synthetic construct
  source 1..20: mol_type = other DNA
aaatgggatggtaaagacca

SEQ ID NO: 175185 - DNA, 20 bp, synthetic construct
  source 1..20: mol_type = other DNA
caaatgggatggtaaagacc

SEQ ID NO: 175186 - DNA, 20 bp, synthetic construct
  source 1..20: mol_type = other DNA
tcaaatgggatggtaaagac

SEQ ID NO: 175187 - DNA, 20 bp, synthetic construct
  source 1..20: mol_type = other DNA
atcaaatgggatggtaaaga

SEQ ID NO: 175188 - DNA, 20 bp, synthetic construct
  source 1..20: mol_type = other DNA
tatcaaatgggatggtaaag

SEQ ID NO: 175189 - DNA, 20 bp, synthetic construct
  source 1..20: mol_type = other DNA
ctatcaaatgggatggtaaa

SEQ ID NO: 175190 - DNA, 20 bp, synthetic construct
  source 1..20: mol_type = other DNA
actatcaaatgggatggtaa

SEQ ID NO: 175191 - DNA, 20 bp, synthetic construct
  source 1..20: mol_type = other DNA
tactatcaaatgggatggta

SEQ ID NO: 175192 - DNA, 20 bp, synthetic construct
  source 1..20: mol_type = other DNA
ttactatcaaatgggatggt

SEQ ID NO: 175193 - DNA, 20 bp, synthetic construct
  source 1..20: mol_type = other DNA
tttactatcaaatgggatgg

SEQ ID NO: 175194 - DNA, 20 bp, synthetic construct
  source 1..20: mol_type = other DNA
atttactatcaaatgggatg

SEQ ID NO: 175195 - DNA, 20 bp, synthetic construct
  source 1..20: mol_type = other DNA
tatttactatcaaatgggat

SEQ ID NO: 175196 - DNA, 20 bp, synthetic construct
  source 1..20: mol_type = other DNA
atatttactatcaaatggga

SEQ ID NO: 175197 - DNA, 20 bp, synthetic construct
  source 1..20: mol_type = other DNA
aatatttactatcaaatggg

SEQ ID NO: 175198 - DNA, 20 bp, synthetic construct
  source 1..20: mol_type = other DNA
taatatttactatcaaatgg

SEQ ID NO: 175199 - DNA, 20 bp, synthetic construct
  source 1..20: mol_type = other DNA
gtaatatttactatcaaatg

SEQ ID NO: 175200 - DNA, 20 bp, synthetic construct
  source 1..20: mol_type = other DNA
agtaatatttactatcaaat

SEQ ID NO: 175201 - DNA, 20 bp, synthetic construct
  source 1..20: mol_type = other DNA
gagtaatatttactatcaaa

SEQ ID NO: 175202 - DNA, 20 bp, synthetic construct
  source 1..20: mol_type = other DNA
tgagtaatatttactatcaa

SEQ ID NO: 175203 - DNA, 20 bp, synthetic construct
  source 1..20: mol_type = other DNA
gtgagtaatatttactatca

SEQ ID NO: 175204 - DNA, 20 bp, synthetic construct
  source 1..20: mol_type = other DNA
ggtgagtaatatttactatc

SEQ ID NO: 175205 - DNA, 20 bp, synthetic construct
  source 1..20: mol_type = other DNA
aggtgagtaatatttactat

SEQ ID NO: 175206 - DNA, 20 bp, synthetic construct
  source 1..20: mol_type = other DNA
aaggtgagtaatatttacta

SEQ ID NO: 175207 - DNA, 20 bp, synthetic construct
  source 1..20: mol_type = other DNA
aaaggtgagtaatatttact

SEQ ID NO: 175208 - DNA, 20 bp, synthetic construct
  source 1..20: mol_type = other DNA
taaaggtgagtaatatttac

SEQ ID NO: 175209 - DNA, 20 bp, synthetic construct
  source 1..20: mol_type = other DNA
ataaaggtgagtaatattta

SEQ ID NO: 175210 - DNA, 20 bp, synthetic construct
  source 1..20: mol_type = other DNA
cataaaggtgagtaatattt

SEQ ID NO: 175211 - DNA, 20 bp, synthetic construct
  source 1..20: mol_type = other DNA
tcataaaggtgagtaatatt

SEQ ID NO: 175212 - DNA, 20 bp, synthetic construct
  source 1..20: mol_type = other DNA
ttcataaaggtgagtaatat

SEQ ID NO: 175213 - DNA, 20 bp, synthetic construct
  source 1..20: mol_type = other DNA
cttcataaaggtgagtaata

SEQ ID NO: 175214 - DNA, 20 bp, synthetic construct
  source 1..20: mol_type = other DNA
acttcataaaggtgagtaat

SEQ ID NO: 175215 - DNA, 20 bp, synthetic construct
  source 1..20: mol_type = other DNA
gacttcataaaggtgagtaa

SEQ ID NO: 175216 - DNA, 20 bp, synthetic construct
  source 1..20: mol_type = other DNA
agacttcataaaggtgagta

SEQ ID NO: 175217 - DNA, 20 bp, synthetic construct
  source 1..20: mol_type = other DNA
aagacttcataaaggtgagt

SEQ ID NO: 175218 - DNA, 20 bp, synthetic construct
  source 1..20: mol_type = other DNA
aaagacttcataaaggtgag

SEQ ID NO: 175219 - DNA, 20 bp, synthetic construct
  source 1..20: mol_type = other DNA
gaaagacttcataaaggtga

SEQ ID NO: 175220 - DNA, 20 bp, synthetic construct
  source 1..20: mol_type = other DNA
ggaaagacttcataaaggtg

SEQ ID NO: 175221 - DNA, 20 bp, synthetic construct
  source 1..20: mol_type = other DNA
tggaaagacttcataaaggt

SEQ ID NO: 175222 - DNA, 20 bp, synthetic construct
  source 1..20: mol_type = other DNA
ttggaaagacttcataaagg

SEQ ID NO: 175223 - DNA, 20 bp, synthetic construct
  source 1..20: mol_type = other DNA
tttggaaagacttcataaag

SEQ ID NO: 175224 - DNA, 20 bp, synthetic construct
  source 1..20: mol_type = other DNA
ttttggaaagacttcataaa

SEQ ID NO: 175225 - DNA, 20 bp, synthetic construct
  source 1..20: mol_type = other DNA
gttttggaaagacttcataa

SEQ ID NO: 175226 - DNA, 20 bp, synthetic construct
  source 1..20: mol_type = other DNA
tgttttggaaagacttcata

SEQ ID NO: 175227 - DNA, 20 bp, synthetic construct
  source 1..20: mol_type = other DNA
atgttttggaaagacttcat

SEQ ID NO: 175228 - DNA, 20 bp, synthetic construct
  source 1..20: mol_type = other DNA
aatgttttggaaagacttca

SEQ ID NO: 175229 - DNA, 20 bp, synthetic construct
  source 1..20: mol_type = other DNA
gaatgttttggaaagacttc

SEQ ID NO: 175230 - DNA, 20 bp, synthetic construct
  source 1..20: mol_type = other DNA
tgaatgttttggaaagactt

SEQ ID NO: 175231 - DNA, 20 bp, synthetic construct
  source 1..20: mol_type = other DNA
ttgaatgttttggaaagact

SEQ ID NO: 175232 - DNA, 20 bp, synthetic construct
  source 1..20: mol_type = other DNA
gttgaatgttttggaaagac

SEQ ID NO: 175233 - DNA, 20 bp, synthetic construct
  source 1..20: mol_type = other DNA
agttgaatgttttggaaaga

SEQ ID NO: 175234 - DNA, 20 bp, synthetic construct
  source 1..20: mol_type = other DNA
tagttgaatgttttggaaag

SEQ ID NO: 175235 - DNA, 20 bp, synthetic construct
  source 1..20: mol_type = other DNA
ttagttgaatgttttggaaa

SEQ ID NO: 175236 - DNA, 20 bp, synthetic construct
  source 1..20: mol_type = other DNA
tttagttgaatgttttggaa

SEQ ID NO: 175237 - DNA, 20 bp, synthetic construct
  source 1..20: mol_type = other DNA
atttagttgaatgttttgga

SEQ ID NO: 175238 - DNA, 20 bp, synthetic construct
  source 1..20: mol_type = other DNA
aatttagttgaatgttttgg

SEQ ID NO: 175239 - DNA, 20 bp, synthetic construct
  source 1..20: mol_type = other DNA
aaatttagttgaatgttttg

SEQ ID NO: 175240 - DNA, 20 bp, synthetic construct
  source 1..20: mol_type = other DNA
aaaatttagttgaatgtttt

SEQ ID NO: 175241 - DNA, 20 bp, synthetic construct
  source 1..20: mol_type = other DNA
gaaaatttagttgaatgttt

SEQ ID NO: 175242 - DNA, 20 bp, synthetic construct
  source 1..20: mol_type = other DNA
agaaaatttagttgaatgtt

SEQ ID NO: 175243 - DNA, 20 bp, synthetic construct
  source 1..20: mol_type = other DNA
aagaaaatttagttgaatgt

SEQ ID NO: 175244 - DNA, 20 bp, synthetic construct
  source 1..20: mol_type = other DNA
taagaaaatttagttgaatg

SEQ ID NO: 175245 - DNA, 20 bp, synthetic construct
  source 1..20: mol_type = other DNA
ttaagaaaatttagttgaat

SEQ ID NO: 175246 - DNA, 20 bp, synthetic construct
  source 1..20: mol_type = other DNA
tttaagaaaatttagttgaa

SEQ ID NO: 175247 - DNA, 20 bp, synthetic construct
  source 1..20: mol_type = other DNA
ttttaagaaaatttagttga

SEQ ID NO: 175248 - DNA, 20 bp, synthetic construct
  source 1..20: mol_type = other DNA
attttaagaaaatttagttg

SEQ ID NO: 175249 - DNA, 20 bp, synthetic construct
  source 1..20: mol_type = other DNA
gattttaagaaaatttagtt

SEQ ID NO: 175250 - DNA, 20 bp, synthetic construct
  source 1..20: mol_type = other DNA
tgattttaagaaaatttagt

SEQ ID NO: 175251 - DNA, 20 bp, synthetic construct
  source 1..20: mol_type = other DNA
atgattttaagaaaatttag

SEQ ID NO: 175252 - DNA, 20 bp, synthetic construct
  source 1..20: mol_type = other DNA
aatgattttaagaaaattta

SEQ ID NO: 175253 - DNA, 20 bp, synthetic construct
  source 1..20: mol_type = other DNA
caatgattttaagaaaattt

SEQ ID NO: 175254 - DNA, 20 bp, synthetic construct
  source 1..20: mol_type = other DNA
tcaatgattttaagaaaatt

SEQ ID NO: 175255 - DNA, 20 bp, synthetic construct
  source 1..20: mol_type = other DNA
ttcaatgattttaagaaaat

SEQ ID NO: 175256 - DNA, 20 bp, synthetic construct
  source 1..20: mol_type = other DNA
attcaatgattttaagaaaa

SEQ ID NO: 175257 - DNA, 20 bp, synthetic construct
  source 1..20: mol_type = other DNA
cattcaatgattttaagaaa

SEQ ID NO: 175258 - DNA, 20 bp, synthetic construct
  source 1..20: mol_type = other DNA
tcattcaatgattttaagaa

SEQ ID NO: 175259 - DNA, 20 bp, synthetic construct
  source 1..20: mol_type = other DNA
atcattcaatgattttaaga

SEQ ID NO: 175260 - DNA, 20 bp, synthetic construct
  source 1..20: mol_type = other DNA
aatcattcaatgattttaag

SEQ ID NO: 175261 - DNA, 20 bp, synthetic construct
  source 1..20: mol_type = other DNA
aaatcattcaatgattttaa

SEQ ID NO: 175262 - DNA, 20 bp, synthetic construct
  source 1..20: mol_type = other DNA
caaatcattcaatgatttta

SEQ ID NO: 175263 - DNA, 20 bp, synthetic construct
  source 1..20: mol_type = other DNA
tcaaatcattcaatgatttt

SEQ ID NO: 175264 - DNA, 20 bp, synthetic construct
  source 1..20: mol_type = other DNA
ttcaaatcattcaatgattt

SEQ ID NO: 175265 - DNA, 20 bp, synthetic construct
  source 1..20: mol_type = other DNA
cttcaaatcattcaatgatt

SEQ ID NO: 175266 - DNA, 20 bp, synthetic construct
  source 1..20: mol_type = other DNA
tcttcaaatcattcaatgat

SEQ ID NO: 175267 - DNA, 20 bp, synthetic construct
  source 1..20: mol_type = other DNA
ctcttcaaatcattcaatga

SEQ ID NO: 175268 - DNA, 20 bp, synthetic construct
  source 1..20: mol_type = other DNA
gctcttcaaatcattcaatg

SEQ ID NO: 175269 - DNA, 20 bp, synthetic construct
  source 1..20: mol_type = other DNA
agctcttcaaatcattcaat

SEQ ID NO: 175270 - DNA, 20 bp, synthetic construct
  source 1..20: mol_type = other DNA
aagctcttcaaatcattcaa

SEQ ID NO: 175271 - DNA, 20 bp, synthetic construct
  source 1..20: mol_type = other DNA
taagctcttcaaatcattca

SEQ ID NO: 175272 - DNA, 20 bp, synthetic construct
  source 1..20: mol_type = other DNA
ataagctcttcaaatcattc

SEQ ID NO: 175273 - DNA, 20 bp, synthetic construct
  source 1..20: mol_type = other DNA
aataagctcttcaaatcatt

SEQ ID NO: 175274 - DNA, 20 bp, synthetic construct
  source 1..20: mol_type = other DNA
gaataagctcttcaaatcat

SEQ ID NO: 175275 - DNA, 20 bp, synthetic construct
  source 1..20: mol_type = other DNA
ggaataagctcttcaaatca

SEQ ID NO: 175276 - DNA, 20 bp, synthetic construct
  source 1..20: mol_type = other DNA
aggaataagctcttcaaatc

SEQ ID NO: 175277 - DNA, 20 bp, synthetic construct
  source 1..20: mol_type = other DNA
gaggaataagctcttcaaat

SEQ ID NO: 175278 - DNA, 20 bp, synthetic construct
  source 1..20: mol_type = other DNA
tgaggaataagctcttcaaa

SEQ ID NO: 175279 - DNA, 20 bp, synthetic construct
  source 1..20: mol_type = other DNA
ctgaggaataagctcttcaa

SEQ ID NO: 175280 - DNA, 20 bp, synthetic construct
  source 1..20: mol_type = other DNA
gctgaggaataagctcttca

SEQ ID NO: 175281 - DNA, 20 bp, synthetic construct
  source 1..20: mol_type = other DNA
tgctgaggaataagctcttc

SEQ ID NO: 175282 - DNA, 20 bp, synthetic construct
  source 1..20: mol_type = other DNA
gtgctgaggaataagctctt

SEQ ID NO: 175283 - DNA, 20 bp, synthetic construct
  source 1..20: mol_type = other DNA
agtgctgaggaataagctct

SEQ ID NO: 175284 - DNA, 20 bp, synthetic construct
  source 1..20: mol_type = other DNA
aagtgctgaggaataagctc

SEQ ID NO: 175285 - DNA, 20 bp, synthetic construct
  source 1..20: mol_type = other DNA
aaagtgctgaggaataagct

SEQ ID NO: 175286 - DNA, 20 bp, synthetic construct
  source 1..20: mol_type = other DNA
aaaagtgctgaggaataagc

SEQ ID NO: 175287 - DNA, 20 bp, synthetic construct
  source 1..20: mol_type = other DNA
taaaagtgctgaggaataag

SEQ ID NO: 175288 - DNA, 20 bp, synthetic construct
  source 1..20: mol_type = other DNA
gtaaaagtgctgaggaataa

SEQ ID NO: 175289 - DNA, 20 bp, synthetic construct
  source 1..20: mol_type = other DNA
agtaaaagtgctgaggaata

SEQ ID NO: 175290 - DNA, 20 bp, synthetic construct
  source 1..20: mol_type = other DNA
gagtaaaagtgctgaggaat

SEQ ID NO: 175291 - DNA, 20 bp, synthetic construct
  source 1..20: mol_type = other DNA
ggagtaaaagtgctgaggaa

SEQ ID NO: 175292 - DNA, 20 bp, synthetic construct
  source 1..20: mol_type = other DNA
tggagtaaaagtgctgagga

SEQ ID NO: 175293 - DNA, 20 bp, synthetic construct
  source 1..20: mol_type = other DNA
atggagtaaaagtgctgagg

SEQ ID NO: 175294 - DNA, 20 bp, synthetic construct
  source 1..20: mol_type = other DNA
gatggagtaaaagtgctgag

SEQ ID NO: 175295 - DNA, 20 bp, synthetic construct
  source 1..20: mol_type = other DNA
tgatggagtaaaagtgctga

SEQ ID NO: 175296 - DNA, 20 bp, synthetic construct
  source 1..20: mol_type = other DNA
ctgatggagtaaaagtgctg

SEQ ID NO: 175297 - DNA, 20 bp, synthetic construct
  source 1..20: mol_type = other DNA
gctgatggagtaaaagtgct

SEQ ID NO: 175298 - DNA, 20 bp, synthetic construct
  source 1..20: mol_type = other DNA
agctgatggagtaaaagtgc

SEQ ID NO: 175299 - DNA, 20 bp, synthetic construct
  source 1..20: mol_type = other DNA
aagctgatggagtaaaagtg

SEQ ID NO: 175300 - DNA, 20 bp, synthetic construct
  source 1..20: mol_type = other DNA
caagctgatggagtaaaagt

SEQ ID NO: 175301 - DNA, 20 bp, synthetic construct
  source 1..20: mol_type = other DNA
gcaagctgatggagtaaaag

SEQ ID NO: 175302 - DNA, 20 bp, synthetic construct
  source 1..20: mol_type = other DNA
tgcaagctgatggagtaaaa

SEQ ID NO: 175303 - DNA, 20 bp, synthetic construct
  source 1..20: mol_type = other DNA
gtgcaagctgatggagtaaa

SEQ ID NO: 175304 - DNA, 20 bp, synthetic construct
  source 1..20: mol_type = other DNA
ggtgcaagctgatggagtaa

SEQ ID NO: 175305 - DNA, 20 bp, synthetic construct
  source 1..20: mol_type = other DNA
aggtgcaagctgatggagta

SEQ ID NO: 175306 - DNA, 20 bp, synthetic construct
  source 1..20: mol_type = other DNA
aaggtgcaagctgatggagt

SEQ ID NO: 175307 - DNA, 20 bp, synthetic construct
  source 1..20: mol_type = other DNA
taaggtgcaagctgatggag

SEQ ID NO: 175308 - DNA, 20 bp, synthetic construct
  source 1..20: mol_type = other DNA
ataaggtgcaagctgatgga

SEQ ID NO: 175309 - DNA, 20 bp, synthetic construct
  source 1..20: mol_type = other DNA
aataaggtgcaagctgatgg

SEQ ID NO: 175310 - DNA, 20 bp, synthetic construct
  source 1..20: mol_type = other DNA
aaataaggtgcaagctgatg

SEQ ID NO: 175311 - DNA, 20 bp, synthetic construct
  source 1..20: mol_type = other DNA
aaaataaggtgcaagctgat

SEQ ID NO: 175312 - DNA, 20 bp, synthetic construct
  source 1..20: mol_type = other DNA
aaaaataaggtgcaagctga

SEQ ID NO: 175313 - DNA, 20 bp, synthetic construct
  source 1..20: mol_type = other DNA
aaaaaataaggtgcaagctg

SEQ ID NO: 175314 - DNA, 20 bp, synthetic construct
  source 1..20: mol_type = other DNA
taaaaaataaggtgcaagct

SEQ ID NO: 175315 - DNA, 20 bp, synthetic construct
  source 1..20: mol_type = other DNA
ttaaaaaataaggtgcaagc

SEQ ID NO: 175316 - DNA, 20 bp, synthetic construct
  source 1..20: mol_type = other DNA
attaaaaaataaggtgcaag

SEQ ID NO: 175317 - DNA, 20 bp, synthetic construct
  source 1..20: mol_type = other DNA
gattaaaaaataaggtgcaa

SEQ ID NO: 175318 - DNA, 20 bp, synthetic construct
  source 1..20: mol_type = other DNA
agattaaaaaataaggtgca

SEQ ID NO: 175319 - DNA, 20 bp, synthetic construct
  source 1..20: mol_type = other DNA
aagattaaaaaataaggtgc

SEQ ID NO: 175320 - DNA, 20 bp, synthetic construct
  source 1..20: mol_type = other DNA
aaagattaaaaaataaggtg

SEQ ID NO: 175321 - DNA, 20 bp, synthetic construct
  source 1..20: mol_type = other DNA
aaaagattaaaaaataaggt

SEQ ID NO: 175322 - DNA, 20 bp, synthetic construct
  source 1..20: mol_type = other DNA
aaaaagattaaaaaataagg

SEQ ID NO: 175323 - DNA, 20 bp, synthetic construct
  source 1..20: mol_type = other DNA
aaaaaagattaaaaaataag

SEQ ID NO: 175324 - DNA, 20 bp, synthetic construct
  source 1..20: mol_type = other DNA
aaaaaaagattaaaaaataa

SEQ ID NO: 175325 - DNA, 20 bp, synthetic construct
  source 1..20: mol_type = other DNA
caaaaaaagattaaaaaata

SEQ ID NO: 175326 - DNA, 20 bp, synthetic construct
  source 1..20: mol_type = other DNA
tcaaaaaaagattaaaaaat

SEQ ID NO: 175327 - DNA, 20 bp, synthetic construct
  source 1..20: mol_type = other DNA
ctcaaaaaaagattaaaaaa

SEQ ID NO: 175328 - DNA, 20 bp, synthetic construct
  source 1..20: mol_type = other DNA
tctcaaaaaaagattaaaaa

SEQ ID NO: 175329 - DNA, 20 bp, synthetic construct
  source 1..20: mol_type = other DNA
gtctcaaaaaaagattaaaa

SEQ ID NO: 175330 - DNA, 20 bp, synthetic construct
  source 1..20: mol_type = other DNA
cgtctcaaaaaaagattaaa

SEQ ID NO: 175331 - DNA, 20 bp, synthetic construct
  source 1..20: mol_type = other DNA
ccgtctcaaaaaaagattaa

SEQ ID NO: 175332 - DNA, 20 bp, synthetic construct
  source 1..20: mol_type = other DNA
tccgtctcaaaaaaagatta

SEQ ID NO: 175333 - DNA, 20 bp, synthetic construct
  source 1..20: mol_type = other DNA
ctccgtctcaaaaaaagatt

SEQ ID NO: 175334 - DNA, 20 bp, synthetic construct
  source 1..20: mol_type = other DNA
actccgtctcaaaaaaagat

SEQ ID NO: 175335 - DNA, 20 bp, synthetic construct
  source 1..20: mol_type = other DNA
gactccgtctcaaaaaaaga

SEQ ID NO: 175336 - DNA, 20 bp, synthetic construct
  source 1..20: mol_type = other DNA
agactccgtctcaaaaaaag

SEQ ID NO: 175337 - DNA, 20 bp, synthetic construct
  source 1..20: mol_type = other DNA
gagactccgtctcaaaaaaa

SEQ ID NO: 175338 - DNA, 20 bp, synthetic construct
  source 1..20: mol_type = other DNA
cgagactccgtctcaaaaaa

SEQ ID NO: 175339 - DNA, 20 bp, synthetic construct
  source 1..20: mol_type = other DNA
gcgagactccgtctcaaaaa

SEQ ID NO: 175340 - DNA, 20 bp, synthetic construct
  source 1..20: mol_type = other DNA
agcgagactccgtctcaaaa

SEQ ID NO: 175341 - DNA, 20 bp, synthetic construct
  source 1..20: mol_type = other DNA
gagcgagactccgtctcaaa

SEQ ID NO: 175342 - DNA, 20 bp, synthetic construct
  source 1..20: mol_type = other DNA
agagcgagactccgtctcaa

SEQ ID NO: 175343 - DNA, 20 bp, synthetic construct
  source 1..20: mol_type = other DNA
tagagcgagactccgtctca

SEQ ID NO: 175344 - DNA, 20 bp, synthetic construct
  source 1..20: mol_type = other DNA
atagagcgagactccgtctc

SEQ ID NO: 175345 - DNA, 20 bp, synthetic construct
  source 1..20: mol_type = other DNA
gatagagcgagactccgtct

SEQ ID NO: 175346 - DNA, 20 bp, synthetic construct
  source 1..20: mol_type = other DNA
cgatagagcgagactccgtc

SEQ ID NO: 175347 - DNA, 20 bp, synthetic construct
  source 1..20: mol_type = other DNA
gcgatagagcgagactccgt

SEQ ID NO: 175348 - DNA, 20 bp, synthetic construct
  source 1..20: mol_type = other DNA
ggcgatagagcgagactccg

SEQ ID NO: 175349 - DNA, 20 bp, synthetic construct
  source 1..20: mol_type = other DNA
gggcgatagagcgagactcc

SEQ ID NO: 175350 - DNA, 20 bp, synthetic construct
  source 1..20: mol_type = other DNA
tgggcgatagagcgagactc

SEQ ID NO: 175351 - DNA, 20 bp, synthetic construct
  source 1..20: mol_type = other DNA
ctgggcgatagagcgagact

SEQ ID NO: 175352 - DNA, 20 bp, synthetic construct
  source 1..20: mol_type = other DNA
cctgggcgatagagcgagac

SEQ ID NO: 175353 - DNA, 20 bp, synthetic construct
  source 1..20: mol_type = other DNA
gcctgggcgatagagcgaga

SEQ ID NO: 175354 - DNA, 20 bp, synthetic construct
  source 1..20: mol_type = other DNA
agcctgggcgatagagcgag

SEQ ID NO: 175355 - DNA, 20 bp, synthetic construct
  source 1..20: mol_type = other DNA
aagcctgggcgatagagcga

SEQ ID NO: 175356 - DNA, 20 bp, synthetic construct
  source 1..20: mol_type = other DNA
taagcctgggcgatagagcg

SEQ ID NO: 175357 - DNA, 20 bp, synthetic construct
  source 1..20: mol_type = other DNA
ttaagcctgggcgatagagc

SEQ ID NO: 175358 - DNA, 20 bp, synthetic construct
  source 1..20: mol_type = other DNA
cttaagcctgggcgatagag

SEQ ID NO: 175359 - DNA, 20 bp, synthetic construct
  source 1..20: mol_type = other DNA
acttaagcctgggcgataga

SEQ ID NO: 175360 - DNA, 20 bp, synthetic construct
  source 1..20: mol_type = other DNA
cacttaagcctgggcgatag

SEQ ID NO: 175361 - DNA, 20 bp, synthetic construct
  source 1..20: mol_type = other DNA
gcacttaagcctgggcgata

SEQ ID NO: 175362 - DNA, 20 bp, synthetic construct
  source 1..20: mol_type = other DNA
tgcacttaagcctgggcgat

SEQ ID NO: 175363 - DNA, 20 bp, synthetic construct
  source 1..20: mol_type = other DNA
ttgcacttaagcctgggcga

SEQ ID NO: 175364 - DNA, 20 bp, synthetic construct
  source 1..20: mol_type = other DNA
attgcacttaagcctgggcg

SEQ ID NO: 175365 - DNA, 20 bp, synthetic construct
  source 1..20: mol_type = other DNA
cattgcacttaagcctgggc

SEQ ID NO: 175366 - DNA, 20 bp, synthetic construct
  source 1..20: mol_type = other DNA
ccattgcacttaagcctggg

SEQ ID NO: 175367 - DNA, 20 bp, synthetic construct
  source 1..20: mol_type = other DNA
gccattgcacttaagcctgg

SEQ ID NO: 175368 - DNA, 20 bp, synthetic construct
  source 1..20: mol_type = other DNA
cgccattgcacttaagcctg

SEQ ID NO: 175369 - DNA, 20 bp, synthetic construct
  source 1..20: mol_type = other DNA
gcgccattgcacttaagcct

SEQ ID NO: 175370 - DNA, 20 bp, synthetic construct
  source 1..20: mol_type = other DNA
cgcgccattgcacttaagcc

SEQ ID NO: 175371 - DNA, 20 bp, synthetic construct
  source 1..20: mol_type = other DNA
tcgcgccattgcacttaagc

SEQ ID NO: 175372 - DNA, 20 bp, synthetic construct
  source 1..20: mol_type = other DNA
atcgcgccattgcacttaag

SEQ ID NO: 175373 - DNA, 20 bp, synthetic construct
  source 1..20: mol_type = other DNA
gatcgcgccattgcacttaa

SEQ ID NO: 175374 - DNA, 20 bp, synthetic construct
  source 1..20: mol_type = other DNA
agatcgcgccattgcactta

SEQ ID NO: 175375 - DNA, 20 bp, synthetic construct
  source 1..20: mol_type = other DNA
aagatcgcgccattgcactt

SEQ ID NO: 175376 - DNA, 20 bp, synthetic construct
  source 1..20: mol_type = other DNA
caagatcgcgccattgcact

SEQ ID NO: 175377 - DNA, 20 bp, synthetic construct
  source 1..20: mol_type = other DNA
ccaagatcgcgccattgcac

SEQ ID NO: 175378 - DNA, 20 bp, synthetic construct
  source 1..20: mol_type = other DNA
gccaagatcgcgccattgca

SEQ ID NO: 175379 - DNA, 20 bp, synthetic construct
  source 1..20: mol_type = other DNA
agccaagatcgcgccattgc

SEQ ID NO: 175380 - DNA, 20 bp, synthetic construct
  source 1..20: mol_type = other DNA
gagccaagatcgcgccattg

SEQ ID NO: 175381 - DNA, 20 bp, synthetic construct
  source 1..20: mol_type = other DNA
tgagccaagatcgcgccatt

SEQ ID NO: 175382 - DNA, 20 bp, synthetic construct
  source 1..20: mol_type = other DNA
gtgagccaagatcgcgccat

SEQ ID NO: 175383 - DNA, 20 bp, synthetic construct
  source 1..20: mol_type = other DNA
agtgagccaagatcgcgcca

SEQ ID NO: 175384 - DNA, 20 bp, synthetic construct
  source 1..20: mol_type = other DNA
cagtgagccaagatcgcgcc

SEQ ID NO: 175385 - DNA, 20 bp, synthetic construct
  source 1..20: mol_type = other DNA
gcagtgagccaagatcgcgc

SEQ ID NO: 175386 - DNA, 20 bp, synthetic construct
  source 1..20: mol_type = other DNA
cgcagtgagccaagatcgcg

SEQ ID NO: 175387 - DNA, 20 bp, synthetic construct
  source 1..20: mol_type = other DNA
tcgcagtgagccaagatcgc

SEQ ID NO: 175388 - DNA, 20 bp, synthetic construct
  source 1..20: mol_type = other DNA
gtcgcagtgagccaagatcg

SEQ ID NO: 175389 - DNA, 20 bp, synthetic construct
  source 1..20: mol_type = other DNA
ggtcgcagtgagccaagatc

SEQ ID NO: 175390 - DNA, 20 bp, synthetic construct
  source 1..20: mol_type = other DNA
aggtcgcagtgagccaagat

SEQ ID NO: 175391 - DNA, 20 bp, synthetic construct
  source 1..20: mol_type = other DNA
gaggtcgcagtgagccaaga

SEQ ID NO: 175392 - DNA, 20 bp, synthetic construct
  source 1..20: mol_type = other DNA
ggaggtcgcagtgagccaag

SEQ ID NO: 175393 - DNA, 20 bp, synthetic construct
  source 1..20: mol_type = other DNA
tggaggtcgcagtgagccaa

SEQ ID NO: 175394 - DNA, 20 bp, synthetic construct
  source 1..20: mol_type = other DNA
gtggaggtcgcagtgagcca

SEQ ID NO: 175395 - DNA, 20 bp, synthetic construct
  source 1..20: mol_type = other DNA
ggtggaggtcgcagtgagcc

SEQ ID NO: 175396 - DNA, 20 bp, synthetic construct
  source 1..20: mol_type = other DNA
aggtggaggtcgcagtgagc

SEQ ID NO: 175397 - DNA, 20 bp, synthetic construct
  source 1..20: mol_type = other DNA
gaggtggaggtcgcagtgag

SEQ ID NO: 175398 - DNA, 20 bp, synthetic construct
  source 1..20: mol_type = other DNA
ggaggtggaggtcgcagtga

SEQ ID NO: 175399 - DNA, 20 bp, synthetic construct
  source 1..20: mol_type = other DNA
aggaggtggaggtcgcagtg

SEQ ID NO: 175400 - DNA, 20 bp, synthetic construct
  source 1..20: mol_type = other DNA
caggaggtggaggtcgcagt

SEQ ID NO: 175401 - DNA, 20 bp, synthetic construct
  source 1..20: mol_type = other DNA
ccaggaggtggaggtcgcag

SEQ ID NO: 175402 - DNA, 20 bp, synthetic construct
  source 1..20: mol_type = other DNA
cccaggaggtggaggtcgca

SEQ ID NO: 175403 - DNA, 20 bp, synthetic construct
  source 1..20: mol_type = other DNA
acccaggaggtggaggtcgc

SEQ ID NO: 175404 - DNA, 20 bp, synthetic construct
  source 1..20: mol_type = other DNA
aacccaggaggtggaggtcg

SEQ ID NO: 175405 - DNA, 20 bp, synthetic construct
  source 1..20: mol_type = other DNA
gaacccaggaggtggaggtc

SEQ ID NO: 175406 - DNA, 20 bp, synthetic construct
  source 1..20: mol_type = other DNA
tgaacccaggaggtggaggt

SEQ ID NO: 175407 - DNA, 20 bp, synthetic construct
  source 1..20: mol_type = other DNA
ttgaacccaggaggtggagg

SEQ ID NO: 175408 - DNA, 20 bp, synthetic construct
  source 1..20: mol_type = other DNA
cttgaacccaggaggtggag

SEQ ID NO: 175409 - DNA, 20 bp, synthetic construct
  source 1..20: mol_type = other DNA
gcttgaacccaggaggtgga

SEQ ID NO: 175410 - DNA, 20 bp, synthetic construct
  source 1..20: mol_type = other DNA
tgcttgaacccaggaggtgg

SEQ ID NO: 175411 - DNA, 20 bp, synthetic construct
  source 1..20: mol_type = other DNA
ttgcttgaacccaggaggtg

SEQ ID NO: 175412 - DNA, 20 bp, synthetic construct
  source 1..20: mol_type = other DNA
attgcttgaacccaggaggt

SEQ ID NO: 175413 - DNA, 20 bp, synthetic construct
  source 1..20: mol_type = other DNA
aattgcttgaacccaggagg

SEQ ID NO: 175414 - DNA, 20 bp, synthetic construct
  source 1..20: mol_type = other DNA
gaattgcttgaacccaggag

SEQ ID NO: 175415 - DNA, 20 bp, synthetic construct
  source 1..20: mol_type = other DNA
ggaattgcttgaacccagga

SEQ ID NO: 175416 - DNA, 20 bp, synthetic construct
  source 1..20: mol_type = other DNA
cggaattgcttgaacccagg

SEQ ID NO: 175417 - DNA, 20 bp, synthetic construct
  source 1..20: mol_type = other DNA
gcggaattgcttgaacccag

SEQ ID NO: 175418 - DNA, 20 bp, synthetic construct
  source 1..20: mol_type = other DNA
ggcggaattgcttgaaccca

SEQ ID NO: 175419 - DNA, 20 bp, synthetic construct
  source 1..20: mol_type = other DNA
aggcggaattgcttgaaccc

SEQ ID NO: 175420 - DNA, 20 bp, synthetic construct
  source 1..20: mol_type = other DNA
gaggcggaattgcttgaacc

SEQ ID NO: 175421 - DNA, 20 bp, synthetic construct
  source 1..20: mol_type = other DNA
tgaggcggaattgcttgaac

SEQ ID NO: 175422 - DNA, 20 bp, synthetic construct
  source 1..20: mol_type = other DNA
ctgaggcggaattgcttgaa

SEQ ID NO: 175423 - DNA, 20 bp, synthetic construct
  source 1..20: mol_type = other DNA
gctgaggcggaattgcttga

SEQ ID NO: 175424 - DNA, 20 bp, synthetic construct
  source 1..20: mol_type = other DNA
ggctgaggcggaattgcttg

SEQ ID NO: 175425 - DNA, 20 bp, synthetic construct
  source 1..20: mol_type = other DNA
aggctgaggcggaattgctt

SEQ ID NO: 175426 - DNA, 20 bp, synthetic construct
  source 1..20: mol_type = other DNA
gaggctgaggcggaattgct

SEQ ID NO: 175427 - DNA, 20 bp, synthetic construct
  source 1..20: mol_type = other DNA
ggaggctgaggcggaattgc

SEQ ID NO: 175428 - DNA, 20 bp, synthetic construct
  source 1..20: mol_type = other DNA
cggaggctgaggcggaattg

SEQ ID NO: 175429 - DNA, 20 bp, synthetic construct
  source 1..20: mol_type = other DNA
gcggaggctgaggcggaatt

SEQ ID NO: 175430 - DNA, 20 bp, synthetic construct
  source 1..20: mol_type = other DNA
ggcggaggctgaggcggaat

SEQ ID NO: 175431 - DNA, 20 bp, synthetic construct
  source 1..20: mol_type = other DNA
cggcggaggctgaggcggaa

SEQ ID NO: 175432 - DNA, 20 bp, synthetic construct
  source 1..20: mol_type = other DNA
acggcggaggctgaggcgga

SEQ ID NO: 175433 - DNA, 20 bp, synthetic construct
  source 1..20: mol_type = other DNA
tacggcggaggctgaggcgg

SEQ ID NO: 175434 - DNA, 20 bp, synthetic construct
  source 1..20: mol_type = other DNA
ctacggcggaggctgaggcg

SEQ ID NO: 175435 - DNA, 20 bp, synthetic construct
  source 1..20: mol_type = other DNA
gctacggcggaggctgaggc

SEQ ID NO: 175436 - DNA, 20 bp, synthetic construct
  source 1..20: mol_type = other DNA
ggctacggcggaggctgagg

SEQ ID NO: 175437 - DNA, 20 bp, synthetic construct
  source 1..20: mol_type = other DNA
cggctacggcggaggctgag

SEQ ID NO: 175438 - DNA, 20 bp, synthetic construct
  source 1..20: mol_type = other DNA
ccggctacggcggaggctga

SEQ ID NO: 175439 - DNA, 20 bp, synthetic construct
  source 1..20: mol_type = other DNA
cccggctacggcggaggctg

SEQ ID NO: 175440 - DNA, 20 bp, synthetic construct
  source 1..20: mol_type = other DNA
tcccggctacggcggaggct

SEQ ID NO: 175441 - DNA, 20 bp, synthetic construct
  source 1..20: mol_type = other DNA
gtcccggctacggcggaggc

SEQ ID NO: 175442 - DNA, 20 bp, synthetic construct
  source 1..20: mol_type = other DNA
agtcccggctacggcggagg

SEQ ID NO: 175443 - DNA, 20 bp, synthetic construct
  source 1..20: mol_type = other DNA
tagtcccggctacggcggag

SEQ ID NO: 175444 - DNA, 20 bp, synthetic construct
  source 1..20: mol_type = other DNA
gtagtcccggctacggcgga

SEQ ID NO: 175445 - DNA, 20 bp, synthetic construct
  source 1..20: mol_type = other DNA
tgtagtcccggctacggcgg

SEQ ID NO: 175446 - DNA, 20 bp, synthetic construct
  source 1..20: mol_type = other DNA
ctgtagtcccggctacggcg

SEQ ID NO: 175447 - DNA, 20 bp, synthetic construct
  source 1..20: mol_type = other DNA
cctgtagtcccggctacggc

SEQ ID NO: 175448 - DNA, 20 bp, synthetic construct
  source 1..20: mol_type = other DNA
acctgtagtcccggctacgg

SEQ ID NO: 175449 - DNA, 20 bp, synthetic construct
  source 1..20: mol_type = other DNA
tacctgtagtcccggctacg

SEQ ID NO: 175450 - DNA, 20 bp, synthetic construct
  source 1..20: mol_type = other DNA
gtacctgtagtcccggctac

SEQ ID NO: 175451 - DNA, 20 bp, synthetic construct
  source 1..20: mol_type = other DNA
tgtacctgtagtcccggcta

SEQ ID NO: 175452 - DNA, 20 bp, synthetic construct
  source 1..20: mol_type = other DNA
gtgtacctgtagtcccggct

SEQ ID NO: 175453 - DNA, 20 bp, synthetic construct
  source 1..20: mol_type = other DNA
tgtgtacctgtagtcccggc

SEQ ID NO: 175454 - DNA, 20 bp, synthetic construct
  source 1..20: mol_type = other DNA
gtgtgtacctgtagtcccgg

SEQ ID NO: 175455 - DNA, 20 bp, synthetic construct
  source 1..20: mol_type = other DNA
ggtgtgtacctgtagtcccg

SEQ ID NO: 175456 - DNA, 20 bp, synthetic construct
  source 1..20: mol_type = other DNA
tggtgtgtacctgtagtccc

SEQ ID NO: 175457 - DNA, 20 bp, synthetic construct
  source 1..20: mol_type = other DNA
atggtgtgtacctgtagtcc

SEQ ID NO: 175458 - DNA, 20 bp, synthetic construct
  source 1..20: mol_type = other DNA
tatggtgtgtacctgtagtc

SEQ ID NO: 175459 - DNA, 20 bp, synthetic construct
  source 1..20: mol_type = other DNA
ttatggtgtgtacctgtagt

SEQ ID NO: 175460 - DNA, 20 bp, synthetic construct
  source 1..20: mol_type = other DNA
attatggtgtgtacctgtag

SEQ ID NO: 175461 - DNA, 20 bp, synthetic construct
  source 1..20: mol_type = other DNA
cattatggtgtgtacctgta

SEQ ID NO: 175462 - DNA, 20 bp, synthetic construct
  source 1..20: mol_type = other DNA
gcattatggtgtgtacctgt

SEQ ID NO: 175463 - DNA, 20 bp, synthetic construct
  source 1..20: mol_type = other DNA
agcattatggtgtgtacctg

SEQ ID NO: 175464 - DNA, 20 bp, synthetic construct
  source 1..20: mol_type = other DNA
gagcattatggtgtgtacct

SEQ ID NO: 175465 - DNA, 20 bp, synthetic construct
  source 1..20: mol_type = other DNA
cgagcattatggtgtgtacc

SEQ ID NO: 175466 - DNA, 20 bp, synthetic construct
  source 1..20: mol_type = other DNA
ccgagcattatggtgtgtac

SEQ ID NO: 175467 - DNA, 20 bp, synthetic construct
  source 1..20: mol_type = other DNA
gccgagcattatggtgtgta

SEQ ID NO: 175468 - DNA, 20 bp, synthetic construct
  source 1..20: mol_type = other DNA
agccgagcattatggtgtgt

SEQ ID NO: 175469 - DNA, 20 bp, synthetic construct
  source 1..20: mol_type = other DNA
cagccgagcattatggtgtg

SEQ ID NO: 175470 - DNA, 20 bp, synthetic construct
  source 1..20: mol_type = other DNA
tcagccgagcattatggtgt

SEQ ID NO: 175471 - DNA, 20 bp, synthetic construct
  source 1..20: mol_type = other DNA
atcagccgagcattatggtg

SEQ ID NO: 175472 - DNA, 20 bp, synthetic construct
  source 1..20: mol_type = other DNA
aatcagccgagcattatggt

SEQ ID NO: 175473 - DNA, 20 bp, synthetic construct
  source 1..20: mol_type = other DNA
aaatcagccgagcattatgg

SEQ ID NO: 175474 - DNA, 20 bp, synthetic construct
  source 1..20: mol_type = other DNA
aaaatcagccgagcattatg

SEQ ID NO: 175475 - DNA, 20 bp, synthetic construct
  source 1..20: mol_type = other DNA
aaaaatcagccgagcattat

SEQ ID NO: 175476 - DNA, 20 bp, synthetic construct
  source 1..20: mol_type = other DNA
caaaaatcagccgagcatta

SEQ ID NO: 175477 - DNA, 20 bp, synthetic construct
  source 1..20: mol_type = other DNA
acaaaaatcagccgagcatt

SEQ ID NO: 175478 - DNA, 20 bp, synthetic construct
  source 1..20: mol_type = other DNA
tacaaaaatcagccgagcat

SEQ ID NO: 175479 - DNA, 20 bp, synthetic construct
  source 1..20: mol_type = other DNA
atacaaaaatcagccgagca

SEQ ID NO: 175480 - DNA, 20 bp, synthetic construct
  source 1..20: mol_type = other DNA
aatacaaaaatcagccgagc

SEQ ID NO: 175481 - DNA, 20 bp, synthetic construct
  source 1..20: mol_type = other DNA
aaatacaaaaatcagccgag

SEQ ID NO: 175482 - DNA, 20 bp, synthetic construct
  source 1..20: mol_type = other DNA
aaaatacaaaaatcagccga

SEQ ID NO: 175483 - DNA, 20 bp, synthetic construct
  source 1..20: mol_type = other DNA
aaaaatacaaaaatcagccg

SEQ ID NO: 175484 - DNA, 20 bp, synthetic construct
  source 1..20: mol_type = other DNA
caaaaatacaaaaatcagcc

SEQ ID NO: 175485 - DNA, 20 bp, synthetic construct
  source 1..20: mol_type = other DNA
acaaaaatacaaaaatcagc

SEQ ID NO: 175486 - DNA, 20 bp, synthetic construct
  source 1..20: mol_type = other DNA
tacaaaaatacaaaaatcag

SEQ ID NO: 175487 - DNA, 20 bp, synthetic construct
  source 1..20: mol_type = other DNA
ctacaaaaatacaaaaatca

SEQ ID NO: 175488 - DNA, 20 bp, synthetic construct
  source 1..20: mol_type = other DNA
cctacaaaaatacaaaaatc

SEQ ID NO: 175489 - DNA, 20 bp, synthetic construct
  source 1..20: mol_type = other DNA
ccctacaaaaatacaaaaat

SEQ ID NO: 175490 - DNA, 20 bp, synthetic construct
  source 1..20: mol_type = other DNA
tccctacaaaaatacaaaaa

SEQ ID NO: 175491 - DNA, 20 bp, synthetic construct
  source 1..20: mol_type = other DNA
atccctacaaaaatacaaaa

SEQ ID NO: 175492 - DNA, 20 bp, synthetic construct
  source 1..20: mol_type = other DNA
catccctacaaaaatacaaa

SEQ ID NO: 175493 - DNA, 20 bp, synthetic construct
  source 1..20: mol_type = other DNA
ccatccctacaaaaatacaa

SEQ ID NO: 175494 - DNA, 20 bp, synthetic construct
  source 1..20: mol_type = other DNA
cccatccctacaaaaataca

SEQ ID NO: 175495 - DNA, 20 bp, synthetic construct
  source 1..20: mol_type = other DNA
ccccatccctacaaaaatac

SEQ ID NO: 175496 - DNA, 20 bp, synthetic construct
  source 1..20: mol_type = other DNA
accccatccctacaaaaata

SEQ ID NO: 175497 - DNA, 20 bp, synthetic construct
  source 1..20: mol_type = other DNA
taccccatccctacaaaaat

SEQ ID NO: 175498 - DNA, 20 bp, synthetic construct
  source 1..20: mol_type = other DNA
ataccccatccctacaaaaa

SEQ ID NO: 175499 - DNA, 20 bp, synthetic construct
  source 1..20: mol_type = other DNA
gataccccatccctacaaaa

SEQ ID NO: 175500 - DNA, 20 bp, synthetic construct
  source 1..20: mol_type = other DNA
cgataccccatccctacaaa

SEQ ID NO: 175501 - DNA, 20 bp, synthetic construct
  source 1..20: mol_type = other DNA
gcgataccccatccctacaa

SEQ ID NO: 175502 - DNA, 20 bp, synthetic construct
  source 1..20: mol_type = other DNA
ggcgataccccatccctaca

SEQ ID NO: 175503 - DNA, 20 bp, synthetic construct
  source 1..20: mol_type = other DNA
tggcgataccccatccctac

SEQ ID NO: 175504 - DNA, 20 bp, synthetic construct
  source 1..20: mol_type = other DNA
atggcgataccccatcccta

SEQ ID NO: 175505 - DNA, 20 bp, synthetic construct
  source 1..20: mol_type = other DNA
catggcgataccccatccct

SEQ ID NO: 175506 - DNA, 20 bp, synthetic construct
  source 1..20: mol_type = other DNA
acatggcgataccccatccc

SEQ ID NO: 175507 - DNA, 20 bp, synthetic construct
  source 1..20: mol_type = other DNA
aacatggcgataccccatcc

SEQ ID NO: 175508 - DNA, 20 bp, synthetic construct
  source 1..20: mol_type = other DNA
caacatggcgataccccatc

SEQ ID NO: 175509 - DNA, 20 bp, synthetic construct
  source 1..20: mol_type = other DNA
ccaacatggcgataccccat

SEQ ID NO: 175510 - DNA, 20 bp, synthetic construct
  source 1..20: mol_type = other DNA
gccaacatggcgatacccca

SEQ ID NO: 175511 - DNA, 20 bp, synthetic construct
  source 1..20: mol_type = other DNA
ggccaacatggcgatacccc

SEQ ID NO: 175512 - DNA, 20 bp, synthetic construct
  source 1..20: mol_type = other DNA
tggccaacatggcgataccc

SEQ ID NO: 175513 - DNA, 20 bp, synthetic construct
  source 1..20: mol_type = other DNA
ctggccaacatggcgatacc

SEQ ID NO: 175514 - DNA, 20 bp, synthetic construct
  source 1..20: mol_type = other DNA
cctggccaacatggcgatac

SEQ ID NO: 175515 - DNA, 20 bp, synthetic construct
  source 1..20: mol_type = other DNA
gcctggccaacatggcgata

SEQ ID NO: 175516 - DNA, 20 bp, synthetic construct
  source 1..20: mol_type = other DNA
agcctggccaacatggcgat

SEQ ID NO: 175517 - DNA, 20 bp, synthetic construct
  source 1..20: mol_type = other DNA
cagcctggccaacatggcga

SEQ ID NO: 175518 - DNA, 20 bp, synthetic construct
  source 1..20: mol_type = other DNA
ccagcctggccaacatggcg

SEQ ID NO: 175519 - DNA, 20 bp, synthetic construct
  source 1..20: mol_type = other DNA
accagcctggccaacatggc

SEQ ID NO: 175520 - DNA, 20 bp, synthetic construct
  source 1..20: mol_type = other DNA
gaccagcctggccaacatgg

SEQ ID NO: 175521 - DNA, 20 bp, synthetic construct
  source 1..20: mol_type = other DNA
ggaccagcctggccaacatg

SEQ ID NO: 175522 - DNA, 20 bp, synthetic construct
  source 1..20: mol_type = other DNA
gggaccagcctggccaacat

SEQ ID NO: 175523 - DNA, 20 bp, synthetic construct
  source 1..20: mol_type = other DNA
cgggaccagcctggccaaca

SEQ ID NO: 175524 - DNA, 20 bp, synthetic construct
  source 1..20: mol_type = other DNA
tcgggaccagcctggccaac

SEQ ID NO: 175525 - DNA, 20 bp, synthetic construct
  source 1..20: mol_type = other DNA
ttcgggaccagcctggccaa

SEQ ID NO: 175526 - DNA, 20 bp, synthetic construct
  source 1..20: mol_type = other DNA
gttcgggaccagcctggcca

SEQ ID NO: 175527 - DNA, 20 bp, synthetic construct
  source 1..20: mol_type = other DNA
agttcgggaccagcctggcc

SEQ ID NO: 175528 - DNA, 20 bp, synthetic construct
  source 1..20: mol_type = other DNA
aagttcgggaccagcctggc

SEQ ID NO: 175529 - DNA, 20 bp, synthetic construct
  source 1..20: mol_type = other DNA
gaagttcgggaccagcctgg

SEQ ID NO: 175530 - DNA, 20 bp, synthetic construct
  source 1..20: mol_type = other DNA
agaagttcgggaccagcctg

SEQ ID NO: 175531 - DNA, 20 bp, synthetic construct
  source 1..20: mol_type = other DNA
cagaagttcgggaccagcct

SEQ ID NO: 175532 - DNA, 20 bp, synthetic construct
  source 1..20: mol_type = other DNA
tcagaagttcgggaccagcc

SEQ ID NO: 175533 - DNA, 20 bp, synthetic construct
  source 1..20: mol_type = other DNA
gtcagaagttcgggaccagc

SEQ ID NO: 175534 - DNA, 20 bp, synthetic construct
  source 1..20: mol_type = other DNA
ggtcagaagttcgggaccag

SEQ ID NO: 175535 - DNA, 20 bp, synthetic construct
  source 1..20: mol_type = other DNA
gggtcagaagttcgggacca

SEQ ID NO: 175536 - DNA, 20 bp, synthetic construct
  source 1..20: mol_type = other DNA
tgggtcagaagttcgggacc

SEQ ID NO: 175537 - DNA, 20 bp, synthetic construct
  source 1..20: mol_type = other DNA
ttgggtcagaagttcgggac

SEQ ID NO: 175538 - DNA, 20 bp, synthetic construct
  source 1..20: mol_type = other DNA
cttgggtcagaagttcggga

SEQ ID NO: 175539 - DNA, 20 bp, synthetic construct
  source 1..20: mol_type = other DNA
acttgggtcagaagttcggg

SEQ ID NO: 175540 - DNA, 20 bp, synthetic construct
  source 1..20: mol_type = other DNA
cacttgggtcagaagttcgg

SEQ ID NO: 175541 - DNA, 20 bp, synthetic construct
  source 1..20: mol_type = other DNA
tcacttgggtcagaagttcg

SEQ ID NO: 175542 - DNA, 20 bp, synthetic construct
  source 1..20: mol_type = other DNA
atcacttgggtcagaagttc

SEQ ID NO: 175543 - DNA, 20 bp, synthetic construct
  source 1..20: mol_type = other DNA
gatcacttgggtcagaagtt

SEQ ID NO: 175544 - DNA, 20 bp, synthetic construct
  source 1..20: mol_type = other DNA
ggatcacttgggtcagaagt

SEQ ID NO: 175545 - DNA, 20 bp, synthetic construct
  source 1..20: mol_type = other DNA
tggatcacttgggtcagaag

SEQ ID NO: 175546 - DNA, 20 bp, synthetic construct
  source 1..20: mol_type = other DNA
gtggatcacttgggtcagaa

SEQ ID NO: 175547 - DNA, 20 bp, synthetic construct
  source 1..20: mol_type = other DNA
ggtggatcacttgggtcaga

SEQ ID NO: 175548 - DNA, 20 bp, synthetic construct
  source 1..20: mol_type = other DNA
gggtggatcacttgggtcag

SEQ ID NO: 175549 - DNA, 20 bp, synthetic construct
  source 1..20: mol_type = other DNA
tgggtggatcacttgggtca

SEQ ID NO: 175550 - DNA, 20 bp, synthetic construct
  source 1..20: mol_type = other DNA
gtgggtggatcacttgggtc

SEQ ID NO: 175551 - DNA, 20 bp, synthetic construct
  source 1..20: mol_type = other DNA
ggtgggtggatcacttgggt

SEQ ID NO: 175552 - DNA, 20 bp, synthetic construct
  source 1..20: mol_type = other DNA
aggtgggtggatcacttggg

SEQ ID NO: 175553 - DNA, 20 bp, synthetic construct
  source 1..20: mol_type = other DNA
gaggtgggtggatcacttgg

SEQ ID NO: 175554 - DNA, 20 bp, synthetic construct
  source 1..20: mol_type = other DNA
cgaggtgggtggatcacttg

SEQ ID NO: 175555 - DNA, 20 bp, synthetic construct
  source 1..20: mol_type = other DNA
ccgaggtgggtggatcactt

SEQ ID NO: 175556 - DNA, 20 bp, synthetic construct
  source 1..20: mol_type = other DNA
gccgaggtgggtggatcact

SEQ ID NO: 175557 - DNA, 20 bp, synthetic construct
  source 1..20: mol_type = other DNA
ggccgaggtgggtggatcac

SEQ ID NO: 175558 - DNA, 20 bp, synthetic construct
  source 1..20: mol_type = other DNA
aggccgaggtgggtggatca

SEQ ID NO: 175559 - DNA, 20 bp, synthetic construct
  source 1..20: mol_type = other DNA
gaggccgaggtgggtggatc

SEQ ID NO: 175560 - DNA, 20 bp, synthetic construct
  source 1..20: mol_type = other DNA
ggaggccgaggtgggtggat

SEQ ID NO: 175561 - DNA, 20 bp, synthetic construct
  source 1..20: mol_type = other DNA
gggaggccgaggtgggtgga

SEQ ID NO: 175562 - DNA, 20 bp, synthetic construct
  source 1..20: mol_type = other DNA
tgggaggccgaggtgggtgg

SEQ ID NO: 175563 - DNA, 20 bp, synthetic construct
  source 1..20: mol_type = other DNA
ttgggaggccgaggtgggtg

SEQ ID NO: 175564 - DNA, 20 bp, synthetic construct
  source 1..20: mol_type = other DNA
tttgggaggccgaggtgggt

SEQ ID NO: 175565 - DNA, 20 bp, synthetic construct
  source 1..20: mol_type = other DNA
ctttgggaggccgaggtggg

SEQ ID NO: 175566 - DNA, 20 bp, synthetic construct
  source 1..20: mol_type = other DNA
actttgggaggccgaggtgg

SEQ ID NO: 175567 - DNA, 20 bp, synthetic construct
  source 1..20: mol_type = other DNA
cactttgggaggccgaggtg

SEQ ID NO: 175568 - DNA, 20 bp, synthetic construct
  source 1..20: mol_type = other DNA
gcactttgggaggccgaggt

SEQ ID NO: 175569 - DNA, 20 bp, synthetic construct
  source 1..20: mol_type = other DNA
agcactttgggaggccgagg

SEQ ID NO: 175570 - DNA, 20 bp, synthetic construct
  source 1..20: mol_type = other DNA
cagcactttgggaggccgag

SEQ ID NO: 175571 - DNA, 20 bp, synthetic construct
  source 1..20: mol_type = other DNA
ccagcactttgggaggccga

SEQ ID NO: 175572 - DNA, 20 bp, synthetic construct
  source 1..20: mol_type = other DNA
cccagcactttgggaggccg

SEQ ID NO: 175573 - DNA, 20 bp, synthetic construct
  source 1..20: mol_type = other DNA
tcccagcactttgggaggcc

SEQ ID NO: 175574 - DNA, 20 bp, synthetic construct
  source 1..20: mol_type = other DNA
atcccagcactttgggaggc

SEQ ID NO: 175575 - DNA, 20 bp, synthetic construct
  source 1..20: mol_type = other DNA
aatcccagcactttgggagg

SEQ ID NO: 175576 - DNA, 20 bp, synthetic construct
  source 1..20: mol_type = other DNA
taatcccagcactttgggag

SEQ ID NO: 175577 - DNA, 20 bp, synthetic construct
  source 1..20: mol_type = other DNA
gtaatcccagcactttggga

SEQ ID NO: 175578 - DNA, 20 bp, synthetic construct
  source 1..20: mol_type = other DNA
tgtaatcccagcactttggg

SEQ ID NO: 175579 - DNA, 20 bp, synthetic construct
  source 1..20: mol_type = other DNA
ctgtaatcccagcactttgg

SEQ ID NO: 175580 - DNA, 20 bp, synthetic construct
  source 1..20: mol_type = other DNA
cctgtaatcccagcactttg

SEQ ID NO: 175581 - DNA, 20 bp, synthetic construct
  source 1..20: mol_type = other DNA
acctgtaatcccagcacttt

SEQ ID NO: 175582 - DNA, 20 bp, synthetic construct
  source 1..20: mol_type = other DNA
cacctgtaatcccagcactt

SEQ ID NO: 175583 - DNA, 20 bp, synthetic construct
  source 1..20: mol_type = other DNA
acacctgtaatcccagcact

SEQ ID NO: 175584 - DNA, 20 bp, synthetic construct
  source 1..20: mol_type = other DNA
cacacctgtaatcccagcac

SEQ ID NO: 175585 - DNA, 20 bp, synthetic construct
  source 1..20: mol_type = other DNA
tcacacctgtaatcccagca

SEQ ID NO: 175586 - DNA, 20 bp, synthetic construct
  source 1..20: mol_type = other DNA
ctcacacctgtaatcccagc

SEQ ID NO: 175587 - DNA, 20 bp, synthetic construct
  source 1..20: mol_type = other DNA
gctcacacctgtaatcccag

SEQ ID NO: 175588 - DNA, 20 bp, synthetic construct
  source 1..20: mol_type = other DNA
ggctcacacctgtaatccca

SEQ ID NO: 175589 - DNA, 20 bp, synthetic construct
  source 1..20: mol_type = other DNA
tggctcacacctgtaatccc

SEQ ID NO: 175590 - DNA, 20 bp, synthetic construct
  source 1..20: mol_type = other DNA
gtggctcacacctgtaatcc

SEQ ID NO: 175591 - DNA, 20 bp, synthetic construct
  source 1..20: mol_type = other DNA
ggtggctcacacctgtaatc

SEQ ID NO: 175592 - DNA, 20 bp, synthetic construct
  source 1..20: mol_type = other DNA
cggtggctcacacctgtaat

SEQ ID NO: 175593 - DNA, 20 bp, synthetic construct
  source 1..20: mol_type = other DNA
gcggtggctcacacctgtaa

SEQ ID NO: 175594 - DNA, 20 bp, synthetic construct
  source 1..20: mol_type = other DNA
cgcggtggctcacacctgta

SEQ ID NO: 175595 - DNA, 20 bp, synthetic construct
  source 1..20: mol_type = other DNA
gcgcggtggctcacacctgt

SEQ ID NO: 175596 - DNA, 20 bp, synthetic construct
  source 1..20: mol_type = other DNA
ggcgcggtggctcacacctg

SEQ ID NO: 175597 - DNA, 20 bp, synthetic construct
  source 1..20: mol_type = other DNA
gggcgcggtggctcacacct

SEQ ID NO: 175598 - DNA, 20 bp, synthetic construct
  source 1..20: mol_type = other DNA
cgggcgcggtggctcacacc

SEQ ID NO: 175599 - DNA, 20 bp, synthetic construct
  source 1..20: mol_type = other DNA
ccgggcgcggtggctcacac

SEQ ID NO: 175600 - DNA, 20 bp, synthetic construct
  source 1..20: mol_type = other DNA
gccgggcgcggtggctcaca

SEQ ID NO: 175601 - DNA, 20 bp, synthetic construct
  source 1..20: mol_type = other DNA
ggccgggcgcggtggctcac

SEQ ID NO: 175602 - DNA, 20 bp, synthetic construct
  source 1..20: mol_type = other DNA
tggccgggcgcggtggctca

SEQ ID NO: 175603 - DNA, 20 bp, synthetic construct
  source 1..20: mol_type = other DNA
ctggccgggcgcggtggctc

SEQ ID NO: 175604 - DNA, 20 bp, synthetic construct
  source 1..20: mol_type = other DNA
gctggccgggcgcggtggct

SEQ ID NO: 175605 - DNA, 20 bp, synthetic construct
  source 1..20: mol_type = other DNA
agctggccgggcgcggtggc

SEQ ID NO: 175606 - DNA, 20 bp, synthetic construct
  source 1..20: mol_type = other DNA
aagctggccgggcgcggtgg

SEQ ID NO: 175607 - DNA, 20 bp, synthetic construct
  source 1..20: mol_type = other DNA
caagctggccgggcgcggtg

SEQ ID NO: 175608 - DNA, 20 bp, synthetic construct
  source 1..20: mol_type = other DNA
gcaagctggccgggcgcggt

SEQ ID NO: 175609 - DNA, 20 bp, synthetic construct
  source 1..20: mol_type = other DNA
tgcaagctggccgggcgcgg

SEQ ID NO: 175610 - DNA, 20 bp, synthetic construct
  source 1..20: mol_type = other DNA
gtgcaagctggccgggcgcg

SEQ ID NO: 175611 - DNA, 20 bp, synthetic construct
  source 1..20: mol_type = other DNA
ggtgcaagctggccgggcgc

SEQ ID NO: 175612 - DNA, 20 bp, synthetic construct
  source 1..20: mol_type = other DNA
aggtgcaagctggccgggcg

SEQ ID NO: 175613 - DNA, 20 bp, synthetic construct
  source 1..20: mol_type = other DNA
aaggtgcaagctggccgggc

SEQ ID NO: 175614 - DNA, 20 bp, synthetic construct
  source 1..20: mol_type = other DNA
taaggtgcaagctggccggg

SEQ ID NO: 175615 - DNA, 20 bp, synthetic construct
  source 1..20: mol_type = other DNA
ataaggtgcaagctggccgg

SEQ ID NO: 175616 - DNA, 20 bp, synthetic construct
  source 1..20: mol_type = other DNA
aataaggtgcaagctggccg

SEQ ID NO: 175617 - DNA, 20 bp, synthetic construct
  source 1..20: mol_type = other DNA
aaataaggtgcaagctggcc

SEQ ID NO: 175618 - DNA, 20 bp, synthetic construct
  source 1..20: mol_type = other DNA
taaataaggtgcaagctggc

SEQ ID NO: 175619 - DNA, 20 bp, synthetic construct
  source 1..20: mol_type = other DNA
ctaaataaggtgcaagctgg

SEQ ID NO: 175620 - DNA, 20 bp, synthetic construct
  source 1..20: mol_type = other DNA
cctaaataaggtgcaagctg

SEQ ID NO: 175621 - DNA, 20 bp, synthetic construct
  source 1..20: mol_type = other DNA
tcctaaataaggtgcaagct

SEQ ID NO: 175622 - DNA, 20 bp, synthetic construct
  source 1..20: mol_type = other DNA
atcctaaataaggtgcaagc

SEQ ID NO: 175623 - DNA, 20 bp, synthetic construct
  source 1..20: mol_type = other DNA
tatcctaaataaggtgcaag

SEQ ID NO: 175624 - DNA, 20 bp, synthetic construct
  source 1..20: mol_type = other DNA
atatcctaaataaggtgcaa

SEQ ID NO: 175625 - DNA, 20 bp, synthetic construct
  source 1..20: mol_type = other DNA
catatcctaaataaggtgca

SEQ ID NO: 175626 - DNA, 20 bp, synthetic construct
  source 1..20: mol_type = other DNA
acatatcctaaataaggtgc

SEQ ID NO: 175627 - DNA, 20 bp, synthetic construct
  source 1..20: mol_type = other DNA
cacatatcctaaataaggtg

SEQ ID NO: 175628 - DNA, 20 bp, synthetic construct
  source 1..20: mol_type = other DNA
tcacatatcctaaataaggt

SEQ ID NO: 175629 - DNA, 20 bp, synthetic construct
  source 1..20: mol_type = other DNA
atcacatatcctaaataagg

SEQ ID NO: 175630 - DNA, 20 bp, synthetic construct
  source 1..20: mol_type = other DNA
aatcacatatcctaaataag

SEQ ID NO: 175631 - DNA, 20 bp, synthetic construct
  source 1..20: mol_type = other DNA
taatcacatatcctaaataa

SEQ ID NO: 175632 - DNA, 20 bp, synthetic construct
  source 1..20: mol_type = other DNA
ataatcacatatcctaaata

SEQ ID NO: 175633 - DNA, 20 bp, synthetic construct
  source 1..20: mol_type = other DNA
aataatcacatatcctaaat

SEQ ID NO: 175634 - DNA, 20 bp, synthetic construct
  source 1..20: mol_type = other DNA
taataatcacatatcctaaa

SEQ ID NO: 175635 - DNA, 20 bp, synthetic construct
  source 1..20: mol_type = other DNA
ataataatcacatatcctaa

SEQ ID NO: 175636 - DNA, 20 bp, synthetic construct
  source 1..20: mol_type = other DNA
tataataatcacatatccta

SEQ ID NO: 175637 - DNA, 20 bp, synthetic construct
  source 1..20: mol_type = other DNA
ctataataatcacatatcct

SEQ ID NO: 175638 - DNA, 20 bp, synthetic construct
  source 1..20: mol_type = other DNA
gctataataatcacatatcc

SEQ ID NO: 175639 - DNA, 20 bp, synthetic construct
  source 1..20: mol_type = other DNA
tgctataataatcacatatc

SEQ ID NO: 175640 - DNA, 20 bp, synthetic construct
  source 1..20: mol_type = other DNA
ttgctataataatcacatat

SEQ ID NO: 175641 - DNA, 20 bp, synthetic construct
  source 1..20: mol_type = other DNA
cttgctataataatcacata

SEQ ID NO: 175642 - DNA, 20 bp, synthetic construct
  source 1..20: mol_type = other DNA
acttgctataataatcacat

SEQ ID NO: 175643 - DNA, 20 bp, synthetic construct
  source 1..20: mol_type = other DNA
gacttgctataataatcaca

SEQ ID NO: 175644 - DNA, 20 bp, synthetic construct
  source 1..20: mol_type = other DNA
agacttgctataataatcac

SEQ ID NO: 175645 - DNA, 20 bp, synthetic construct
  source 1..20: mol_type = other DNA
cagacttgctataataatca

SEQ ID NO: 175646 - DNA, 20 bp, synthetic construct
  source 1..20: mol_type = other DNA
ccagacttgctataataatc

SEQ ID NO: 175647 - DNA, 20 bp, synthetic construct
  source 1..20: mol_type = other DNA
accagacttgctataataat

SEQ ID NO: 175648 - DNA, 20 bp, synthetic construct
  source 1..20: mol_type = other DNA
caccagacttgctataataa

SEQ ID NO: 175649 - DNA, 20 bp, synthetic construct
  source 1..20: mol_type = other DNA
acaccagacttgctataata

SEQ ID NO: 175650 - DNA, 20 bp, synthetic construct
  source 1..20: mol_type = other DNA
tacaccagacttgctataat

SEQ ID NO: 175651 - DNA, 20 bp, synthetic construct
  source 1..20: mol_type = other DNA
gtacaccagacttgctataa

SEQ ID NO: 175652 - DNA, 20 bp, synthetic construct
  source 1..20: mol_type = other DNA
tgtacaccagacttgctata

SEQ ID NO: 175653 - DNA, 20 bp, synthetic construct
  source 1..20: mol_type = other DNA
atgtacaccagacttgctat

SEQ ID NO: 175654 - DNA, 20 bp, synthetic construct
  source 1..20: mol_type = other DNA
tatgtacaccagacttgcta

SEQ ID NO: 175655 - DNA, 20 bp, synthetic construct
  source 1..20: mol_type = other DNA
gtatgtacaccagacttgct

SEQ ID NO: 175656 - DNA, 20 bp, synthetic construct
  source 1..20: mol_type = other DNA
tgtatgtacaccagacttgc

SEQ ID NO: 175657 - DNA, 20 bp, synthetic construct
  source 1..20: mol_type = other DNA
ttgtatgtacaccagacttg

SEQ ID NO: 175658 - DNA, 20 bp, synthetic construct
  source 1..20: mol_type = other DNA
cttgtatgtacaccagactt

SEQ ID NO: 175659 - DNA, 20 bp, synthetic construct
  source 1..20: mol_type = other DNA
tcttgtatgtacaccagact

SEQ ID NO: 175660 - DNA, 20 bp, synthetic construct
  source 1..20: mol_type = other DNA
atcttgtatgtacaccagac

SEQ ID NO: 175661 - DNA, 20 bp, synthetic construct
  source 1..20: mol_type = other DNA
aatcttgtatgtacaccaga

SEQ ID NO: 175662 - DNA, 20 bp, synthetic construct
  source 1..20: mol_type = other DNA
aaatcttgtatgtacaccag

SEQ ID NO: 175663 - DNA, 20 bp, synthetic construct
  source 1..20: mol_type = other DNA
aaaatcttgtatgtacacca

SEQ ID NO: 175664 - DNA, 20 bp, synthetic construct
  source 1..20: mol_type = other DNA
caaaatcttgtatgtacacc

SEQ ID NO: 175665 - DNA, 20 bp, synthetic construct
  source 1..20: mol_type = other DNA
tcaaaatcttgtatgtacac

SEQ ID NO: 175666 - DNA, 20 bp, synthetic construct
  source 1..20: mol_type = other DNA
ttcaaaatcttgtatgtaca

SEQ ID NO: 175667 - DNA, 20 bp, synthetic construct
  source 1..20: mol_type = other DNA
attcaaaatcttgtatgtac

SEQ ID NO: 175668 - DNA, 20 bp, synthetic construct
  source 1..20: mol_type = other DNA
cattcaaaatcttgtatgta

SEQ ID NO: 175669 - DNA, 20 bp, synthetic construct
  source 1..20: mol_type = other DNA
ccattcaaaatcttgtatgt

SEQ ID NO: 175670 - DNA, 20 bp, synthetic construct
  source 1..20: mol_type = other DNA
cccattcaaaatcttgtatg

SEQ ID NO: 175671 - DNA, 20 bp, synthetic construct
  source 1..20: mol_type = other DNA
gcccattcaaaatcttgtat

SEQ ID NO: 175672 - DNA, 20 bp, synthetic construct
  source 1..20: mol_type = other DNA
tgcccattcaaaatcttgta

SEQ ID NO: 175673 - DNA, 20 bp, synthetic construct
  source 1..20: mol_type = other DNA
gtgcccattcaaaatcttgt

SEQ ID NO: 175674 - DNA, 20 bp, synthetic construct
  source 1..20: mol_type = other DNA
tgtgcccattcaaaatcttg

SEQ ID NO: 175675 - DNA, 20 bp, synthetic construct
  source 1..20: mol_type = other DNA
ctgtgcccattcaaaatctt

SEQ ID NO: 175676 - DNA, 20 bp, synthetic construct
  source 1..20: mol_type = other DNA
tctgtgcccattcaaaatct

SEQ ID NO: 175677 - DNA, 20 bp, synthetic construct
  source 1..20: mol_type = other DNA
atctgtgcccattcaaaatc

SEQ ID NO: 175678 - DNA, 20 bp, synthetic construct
  source 1..20: mol_type = other DNA
catctgtgcccattcaaaat

SEQ ID NO: 175679 - DNA, 20 bp, synthetic construct
  source 1..20: mol_type = other DNA
tcatctgtgcccattcaaaa

SEQ ID NO: 175680 - DNA, 20 bp, synthetic construct
  source 1..20: mol_type = other DNA
gtcatctgtgcccattcaaa

SEQ ID NO: 175681 - DNA, 20 bp, synthetic construct
  source 1..20: mol_type = other DNA
ggtcatctgtgcccattcaa

SEQ ID NO: 175682 - DNA, 20 bp, synthetic construct
  source 1..20: mol_type = other DNA
aggtcatctgtgcccattca

SEQ ID NO: 175683 - DNA, 20 bp, synthetic construct
  source 1..20: mol_type = other DNA
aaggtcatctgtgcccattc

SEQ ID NO: 175684 - DNA, 20 bp, synthetic construct
  source 1..20: mol_type = other DNA
aaaggtcatctgtgcccatt

SEQ ID NO: 175685 - DNA, 20 bp, synthetic construct
  source 1..20: mol_type = other DNA
taaaggtcatctgtgcccat

SEQ ID NO: 175686 - DNA, 20 bp, synthetic construct
  source 1..20: mol_type = other DNA
ctaaaggtcatctgtgccca

SEQ ID NO: 175687 - DNA, 20 bp, synthetic construct
  source 1..20: mol_type = other DNA
actaaaggtcatctgtgccc

SEQ ID NO: 175688 - DNA, 20 bp, synthetic construct
  source 1..20: mol_type = other DNA
tactaaaggtcatctgtgcc

SEQ ID NO: 175689 - DNA, 20 bp, synthetic construct
  source 1..20: mol_type = other DNA
ttactaaaggtcatctgtgc

SEQ ID NO: 175690 - DNA, 20 bp, synthetic construct
  source 1..20: mol_type = other DNA
cttactaaaggtcatctgtg

SEQ ID NO: 175691 - DNA, 20 bp, synthetic construct
  source 1..20: mol_type = other DNA
acttactaaaggtcatctgt

SEQ ID NO: 175692 - DNA, 20 bp, synthetic construct
  source 1..20: mol_type = other DNA
cacttactaaaggtcatctg

SEQ ID NO: 175693 - DNA, 20 bp, synthetic construct
  source 1..20: mol_type = other DNA
gcacttactaaaggtcatct

SEQ ID NO: 175694 - DNA, 20 bp, synthetic construct
  source 1..20: mol_type = other DNA
agcacttactaaaggtcatc

SEQ ID NO: 175695 - DNA, 20 bp, synthetic construct
  source 1..20: mol_type = other DNA
aagcacttactaaaggtcat

SEQ ID NO: 175696 - DNA, 20 bp, synthetic construct
  source 1..20: mol_type = other DNA
caagcacttactaaaggtca

SEQ ID NO: 175697 - DNA, 20 bp, synthetic construct
  source 1..20: mol_type = other DNA
ccaagcacttactaaaggtc

SEQ ID NO: 175698 - DNA, 20 bp, synthetic construct
  source 1..20: mol_type = other DNA
gccaagcacttactaaaggt

SEQ ID NO: 175699 - DNA, 20 bp, synthetic construct
  source 1..20: mol_type = other DNA
agccaagcacttactaaagg

SEQ ID NO: 175700 - DNA, 20 bp, synthetic construct
  source 1..20: mol_type = other DNA
cagccaagcacttactaaag

SEQ ID NO: 175701 - DNA, 20 bp, synthetic construct
  source 1..20: mol_type = other DNA
acagccaagcacttactaaa

SEQ ID NO: 175702 - DNA, 20 bp, synthetic construct
  source 1..20: mol_type = other DNA
cacagccaagcacttactaa

SEQ ID NO: 175703 - DNA, 20 bp, synthetic construct
  source 1..20: mol_type = other DNA
tcacagccaagcacttacta

SEQ ID NO: 175704 - DNA, 20 bp, synthetic construct
  source 1..20: mol_type = other DNA
atcacagccaagcacttact

SEQ ID NO: 175705 - DNA, 20 bp, synthetic construct
  source 1..20: mol_type = other DNA
tatcacagccaagcacttac

SEQ ID NO: 175706 - DNA, 20 bp, synthetic construct
  source 1..20: mol_type = other DNA
ttatcacagccaagcactta

SEQ ID NO: 175707 - DNA, 20 bp, synthetic construct
  source 1..20: mol_type = other DNA
cttatcacagccaagcactt

SEQ ID NO: 175708 - DNA, 20 bp, synthetic construct
  source 1..20: mol_type = other DNA
tcttatcacagccaagcact

SEQ ID NO: 175709 - DNA, 20 bp, synthetic construct
  source 1..20: mol_type = other DNA
ctcttatcacagccaagcac

SEQ ID NO: 175710 - DNA, 20 bp, synthetic construct
  source 1..20: mol_type = other DNA
cctcttatcacagccaagca

SEQ ID NO: 175711 - DNA, 20 bp, synthetic construct
  source 1..20: mol_type = other DNA
gcctcttatcacagccaagc

SEQ ID NO: 175712 - DNA, 20 bp, synthetic construct
  source 1..20: mol_type = other DNA
tgcctcttatcacagccaag

SEQ ID NO: 175713 - DNA, 20 bp, synthetic construct
  source 1..20: mol_type = other DNA
ctgcctcttatcacagccaa

SEQ ID NO: 175714 - DNA, 20 bp, synthetic construct
  source 1..20: mol_type = other DNA
actgcctcttatcacagcca

SEQ ID NO: 175715 - DNA, 20 bp, synthetic construct
  source 1..20: mol_type = other DNA
gactgcctcttatcacagcc

SEQ ID NO: 175716 - DNA, 20 bp, synthetic construct
  source 1..20: mol_type = other DNA
ggactgcctcttatcacagc

SEQ ID NO: 175717 - DNA, 20 bp, synthetic construct
  source 1..20: mol_type = other DNA
aggactgcctcttatcacag

SEQ ID NO: 175718 - DNA, 20 bp, synthetic construct
  source 1..20: mol_type = other DNA
caggactgcctcttatcaca

SEQ ID NO: 175719 - DNA, 20 bp, synthetic construct
  source 1..20: mol_type = other DNA
tcaggactgcctcttatcac

SEQ ID NO: 175720 - DNA, 20 bp, synthetic construct
  source 1..20: mol_type = other DNA
gtcaggactgcctcttatca

SEQ ID NO: 175721 - DNA, 20 bp, synthetic construct
  source 1..20: mol_type = other DNA
agtcaggactgcctcttatc

SEQ ID NO: 175722 - DNA, 20 bp, synthetic construct
  source 1..20: mol_type = other DNA
cagtcaggactgcctcttat

SEQ ID NO: 175723 - DNA, 20 bp, synthetic construct
  source 1..20: mol_type = other DNA
gcagtcaggactgcctctta

SEQ ID NO: 175724 - DNA, 20 bp, synthetic construct
  source 1..20: mol_type = other DNA
tgcagtcaggactgcctctt

SEQ ID NO: 175725 - DNA, 20 bp, synthetic construct
  source 1..20: mol_type = other DNA
ctgcagtcaggactgcctct

SEQ ID NO: 175726 - DNA, 20 bp, synthetic construct
  source 1..20: mol_type = other DNA
tctgcagtcaggactgcctc

SEQ ID NO: 175727 - DNA, 20 bp, synthetic construct
  source 1..20: mol_type = other DNA
atctgcagtcaggactgcct

SEQ ID NO: 175728 - DNA, 20 bp, synthetic construct
  source 1..20: mol_type = other DNA
gatctgcagtcaggactgcc

SEQ ID NO: 175729 - DNA, 20 bp, synthetic construct
  source 1..20: mol_type = other DNA
tgatctgcagtcaggactgc

SEQ ID NO: 175730 - DNA, 20 bp, synthetic construct
  source 1..20: mol_type = other DNA
ctgatctgcagtcaggactg

SEQ ID NO: 175731 - DNA, 20 bp, synthetic construct
  source 1..20: mol_type = other DNA
cctgatctgcagtcaggact

SEQ ID NO: 175732 - DNA, 20 bp, synthetic construct
  source 1..20: mol_type = other DNA
gcctgatctgcagtcaggac

SEQ ID NO: 175733 - DNA, 20 bp, synthetic construct
  source 1..20: mol_type = other DNA
agcctgatctgcagtcagga

SEQ ID NO: 175734 - DNA, 20 bp, synthetic construct
  source 1..20: mol_type = other DNA
cagcctgatctgcagtcagg

SEQ ID NO: 175735 - DNA, 20 bp, synthetic construct
  source 1..20: mol_type = other DNA
acagcctgatctgcagtcag

SEQ ID NO: 175736 - DNA, 20 bp, synthetic construct
  source 1..20: mol_type = other DNA
cacagcctgatctgcagtca

SEQ ID NO: 175737 - DNA, 20 bp, synthetic construct
  source 1..20: mol_type = other DNA
acacagcctgatctgcagtc

SEQ ID NO: 175738 - DNA, 20 bp, synthetic construct
  source 1..20: mol_type = other DNA
cacacagcctgatctgcagt

SEQ ID NO: 175739 - DNA, 20 bp, synthetic construct
  source 1..20: mol_type = other DNA
ccacacagcctgatctgcag

SEQ ID NO: 175740 - DNA, 20 bp, synthetic construct
  source 1..20: mol_type = other DNA
tccacacagcctgatctgca

SEQ ID NO: 175741 - DNA, 20 bp, synthetic construct
  source 1..20: mol_type = other DNA
gtccacacagcctgatctgc

SEQ ID NO: 175742 - DNA, 20 bp, synthetic construct
  source 1..20: mol_type = other DNA
ggtccacacagcctgatctg

SEQ ID NO: 175743 - DNA, 20 bp, synthetic construct
  source 1..20: mol_type = other DNA
gggtccacacagcctgatct

SEQ ID NO: 175744 - DNA, 20 bp, synthetic construct
  source 1..20: mol_type = other DNA
ggggtccacacagcctgatc

SEQ ID NO: 175745 - DNA, 20 bp, synthetic construct
  source 1..20: mol_type = other DNA
tggggtccacacagcctgat

SEQ ID NO: 175746 - DNA, 20 bp, synthetic construct
  source 1..20: mol_type = other DNA
ctggggtccacacagcctga

SEQ ID NO: 175747 - DNA, 20 bp, synthetic construct
  source 1..20: mol_type = other DNA
gctggggtccacacagcctg

SEQ ID NO: 175748 - DNA, 20 bp, synthetic construct
  source 1..20: mol_type = other DNA
ggctggggtccacacagcct

SEQ ID NO: 175749 - DNA, 20 bp, synthetic construct
  source 1..20: mol_type = other DNA
aggctggggtccacacagcc

SEQ ID NO: 175750 - DNA, 20 bp, synthetic construct
  source 1..20: mol_type = other DNA
aaggctggggtccacacagc

SEQ ID NO: 175751 - DNA, 20 bp, synthetic construct
  source 1..20: mol_type = other DNA
caaggctggggtccacacag

SEQ ID NO: 175752 - DNA, 20 bp, synthetic construct
  source 1..20: mol_type = other DNA
gcaaggctggggtccacaca

SEQ ID NO: 175753 - DNA, 20 bp, synthetic construct
  source 1..20: mol_type = other DNA
tgcaaggctggggtccacac

SEQ ID NO: 175754 - DNA, 20 bp, synthetic construct
  source 1..20: mol_type = other DNA
atgcaaggctggggtccaca

SEQ ID NO: 175755 - DNA, 20 bp, synthetic construct
  source 1..20: mol_type = other DNA
catgcaaggctggggtccac

SEQ ID NO: 175756 - DNA, 20 bp, synthetic construct
  source 1..20: mol_type = other DNA
acatgcaaggctggggtcca

SEQ ID NO: 175757 - DNA, 20 bp, synthetic construct
  source 1..20: mol_type = other DNA
aacatgcaaggctggggtcc

SEQ ID NO: 175758 - DNA, 20 bp, synthetic construct
  source 1..20: mol_type = other DNA
aaacatgcaaggctggggtc

SEQ ID NO: 175759 - DNA, 20 bp, synthetic construct
  source 1..20: mol_type = other DNA
taaacatgcaaggctggggt

SEQ ID NO: 175760 - DNA, 20 bp, synthetic construct
  source 1..20: mol_type = other DNA
gtaaacatgcaaggctgggg

SEQ ID NO: 175761 - DNA, 20 bp, synthetic construct
  source 1..20: mol_type = other DNA
tgtaaacatgcaaggctggg

SEQ ID NO: 175762 - DNA, 20 bp, synthetic construct
  source 1..20: mol_type = other DNA
ctgtaaacatgcaaggctgg

SEQ ID NO: 175763 - DNA, 20 bp, synthetic construct
  source 1..20: mol_type = other DNA
tctgtaaacatgcaaggctg

SEQ ID NO: 175764 - DNA, 20 bp, synthetic construct
  source 1..20: mol_type = other DNA
gtctgtaaacatgcaaggct

SEQ ID NO: 175765 - DNA, 20 bp, synthetic construct
  source 1..20: mol_type = other DNA
ggtctgtaaacatgcaaggc

SEQ ID NO: 175766 - DNA, 20 bp, synthetic construct
  source 1..20: mol_type = other DNA
aggtctgtaaacatgcaagg

SEQ ID NO: 175767 - DNA, 20 bp, synthetic construct
  source 1..20: mol_type = other DNA
aaggtctgtaaacatgcaag

SEQ ID NO: 175768 - DNA, 20 bp, synthetic construct
  source 1..20: mol_type = other DNA
gaaggtctgtaaacatgcaa

SEQ ID NO: 175769 - DNA, 20 bp, synthetic construct
  source 1..20: mol_type = other DNA
tgaaggtctgtaaacatgca

SEQ ID NO: 175770 - DNA, 20 bp, synthetic construct
  source 1..20: mol_type = other DNA
atgaaggtctgtaaacatgc

SEQ ID NO: 175771 - DNA, 20 bp, synthetic construct
  source 1..20: mol_type = other DNA
catgaaggtctgtaaacatg

SEQ ID NO: 175772 - DNA, 20 bp, synthetic construct
  source 1..20: mol_type = other DNA
acatgaaggtctgtaaacat

SEQ ID NO: 175773 - DNA, 20 bp, synthetic construct
  source 1..20: mol_type = other DNA
gacatgaaggtctgtaaaca

SEQ ID NO: 175774 - DNA, 20 bp, synthetic construct
  source 1..20: mol_type = other DNA
agacatgaaggtctgtaaac

SEQ ID NO: 175775 - DNA, 20 bp, synthetic construct
  source 1..20: mol_type = other DNA
aagacatgaaggtctgtaaa

SEQ ID NO: 175776 - DNA, 20 bp, synthetic construct
  source 1..20: mol_type = other DNA
taagacatgaaggtctgtaa

SEQ ID NO: 175777 - DNA, 20 bp, synthetic construct
  source 1..20: mol_type = other DNA
ataagacatgaaggtctgta

SEQ ID NO: 175778 - DNA, 20 bp, synthetic construct
  source 1..20: mol_type = other DNA
aataagacatgaaggtctgt

SEQ ID NO: 175779 - DNA, 20 bp, synthetic construct
  source 1..20: mol_type = other DNA
gaataagacatgaaggtctg

SEQ ID NO: 175780 - DNA, 20 bp, synthetic construct
  source 1..20: mol_type = other DNA
agaataagacatgaaggtct

SEQ ID NO: 175781 - DNA, 20 bp, synthetic construct
  source 1..20: mol_type = other DNA
aagaataagacatgaaggtc

SEQ ID NO: 175782 - DNA, 20 bp, synthetic construct
  source 1..20: mol_type = other DNA
taagaataagacatgaaggt

SEQ ID NO: 175783 - DNA, 20 bp, synthetic construct
  source 1..20: mol_type = other DNA
gtaagaataagacatgaagg

SEQ ID NO: 175784 - DNA, 20 bp, synthetic construct
  source 1..20: mol_type = other DNA
tgtaagaataagacatgaag

SEQ ID NO: 175785 - DNA, 20 bp, synthetic construct
  source 1..20: mol_type = other DNA
ctgtaagaataagacatgaa

SEQ ID NO: 175786 - DNA, 20 bp, synthetic construct
  source 1..20: mol_type = other DNA
cctgtaagaataagacatga

SEQ ID NO: 175787 - DNA, 20 bp, synthetic construct
  source 1..20: mol_type = other DNA
ccctgtaagaataagacatg

SEQ ID NO: 175788 - DNA, 20 bp, synthetic construct
  source 1..20: mol_type = other DNA
accctgtaagaataagacat

SEQ ID NO: 175789 - DNA, 20 bp, synthetic construct
  source 1..20: mol_type = other DNA
taccctgtaagaataagaca

SEQ ID NO: 175790 - DNA, 20 bp, synthetic construct
  source 1..20: mol_type = other DNA
ataccctgtaagaataagac

SEQ ID NO: 175791 - DNA, 20 bp, synthetic construct
  source 1..20: mol_type = other DNA
gataccctgtaagaataaga

SEQ ID NO: 175792 - DNA, 20 bp, synthetic construct
  source 1..20: mol_type = other DNA
tgataccctgtaagaataag

SEQ ID NO: 175793 - DNA, 20 bp, synthetic construct
  source 1..20: mol_type = other DNA
ctgataccctgtaagaataa

SEQ ID NO: 175794 - DNA, 20 bp, synthetic construct
  source 1..20: mol_type = other DNA
tctgataccctgtaagaata

SEQ ID NO: 175795 - DNA, 20 bp, synthetic construct
  source 1..20: mol_type = other DNA
ttctgataccctgtaagaat

SEQ ID NO: 175796 - DNA, 20 bp, synthetic construct
  source 1..20: mol_type = other DNA
cttctgataccctgtaagaa

SEQ ID NO: 175797 - DNA, 20 bp, synthetic construct
  source 1..20: mol_type = other DNA
tcttctgataccctgtaaga

SEQ ID NO: 175798 - DNA, 20 bp, synthetic construct
  source 1..20: mol_type = other DNA
ttcttctgataccctgtaag

SEQ ID NO: 175799 - DNA, 20 bp, synthetic construct
  source 1..20: mol_type = other DNA
gttcttctgataccctgtaa

SEQ ID NO: 175800 - DNA, 20 bp, synthetic construct
  source 1..20: mol_type = other DNA
tgttcttctgataccctgta

SEQ ID NO: 175801 - DNA, 20 bp, synthetic construct
  source 1..20: mol_type = other DNA
gtgttcttctgataccctgt

SEQ ID NO: 175802 - DNA, 20 bp, synthetic construct
  source 1..20: mol_type = other DNA
ggtgttcttctgataccctg

SEQ ID NO: 175803 - DNA, 20 bp, synthetic construct
  source 1..20: mol_type = other DNA
aggtgttcttctgataccct

SEQ ID NO: 175804 - DNA, 20 bp, synthetic construct
  source 1..20: mol_type = other DNA
taggtgttcttctgataccc

SEQ ID NO: 175805 - DNA, 20 bp, synthetic construct
  source 1..20: mol_type = other DNA
gtaggtgttcttctgatacc

SEQ ID NO: 175806 - DNA, 20 bp, synthetic construct
  source 1..20: mol_type = other DNA
agtaggtgttcttctgatac

SEQ ID NO: 175807 - DNA, 20 bp, synthetic construct
  source 1..20: mol_type = other DNA
cagtaggtgttcttctgata

SEQ ID NO: 175808 - DNA, 20 bp, synthetic construct
  source 1..20: mol_type = other DNA
ccagtaggtgttcttctgat

SEQ ID NO: 175809 - DNA, 20 bp, synthetic construct
  source 1..20: mol_type = other DNA
cccagtaggtgttcttctga

SEQ ID NO: 175810 - DNA, 20 bp, synthetic construct
  source 1..20: mol_type = other DNA
ccccagtaggtgttcttctg

SEQ ID NO: 175811 - DNA, 20 bp, synthetic construct
  source 1..20: mol_type = other DNA
tccccagtaggtgttcttct

SEQ ID NO: 175812 - DNA, 20 bp, synthetic construct
  source 1..20: mol_type = other DNA
ttccccagtaggtgttcttc

SEQ ID NO: 175813 - DNA, 20 bp, synthetic construct
  source 1..20: mol_type = other DNA
tttccccagtaggtgttctt

SEQ ID NO: 175814 - DNA, 20 bp, synthetic construct
  source 1..20: mol_type = other DNA
gtttccccagtaggtgttct

SEQ ID NO: 175815 - DNA, 20 bp, synthetic construct
  source 1..20: mol_type = other DNA
agtttccccagtaggtgttc

SEQ ID NO: 175816 - DNA, 20 bp, synthetic construct
  source 1..20: mol_type = other DNA
aagtttccccagtaggtgtt

SEQ ID NO: 175817 - DNA, 20 bp, synthetic construct
  source 1..20: mol_type = other DNA
taagtttccccagtaggtgt

SEQ ID NO: 175818 - DNA, 20 bp, synthetic construct
  source 1..20: mol_type = other DNA
ataagtttccccagtaggtg

SEQ ID NO: 175819 - DNA, 20 bp, synthetic construct
  source 1..20: mol_type = other DNA
tataagtttccccagtaggt

SEQ ID NO: 175820 - DNA, 20 bp, synthetic construct
  source 1..20: mol_type = other DNA
ttataagtttccccagtagg

SEQ ID NO: 175821 - DNA, 20 bp, synthetic construct
  source 1..20: mol_type = other DNA
tttataagtttccccagtag

SEQ ID NO: 175822 - DNA, 20 bp, synthetic construct
  source 1..20: mol_type = other DNA
atttataagtttccccagta

SEQ ID NO: 175823 - DNA, 20 bp, synthetic construct
  source 1..20: mol_type = other DNA
aatttataagtttccccagt

SEQ ID NO: 175824 - DNA, 20 bp, synthetic construct
  source 1..20: mol_type = other DNA
taatttataagtttccccag

SEQ ID NO: 175825 - DNA, 20 bp, synthetic construct
  source 1..20: mol_type = other DNA
ctaatttataagtttcccca

SEQ ID NO: 175826 - DNA, 20 bp, synthetic construct
  source 1..20: mol_type = other DNA
actaatttataagtttcccc

SEQ ID NO: 175827 - DNA, 20 bp, synthetic construct
  source 1..20: mol_type = other DNA
tactaatttataagtttccc

SEQ ID NO: 175828 - DNA, 20 bp, synthetic construct
  source 1..20: mol_type = other DNA
ttactaatttataagtttcc

SEQ ID NO: 175829 - DNA, 20 bp, synthetic construct
  source 1..20: mol_type = other DNA
tttactaatttataagtttc

SEQ ID NO: 175830 - DNA, 20 bp, synthetic construct
  source 1..20: mol_type = other DNA
ttttactaatttataagttt

SEQ ID NO: 175831 - DNA, 20 bp, synthetic construct
  source 1..20: mol_type = other DNA
cttttactaatttataagtt

SEQ ID NO: 175832 - DNA, 20 bp, synthetic construct
  source 1..20: mol_type = other DNA
ccttttactaatttataagt

SEQ ID NO: 175833 - DNA, 20 bp, synthetic construct
  source 1..20: mol_type = other DNA
accttttactaatttataag

SEQ ID NO: 175834 - DNA, 20 bp, synthetic construct
  source 1..20: mol_type = other DNA
caccttttactaatttataa

SEQ ID NO: 175835 - DNA, 20 bp, synthetic construct
  source 1..20: mol_type = other DNA
ccaccttttactaatttata

SEQ ID NO: 175836 - DNA, 20 bp, synthetic construct
  source 1..20: mol_type = other DNA
cccaccttttactaatttat

SEQ ID NO: 175837 - DNA, 20 bp, synthetic construct
  source 1..20: mol_type = other DNA
gcccaccttttactaattta

SEQ ID NO: 175838 - DNA, 20 bp, synthetic construct
  source 1..20: mol_type = other DNA
tgcccaccttttactaattt

SEQ ID NO: 175839 - DNA, 20 bp, synthetic construct
  source 1..20: mol_type = other DNA
atgcccaccttttactaatt

SEQ ID NO: 175840 - DNA, 20 bp, synthetic construct
  source 1..20: mol_type = other DNA
aatgcccaccttttactaat

SEQ ID NO: 175841 - DNA, 20 bp, synthetic construct
  source 1..20: mol_type = other DNA
gaatgcccaccttttactaa

SEQ ID NO: 175842 - DNA, 20 bp, synthetic construct
  source 1..20: mol_type = other DNA
agaatgcccaccttttacta

SEQ ID NO: 175843 - DNA, 20 bp, synthetic construct
  source 1..20: mol_type = other DNA
gagaatgcccaccttttact

SEQ ID NO: 175844 - DNA, 20 bp, synthetic construct
  source 1..20: mol_type = other DNA
ggagaatgcccaccttttac

SEQ ID NO: 175845 - DNA, 20 bp, synthetic construct
  source 1..20: mol_type = other DNA
gggagaatgcccacctttta

SEQ ID NO: 175846 - DNA, 20 bp, synthetic construct
  source 1..20: mol_type = other DNA
ggggagaatgcccacctttt

SEQ ID NO: 175847 - DNA, 20 bp, synthetic construct
  source 1..20: mol_type = other DNA
cggggagaatgcccaccttt

SEQ ID NO: 175848 - DNA, 20 bp, synthetic construct
  source 1..20: mol_type = other DNA
gcggggagaatgcccacctt

SEQ ID NO: 175849 - DNA, 20 bp, synthetic construct
  source 1..20: mol_type = other DNA
ggcggggagaatgcccacct

SEQ ID NO: 175850 - DNA, 20 bp, synthetic construct
  source 1..20: mol_type = other DNA
gggcggggagaatgcccacc

SEQ ID NO: 175851 - DNA, 20 bp, synthetic construct
  source 1..20: mol_type = other DNA
tgggcggggagaatgcccac

SEQ ID NO: 175852 - DNA, 20 bp, synthetic construct
  source 1..20: mol_type = other DNA
atgggcggggagaatgccca

SEQ ID NO: 175853 - DNA, 20 bp, synthetic construct
  source 1..20: mol_type = other DNA
gatgggcggggagaatgccc

SEQ ID NO: 175854 - DNA, 20 bp, synthetic construct
  source 1..20: mol_type = other DNA
agatgggcggggagaatgcc

SEQ ID NO: 175855 - DNA, 20 bp, synthetic construct
  source 1..20: mol_type = other DNA
aagatgggcggggagaatgc

SEQ ID NO: 175856 - DNA, 20 bp, synthetic construct
  source 1..20: mol_type = other DNA
gaagatgggcggggagaatg

SEQ ID NO: 175857 - DNA, 20 bp, synthetic construct
  source 1..20: mol_type = other DNA
agaagatgggcggggagaat

SEQ ID NO: 175858 - DNA, 20 bp, synthetic construct
  source 1..20: mol_type = other DNA
cagaagatgggcggggagaa

SEQ ID NO: 175859 - DNA, 20 bp, synthetic construct
  source 1..20: mol_type = other DNA
acagaagatgggcggggaga

SEQ ID NO: 175860 - DNA, 20 bp, synthetic construct
  source 1..20: mol_type = other DNA
gacagaagatgggcggggag

SEQ ID NO: 175861 - DNA, 20 bp, synthetic construct
  source 1..20: mol_type = other DNA
agacagaagatgggcgggga

SEQ ID NO: 175862 - DNA, 20 bp, synthetic construct
  source 1..20: mol_type = other DNA
cagacagaagatgggcgggg

SEQ ID NO: 175863 - DNA, 20 bp, synthetic construct
  source 1..20: mol_type = other DNA
acagacagaagatgggcggg

SEQ ID NO: 175864 - DNA, 20 bp, synthetic construct
  source 1..20: mol_type = other DNA
gacagacagaagatgggcgg

SEQ ID NO: 175865 - DNA, 20 bp, synthetic construct
  source 1..20: mol_type = other DNA
agacagacagaagatgggcg

SEQ ID NO: 175866 - DNA, 20 bp, synthetic construct
  source 1..20: mol_type = other DNA
cagacagacagaagatgggc

SEQ ID NO: 175867 - DNA, 20 bp, synthetic construct
  source 1..20: mol_type = other DNA
gcagacagacagaagatggg

SEQ ID NO: 175868 - DNA, 20 bp, synthetic construct
  source 1..20: mol_type = other DNA
ggcagacagacagaagatgg

SEQ ID NO: 175869 - DNA, 20 bp, synthetic construct
  source 1..20: mol_type = other DNA
tggcagacagacagaagatg

SEQ ID NO: 175870 - DNA, 20 bp, synthetic construct
  source 1..20: mol_type = other DNA
ctggcagacagacagaagat

SEQ ID NO: 175871 - DNA, 20 bp, synthetic construct
  source 1..20: mol_type = other DNA
cctggcagacagacagaaga

SEQ ID NO: 175872 - DNA, 20 bp, synthetic construct
  source 1..20: mol_type = other DNA
tcctggcagacagacagaag

SEQ ID NO: 175873 - DNA, 20 bp, synthetic construct
  source 1..20: mol_type = other DNA
gtcctggcagacagacagaa

SEQ ID NO: 175874 - DNA, 20 bp, synthetic construct
  source 1..20: mol_type = other DNA
agtcctggcagacagacaga

SEQ ID NO: 175875 - DNA, 20 bp, synthetic construct
  source 1..20: mol_type = other DNA
tagtcctggcagacagacag

SEQ ID NO: 175876 - DNA, 20 bp, synthetic construct
  source 1..20: mol_type = other DNA
ctagtcctggcagacagaca

SEQ ID NO: 175877 - DNA, 20 bp, synthetic construct
  source 1..20: mol_type = other DNA
gctagtcctggcagacagac

SEQ ID NO: 175878 - DNA, 20 bp, synthetic construct
  source 1..20: mol_type = other DNA
tgctagtcctggcagacaga

SEQ ID NO: 175879 - DNA, 20 bp, synthetic construct
  source 1..20: mol_type = other DNA
gtgctagtcctggcagacag

SEQ ID NO: 175880 - DNA, 20 bp, synthetic construct
  source 1..20: mol_type = other DNA
tgtgctagtcctggcagaca

SEQ ID NO: 175881 - DNA, 20 bp, synthetic construct
  source 1..20: mol_type = other DNA
ctgtgctagtcctggcagac

SEQ ID NO: 175882 - DNA, 20 bp, synthetic construct
  source 1..20: mol_type = other DNA
gctgtgctagtcctggcaga

SEQ ID NO: 175883 - DNA, 20 bp, synthetic construct
  source 1..20: mol_type = other DNA
tgctgtgctagtcctggcag

SEQ ID NO: 175884 - DNA, 20 bp, synthetic construct
  source 1..20: mol_type = other DNA
gtgctgtgctagtcctggca

SEQ ID NO: 175885 - DNA, 20 bp, synthetic construct
  source 1..20: mol_type = other DNA
agtgctgtgctagtcctggc

SEQ ID NO: 175886 - DNA, 20 bp, synthetic construct
  source 1..20: mol_type = other DNA
aagtgctgtgctagtcctgg

SEQ ID NO: 175887 - DNA, 20 bp, synthetic construct
  source 1..20: mol_type = other DNA
aaagtgctgtgctagtcctg

SEQ ID NO: 175888 - DNA, 20 bp, synthetic construct
  source 1..20: mol_type = other DNA
caaagtgctgtgctagtcct

SEQ ID NO: 175889 - DNA, 20 bp, synthetic construct
  source 1..20: mol_type = other DNA
tcaaagtgctgtgctagtcc

SEQ ID NO: 175890 - DNA, 20 bp, synthetic construct
  source 1..20: mol_type = other DNA
ttcaaagtgctgtgctagtc

SEQ ID NO: 175891 - DNA, 20 bp, synthetic construct
  source 1..20: mol_type = other DNA
cttcaaagtgctgtgctagt

SEQ ID NO: 175892 - DNA, 20 bp, synthetic construct
  source 1..20: mol_type = other DNA
acttcaaagtgctgtgctag

SEQ ID NO: 175893 - DNA, 20 bp, synthetic construct
  source 1..20: mol_type = other DNA
gacttcaaagtgctgtgcta

SEQ ID NO: 175894 - DNA, 20 bp, synthetic construct
  source 1..20: mol_type = other DNA
tgacttcaaagtgctgtgct

SEQ ID NO: 175895 - DNA, 20 bp, synthetic construct
  source 1..20: mol_type = other DNA
atgacttcaaagtgctgtgc

SEQ ID NO: 175896 - DNA, 20 bp, synthetic construct
  source 1..20: mol_type = other DNA
aatgacttcaaagtgctgtg

SEQ ID NO: 175897 - DNA, 20 bp, synthetic construct
  source 1..20: mol_type = other DNA
gaatgacttcaaagtgctgt

SEQ ID NO: 175898 - DNA, 20 bp, synthetic construct
  source 1..20: mol_type = other DNA
tgaatgacttcaaagtgctg

SEQ ID NO: 175899 - DNA, 20 bp, synthetic construct
  source 1..20: mol_type = other DNA
gtgaatgacttcaaagtgct

SEQ ID NO: 175900 - DNA, 20 bp, synthetic construct
  source 1..20: mol_type = other DNA
tgtgaatgacttcaaagtgc

SEQ ID NO: 175901 - DNA, 20 bp, synthetic construct
  source 1..20: mol_type = other DNA
atgtgaatgacttcaaagtg

SEQ ID NO: 175902 - DNA, 20 bp, synthetic construct
  source 1..20: mol_type = other DNA
tatgtgaatgacttcaaagt

SEQ ID NO: 175903 - DNA, 20 bp, synthetic construct
  source 1..20: mol_type = other DNA
ctatgtgaatgacttcaaag

SEQ ID NO: 175904 - DNA, 20 bp, synthetic construct
  source 1..20: mol_type = other DNA
tctatgtgaatgacttcaaa

SEQ ID NO: 175905 - DNA, 20 bp, synthetic construct
  source 1..20: mol_type = other DNA
ttctatgtgaatgacttcaa

SEQ ID NO: 175906 - DNA, 20 bp, synthetic construct
  source 1..20: mol_type = other DNA
attctatgtgaatgacttca

SEQ ID NO: 175907 - DNA, 20 bp, synthetic construct
  source 1..20: mol_type = other DNA
gattctatgtgaatgacttc

SEQ ID NO: 175908 - DNA, 20 bp, synthetic construct
  source 1..20: mol_type = other DNA
ggattctatgtgaatgactt

SEQ ID NO: 175909 - DNA, 20 bp, synthetic construct
  source 1..20: mol_type = other DNA
gggattctatgtgaatgact

SEQ ID NO: 175910 - DNA, 20 bp, synthetic construct
  source 1..20: mol_type = other DNA
tgggattctatgtgaatgac

SEQ ID NO: 175911 - DNA, 20 bp, synthetic construct
  source 1..20: mol_type = other DNA
ttgggattctatgtgaatga

SEQ ID NO: 175912 - DNA, 20 bp, synthetic construct
  source 1..20: mol_type = other DNA
gttgggattctatgtgaatg

SEQ ID NO: 175913 - DNA, 20 bp, synthetic construct
  source 1..20: mol_type = other DNA
agttgggattctatgtgaat

SEQ ID NO: 175914 - DNA, 20 bp, synthetic construct
  source 1..20: mol_type = other DNA
aagttgggattctatgtgaa

SEQ ID NO: 175915 - DNA, 20 bp, synthetic construct
  source 1..20: mol_type = other DNA
taagttgggattctatgtga

SEQ ID NO: 175916 - DNA, 20 bp, synthetic construct
  source 1..20: mol_type = other DNA
ttaagttgggattctatgtg

SEQ ID NO: 175917 - DNA, 20 bp, synthetic construct
  source 1..20: mol_type = other DNA
cttaagttgggattctatgt

SEQ ID NO: 175918 - DNA, 20 bp, synthetic construct
  source 1..20: mol_type = other DNA
tcttaagttgggattctatg

SEQ ID NO: 175919 - DNA, 20 bp, synthetic construct
  source 1..20: mol_type = other DNA
ctcttaagttgggattctat

SEQ ID NO: 175920 - DNA, 20 bp, synthetic construct
  source 1..20: mol_type = other DNA
cctcttaagttgggattcta

SEQ ID NO: 175921 - DNA, 20 bp, synthetic construct
  source 1..20: mol_type = other DNA
ccctcttaagttgggattct

SEQ ID NO: 175922 - DNA, 20 bp, synthetic construct
  source 1..20: mol_type = other DNA
accctcttaagttgggattc

SEQ ID NO: 175923 - DNA, 20 bp, synthetic construct
  source 1..20: mol_type = other DNA
taccctcttaagttgggatt

SEQ ID NO: 175924 - DNA, 20 bp, synthetic construct
  source 1..20: mol_type = other DNA
ttaccctcttaagttgggat

SEQ ID NO: 175925 - DNA, 20 bp, synthetic construct
  source 1..20: mol_type = other DNA
tttaccctcttaagttggga

SEQ ID NO: 175926 - DNA, 20 bp, synthetic construct
  source 1..20: mol_type = other DNA
ttttaccctcttaagttggg

SEQ ID NO: 175927 - DNA, 20 bp, synthetic construct
  source 1..20: mol_type = other DNA
attttaccctcttaagttgg

SEQ ID NO: 175928 - DNA, 20 bp, synthetic construct
  source 1..20: mol_type = other DNA
gattttaccctcttaagttg

SEQ ID NO: 175929 - DNA, 20 bp, synthetic construct
  source 1..20: mol_type = other DNA
ggattttaccctcttaagtt

SEQ ID NO: 175930 - DNA, 20 bp, synthetic construct
  source 1..20: mol_type = other DNA
aggattttaccctcttaagt

SEQ ID NO: 175931 - DNA, 20 bp, synthetic construct
  source 1..20: mol_type = other DNA
gaggattttaccctcttaag

SEQ ID NO: 175932 - DNA, 20 bp, synthetic construct
  source 1..20: mol_type = other DNA
ggaggattttaccctcttaa

SEQ ID NO: 175933 - DNA, 20 bp, synthetic construct
  source 1..20: mol_type = other DNA
aggaggattttaccctctta

SEQ ID NO: 175934 - DNA, 20 bp, synthetic construct
  source 1..20: mol_type = other DNA
gaggaggattttaccctctt

SEQ ID NO: 175935 - DNA, 20 bp, synthetic construct
  source 1..20: mol_type = other DNA
tgaggaggattttaccctct

SEQ ID NO: 175936 - DNA, 20 bp, synthetic construct
  source 1..20: mol_type = other DNA
ttgaggaggattttaccctc

SEQ ID NO: 175937 - DNA, 20 bp, synthetic construct
  source 1..20: mol_type = other DNA
gttgaggaggattttaccct

SEQ ID NO: 175938 - DNA, 20 bp, synthetic construct
  source 1..20: mol_type = other DNA
tgttgaggaggattttaccc

SEQ ID NO: 175939 - DNA, 20 bp, synthetic construct
  source 1..20: mol_type = other DNA
ctgttgaggaggattttacc

SEQ ID NO: 175940 - DNA, 20 bp, synthetic construct
  source 1..20: mol_type = other DNA
tctgttgaggaggattttac

SEQ ID NO: 175941 - DNA, 20 bp, synthetic construct
  source 1..20: mol_type = other DNA
gtctgttgaggaggatttta

SEQ ID NO: 175942 - DNA, 20 bp, synthetic construct
  source 1..20: mol_type = other DNA
agtctgttgaggaggatttt

SEQ ID NO: 175943 - DNA, 20 bp, synthetic construct
  source 1..20: mol_type = other DNA
cagtctgttgaggaggattt

SEQ ID NO: 175944 - DNA, 20 bp, synthetic construct
  source 1..20: mol_type = other DNA
tcagtctgttgaggaggatt

SEQ ID NO: 175945 - DNA, 20 bp, synthetic construct
  source 1..20: mol_type = other DNA
ttcagtctgttgaggaggat

SEQ ID NO: 175946 - DNA, 20 bp, synthetic construct
  source 1..20: mol_type = other DNA
tttcagtctgttgaggagga

SEQ ID NO: 175947 - DNA, 20 bp, synthetic construct
  source 1..20: mol_type = other DNA
ttttcagtctgttgaggagg

SEQ ID NO: 175948 - DNA, 20 bp, synthetic construct
  source 1..20: mol_type = other DNA
attttcagtctgttgaggag

SEQ ID NO: 175949 - DNA, 20 bp, synthetic construct
  source 1..20: mol_type = other DNA
tattttcagtctgttgagga

SEQ ID NO: 175950 - DNA, 20 bp, synthetic construct
  source 1..20: mol_type = other DNA
ttattttcagtctgttgagg

SEQ ID NO: 175951 - DNA, 20 bp, synthetic construct
  source 1..20: mol_type = other DNA
cttattttcagtctgttgag

SEQ ID NO: 175952 - DNA, 20 bp, synthetic construct
  source 1..20: mol_type = other DNA
acttattttcagtctgttga

SEQ ID NO: 175953 - DNA, 20 bp, synthetic construct
  source 1..20: mol_type = other DNA
aacttattttcagtctgttg

SEQ ID NO: 175954 - DNA, 20 bp, synthetic construct
  source 1..20: mol_type = other DNA
aaacttattttcagtctgtt

SEQ ID NO: 175955 - DNA, 20 bp, synthetic construct
  source 1..20: mol_type = other DNA
taaacttattttcagtctgt

SEQ ID NO: 175956 - DNA, 20 bp, synthetic construct
  source 1..20: mol_type = other DNA
ttaaacttattttcagtctg

SEQ ID NO: 175957 - DNA, 20 bp, synthetic construct
  source 1..20: mol_type = other DNA
tttaaacttattttcagtct

SEQ ID NO: 175958 - DNA, 20 bp, synthetic construct
  source 1..20: mol_type = other DNA
atttaaacttattttcagtc

SEQ ID NO: 175959 - DNA, 20 bp, synthetic construct
  source 1..20: mol_type = other DNA
aatttaaacttattttcagt

SEQ ID NO: 175960 - DNA, 20 bp, synthetic construct
  source 1..20: mol_type = other DNA
gaatttaaacttattttcag

SEQ ID NO: 175961 - DNA, 20 bp, synthetic construct
  source 1..20: mol_type = other DNA
ggaatttaaacttattttca

SEQ ID NO: 175962 - DNA, 20 bp, synthetic construct
  source 1..20: mol_type = other DNA
gggaatttaaacttattttc

SEQ ID NO: 175963 - DNA, 20 bp, synthetic construct
  source 1..20: mol_type = other DNA
agggaatttaaacttatttt

SEQ ID NO: 175964 - DNA, 20 bp, synthetic construct
  source 1..20: mol_type = other DNA
aagggaatttaaacttattt

SEQ ID NO: 175965 - DNA, 20 bp, synthetic construct
  source 1..20: mol_type = other DNA
aaagggaatttaaacttatt

SEQ ID NO: 175966 - DNA, 20 bp, synthetic construct
  source 1..20: mol_type = other DNA
caaagggaatttaaacttat

SEQ ID NO: 175967 - DNA, 20 bp, synthetic construct
  source 1..20: mol_type = other DNA
gcaaagggaatttaaactta

SEQ ID NO: 175968 - DNA, 20 bp, synthetic construct
  source 1..20: mol_type = other DNA
agcaaagggaatttaaactt

SEQ ID NO: 175969 - DNA, 20 bp, synthetic construct
  source 1..20: mol_type = other DNA
tagcaaagggaatttaaact

SEQ ID NO: 175970 - DNA, 20 bp, synthetic construct
  source 1..20: mol_type = other DNA
atagcaaagggaatttaaac

SEQ ID NO: 175971 - DNA, 20 bp, synthetic construct
  source 1..20: mol_type = other DNA
tatagcaaagggaatttaaa

SEQ ID NO: 175972 - DNA, 20 bp, synthetic construct
  source 1..20: mol_type = other DNA
atatagcaaagggaatttaa

SEQ ID NO: 175973 - DNA, 20 bp, synthetic construct
  source 1..20: mol_type = other DNA
aatatagcaaagggaattta

SEQ ID NO: 175974 - DNA, 20 bp, synthetic construct
  source 1..20: mol_type = other DNA
taatatagcaaagggaattt

SEQ ID NO: 175975 - DNA, 20 bp, synthetic construct
  source 1..20: mol_type = other DNA
ttaatatagcaaagggaatt

SEQ ID NO: 175976 - DNA, 20 bp, synthetic construct
  source 1..20: mol_type = other DNA
gttaatatagcaaagggaat

SEQ ID NO: 175977 - DNA, 20 bp, synthetic construct
  source 1..20: mol_type = other DNA
agttaatatagcaaagggaa

SEQ ID NO: 175978 - DNA, 20 bp, synthetic construct
  source 1..20: mol_type = other DNA
gagttaatatagcaaaggga

SEQ ID NO: 175979 - DNA, 20 bp, synthetic construct
  source 1..20: mol_type = other DNA
ggagttaatatagcaaaggg

SEQ ID NO: 175980 - DNA, 20 bp, synthetic construct
  source 1..20: mol_type = other DNA
gggagttaatatagcaaagg

SEQ ID NO: 175981 - DNA, 20 bp, synthetic construct
  source 1..20: mol_type = other DNA
ggggagttaatatagcaaag

SEQ ID NO: 175982 - DNA, 20 bp, synthetic construct
  source 1..20: mol_type = other DNA
aggggagttaatatagcaaa

SEQ ID NO: 175983 - DNA, 20 bp, synthetic construct
  source 1..20: mol_type = other DNA
caggggagttaatatagcaa

SEQ ID NO: 175984 - DNA, 20 bp, synthetic construct
  source 1..20: mol_type = other DNA
tcaggggagttaatatagca

SEQ ID NO: 175985 - DNA, 20 bp, synthetic construct
  source 1..20: mol_type = other DNA
ctcaggggagttaatatagc

SEQ ID NO: 175986 - DNA, 20 bp, synthetic construct
  source 1..20: mol_type = other DNA
cctcaggggagttaatatag

SEQ ID NO: 175987 - DNA, 20 bp, synthetic construct
  source 1..20: mol_type = other DNA
tcctcaggggagttaatata

SEQ ID NO: 175988 - DNA, 20 bp, synthetic construct
  source 1..20: mol_type = other DNA
ttcctcaggggagttaatat

SEQ ID NO: 175989 - DNA, 20 bp, synthetic construct
  source 1..20: mol_type = other DNA
tttcctcaggggagttaata

SEQ ID NO: 175990 - DNA, 20 bp, synthetic construct
  source 1..20: mol_type = other DNA
ctttcctcaggggagttaat

SEQ ID NO: 175991 - DNA, 20 bp, synthetic construct
  source 1..20: mol_type = other DNA
tctttcctcaggggagttaa

SEQ ID NO: 175992 - DNA, 20 bp, synthetic construct
  source 1..20: mol_type = other DNA
ctctttcctcaggggagtta

SEQ ID NO: 175993 - DNA, 20 bp, synthetic construct
  source 1..20: mol_type = other DNA
actctttcctcaggggagtt

SEQ ID NO: 175994 - DNA, 20 bp, synthetic construct
  source 1..20: mol_type = other DNA
gactctttcctcaggggagt

SEQ ID NO: 175995 - DNA, 20 bp, synthetic construct
  source 1..20: mol_type = other DNA
agactctttcctcaggggag

SEQ ID NO: 175996 - DNA, 20 bp, synthetic construct
  source 1..20: mol_type = other DNA
aagactctttcctcagggga

SEQ ID NO: 175997 - DNA, 20 bp, synthetic construct
  source 1..20: mol_type = other DNA
taagactctttcctcagggg

SEQ ID NO: 175998 - DNA, 20 bp, synthetic construct
  source 1..20: mol_type = other DNA
ctaagactctttcctcaggg

SEQ ID NO: 175999 - DNA, 20 bp, synthetic construct
  source 1..20: mol_type = other DNA
tctaagactctttcctcagg

SEQ ID NO: 176000 - DNA, 20 bp, synthetic construct
  source 1..20: mol_type = other DNA
atctaagactctttcctcag

SEQ ID NO: 176001 - DNA, 20 bp, synthetic construct
  source 1..20: mol_type = other DNA
gatctaagactctttcctca

SEQ ID NO: 176002 - DNA, 20 bp, synthetic construct
  source 1..20: mol_type = other DNA
tgatctaagactctttcctc

SEQ ID NO: 176003 - DNA, 20 bp, synthetic construct
  source 1..20: mol_type = other DNA
ttgatctaagactctttcct

SEQ ID NO: 176004 - DNA, 20 bp, synthetic construct
  source 1..20: mol_type = other DNA
attgatctaagactctttcc

SEQ ID NO: 176005 - DNA, 20 bp, synthetic construct
  source 1..20: mol_type = other DNA
cattgatctaagactctttc

SEQ ID NO: 176006 - DNA, 20 bp, synthetic construct
  source 1..20: mol_type = other DNA
acattgatctaagactcttt

SEQ ID NO: 176007 - DNA, 20 bp, synthetic construct
  source 1..20: mol_type = other DNA
gacattgatctaagactctt

SEQ ID NO: 176008 - DNA, 20 bp, synthetic construct
  source 1..20: mol_type = other DNA
ggacattgatctaagactct

SEQ ID NO: 176009 - DNA, 20 bp, synthetic construct
  source 1..20: mol_type = other DNA
tggacattgatctaagactc

SEQ ID NO: 176010 - DNA, 20 bp, synthetic construct
  source 1..20: mol_type = other DNA
ttggacattgatctaagact

SEQ ID NO: 176011 - DNA, 20 bp, synthetic construct
  source 1..20: mol_type = other DNA
gttggacattgatctaagac

SEQ ID NO: 176012 - DNA, 20 bp, synthetic construct
  source 1..20: mol_type = other DNA
tgttggacattgatctaaga

SEQ ID NO: 176013 - DNA, 20 bp, synthetic construct
  source 1..20: mol_type = other DNA
gtgttggacattgatctaag

SEQ ID NO: 176014 - DNA, 20 bp, synthetic construct
  source 1..20: mol_type = other DNA
agtgttggacattgatctaa

SEQ ID NO: 176015 - DNA, 20 bp, synthetic construct
  source 1..20: mol_type = other DNA
tagtgttggacattgatcta

SEQ ID NO: 176016 - DNA, 20 bp, synthetic construct
  source 1..20: mol_type = other DNA
ttagtgttggacattgatct

SEQ ID NO: 176017 - DNA, 20 bp, synthetic construct
  source 1..20: mol_type = other DNA
tttagtgttggacattgatc

SEQ ID NO: 176018 - DNA, 20 bp, synthetic construct
  source 1..20: mol_type = other DNA
ttttagtgttggacattgat

SEQ ID NO: 176019 - DNA, 20 bp, synthetic construct
  source 1..20: mol_type = other DNA
tttttagtgttggacattga

SEQ ID NO: 176020 - DNA, 20 bp, synthetic construct
  source 1..20: mol_type = other DNA
gtttttagtgttggacattg

SEQ ID NO: 176021 - DNA, 20 bp, synthetic construct
  source 1..20: mol_type = other DNA
tgtttttagtgttggacatt

SEQ ID NO: 176022 - DNA, 20 bp, synthetic construct
  source 1..20: mol_type = other DNA
ctgtttttagtgttggacat

SEQ ID NO: 176023 - DNA, 20 bp, synthetic construct
  source 1..20: mol_type = other DNA
actgtttttagtgttggaca

SEQ ID NO: 176024 - DNA, 20 bp, synthetic construct
  source 1..20: mol_type = other DNA
aactgtttttagtgttggac

SEQ ID NO: 176025 - DNA, 20 bp, synthetic construct
  source 1..20: mol_type = other DNA
aaactgtttttagtgttgga

SEQ ID NO: 176026 - DNA, 20 bp, synthetic construct
  source 1..20: mol_type = other DNA
aaaactgtttttagtgttgg

SEQ ID NO: 176027 - DNA, 20 bp, synthetic construct
  source 1..20: mol_type = other DNA
taaaactgtttttagtgttg

SEQ ID NO: 176028 - DNA, 20 bp, synthetic construct
  source 1..20: mol_type = other DNA
ttaaaactgtttttagtgtt

SEQ ID NO: 176029 - DNA, 20 bp, synthetic construct
  source 1..20: mol_type = other DNA
tttaaaactgtttttagtgt

SEQ ID NO: 176030 - DNA, 20 bp, synthetic construct
  source 1..20: mol_type = other DNA
atttaaaactgtttttagtg

SEQ ID NO: 176031 - DNA, 20 bp, synthetic construct
  source 1..20: mol_type = other DNA
gatttaaaactgtttttagt

SEQ ID NO: 176032 - DNA, 20 bp, synthetic construct
  source 1..20: mol_type = other DNA
tgatttaaaactgtttttag

SEQ ID NO: 176033 - DNA, 20 bp, synthetic construct
  source 1..20: mol_type = other DNA
ctgatttaaaactgttttta

SEQ ID NO: 176034 - DNA, 20 bp, synthetic construct
  source 1..20: mol_type = other DNA
gctgatttaaaactgttttt

SEQ ID NO: 176035 - DNA, 20 bp, synthetic construct
  source 1..20: mol_type = other DNA
tgctgatttaaaactgtttt

SEQ ID NO: 176036 - DNA, 20 bp, synthetic construct
  source 1..20: mol_type = other DNA
ttgctgatttaaaactgttt

SEQ ID NO: 176037 - DNA, 20 bp, synthetic construct
  source 1..20: mol_type = other DNA
cttgctgatttaaaactgtt

SEQ ID NO: 176038 - DNA, 20 bp, synthetic construct
  source 1..20: mol_type = other DNA
acttgctgatttaaaactgt

SEQ ID NO: 176039 - DNA, 20 bp, synthetic construct
  source 1..20: mol_type = other DNA
cacttgctgatttaaaactg

SEQ ID NO: 176040 - DNA, 20 bp, synthetic construct
  source 1..20: mol_type = other DNA
tcacttgctgatttaaaact

SEQ ID NO: 176041 - DNA, 20 bp, synthetic construct
  source 1..20: mol_type = other DNA
ctcacttgctgatttaaaac

SEQ ID NO: 176042 - DNA, 20 bp, synthetic construct
  source 1..20: mol_type = other DNA
tctcacttgctgatttaaaa

SEQ ID NO: 176043 - DNA, 20 bp, synthetic construct
  source 1..20: mol_type = other DNA
ttctcacttgctgatttaaa

SEQ ID NO: 176044 - DNA, 20 bp, synthetic construct
  source 1..20: mol_type = other DNA
attctcacttgctgatttaa

SEQ ID NO: 176045 - DNA, 20 bp, synthetic construct
  source 1..20: mol_type = other DNA
aattctcacttgctgattta

SEQ ID NO: 176046 - DNA, 20 bp, synthetic construct
  source 1..20: mol_type = other DNA
taattctcacttgctgattt

SEQ ID NO: 176047 - DNA, 20 bp, synthetic construct
  source 1..20: mol_type = other DNA
ttaattctcacttgctgatt

SEQ ID NO: 176048 - DNA, 20 bp, synthetic construct
  source 1..20: mol_type = other DNA
tttaattctcacttgctgat

SEQ ID NO: 176049 - DNA, 20 bp, synthetic construct
  source 1..20: mol_type = other DNA
atttaattctcacttgctga

SEQ ID NO: 176050 - DNA, 20 bp, synthetic construct
  source 1..20: mol_type = other DNA
gatttaattctcacttgctg

SEQ ID NO: 176051 - DNA, 20 bp, synthetic construct
  source 1..20: mol_type = other DNA
agatttaattctcacttgct

SEQ ID NO: 176052 - DNA, 20 bp, synthetic construct
  source 1..20: mol_type = other DNA
cagatttaattctcacttgc

SEQ ID NO: 176053 - DNA, 20 bp, synthetic construct
  source 1..20: mol_type = other DNA
tcagatttaattctcacttg

SEQ ID NO: 176054 - DNA, 20 bp, synthetic construct
  source 1..20: mol_type = other DNA
ttcagatttaattctcactt

SEQ ID NO: 176055 - DNA, 20 bp, synthetic construct
  source 1..20: mol_type = other DNA
cttcagatttaattctcact

SEQ ID NO: 176056 - DNA, 20 bp, synthetic construct
  source 1..20: mol_type = other DNA
gcttcagatttaattctcac

SEQ ID NO: 176057 - DNA, 20 bp, synthetic construct
  source 1..20: mol_type = other DNA
tgcttcagatttaattctca

SEQ ID NO: 176058 - DNA, 20 bp, synthetic construct
  source 1..20: mol_type = other DNA
ttgcttcagatttaattctc

SEQ ID NO: 176059 - DNA, 20 bp, synthetic construct
  source 1..20: mol_type = other DNA
attgcttcagatttaattct

SEQ ID NO: 176060 - DNA, 20 bp, synthetic construct
  source 1..20: mol_type = other DNA
aattgcttcagatttaattc

SEQ ID NO: 176061 - DNA, 20 bp, synthetic construct
  source 1..20: mol_type = other DNA
caattgcttcagatttaatt

SEQ ID NO: 176062 - DNA, 20 bp, synthetic construct
  source 1..20: mol_type = other DNA
tcaattgcttcagatttaat

SEQ ID NO: 176063 - DNA, 20 bp, synthetic construct
  source 1..20: mol_type = other DNA
atcaattgcttcagatttaa

SEQ ID NO: 176064 - DNA, 20 bp, synthetic construct
  source 1..20: mol_type = other DNA
tatcaattgcttcagattta

SEQ ID NO: 176065 - DNA, 20 bp, synthetic construct
  source 1..20: mol_type = other DNA
ttatcaattgcttcagattt

SEQ ID NO: 176066 - DNA, 20 bp, synthetic construct
  source 1..20: mol_type = other DNA
attatcaattgcttcagatt

SEQ ID NO: 176067 - DNA, 20 bp, synthetic construct
  source 1..20: mol_type = other DNA
tattatcaattgcttcagat

SEQ ID NO: 176068 - DNA, 20 bp, synthetic construct
  source 1..20: mol_type = other DNA
ttattatcaattgcttcaga

SEQ ID NO: 176069 - DNA, 20 bp, synthetic construct
  source 1..20: mol_type = other DNA
attattatcaattgcttcag

SEQ ID NO: 176070 - DNA, 20 bp, synthetic construct
  source 1..20: mol_type = other DNA
cattattatcaattgcttca

SEQ ID NO: 176071 - DNA, 20 bp, synthetic construct
  source 1..20: mol_type = other DNA
acattattatcaattgcttc

SEQ ID NO: 176072 - DNA, 20 bp, synthetic construct
  source 1..20: mol_type = other DNA
aacattattatcaattgctt

SEQ ID NO: 176073 - DNA, 20 bp, synthetic construct
  source 1..20: mol_type = other DNA
aaacattattatcaattgct

SEQ ID NO: 176074 - DNA, 20 bp, synthetic construct
  source 1..20: mol_type = other DNA
gaaacattattatcaattgc

SEQ ID NO: 176075 - DNA, 20 bp, synthetic construct
  source 1..20: mol_type = other DNA
tgaaacattattatcaattg

SEQ ID NO: 176076 - DNA, 20 bp, synthetic construct
  source 1..20: mol_type = other DNA
atgaaacattattatcaatt

SEQ ID NO: 176077 - DNA, 20 bp, synthetic construct
  source 1..20: mol_type = other DNA
aatgaaacattattatcaat

SEQ ID NO: 176078 - DNA, 20 bp, synthetic construct
  source 1..20: mol_type = other DNA
gaatgaaacattattatcaa

SEQ ID NO: 176079 - DNA, 20 bp, synthetic construct
  source 1..20: mol_type = other DNA
tgaatgaaacattattatca

SEQ ID NO: 176080 - DNA, 20 bp, synthetic construct
  source 1..20: mol_type = other DNA
atgaatgaaacattattatc

SEQ ID NO: 176081 - DNA, 20 bp, synthetic construct
  source 1..20: mol_type = other DNA
aatgaatgaaacattattat

SEQ ID NO: 176082 - DNA, 20 bp, synthetic construct
  source 1..20: mol_type = other DNA
gaatgaatgaaacattatta

SEQ ID NO: 176083 - DNA, 20 bp, synthetic construct
  source 1..20: mol_type = other DNA
ggaatgaatgaaacattatt

SEQ ID NO: 176084 - DNA, 20 bp, synthetic construct
  source 1..20: mol_type = other DNA
aggaatgaatgaaacattat

SEQ ID NO: 176085 - DNA, 20 bp, synthetic construct
  source 1..20: mol_type = other DNA
gaggaatgaatgaaacatta

SEQ ID NO: 176086 - DNA, 20 bp, synthetic construct
  source 1..20: mol_type = other DNA
agaggaatgaatgaaacatt

SEQ ID NO: 176087 - DNA, 20 bp, synthetic construct
  source 1..20: mol_type = other DNA
gagaggaatgaatgaaacat

SEQ ID NO: 176088 - DNA, 20 bp, synthetic construct
  source 1..20: mol_type = other DNA
ggagaggaatgaatgaaaca

SEQ ID NO: 176089 - DNA, 20 bp, synthetic construct
  source 1..20: mol_type = other DNA
aggagaggaatgaatgaaac

SEQ ID NO: 176090 - DNA, 20 bp, synthetic construct
  source 1..20: mol_type = other DNA
aaggagaggaatgaatgaaa

SEQ ID NO: 176091 - DNA, 20 bp, synthetic construct
  source 1..20: mol_type = other DNA
aaaggagaggaatgaatgaa

SEQ ID NO: 176092 - DNA, 20 bp, synthetic construct
  source 1..20: mol_type = other DNA
caaaggagaggaatgaatga

SEQ ID NO: 176093 - DNA, 20 bp, synthetic construct
  source 1..20: mol_type = other DNA
ccaaaggagaggaatgaatg

SEQ ID NO: 176094 - DNA, 20 bp, synthetic construct
  source 1..20: mol_type = other DNA
gccaaaggagaggaatgaat

SEQ ID NO: 176095 - DNA, 20 bp, synthetic construct
  source 1..20: mol_type = other DNA
ggccaaaggagaggaatgaa

SEQ ID NO: 176096 - DNA, 20 bp, synthetic construct
  source 1..20: mol_type = other DNA
gggccaaaggagaggaatga

SEQ ID NO: 176097 - DNA, 20 bp, synthetic construct
  source 1..20: mol_type = other DNA
ggggccaaaggagaggaatg

SEQ ID NO: 176098 - DNA, 20 bp, synthetic construct
  source 1..20: mol_type = other DNA
cggggccaaaggagaggaat

SEQ ID NO: 176099 - DNA, 20 bp, synthetic construct
  source 1..20: mol_type = other DNA
acggggccaaaggagaggaa

SEQ ID NO: 176100 - DNA, 20 bp, synthetic construct
  source 1..20: mol_type = other DNA
gacggggccaaaggagagga

SEQ ID NO: 176101 - DNA, 20 bp, synthetic construct
  source 1..20: mol_type = other DNA
ggacggggccaaaggagagg

SEQ ID NO: 176102 - DNA, 20 bp, synthetic construct
  source 1..20: mol_type = other DNA
tggacggggccaaaggagag

SEQ ID NO: 176103 - DNA, 20 bp, synthetic construct
  source 1..20: mol_type = other DNA
gtggacggggccaaaggaga

SEQ ID NO: 176104 - DNA, 20 bp, synthetic construct
  source 1..20: mol_type = other DNA
ggtggacggggccaaaggag

SEQ ID NO: 176105 - DNA, 20 bp, synthetic construct
  source 1..20: mol_type = other DNA
gggtggacggggccaaagga

SEQ ID NO: 176106 - DNA, 20 bp, synthetic construct
  source 1..20: mol_type = other DNA
agggtggacggggccaaagg

SEQ ID NO: 176107 - DNA, 20 bp, synthetic construct
  source 1..20: mol_type = other DNA
tagggtggacggggccaaag

SEQ ID NO: 176108 - DNA, 20 bp, synthetic construct
  source 1..20: mol_type = other DNA
gtagggtggacggggccaaa

SEQ ID NO: 176109 - DNA, 20 bp, synthetic construct
  source 1..20: mol_type = other DNA
agtagggtggacggggccaa

SEQ ID NO: 176110 - DNA, 20 bp, synthetic construct
  source 1..20: mol_type = other DNA
cagtagggtggacggggcca

SEQ ID NO: 176111 - DNA, 20 bp, synthetic construct
  source 1..20: mol_type = other DNA
gcagtagggtggacggggcc

SEQ ID NO: 176112 - DNA, 20 bp, synthetic construct
  source 1..20: mol_type = other DNA
agcagtagggtggacggggc

SEQ ID NO: 176113 - DNA, 20 bp, synthetic construct
  source 1..20: mol_type = other DNA
tagcagtagggtggacgggg

SEQ ID NO: 176114 - DNA, 20 bp, synthetic construct
  source 1..20: mol_type = other DNA
ttagcagtagggtggacggg

SEQ ID NO: 176115 - DNA, 20 bp, synthetic construct
  source 1..20: mol_type = other DNA
tttagcagtagggtggacgg

SEQ ID NO: 176116 - DNA, 20 bp, synthetic construct
  source 1..20: mol_type = other DNA
atttagcagtagggtggacg

SEQ ID NO: 176117 - DNA, 20 bp, synthetic construct
  source 1..20: mol_type = other DNA
gatttagcagtagggtggac

SEQ ID NO: 176118 - DNA, 20 bp, synthetic construct
  source 1..20: mol_type = other DNA
ggatttagcagtagggtgga

SEQ ID NO: 176119 - DNA, 20 bp, synthetic construct
  source 1..20: mol_type = other DNA
tggatttagcagtagggtgg

SEQ ID NO: 176120 - DNA, 20 bp, synthetic construct
  source 1..20: mol_type = other DNA
ctggatttagcagtagggtg

SEQ ID NO: 176121 - DNA, 20 bp, synthetic construct
  source 1..20: mol_type = other DNA
cctggatttagcagtagggt

SEQ ID NO: 176122 - DNA, 20 bp, synthetic construct
  source 1..20: mol_type = other DNA
gcctggatttagcagtaggg

SEQ ID NO: 176123 - DNA, 20 bp, synthetic construct
  source 1..20: mol_type = other DNA
tgcctggatttagcagtagg

SEQ ID NO: 176124 - DNA, 20 bp, synthetic construct
  source 1..20: mol_type = other DNA
atgcctggatttagcagtag

SEQ ID NO: 176125 - DNA, 20 bp, synthetic construct
  source 1..20: mol_type = other DNA
gatgcctggatttagcagta

SEQ ID NO: 176126 - DNA, 20 bp, synthetic construct
  source 1..20: mol_type = other DNA
tgatgcctggatttagcagt

SEQ ID NO: 176127 - DNA, 20 bp, synthetic construct
  source 1..20: mol_type = other DNA
ttgatgcctggatttagcag

SEQ ID NO: 176128 - DNA, 20 bp, synthetic construct
  source 1..20: mol_type = other DNA
tttgatgcctggatttagca

SEQ ID NO: 176129 - DNA, 20 bp, synthetic construct
  source 1..20: mol_type = other DNA
ctttgatgcctggatttagc

SEQ ID NO: 176130 - DNA, 20 bp, synthetic construct
  source 1..20: mol_type = other DNA
tctttgatgcctggatttag

SEQ ID NO: 176131 - DNA, 20 bp, synthetic construct
  source 1..20: mol_type = other DNA
ctctttgatgcctggattta

SEQ ID NO: 176132 - DNA, 20 bp, synthetic construct
  source 1..20: mol_type = other DNA
tctctttgatgcctggattt

SEQ ID NO: 176133 - DNA, 20 bp, synthetic construct
  source 1..20: mol_type = other DNA
ttctctttgatgcctggatt

SEQ ID NO: 176134 - DNA, 20 bp, synthetic construct
  source 1..20: mol_type = other DNA
cttctctttgatgcctggat

SEQ ID NO: 176135 - DNA, 20 bp, synthetic construct
  source 1..20: mol_type = other DNA
tcttctctttgatgcctgga

SEQ ID NO: 176136 - DNA, 20 bp, synthetic construct
  source 1..20: mol_type = other DNA
ctcttctctttgatgcctgg

SEQ ID NO: 176137 - DNA, 20 bp, synthetic construct
  source 1..20: mol_type = other DNA
cctcttctctttgatgcctg

SEQ ID NO: 176138 - DNA, 20 bp, synthetic construct
  source 1..20: mol_type = other DNA
ccctcttctctttgatgcct

SEQ ID NO: 176139 - DNA, 20 bp, synthetic construct
  source 1..20: mol_type = other DNA
tccctcttctctttgatgcc

SEQ ID NO: 176140 - DNA, 20 bp, synthetic construct
  source 1..20: mol_type = other DNA
gtccctcttctctttgatgc

SEQ ID NO: 176141 - DNA, 20 bp, synthetic construct
  source 1..20: mol_type = other DNA
tgtccctcttctctttgatg

SEQ ID NO: 176142 - DNA, 20 bp, synthetic construct
  source 1..20: mol_type = other DNA
atgtccctcttctctttgat

SEQ ID NO: 176143 - DNA, 20 bp, synthetic construct
  source 1..20: mol_type = other DNA
tatgtccctcttctctttga

SEQ ID NO: 176144 - DNA, 20 bp, synthetic construct
  source 1..20: mol_type = other DNA
ttatgtccctcttctctttg

SEQ ID NO: 176145 - DNA, 20 bp, synthetic construct
  source 1..20: mol_type = other DNA
attatgtccctcttctcttt

SEQ ID NO: 176146 - DNA, 20 bp, synthetic construct
  source 1..20: mol_type = other DNA
aattatgtccctcttctctt

SEQ ID NO: 176147 - DNA, 20 bp, synthetic construct
  source 1..20: mol_type = other DNA
taattatgtccctcttctct

SEQ ID NO: 176148 - DNA, 20 bp, synthetic construct
  source 1..20: mol_type = other DNA
ataattatgtccctcttctc

SEQ ID NO: 176149 - DNA, 20 bp, synthetic construct
  source 1..20: mol_type = other DNA
gataattatgtccctcttct

SEQ ID NO: 176150 - DNA, 20 bp, synthetic construct
  source 1..20: mol_type = other DNA
agataattatgtccctcttc

SEQ ID NO: 176151 - DNA, 20 bp, synthetic construct
  source 1..20: mol_type = other DNA
gagataattatgtccctctt

SEQ ID NO: 176152 - DNA, 20 bp, synthetic construct
  source 1..20: mol_type = other DNA
agagataattatgtccctct

SEQ ID NO: 176153 - DNA, 20 bp, synthetic construct
  source 1..20: mol_type = other DNA
tagagataattatgtccctc

SEQ ID NO: 176154 - DNA, 20 bp, synthetic construct
  source 1..20: mol_type = other DNA
ctagagataattatgtccct

SEQ ID NO: 176155 - DNA, 20 bp, synthetic construct
  source 1..20: mol_type = other DNA
actagagataattatgtccc

SEQ ID NO: 176156 - DNA, 20 bp, synthetic construct
  source 1..20: mol_type = other DNA
gactagagataattatgtcc

SEQ ID NO: 176157 - DNA, 20 bp, synthetic construct
  source 1..20: mol_type = other DNA
ggactagagataattatgtc

SEQ ID NO: 176158 - DNA, 20 bp, synthetic construct
  source 1..20: mol_type = other DNA
gggactagagataattatgt

SEQ ID NO: 176159 - DNA, 20 bp, synthetic construct
  source 1..20: mol_type = other DNA
tgggactagagataattatg

SEQ ID NO: 176160 - DNA, 20 bp, synthetic construct
  source 1..20: mol_type = other DNA
ctgggactagagataattat

SEQ ID NO: 176161 - DNA, 20 bp, synthetic construct
  source 1..20: mol_type = other DNA
gctgggactagagataatta

SEQ ID NO: 176162 - DNA, 20 bp, synthetic construct
  source 1..20: mol_type = other DNA
agctgggactagagataatt

SEQ ID NO: 176163 - DNA, 20 bp, synthetic construct
  source 1..20: mol_type = other DNA
cagctgggactagagataat

SEQ ID NO: 176164 - DNA, 20 bp, synthetic construct
  source 1..20: mol_type = other DNA
gcagctgggactagagataa

SEQ ID NO: 176165 - DNA, 20 bp, synthetic construct
  source 1..20: mol_type = other DNA
agcagctgggactagagata

SEQ ID NO: 176166 - DNA, 20 bp, synthetic construct
  source 1..20: mol_type = other DNA
cagcagctgggactagagat

SEQ ID NO: 176167 - DNA, 20 bp, synthetic construct
  source 1..20: mol_type = other DNA
ccagcagctgggactagaga

SEQ ID NO: 176168 - DNA, 20 bp, synthetic construct
  source 1..20: mol_type = other DNA
accagcagctgggactagag

SEQ ID NO: 176169 - DNA, 20 bp, synthetic construct
  source 1..20: mol_type = other DNA
aaccagcagctgggactaga

SEQ ID NO: 176170 - DNA, 20 bp, synthetic construct
  source 1..20: mol_type = other DNA
aaaccagcagctgggactag

SEQ ID NO: 176171 - DNA, 20 bp, synthetic construct
  source 1..20: mol_type = other DNA
aaaaccagcagctgggacta

SEQ ID NO: 176172 - DNA, 20 bp, synthetic construct
  source 1..20: mol_type = other DNA
gaaaaccagcagctgggact

SEQ ID NO: 176173 - DNA, 20 bp, synthetic construct
  source 1..20: mol_type = other DNA
ggaaaaccagcagctgggac

SEQ ID NO: 176174 - DNA, 20 bp, synthetic construct
  source 1..20: mol_type = other DNA
aggaaaaccagcagctggga

SEQ ID NO: 176175 - DNA, 20 bp, synthetic construct
  source 1..20: mol_type = other DNA
aaggaaaaccagcagctggg

SEQ ID NO: 176176 - DNA, 20 bp, synthetic construct
  source 1..20: mol_type = other DNA
gaaggaaaaccagcagctgg

SEQ ID NO: 176177 - DNA, 20 bp, synthetic construct
  source 1..20: mol_type = other DNA
ggaaggaaaaccagcagctg

SEQ ID NO: 176178 - DNA, 20 bp, synthetic construct
  source 1..20: mol_type = other DNA
tggaaggaaaaccagcagct

SEQ ID NO: 176179 - DNA, 20 bp, synthetic construct
  source 1..20: mol_type = other DNA
ctggaaggaaaaccagcagc

SEQ ID NO: 176180 - DNA, 20 bp, synthetic construct
  source 1..20: mol_type = other DNA
gctggaaggaaaaccagcag

SEQ ID NO: 176181 - DNA, 20 bp, synthetic construct
  source 1..20: mol_type = other DNA
ggctggaaggaaaaccagca

SEQ ID NO: 176182 - DNA, 20 bp, synthetic construct
  source 1..20: mol_type = other DNA
aggctggaaggaaaaccagc

SEQ ID NO: 176183 - DNA, 20 bp, synthetic construct
  source 1..20: mol_type = other DNA
taggctggaaggaaaaccag

SEQ ID NO: 176184 - DNA, 20 bp, synthetic construct
  source 1..20: mol_type = other DNA
ataggctggaaggaaaacca

SEQ ID NO: 176185 - DNA, 20 bp, synthetic construct
  source 1..20: mol_type = other DNA
cataggctggaaggaaaacc

SEQ ID NO: 176186 - DNA, 20 bp, synthetic construct
  source 1..20: mol_type = other DNA
ccataggctggaaggaaaac

SEQ ID NO: 176187 - DNA, 20 bp, synthetic construct
  source 1..20: mol_type = other DNA
gccataggctggaaggaaaa

SEQ ID NO: 176188 - DNA, 20 bp, synthetic construct
  source 1..20: mol_type = other DNA
ggccataggctggaaggaaa

SEQ ID NO: 176189 - DNA, 20 bp, synthetic construct
  source 1..20: mol_type = other DNA
gggccataggctggaaggaa

SEQ ID NO: 176190 - DNA, 20 bp, synthetic construct
  source 1..20: mol_type = other DNA
tgggccataggctggaagga

SEQ ID NO: 176191 - DNA, 20 bp, synthetic construct
  source 1..20: mol_type = other DNA
ctgggccataggctggaagg

SEQ ID NO: 176192 - DNA, 20 bp, synthetic construct
  source 1..20: mol_type = other DNA
actgggccataggctggaag

SEQ ID NO: 176193 - DNA, 20 bp, synthetic construct
  source 1..20: mol_type = other DNA
aactgggccataggctggaa

SEQ ID NO: 176194 - DNA, 20 bp, synthetic construct
  source 1..20: mol_type = other DNA
aaactgggccataggctgga

SEQ ID NO: 176195 - DNA, 20 bp, synthetic construct
  source 1..20: mol_type = other DNA
aaaactgggccataggctgg

SEQ ID NO: 176196 - DNA, 20 bp, synthetic construct
  source 1..20: mol_type = other DNA
gaaaactgggccataggctg

SEQ ID NO: 176197 - DNA, 20 bp, synthetic construct
  source 1..20: mol_type = other DNA
agaaaactgggccataggct

SEQ ID NO: 176198 - DNA, 20 bp, synthetic construct
  source 1..20: mol_type = other DNA
cagaaaactgggccataggc

SEQ ID NO: 176199 - DNA, 20 bp, synthetic construct
  source 1..20: mol_type = other DNA
acagaaaactgggccatagg

SEQ ID NO: 176200 - DNA, 20 bp, synthetic construct
  source 1..20: mol_type = other DNA
aacagaaaactgggccatag

SEQ ID NO: 176201 - DNA, 20 bp, synthetic construct
  source 1..20: mol_type = other DNA
aaacagaaaactgggccata

SEQ ID NO: 176202 - DNA, 20 bp, synthetic construct
  source 1..20: mol_type = other DNA
aaaacagaaaactgggccat

SEQ ID NO: 176203 - DNA, 20 bp, synthetic construct
  source 1..20: mol_type = other DNA
taaaacagaaaactgggcca

SEQ ID NO: 176204 - DNA, 20 bp, synthetic construct
  source 1..20: mol_type = other DNA
gtaaaacagaaaactgggcc

SEQ ID NO: 176205 - DNA, 20 bp, synthetic construct
  source 1..20: mol_type = other DNA
agtaaaacagaaaactgggc

SEQ ID NO: 176206 - DNA, 20 bp, synthetic construct
  source 1..20: mol_type = other DNA
cagtaaaacagaaaactggg

SEQ ID NO: 176207 - DNA, 20 bp, synthetic construct
  source 1..20: mol_type = other DNA
tcagtaaaacagaaaactgg

SEQ ID NO: 176208 - DNA, 20 bp, synthetic construct
  source 1..20: mol_type = other DNA
ctcagtaaaacagaaaactg

SEQ ID NO: 176209 - DNA, 20 bp, synthetic construct
  source 1..20: mol_type = other DNA
tctcagtaaaacagaaaact

SEQ ID NO: 176210 - DNA, 20 bp, synthetic construct
  source 1..20: mol_type = other DNA
ttctcagtaaaacagaaaac

SEQ ID NO: 176211 - DNA, 20 bp, synthetic construct
  source 1..20: mol_type = other DNA
cttctcagtaaaacagaaaa

SEQ ID NO: 176212 - DNA, 20 bp, synthetic construct
  source 1..20: mol_type = other DNA
ccttctcagtaaaacagaaa

SEQ ID NO: 176213 - DNA, 20 bp, synthetic construct
  source 1..20: mol_type = other DNA
gccttctcagtaaaacagaa

SEQ ID NO: 176214 - DNA, 20 bp, synthetic construct
  source 1..20: mol_type = other DNA
agccttctcagtaaaacaga

SEQ ID NO: 176215 - DNA, 20 bp, synthetic construct
  source 1..20: mol_type = other DNA
cagccttctcagtaaaacag

SEQ ID NO: 176216 - DNA, 20 bp, synthetic construct
  source 1..20: mol_type = other DNA
ccagccttctcagtaaaaca

SEQ ID NO: 176217 - DNA, 20 bp, synthetic construct
  source 1..20: mol_type = other DNA
accagccttctcagtaaaac

SEQ ID NO: 176218 - DNA, 20 bp, synthetic construct
  source 1..20: mol_type = other DNA
caccagccttctcagtaaaa

SEQ ID NO: 176219 - DNA, 20 bp, synthetic construct
  source 1..20: mol_type = other DNA
tcaccagccttctcagtaaa

SEQ ID NO: 176220 - DNA, 20 bp, synthetic construct
  source 1..20: mol_type = other DNA
atcaccagccttctcagtaa

SEQ ID NO: 176221 - DNA, 20 bp, synthetic construct
  source 1..20: mol_type = other DNA
catcaccagccttctcagta

SEQ ID NO: 176222 - DNA, 20 bp, synthetic construct
  source 1..20: mol_type = other DNA
acatcaccagccttctcagt

SEQ ID NO: 176223 - DNA, 20 bp, synthetic construct
  source 1..20: mol_type = other DNA
aacatcaccagccttctcag

SEQ ID NO: 176224 - DNA, 20 bp, synthetic construct
  source 1..20: mol_type = other DNA
taacatcaccagccttctca

SEQ ID NO: 176225 - DNA, 20 bp, synthetic construct
  source 1..20: mol_type = other DNA
ataacatcaccagccttctc

SEQ ID NO: 176226 - DNA, 20 bp, synthetic construct
  source 1..20: mol_type = other DNA
gataacatcaccagccttct

SEQ ID NO: 176227 - DNA, 20 bp, synthetic construct
  source 1..20: mol_type = other DNA
agataacatcaccagccttc

SEQ ID NO: 176228 - DNA, 20 bp, synthetic construct
  source 1..20: mol_type = other DNA
aagataacatcaccagcctt

SEQ ID NO: 176229 - DNA, 20 bp, synthetic construct
  source 1..20: mol_type = other DNA
caagataacatcaccagcct

SEQ ID NO: 176230 - DNA, 20 bp, synthetic construct
  source 1..20: mol_type = other DNA
ccaagataacatcaccagcc

SEQ ID NO: 176231 - DNA, 20 bp, synthetic construct
  source 1..20: mol_type = other DNA
cccaagataacatcaccagc

SEQ ID NO: 176232 - DNA, 20 bp, synthetic construct
  source 1..20: mol_type = other DNA
tcccaagataacatcaccag

SEQ ID NO: 176233 - DNA, 20 bp, synthetic construct
  source 1..20: mol_type = other DNA
atcccaagataacatcacca

SEQ ID NO: 176234 - DNA, 20 bp, synthetic construct
  source 1..20: mol_type = other DNA
gatcccaagataacatcacc

SEQ ID NO: 176235 - DNA, 20 bp, synthetic construct
  source 1..20: mol_type = other DNA
agatcccaagataacatcac

SEQ ID NO: 176236 - DNA, 20 bp, synthetic construct
  source 1..20: mol_type = other DNA
tagatcccaagataacatca

SEQ ID NO: 176237 - DNA, 20 bp, synthetic construct
  source 1..20: mol_type = other DNA
ttagatcccaagataacatc

SEQ ID NO: 176238 - DNA, 20 bp, synthetic construct
  source 1..20: mol_type = other DNA
cttagatcccaagataacat

SEQ ID NO: 176239 - DNA, 20 bp, synthetic construct
  source 1..20: mol_type = other DNA
acttagatcccaagataaca

SEQ ID NO: 176240 - DNA, 20 bp, synthetic construct
  source 1..20: mol_type = other DNA
gacttagatcccaagataac

SEQ ID NO: 176241 - DNA, 20 bp, synthetic construct
  source 1..20: mol_type = other DNA
agacttagatcccaagataa

SEQ ID NO: 176242 - DNA, 20 bp, synthetic construct
  source 1..20: mol_type = other DNA
cagacttagatcccaagata

SEQ ID NO: 176243 - DNA, 20 bp, synthetic construct
  source 1..20: mol_type = other DNA
gcagacttagatcccaagat

SEQ ID NO: 176244 - DNA, 20 bp, synthetic construct
  source 1..20: mol_type = other DNA
tgcagacttagatcccaaga

SEQ ID NO: 176245 - DNA, 20 bp, synthetic construct
  source 1..20: mol_type = other DNA
ctgcagacttagatcccaag

SEQ ID NO: 176246 - DNA, 20 bp, synthetic construct
  source 1..20: mol_type = other DNA
actgcagacttagatcccaa

SEQ ID NO: 176247 - DNA, 20 bp, synthetic construct
  source 1..20: mol_type = other DNA
aactgcagacttagatccca

SEQ ID NO: 176248 - DNA, 20 bp, synthetic construct
  source 1..20: mol_type = other DNA
aaactgcagacttagatccc

SEQ ID NO: 176249 - DNA, 20 bp, synthetic construct
  source 1..20: mol_type = other DNA
gaaactgcagacttagatcc

SEQ ID NO: 176250 - DNA, 20 bp, synthetic construct
  source 1..20: mol_type = other DNA
tgaaactgcagacttagatc

SEQ ID NO: 176251 - DNA, 20 bp, synthetic construct
  source 1..20: mol_type = other DNA
gtgaaactgcagacttagat

SEQ ID NO: 176252 - DNA, 20 bp, synthetic construct
  source 1..20: mol_type = other DNA
ggtgaaactgcagacttaga

SEQ ID NO: 176253 - DNA, 20 bp, synthetic construct
  source 1..20: mol_type = other DNA
tggtgaaactgcagacttag

SEQ ID NO: 176254 - DNA, 20 bp, synthetic construct
  source 1..20: mol_type = other DNA
gtggtgaaactgcagactta

SEQ ID NO: 176255 - DNA, 20 bp, synthetic construct
  source 1..20: mol_type = other DNA
tgtggtgaaactgcagactt

SEQ ID NO: 176256 - DNA, 20 bp, synthetic construct
  source 1..20: mol_type = other DNA
ttgtggtgaaactgcagact

SEQ ID NO: 176257 - DNA, 20 bp, synthetic construct
  source 1..20: mol_type = other DNA
tttgtggtgaaactgcagac

SEQ ID NO: 176258 - DNA, 20 bp, synthetic construct
  source 1..20: mol_type = other DNA
ttttgtggtgaaactgcaga

SEQ ID NO: 176259 - DNA, 20 bp, synthetic construct
  source 1..20: mol_type = other DNA
tttttgtggtgaaactgcag

SEQ ID NO: 176260 - DNA, 20 bp, synthetic construct
  source 1..20: mol_type = other DNA
ctttttgtggtgaaactgca

SEQ ID NO: 176261 - DNA, 20 bp, synthetic construct
  source 1..20: mol_type = other DNA
actttttgtggtgaaactgc

SEQ ID NO: 176262 - DNA, 20 bp, synthetic construct
  source 1..20: mol_type = other DNA
gactttttgtggtgaaactg

SEQ ID NO: 176263 - DNA, 20 bp, synthetic construct
  source 1..20: mol_type = other DNA
ggactttttgtggtgaaact

SEQ ID NO: 176264 - DNA, 20 bp, synthetic construct
  source 1..20: mol_type = other DNA
tggactttttgtggtgaaac

SEQ ID NO: 176265 - DNA, 20 bp, synthetic construct
  source 1..20: mol_type = other DNA
ctggactttttgtggtgaaa

SEQ ID NO: 176266 - DNA, 20 bp, synthetic construct
  source 1..20: mol_type = other DNA
cctggactttttgtggtgaa

SEQ ID NO: 176267 - DNA, 20 bp, synthetic construct
  source 1..20: mol_type = other DNA
ccctggactttttgtggtga

SEQ ID NO: 176268 - DNA, 20 bp, synthetic construct
  source 1..20: mol_type = other DNA
tccctggactttttgtggtg

SEQ ID NO: 176269 - DNA, 20 bp, synthetic construct
  source 1..20: mol_type = other DNA
atccctggactttttgtggt

SEQ ID NO: 176270 - DNA, 20 bp, synthetic construct
  source 1..20: mol_type = other DNA
catccctggactttttgtgg

SEQ ID NO: 176271 - DNA, 20 bp, synthetic construct
  source 1..20: mol_type = other DNA
gcatccctggactttttgtg

SEQ ID NO: 176272 - DNA, 20 bp, synthetic construct
  source 1..20: mol_type = other DNA
tgcatccctggactttttgt

SEQ ID NO: 176273 - DNA, 20 bp, synthetic construct
  source 1..20: mol_type = other DNA
gtgcatccctggactttttg

SEQ ID NO: 176274 - DNA, 20 bp, synthetic construct
  source 1..20: mol_type = other DNA
agtgcatccctggacttttt

SEQ ID NO: 176275 - DNA, 20 bp, synthetic construct
  source 1..20: mol_type = other DNA
aagtgcatccctggactttt

SEQ ID NO: 176276 - DNA, 20 bp, synthetic construct
  source 1..20: mol_type = other DNA
aaagtgcatccctggacttt

SEQ ID NO: 176277 - DNA, 20 bp, synthetic construct
  source 1..20: mol_type = other DNA
gaaagtgcatccctggactt

SEQ ID NO: 176278 - DNA, 20 bp, synthetic construct
  source 1..20: mol_type = other DNA
tgaaagtgcatccctggact

SEQ ID NO: 176279 - DNA, 20 bp, synthetic construct
  source 1..20: mol_type = other DNA
atgaaagtgcatccctggac

SEQ ID NO: 176280 - DNA, 20 bp, synthetic construct
  source 1..20: mol_type = other DNA
catgaaagtgcatccctgga

SEQ ID NO: 176281 - DNA, 20 bp, synthetic construct
  source 1..20: mol_type = other DNA
gcatgaaagtgcatccctgg

SEQ ID NO: 176282 - DNA, 20 bp, synthetic construct
  source 1..20: mol_type = other DNA
agcatgaaagtgcatccctg

SEQ ID NO: 176283 - DNA, 20 bp, synthetic construct
  source 1..20: mol_type = other DNA
aagcatgaaagtgcatccct

SEQ ID NO: 176284 - DNA, 20 bp, synthetic construct
  source 1..20: mol_type = other DNA
caagcatgaaagtgcatccc

SEQ ID NO: 176285 - DNA, 20 bp, synthetic construct
  source 1..20: mol_type = other DNA
acaagcatgaaagtgcatcc

SEQ ID NO: 176286 - DNA, 20 bp, synthetic construct
  source 1..20: mol_type = other DNA
cacaagcatgaaagtgcatc

SEQ ID NO: 176287 - DNA, 20 bp, synthetic construct
  source 1..20: mol_type = other DNA
acacaagcatgaaagtgcat

SEQ ID NO: 176288 - DNA, 20 bp, synthetic construct
  source 1..20: mol_type = other DNA
gacacaagcatgaaagtgca

SEQ ID NO: 176289 - DNA, 20 bp, synthetic construct
  source 1..20: mol_type = other DNA
ggacacaagcatgaaagtgc

SEQ ID NO: 176290 - DNA, 20 bp, synthetic construct
  source 1..20: mol_type = other DNA
aggacacaagcatgaaagtg

SEQ ID NO: 176291 - DNA, 20 bp, synthetic construct
  source 1..20: mol_type = other DNA
gaggacacaagcatgaaagt

SEQ ID NO: 176292 - DNA, 20 bp, synthetic construct
  source 1..20: mol_type = other DNA
ggaggacacaagcatgaaag

SEQ ID NO: 176293 - DNA, 20 bp, synthetic construct
  source 1..20: mol_type = other DNA
aggaggacacaagcatgaaa

SEQ ID NO: 176294 - DNA, 20 bp, synthetic construct
  source 1..20: mol_type = other DNA
gaggaggacacaagcatgaa

SEQ ID NO: 176295 - DNA, 20 bp, synthetic construct
  source 1..20: mol_type = other DNA
ggaggaggacacaagcatga

SEQ ID NO: 176296 - DNA, 20 bp, synthetic construct
  source 1..20: mol_type = other DNA
gggaggaggacacaagcatg

SEQ ID NO: 176297 - DNA, 20 bp, synthetic construct
  source 1..20: mol_type = other DNA
agggaggaggacacaagcat

SEQ ID NO: 176298 - DNA, 20 bp, synthetic construct
  source 1..20: mol_type = other DNA
cagggaggaggacacaagca

SEQ ID NO: 176299 - DNA, 20 bp, synthetic construct
  source 1..20: mol_type = other DNA
ccagggaggaggacacaagc

SEQ ID NO: 176300 - DNA, 20 bp, synthetic construct
  source 1..20: mol_type = other DNA
cccagggaggaggacacaag

SEQ ID NO: 176301 - DNA, 20 bp, synthetic construct
  source 1..20: mol_type = other DNA
tcccagggaggaggacacaa

SEQ ID NO: 176302 - DNA, 20 bp, synthetic construct
  source 1..20: mol_type = other DNA
atcccagggaggaggacaca

SEQ ID NO: 176303 - DNA, 20 bp, synthetic construct
  source 1..20: mol_type = other DNA
tatcccagggaggaggacac

SEQ ID NO: 176304 - DNA, 20 bp, synthetic construct
  source 1..20: mol_type = other DNA
ctatcccagggaggaggaca

SEQ ID NO: 176305 - DNA, 20 bp, synthetic construct
  source 1..20: mol_type = other DNA
gctatcccagggaggaggac

SEQ ID NO: 176306 - DNA, 20 bp, synthetic construct
  source 1..20: mol_type = other DNA
tgctatcccagggaggagga

SEQ ID NO: 176307 - DNA, 20 bp, synthetic construct
  source 1..20: mol_type = other DNA
ttgctatcccagggaggagg

SEQ ID NO: 176308 - DNA, 20 bp, synthetic construct
  source 1..20: mol_type = other DNA
cttgctatcccagggaggag

SEQ ID NO: 176309 - DNA, 20 bp, synthetic construct
  source 1..20: mol_type = other DNA
ccttgctatcccagggagga

SEQ ID NO: 176310 - DNA, 20 bp, synthetic construct
  source 1..20: mol_type = other DNA
tccttgctatcccagggagg

SEQ ID NO: 176311 - DNA, 20 bp, synthetic construct
  source 1..20: mol_type = other DNA
atccttgctatcccagggag

SEQ ID NO: 176312 - DNA, 20 bp, synthetic construct
  source 1..20: mol_type = other DNA
tatccttgctatcccaggga

SEQ ID NO: 176313 - DNA, 20 bp, synthetic construct
  source 1..20: mol_type = other DNA
atatccttgctatcccaggg

SEQ ID NO: 176314 - DNA, 20 bp, synthetic construct
  source 1..20: mol_type = other DNA
aatatccttgctatcccagg

SEQ ID NO: 176315 - DNA, 20 bp, synthetic construct
  source 1..20: mol_type = other DNA
taatatccttgctatcccag

SEQ ID NO: 176316 - DNA, 20 bp, synthetic construct
  source 1..20: mol_type = other DNA
ctaatatccttgctatccca

SEQ ID NO: 176317 - DNA, 20 bp, synthetic construct
  source 1..20: mol_type = other DNA
tctaatatccttgctatccc

SEQ ID NO: 176318 - DNA, 20 bp, synthetic construct
  source 1..20: mol_type = other DNA
ttctaatatccttgctatcc

SEQ ID NO: 176319 - DNA, 20 bp, synthetic construct
  source 1..20: mol_type = other DNA
cttctaatatccttgctatc

SEQ ID NO: 176320 - DNA, 20 bp, synthetic construct
  source 1..20: mol_type = other DNA
tcttctaatatccttgctat

SEQ ID NO: 176321 - DNA, 20 bp, synthetic construct
  source 1..20: mol_type = other DNA
gtcttctaatatccttgcta

SEQ ID NO: 176322 - DNA, 20 bp, synthetic construct
  source 1..20: mol_type = other DNA
ggtcttctaatatccttgct

SEQ ID NO: 176323 - DNA, 20 bp, synthetic construct
  source 1..20: mol_type = other DNA
gggtcttctaatatccttgc

SEQ ID NO: 176324 - DNA, 20 bp, synthetic construct
  source 1..20: mol_type = other DNA
ggggtcttctaatatccttg

SEQ ID NO: 176325 - DNA, 20 bp, synthetic construct
  source 1..20: mol_type = other DNA
aggggtcttctaatatcctt

SEQ ID NO: 176326 - DNA, 20 bp, synthetic construct
  source 1..20: mol_type = other DNA
caggggtcttctaatatcct

SEQ ID NO: 176327 - DNA, 20 bp, synthetic construct
  source 1..20: mol_type = other DNA
ccaggggtcttctaatatcc

SEQ ID NO: 176328 - DNA, 20 bp, synthetic construct
  source 1..20: mol_type = other DNA
gccaggggtcttctaatatc

SEQ ID NO: 176329 - DNA, 20 bp, synthetic construct
  source 1..20: mol_type = other DNA
agccaggggtcttctaatat

SEQ ID NO: 176330 - DNA, 20 bp, synthetic construct
  source 1..20: mol_type = other DNA
gagccaggggtcttctaata

SEQ ID NO: 176331 - DNA, 20 bp, synthetic construct
  source 1..20: mol_type = other DNA
agagccaggggtcttctaat

SEQ ID NO: 176332 - DNA, 20 bp, synthetic construct
  source 1..20: mol_type = other DNA
cagagccaggggtcttctaa

SEQ ID NO: 176333 - DNA, 20 bp, synthetic construct
  source 1..20: mol_type = other DNA
acagagccaggggtcttcta

SEQ ID NO: 176334 - DNA, 20 bp, synthetic construct
  source 1..20: mol_type = other DNA
tacagagccaggggtcttct

SEQ ID NO: 176335 - DNA, 20 bp, synthetic construct
  source 1..20: mol_type = other DNA
ttacagagccaggggtcttc

SEQ ID NO: 176336 - DNA, 20 bp, synthetic construct
  source 1..20: mol_type = other DNA
attacagagccaggggtctt

SEQ ID NO: 176337 - DNA, 20 bp, synthetic construct
  source 1..20: mol_type = other DNA
aattacagagccaggggtct

SEQ ID NO: 176338 - DNA, 20 bp, synthetic construct
  source 1..20: mol_type = other DNA
caattacagagccaggggtc

SEQ ID NO: 176339 - DNA, 20 bp, synthetic construct
  source 1..20: mol_type = other DNA
gcaattacagagccaggggt

SEQ ID NO: 176340 - DNA, 20 bp, synthetic construct
  source 1..20: mol_type = other DNA
agcaattacagagccagggg

SEQ ID NO: 176341 - DNA, 20 bp, synthetic construct
  source 1..20: mol_type = other DNA
aagcaattacagagccaggg

SEQ ID NO: 176342 - DNA, 20 bp, synthetic construct
  source 1..20: mol_type = other DNA
caagcaattacagagccagg

SEQ ID NO: 176343 - DNA, 20 bp, synthetic construct
  source 1..20: mol_type = other DNA
acaagcaattacagagccag

SEQ ID NO: 176344 - DNA, 20 bp, synthetic construct
  source 1..20: mol_type = other DNA
gacaagcaattacagagcca

SEQ ID NO: 176345 - DNA, 20 bp, synthetic construct
  source 1..20: mol_type = other DNA
tgacaagcaattacagagcc

SEQ ID NO: 176346 - DNA, 20 bp, synthetic construct
  source 1..20: mol_type = other DNA
atgacaagcaattacagagc

SEQ ID NO: 176347 - DNA, 20 bp, synthetic construct
  source 1..20: mol_type = other DNA
catgacaagcaattacagag

SEQ ID NO: 176348 - DNA, 20 bp, synthetic construct
  source 1..20: mol_type = other DNA
acatgacaagcaattacaga

SEQ ID NO: 176349 - DNA, 20 bp, synthetic construct
  source 1..20: mol_type = other DNA
cacatgacaagcaattacag

SEQ ID NO: 176350 - DNA, 20 bp, synthetic construct
  source 1..20: mol_type = other DNA
gcacatgacaagcaattaca

SEQ ID NO: 176351 - DNA, 20 bp, synthetic construct
  source 1..20: mol_type = other DNA
agcacatgacaagcaattac

SEQ ID NO: 176352 - DNA, 20 bp, synthetic construct
  source 1..20: mol_type = other DNA
gagcacatgacaagcaatta

SEQ ID NO: 176353 - DNA, 20 bp, synthetic construct
  source 1..20: mol_type = other DNA
agagcacatgacaagcaatt

SEQ ID NO: 176354 - DNA, 20 bp, synthetic construct
  source 1..20: mol_type = other DNA
tagagcacatgacaagcaat

SEQ ID NO: 176355 - DNA, 20 bp, synthetic construct
  source 1..20: mol_type = other DNA
gtagagcacatgacaagcaa

SEQ ID NO: 176356 - DNA, 20 bp, synthetic construct
  source 1..20: mol_type = other DNA
tgtagagcacatgacaagca

SEQ ID NO: 176357 - DNA, 20 bp, synthetic construct
  source 1..20: mol_type = other DNA
ctgtagagcacatgacaagc

SEQ ID NO: 176358 - DNA, 20 bp, synthetic construct
  source 1..20: mol_type = other DNA
tctgtagagcacatgacaag

SEQ ID NO: 176359 - DNA, 20 bp, synthetic construct
  source 1..20: mol_type = other DNA
gtctgtagagcacatgacaa

SEQ ID NO: 176360 - DNA, 20 bp, synthetic construct
  source 1..20: mol_type = other DNA
cgtctgtagagcacatgaca

SEQ ID NO: 176361 - DNA, 20 bp, synthetic construct
  source 1..20: mol_type = other DNA
gcgtctgtagagcacatgac

SEQ ID NO: 176362 - DNA, 20 bp, synthetic construct
  source 1..20: mol_type = other DNA
ggcgtctgtagagcacatga

SEQ ID NO: 176363 - DNA, 20 bp, synthetic construct
  source 1..20: mol_type = other DNA
tggcgtctgtagagcacatg

SEQ ID NO: 176364 - DNA, 20 bp, synthetic construct
  source 1..20: mol_type = other DNA
gtggcgtctgtagagcacat

SEQ ID NO: 176365 - DNA, 20 bp, synthetic construct
  source 1..20: mol_type = other DNA
tgtggcgtctgtagagcaca

SEQ ID NO: 176366 - DNA, 20 bp, synthetic construct
  source 1..20: mol_type = other DNA
ctgtggcgtctgtagagcac

SEQ ID NO: 176367 - DNA, 20 bp, synthetic construct
  source 1..20: mol_type = other DNA
tctgtggcgtctgtagagca

SEQ ID NO: 176368 - DNA, 20 bp, synthetic construct
  source 1..20: mol_type = other DNA
ttctgtggcgtctgtagagc

SEQ ID NO: 176369 - DNA, 20 bp, synthetic construct
  source 1..20: mol_type = other DNA
attctgtggcgtctgtagag

SEQ ID NO: 176370 - DNA, 20 bp, synthetic construct
  source 1..20: mol_type = other DNA
cattctgtggcgtctgtaga

SEQ ID NO: 176371 - DNA, 20 bp, synthetic construct
  source 1..20: mol_type = other DNA
gcattctgtggcgtctgtag

SEQ ID NO: 176372 - DNA, 20 bp, synthetic construct
  source 1..20: mol_type = other DNA
ggcattctgtggcgtctgta

SEQ ID NO: 176373 - DNA, 20 bp, synthetic construct
  source 1..20: mol_type = other DNA
tggcattctgtggcgtctgt

SEQ ID NO: 176374 - DNA, 20 bp, synthetic construct
  source 1..20: mol_type = other DNA
ttggcattctgtggcgtctg

SEQ ID NO: 176375 - DNA, 20 bp, synthetic construct
  source 1..20: mol_type = other DNA
cttggcattctgtggcgtct

SEQ ID NO: 176376 - DNA, 20 bp, synthetic construct
  source 1..20: mol_type = other DNA
tcttggcattctgtggcgtc

SEQ ID NO: 176377 - DNA, 20 bp, synthetic construct
  source 1..20: mol_type = other DNA
ttcttggcattctgtggcgt

SEQ ID NO: 176378 - DNA, 20 bp, synthetic construct
  source 1..20: mol_type = other DNA
gttcttggcattctgtggcg

SEQ ID NO: 176379 - DNA, 20 bp, synthetic construct
  source 1..20: mol_type = other DNA
cgttcttggcattctgtggc

SEQ ID NO: 176380 - DNA, 20 bp, synthetic construct
  source 1..20: mol_type = other DNA
tcgttcttggcattctgtgg

SEQ ID NO: 176381 - DNA, 20 bp, synthetic construct
  source 1..20: mol_type = other DNA
ttcgttcttggcattctgtg

SEQ ID NO: 176382 - DNA, 20 bp, synthetic construct
  source 1..20: mol_type = other DNA
cttcgttcttggcattctgt

SEQ ID NO: 176383 - DNA, 20 bp, synthetic construct
  source 1..20: mol_type = other DNA
acttcgttcttggcattctg

SEQ ID NO: 176384 - DNA, 20 bp, synthetic construct
  source 1..20: mol_type = other DNA
cacttcgttcttggcattct

SEQ ID NO: 176385 - DNA, 20 bp, synthetic construct
  source 1..20: mol_type = other DNA
gcacttcgttcttggcattc

SEQ ID NO: 176386 - DNA, 20 bp, synthetic construct
  source 1..20: mol_type = other DNA
agcacttcgttcttggcatt

SEQ ID NO: 176387 - DNA, 20 bp, synthetic construct
  source 1..20: mol_type = other DNA
cagcacttcgttcttggcat

SEQ ID NO: 176388 - DNA, 20 bp, synthetic construct
  source 1..20: mol_type = other DNA
ccagcacttcgttcttggca

SEQ ID NO: 176389 - DNA, 20 bp, synthetic construct
  source 1..20: mol_type = other DNA
cccagcacttcgttcttggc

SEQ ID NO: 176390 - DNA, 20 bp, synthetic construct
  source 1..20: mol_type = other DNA
tcccagcacttcgttcttgg

SEQ ID NO: 176391 - DNA, 20 bp, synthetic construct
  source 1..20: mol_type = other DNA
ttcccagcacttcgttcttg

SEQ ID NO: 176392 - DNA, 20 bp, synthetic construct
  source 1..20: mol_type = other DNA
cttcccagcacttcgttctt

SEQ ID NO: 176393 - DNA, 20 bp, synthetic construct
  source 1..20: mol_type = other DNA
ccttcccagcacttcgttct

SEQ ID NO: 176394 - DNA, 20 bp, synthetic construct
  source 1..20: mol_type = other DNA
tccttcccagcacttcgttc

SEQ ID NO: 176395 - DNA, 20 bp, synthetic construct
  source 1..20: mol_type = other DNA
gtccttcccagcacttcgtt

SEQ ID NO: 176396 - DNA, 20 bp, synthetic construct
  source 1..20: mol_type = other DNA
tgtccttcccagcacttcgt

SEQ ID NO: 176397 - DNA, 20 bp, synthetic construct
  source 1..20: mol_type = other DNA
ttgtccttcccagcacttcg

SEQ ID NO: 176398 - DNA, 20 bp, synthetic construct
  source 1..20: mol_type = other DNA
tttgtccttcccagcacttc

SEQ ID NO: 176399 - DNA, 20 bp, synthetic construct
  source 1..20: mol_type = other DNA
atttgtccttcccagcactt

SEQ ID NO: 176400 - DNA, 20 bp, synthetic construct
  source 1..20: mol_type = other DNA
aatttgtccttcccagcact

SEQ ID NO: 176401 - DNA, 20 bp, synthetic construct
  source 1..20: mol_type = other DNA
gaatttgtccttcccagcac

SEQ ID NO: 176402 - DNA, 20 bp, synthetic construct
  source 1..20: mol_type = other DNA
tgaatttgtccttcccagca

SEQ ID NO: 176403 - DNA, 20 bp, synthetic construct
  source 1..20: mol_type = other DNA
atgaatttgtccttcccagc

SEQ ID NO: 176404 - DNA, 20 bp, synthetic construct
  source 1..20: mol_type = other DNA
catgaatttgtccttcccag

SEQ ID NO: 176405 - DNA, 20 bp, synthetic construct
  source 1..20: mol_type = other DNA
ccatgaatttgtccttccca

SEQ ID NO: 176406 - DNA, 20 bp, synthetic construct
  source 1..20: mol_type = other DNA
tccatgaatttgtccttccc

SEQ ID NO: 176407 - DNA, 20 bp, synthetic construct
  source 1..20: mol_type = other DNA
ttccatgaatttgtccttcc

SEQ ID NO: 176408 - DNA, 20 bp, synthetic construct
  source 1..20: mol_type = other DNA
gttccatgaatttgtccttc

SEQ ID NO: 176409 - DNA, 20 bp, synthetic construct
  source 1..20: mol_type = other DNA
ggttccatgaatttgtcctt

SEQ ID NO: 176410 - DNA, 20 bp, synthetic construct
  source 1..20: mol_type = other DNA
cggttccatgaatttgtcct

SEQ ID NO: 176411 - DNA, 20 bp, synthetic construct
  source 1..20: mol_type = other DNA
acggttccatgaatttgtcc

SEQ ID NO: 176412 - DNA, 20 bp, synthetic construct
  source 1..20: mol_type = other DNA
cacggttccatgaatttgtc

SEQ ID NO: 176413 - DNA, 20 bp, synthetic construct
  source 1..20: mol_type = other DNA
ccacggttccatgaatttgt

SEQ ID NO: 176414 - DNA, 20 bp, synthetic construct
  source 1..20: mol_type = other DNA
cccacggttccatgaatttg

SEQ ID NO: 176415 - DNA, 20 bp, synthetic construct
  source 1..20: mol_type = other DNA
tcccacggttccatgaattt

SEQ ID NO: 176416 - DNA, 20 bp, synthetic construct
  source 1..20: mol_type = other DNA
gtcccacggttccatgaatt

SEQ ID NO: 176417 - DNA, 20 bp, synthetic construct
  source 1..20: mol_type = other DNA
cgtcccacggttccatgaat

SEQ ID NO: 176418 - DNA, 20 bp, synthetic construct
  source 1..20: mol_type = other DNA
ccgtcccacggttccatgaa

SEQ ID NO: 176419 - DNA, 20 bp, synthetic construct
  source 1..20: mol_type = other DNA
accgtcccacggttccatga

SEQ ID NO: 176420 - DNA, 20 bp, synthetic construct
  source 1..20: mol_type = other DNA
caccgtcccacggttccatg

SEQ ID NO: 176421 - DNA, 20 bp, synthetic construct
  source 1..20: mol_type = other DNA
gcaccgtcccacggttccat

SEQ ID NO: 176422 - DNA, 20 bp, synthetic construct
  source 1..20: mol_type = other DNA
agcaccgtcccacggttcca

SEQ ID NO: 176423 - DNA, 20 bp, synthetic construct
  source 1..20: mol_type = other DNA
gagcaccgtcccacggttcc

SEQ ID NO: 176424 - DNA, 20 bp, synthetic construct
  source 1..20: mol_type = other DNA
ggagcaccgtcccacggttc

SEQ ID NO: 176425 - DNA, 20 bp, synthetic construct
  source 1..20: mol_type = other DNA
aggagcaccgtcccacggtt

SEQ ID NO: 176426 - DNA, 20 bp, synthetic construct
  source 1..20: mol_type = other DNA
gaggagcaccgtcccacggt

SEQ ID NO: 176427 - DNA, 20 bp, synthetic construct
  source 1..20: mol_type = other DNA
ggaggagcaccgtcccacgg

SEQ ID NO: 176428 - DNA, 20 bp, synthetic construct
  source 1..20: mol_type = other DNA
gggaggagcaccgtcccacg

SEQ ID NO: 176429 - DNA, 20 bp, synthetic construct
  source 1..20: mol_type = other DNA
ggggaggagcaccgtcccac

SEQ ID NO: 176430 - DNA, 20 bp, synthetic construct
  source 1..20: mol_type = other DNA
gggggaggagcaccgtccca

SEQ ID NO: 176431 - DNA, 20 bp, synthetic construct
  source 1..20: mol_type = other DNA
tgggggaggagcaccgtccc

SEQ ID NO: 176432 - DNA, 20 bp, synthetic construct
  source 1..20: mol_type = other DNA
ctgggggaggagcaccgtcc

SEQ ID NO: 176433 - DNA, 20 bp, synthetic construct
  source 1..20: mol_type = other DNA
gctgggggaggagcaccgtc

SEQ ID NO: 176434 - DNA, 20 bp, synthetic construct
  source 1..20: mol_type = other DNA
cgctgggggaggagcaccgt

SEQ ID NO: 176435 - DNA, 20 bp, synthetic construct
  source 1..20: mol_type = other DNA
acgctgggggaggagcaccg

SEQ ID NO: 176436 - DNA, 20 bp, synthetic construct
  source 1..20: mol_type = other DNA
tacgctgggggaggagcacc

SEQ ID NO: 176437 - DNA, 20 bp, synthetic construct
  source 1..20: mol_type = other DNA
ttacgctgggggaggagcac

SEQ ID NO: 176438 - DNA, 20 bp, synthetic construct
  source 1..20: mol_type = other DNA
tttacgctgggggaggagca

SEQ ID NO: 176439 - DNA, 20 bp, synthetic construct
  source 1..20: mol_type = other DNA
ctttacgctgggggaggagc

SEQ ID NO: 176440 - DNA, 20 bp, synthetic construct
  source 1..20: mol_type = other DNA
cctttacgctgggggaggag

SEQ ID NO: 176441 - DNA, 20 bp, synthetic construct
  source 1..20: mol_type = other DNA
tcctttacgctgggggagga

SEQ ID NO: 176442 - DNA, 20 bp, synthetic construct
  source 1..20: mol_type = other DNA
gtcctttacgctgggggagg

SEQ ID NO: 176443 - DNA, 20 bp, synthetic construct
  source 1..20: mol_type = other DNA
tgtcctttacgctgggggag

SEQ ID NO: 176444 - DNA, 20 bp, synthetic construct
  source 1..20: mol_type = other DNA
ctgtcctttacgctggggga

SEQ ID NO: 176445 - DNA, 20 bp, synthetic construct
  source 1..20: mol_type = other DNA
gctgtcctttacgctggggg

SEQ ID NO: 176446 - DNA, 20 bp, synthetic construct
  source 1..20: mol_type = other DNA
agctgtcctttacgctgggg

SEQ ID NO: 176447 - DNA, 20 bp, synthetic construct
  source 1..20: mol_type = other DNA
gagctgtcctttacgctggg

SEQ ID NO: 176448 - DNA, 20 bp, synthetic construct
  source 1..20: mol_type = other DNA
ggagctgtcctttacgctgg

SEQ ID NO: 176449 - DNA, 20 bp, synthetic construct
  source 1..20: mol_type = other DNA
aggagctgtcctttacgctg

SEQ ID NO: 176450 - DNA, 20 bp, synthetic construct
  source 1..20: mol_type = other DNA
gaggagctgtcctttacgct

SEQ ID NO: 176451 - DNA, 20 bp, synthetic construct
  source 1..20: mol_type = other DNA
ggaggagctgtcctttacgc

SEQ ID NO: 176452 - DNA, 20 bp, synthetic construct
  source 1..20: mol_type = other DNA
aggaggagctgtcctttacg

SEQ ID NO: 176453 - DNA, 20 bp, synthetic construct
  source 1..20: mol_type = other DNA
gaggaggagctgtcctttac

SEQ ID NO: 176454 - DNA, 20 bp, synthetic construct
  source 1..20: mol_type = other DNA
ggaggaggagctgtccttta

SEQ ID NO: 176455 - DNA, 20 bp, synthetic construct
  source 1..20: mol_type = other DNA
aggaggaggagctgtccttt

SEQ ID NO: 176456 - DNA, 20 bp, synthetic construct
  source 1..20: mol_type = other DNA
caggaggaggagctgtcctt

SEQ ID NO: 176457 - DNA, 20 bp, synthetic construct
  source 1..20: mol_type = other DNA
tcaggaggaggagctgtcct

SEQ ID NO: 176458 - DNA, 20 bp, synthetic construct
  source 1..20: mol_type = other DNA
ttcaggaggaggagctgtcc

SEQ ID NO: 176459 - DNA, 20 bp, synthetic construct
  source 1..20: mol_type = other DNA
attcaggaggaggagctgtc

SEQ ID NO: 176460 - DNA, 20 bp, synthetic construct
  source 1..20: mol_type = other DNA
aattcaggaggaggagctgt

SEQ ID NO: 176461 - DNA, 20 bp, synthetic construct
  source 1..20: mol_type = other DNA
caattcaggaggaggagctg

SEQ ID NO: 176462 - DNA, 20 bp, synthetic construct
  source 1..20: mol_type = other DNA
ccaattcaggaggaggagct

SEQ ID NO: 176463 - DNA, 20 bp, synthetic construct
  source 1..20: mol_type = other DNA
tccaattcaggaggaggagc

SEQ ID NO: 176464 - DNA, 20 bp, synthetic construct
  source 1..20: mol_type = other DNA
ctccaattcaggaggaggag

SEQ ID NO: 176465 - DNA, 20 bp, synthetic construct
  source 1..20: mol_type = other DNA
gctccaattcaggaggagga

SEQ ID NO: 176466 - DNA, 20 bp, synthetic construct
  source 1..20: mol_type = other DNA
ggctccaattcaggaggagg

SEQ ID NO: 176467 - DNA, 20 bp, synthetic construct
  source 1..20: mol_type = other DNA
tggctccaattcaggaggag

SEQ ID NO: 176468 - DNA, 20 bp, synthetic construct
  source 1..20: mol_type = other DNA
ctggctccaattcaggagga

SEQ ID NO: 176469 - DNA, 20 bp, synthetic construct
  source 1..20: mol_type = other DNA
gctggctccaattcaggagg

SEQ ID NO: 176470 - DNA, 20 bp, synthetic construct
  source 1..20: mol_type = other DNA
cgctggctccaattcaggag

SEQ ID NO: 176471 - DNA, 20 bp, synthetic construct
  source 1..20: mol_type = other DNA
acgctggctccaattcagga

SEQ ID NO: 176472 - DNA, 20 bp, synthetic construct
  source 1..20: mol_type = other DNA
aacgctggctccaattcagg

SEQ ID NO: 176473 - DNA, 20 bp, synthetic construct
  source 1..20: mol_type = other DNA
gaacgctggctccaattcag

SEQ ID NO: 176474 - DNA, 20 bp, synthetic construct
  source 1..20: mol_type = other DNA
agaacgctggctccaattca

SEQ ID NO: 176475 - DNA, 20 bp, synthetic construct
  source 1..20: mol_type = other DNA
tagaacgctggctccaattc

SEQ ID NO: 176476 - DNA, 20 bp, synthetic construct
  source 1..20: mol_type = other DNA
ttagaacgctggctccaatt

SEQ ID NO: 176477 - DNA, 20 bp, synthetic construct
  source 1..20: mol_type = other DNA
tttagaacgctggctccaat

SEQ ID NO: 176478 - DNA, 20 bp, synthetic construct
  source 1..20: mol_type = other DNA
atttagaacgctggctccaa

SEQ ID NO: 176479 - DNA, 20 bp, synthetic construct
  source 1..20: mol_type = other DNA
gatttagaacgctggctcca

SEQ ID NO: 176480 - DNA, 20 bp, synthetic construct
  source 1..20: mol_type = other DNA
tgatttagaacgctggctcc

SEQ ID NO: 176481 - DNA, 20 bp, synthetic construct
  source 1..20: mol_type = other DNA
atgatttagaacgctggctc

SEQ ID NO: 176482 - DNA, 20 bp, synthetic construct
  source 1..20: mol_type = other DNA
catgatttagaacgctggct

SEQ ID NO: 176483 - DNA, 20 bp, synthetic construct
  source 1..20: mol_type = other DNA
acatgatttagaacgctggc

SEQ ID NO: 176484 - DNA, 20 bp, synthetic construct
  source 1..20: mol_type = other DNA
cacatgatttagaacgctgg

SEQ ID NO: 176485 - DNA, 20 bp, synthetic construct
  source 1..20: mol_type = other DNA
acacatgatttagaacgctg

SEQ ID NO: 176486 - DNA, 20 bp, synthetic construct
  source 1..20: mol_type = other DNA
gacacatgatttagaacgct

SEQ ID NO: 176487 - DNA, 20 bp, synthetic construct
  source 1..20: mol_type = other DNA
tgacacatgatttagaacgc

SEQ ID NO: 176488 - DNA, 20 bp, synthetic construct
  source 1..20: mol_type = other DNA
ttgacacatgatttagaacg

SEQ ID NO: 176489 - DNA, 20 bp, synthetic construct
  source 1..20: mol_type = other DNA
gttgacacatgatttagaac

SEQ ID NO: 176490 - DNA, 20 bp, synthetic construct
  source 1..20: mol_type = other DNA
tgttgacacatgatttagaa

SEQ ID NO: 176491 - DNA, 20 bp, synthetic construct
  source 1..20: mol_type = other DNA
ctgttgacacatgatttaga

SEQ ID NO: 176492 - DNA, 20 bp, synthetic construct
  source 1..20: mol_type = other DNA
tctgttgacacatgatttag

SEQ ID NO: 176493 - DNA, 20 bp, synthetic construct
  source 1..20: mol_type = other DNA
ctctgttgacacatgattta

SEQ ID NO: 176494 - DNA, 20 bp, synthetic construct
  source 1..20: mol_type = other DNA
actctgttgacacatgattt

SEQ ID NO: 176495 - DNA, 20 bp, synthetic construct
  source 1..20: mol_type = other DNA
aactctgttgacacatgatt

SEQ ID NO: 176496 - DNA, 20 bp, synthetic construct
  source 1..20: mol_type = other DNA
caactctgttgacacatgat

SEQ ID NO: 176497 - DNA, 20 bp, synthetic construct
  source 1..20: mol_type = other DNA
acaactctgttgacacatga

SEQ ID NO: 176498 - DNA, 20 bp, synthetic construct
  source 1..20: mol_type = other DNA
gacaactctgttgacacatg

SEQ ID NO: 176499 - DNA, 20 bp, synthetic construct
  source 1..20: mol_type = other DNA
ggacaactctgttgacacat

SEQ ID NO: 176500 - DNA, 20 bp, synthetic construct
  source 1..20: mol_type = other DNA
aggacaactctgttgacaca

SEQ ID NO: 176501 - DNA, 20 bp, synthetic construct
  source 1..20: mol_type = other DNA
caggacaactctgttgacac

SEQ ID NO: 176502 - DNA, 20 bp, synthetic construct
  source 1..20: mol_type = other DNA
ccaggacaactctgttgaca

SEQ ID NO: 176503 - DNA, 20 bp, synthetic construct
  source 1..20: mol_type = other DNA
tccaggacaactctgttgac

SEQ ID NO: 176504 - DNA, 20 bp, synthetic construct
  source 1..20: mol_type = other DNA
atccaggacaactctgttga

SEQ ID NO: 176505 - DNA, 20 bp, synthetic construct
  source 1..20: mol_type = other DNA
gatccaggacaactctgttg

SEQ ID NO: 176506 - DNA, 20 bp, synthetic construct
  source 1..20: mol_type = other DNA
cgatccaggacaactctgtt

SEQ ID NO: 176507 - DNA, 20 bp, synthetic construct
  source 1..20: mol_type = other DNA
ccgatccaggacaactctgt

SEQ ID NO: 176508 - DNA, 20 bp, synthetic construct
  source 1..20: mol_type = other DNA
tccgatccaggacaactctg

SEQ ID NO: 176509 - DNA, 20 bp, synthetic construct
  source 1..20: mol_type = other DNA
atccgatccaggacaactct

SEQ ID NO: 176510 - DNA, 20 bp, synthetic construct
  source 1..20: mol_type = other DNA
gatccgatccaggacaactc

SEQ ID NO: 176511 - DNA, 20 bp, synthetic construct
  source 1..20: mol_type = other DNA
ggatccgatccaggacaact

SEQ ID NO: 176512 - DNA, 20 bp, synthetic construct
  source 1..20: mol_type = other DNA
tggatccgatccaggacaac

SEQ ID NO: 176513 - DNA, 20 bp, synthetic construct
  source 1..20: mol_type = other DNA
ctggatccgatccaggacaa

SEQ ID NO: 176514 - DNA, 20 bp, synthetic construct
  source 1..20: mol_type = other DNA
actggatccgatccaggaca

SEQ ID NO: 176515 - DNA, 20 bp, synthetic construct
  source 1..20: mol_type = other DNA
aactggatccgatccaggac

SEQ ID NO: 176516 - DNA, 20 bp, synthetic construct
  source 1..20: mol_type = other DNA
gaactggatccgatccagga

SEQ ID NO: 176517 - DNA, 20 bp, synthetic construct
  source 1..20: mol_type = other DNA
agaactggatccgatccagg

SEQ ID NO: 176518 - DNA, 20 bp, synthetic construct
  source 1..20: mol_type = other DNA
cagaactggatccgatccag

SEQ ID NO: 176519 - DNA, 20 bp, synthetic construct
  source 1..20: mol_type = other DNA
gcagaactggatccgatcca

SEQ ID NO: 176520 - DNA, 20 bp, synthetic construct
  source 1..20: mol_type = other DNA
ggcagaactggatccgatcc

SEQ ID NO: 176521 - DNA, 20 bp, synthetic construct
  source 1..20: mol_type = other DNA
tggcagaactggatccgatc

SEQ ID NO: 176522 - DNA, 20 bp, synthetic construct
  source 1..20: mol_type = other DNA
atggcagaactggatccgat

SEQ ID NO: 176523 - DNA, 20 bp, synthetic construct
  source 1..20: mol_type = other DNA
aatggcagaactggatccga

SEQ ID NO: 176524 - DNA, 20 bp, synthetic construct
  source 1..20: mol_type = other DNA
caatggcagaactggatccg

SEQ ID NO: 176525 - DNA, 20 bp, synthetic construct
  source 1..20: mol_type = other DNA
tcaatggcagaactggatcc

SEQ ID NO: 176526 - DNA, 20 bp, synthetic construct
  source 1..20: mol_type = other DNA
atcaatggcagaactggatc

SEQ ID NO: 176527 - DNA, 20 bp, synthetic construct
  source 1..20: mol_type = other DNA
aatcaatggcagaactggat

SEQ ID NO: 176528 - DNA, 20 bp, synthetic construct
  source 1..20: mol_type = other DNA
aaatcaatggcagaactgga

SEQ ID NO: 176529 - DNA, 20 bp, synthetic construct
  source 1..20: mol_type = other DNA
caaatcaatggcagaactgg

SEQ ID NO: 176530 - DNA, 20 bp, synthetic construct
  source 1..20: mol_type = other DNA
gcaaatcaatggcagaactg

SEQ ID NO: 176531 - DNA, 20 bp, synthetic construct
  source 1..20: mol_type = other DNA
tgcaaatcaatggcagaact

SEQ ID NO: 176532 - DNA, 20 bp, synthetic construct
  source 1..20: mol_type = other DNA
ctgcaaatcaatggcagaac

SEQ ID NO: 176533 - DNA, 20 bp, synthetic construct
  source 1..20: mol_type = other DNA
cctgcaaatcaatggcagaa

SEQ ID NO: 176534 - DNA, 20 bp, synthetic construct
  source 1..20: mol_type = other DNA
acctgcaaatcaatggcaga

SEQ ID NO: 176535 - DNA, 20 bp, synthetic construct
  source 1..20: mol_type = other DNA
gacctgcaaatcaatggcag

SEQ ID NO: 176536 - DNA, 20 bp, synthetic construct
  source 1..20: mol_type = other DNA
tgacctgcaaatcaatggca

SEQ ID NO: 176537 - DNA, 20 bp, synthetic construct
  source 1..20: mol_type = other DNA
atgacctgcaaatcaatggc

SEQ ID NO: 176538 - DNA, 20 bp, synthetic construct
  source 1..20: mol_type = other DNA
aatgacctgcaaatcaatgg

SEQ ID NO: 176539 - DNA, 20 bp, synthetic construct
  source 1..20: mol_type = other DNA
aaatgacctgcaaatcaatg

SEQ ID NO: 176540 - DNA, 20 bp, synthetic construct
  source 1..20: mol_type = other DNA
gaaatgacctgcaaatcaat

SEQ ID NO: 176541 - DNA, 20 bp, synthetic construct
  source 1..20: mol_type = other DNA
tgaaatgacctgcaaatcaa

SEQ ID NO: 176542 - DNA, 20 bp, synthetic construct
  source 1..20: mol_type = other DNA
ctgaaatgacctgcaaatca

SEQ ID NO: 176543 - DNA, 20 bp, synthetic construct
  source 1..20: mol_type = other DNA
actgaaatgacctgcaaatc

SEQ ID NO: 176544 - DNA, 20 bp, synthetic construct
  source 1..20: mol_type = other DNA
cactgaaatgacctgcaaat

SEQ ID NO: 176545 - DNA, 20 bp, synthetic construct
  source 1..20: mol_type = other DNA
ccactgaaatgacctgcaaa

SEQ ID NO: 176546 - DNA, 20 bp, synthetic construct
  source 1..20: mol_type = other DNA
accactgaaatgacctgcaa

SEQ ID NO: 176547 - DNA, 20 bp, synthetic construct
  source 1..20: mol_type = other DNA
taccactgaaatgacctgca

SEQ ID NO: 176548 - DNA, 20 bp, synthetic construct
  source 1..20: mol_type = other DNA
gtaccactgaaatgacctgc

SEQ ID NO: 176549 - DNA, 20 bp, synthetic construct
  source 1..20: mol_type = other DNA
ggtaccactgaaatgacctg

SEQ ID NO: 176550 - DNA, 20 bp, synthetic construct
  source 1..20: mol_type = other DNA
aggtaccactgaaatgacct

SEQ ID NO: 176551 - DNA, 20 bp, synthetic construct
  source 1..20: mol_type = other DNA
caggtaccactgaaatgacc

SEQ ID NO: 176552 - DNA, 20 bp, synthetic construct
  source 1..20: mol_type = other DNA
acaggtaccactgaaatgac

SEQ ID NO: 176553 - DNA, 20 bp, synthetic construct
  source 1..20: mol_type = other DNA
aacaggtaccactgaaatga

SEQ ID NO: 176554 - DNA, 20 bp, synthetic construct
  source 1..20: mol_type = other DNA
aaacaggtaccactgaaatg

SEQ ID NO: 176555 - DNA, 20 bp, synthetic construct
  source 1..20: mol_type = other DNA
gaaacaggtaccactgaaat

SEQ ID NO: 176556 - DNA, 20 bp, synthetic construct
  source 1..20: mol_type = other DNA
ggaaacaggtaccactgaaa

SEQ ID NO: 176557 - DNA, 20 bp, synthetic construct
  source 1..20: mol_type = other DNA
tggaaacaggtaccactgaa

SEQ ID NO: 176558 - DNA, 20 bp, synthetic construct
  source 1..20: mol_type = other DNA
ctggaaacaggtaccactga

SEQ ID NO: 176559 - DNA, 20 bp, synthetic construct
  source 1..20: mol_type = other DNA
actggaaacaggtaccactg

SEQ ID NO: 176560 - DNA, 20 bp, synthetic construct
  source 1..20: mol_type = other DNA
aactggaaacaggtaccact

SEQ ID NO: 176561 - DNA, 20 bp, synthetic construct
  source 1..20: mol_type = other DNA
caactggaaacaggtaccac

SEQ ID NO: 176562 - DNA, 20 bp, synthetic construct
  source 1..20: mol_type = other DNA
acaactggaaacaggtacca

SEQ ID NO: 176563 - DNA, 20 bp, synthetic construct
  source 1..20: mol_type = other DNA
aacaactggaaacaggtacc

SEQ ID NO: 176564 - DNA, 20 bp, synthetic construct
  source 1..20: mol_type = other DNA
gaacaactggaaacaggtac

SEQ ID NO: 176565 - DNA, 20 bp, synthetic construct
  source 1..20: mol_type = other DNA
agaacaactggaaacaggta

SEQ ID NO: 176566 - DNA, 20 bp, synthetic construct
  source 1..20: mol_type = other DNA
aagaacaactggaaacaggt

SEQ ID NO: 176567 - DNA, 20 bp, synthetic construct
  source 1..20: mol_type = other DNA
taagaacaactggaaacagg

SEQ ID NO: 176568 - DNA, 20 bp, synthetic construct
  source 1..20: mol_type = other DNA
ttaagaacaactggaaacag

SEQ ID NO: 176569 - DNA, 20 bp, synthetic construct
  source 1..20: mol_type = other DNA
attaagaacaactggaaaca

SEQ ID NO: 176570 - DNA, 20 bp, synthetic construct
  source 1..20: mol_type = other DNA
aattaagaacaactggaaac

SEQ ID NO: 176571 - DNA, 20 bp, synthetic construct
  source 1..20: mol_type = other DNA
caattaagaacaactggaaa

SEQ ID NO: 176572 - DNA, 20 bp, synthetic construct
  source 1..20: mol_type = other DNA
tcaattaagaacaactggaa

SEQ ID NO: 176573 - DNA, 20 bp, synthetic construct
  source 1..20: mol_type = other DNA
ttcaattaagaacaactgga

SEQ ID NO: 176574 - DNA, 20 bp, synthetic construct
  source 1..20: mol_type = other DNA
gttcaattaagaacaactgg

SEQ ID NO: 176575 - DNA, 20 bp, synthetic construct
  source 1..20: mol_type = other DNA
tgttcaattaagaacaactg

SEQ ID NO: 176576 - DNA, 20 bp, synthetic construct
  source 1..20: mol_type = other DNA
ctgttcaattaagaacaact

SEQ ID NO: 176577 - DNA, 20 bp, synthetic construct
  source 1..20: mol_type = other DNA
actgttcaattaagaacaac

SEQ ID NO: 176578 - DNA, 20 bp, synthetic construct
  source 1..20: mol_type = other DNA
cactgttcaattaagaacaa

SEQ ID NO: 176579 - DNA, 20 bp, synthetic construct
  source 1..20: mol_type = other DNA
ccactgttcaattaagaaca

SEQ ID NO: 176580 - DNA, 20 bp, synthetic construct
  source 1..20: mol_type = other DNA
gccactgttcaattaagaac

SEQ ID NO: 176581 - DNA, 20 bp, synthetic construct
  source 1..20: mol_type = other DNA
tgccactgttcaattaagaa

SEQ ID NO: 176582 - DNA, 20 bp, synthetic construct
  source 1..20: mol_type = other DNA
gtgccactgttcaattaaga

SEQ ID NO: 176583 - DNA, 20 bp, synthetic construct
  source 1..20: mol_type = other DNA
ggtgccactgttcaattaag

SEQ ID NO: 176584 - DNA, 20 bp, synthetic construct
  source 1..20: mol_type = other DNA
tggtgccactgttcaattaa

SEQ ID NO: 176585 - DNA, 20 bp, synthetic construct
  source 1..20: mol_type = other DNA
ttggtgccactgttcaatta

SEQ ID NO: 176586 - DNA, 20 bp, synthetic construct
  source 1..20: mol_type = other DNA
tttggtgccactgttcaatt

SEQ ID NO: 176587 - DNA, 20 bp, synthetic construct
  source 1..20: mol_type = other DNA
gtttggtgccactgttcaat

SEQ ID NO: 176588 - DNA, 20 bp, synthetic construct
  source 1..20: mol_type = other DNA
agtttggtgccactgttcaa

SEQ ID NO: 176589 - DNA, 20 bp, synthetic construct
  source 1..20: mol_type = other DNA
tagtttggtgccactgttca

SEQ ID NO: 176590 - DNA, 20 bp, synthetic construct
  source 1..20: mol_type = other DNA
atagtttggtgccactgttc

SEQ ID NO: 176591 - DNA, 20 bp, synthetic construct
  source 1..20: mol_type = other DNA
aatagtttggtgccactgtt

SEQ ID NO: 176592 - DNA, 20 bp, synthetic construct
  source 1..20: mol_type = other DNA
caatagtttggtgccactgt

SEQ ID NO: 176593 - DNA, 20 bp, synthetic construct
  source 1..20: mol_type = other DNA
acaatagtttggtgccactg

SEQ ID NO: 176594 - DNA, 20 bp, synthetic construct
  source 1..20: mol_type = other DNA
gacaatagtttggtgccact

SEQ ID NO: 176595 - DNA, 20 bp, synthetic construct
  source 1..20: mol_type = other DNA
agacaatagtttggtgccac

SEQ ID NO: 176596 - DNA, 20 bp, synthetic construct
  source 1..20: mol_type = other DNA
aagacaatagtttggtgcca

SEQ ID NO: 176597 - DNA, 20 bp, synthetic construct
  source 1..20: mol_type = other DNA
caagacaatagtttggtgcc

SEQ ID NO: 176598 - DNA, 20 bp, synthetic construct
  source 1..20: mol_type = other DNA
gcaagacaatagtttggtgc

SEQ ID NO: 176599 - DNA, 20 bp, synthetic construct
  source 1..20: mol_type = other DNA
ggcaagacaatagtttggtg

SEQ ID NO: 176600 - DNA, 20 bp, synthetic construct
  source 1..20: mol_type = other DNA
aggcaagacaatagtttggt

SEQ ID NO: 176601 - DNA, 20 bp, synthetic construct
  source 1..20: mol_type = other DNA
gaggcaagacaatagtttgg

SEQ ID NO: 176602 - DNA, 20 bp, synthetic construct
  source 1..20: mol_type = other DNA
tgaggcaagacaatagtttg

SEQ ID NO: 176603 - DNA, 20 bp, synthetic construct
  source 1..20: mol_type = other DNA
atgaggcaagacaatagttt

SEQ ID NO: 176604 - DNA, 20 bp, synthetic construct
  source 1..20: mol_type = other DNA
gatgaggcaagacaatagtt

SEQ ID NO: 176605 - DNA, 20 bp, synthetic construct
  source 1..20: mol_type = other DNA
ggatgaggcaagacaatagt

SEQ ID NO: 176606 - DNA, 20 bp, synthetic construct
  source 1..20: mol_type = other DNA
gggatgaggcaagacaatag

SEQ ID NO: 176607 - DNA, 20 bp, synthetic construct
  source 1..20: mol_type = other DNA
ggggatgaggcaagacaata

SEQ ID NO: 176608 - DNA, 20 bp, synthetic construct
  source 1..20: mol_type = other DNA
gggggatgaggcaagacaat

SEQ ID NO: 176609 - DNA, 20 bp, synthetic construct
  source 1..20: mol_type = other DNA
agggggatgaggcaagacaa

SEQ ID NO: 176610 - DNA, 20 bp, synthetic construct
  source 1..20: mol_type = other DNA
gagggggatgaggcaagaca

SEQ ID NO: 176611 - DNA, 20 bp, synthetic construct
  source 1..20: mol_type = other DNA
ggagggggatgaggcaagac

SEQ ID NO: 176612 - DNA, 20 bp, synthetic construct
  source 1..20: mol_type = other DNA
gggagggggatgaggcaaga

SEQ ID NO: 176613 - DNA, 20 bp, synthetic construct
  source 1..20: mol_type = other DNA
tgggagggggatgaggcaag

SEQ ID NO: 176614 - DNA, 20 bp, synthetic construct
  source 1..20: mol_type = other DNA
atgggagggggatgaggcaa

SEQ ID NO: 176615 - DNA, 20 bp, synthetic construct
  source 1..20: mol_type = other DNA
catgggagggggatgaggca

SEQ ID NO: 176616 - DNA, 20 bp, synthetic construct
  source 1..20: mol_type = other DNA
ccatgggagggggatgaggc

SEQ ID NO: 176617 - DNA, 20 bp, synthetic construct
  source 1..20: mol_type = other DNA
gccatgggagggggatgagg

SEQ ID NO: 176618 - DNA, 20 bp, synthetic construct
  source 1..20: mol_type = other DNA
ggccatgggagggggatgag

SEQ ID NO: 176619 - DNA, 20 bp, synthetic construct
  source 1..20: mol_type = other DNA
aggccatgggagggggatga

SEQ ID NO: 176620 - DNA, 20 bp, synthetic construct
  source 1..20: mol_type = other DNA
caggccatgggagggggatg

SEQ ID NO: 176621 - DNA, 20 bp, synthetic construct
  source 1..20: mol_type = other DNA
acaggccatgggagggggat

SEQ ID NO: 176622 - DNA, 20 bp, synthetic construct
  source 1..20: mol_type = other DNA
gacaggccatgggaggggga

SEQ ID NO: 176623 - DNA, 20 bp, synthetic construct
  source 1..20: mol_type = other DNA
ggacaggccatgggaggggg

SEQ ID NO: 176624 - DNA, 20 bp, synthetic construct
  source 1..20: mol_type = other DNA
gggacaggccatgggagggg

SEQ ID NO: 176625 - DNA, 20 bp, synthetic construct
  source 1..20: mol_type = other DNA
ggggacaggccatgggaggg

SEQ ID NO: 176626 - DNA, 20 bp, synthetic construct
  source 1..20: mol_type = other DNA
gggggacaggccatgggagg

SEQ ID NO: 176627 - DNA, 20 bp, synthetic construct
  source 1..20: mol_type = other DNA
tgggggacaggccatgggag

SEQ ID NO: 176628 - DNA, 20 bp, synthetic construct
  source 1..20: mol_type = other DNA
ttgggggacaggccatggga

SEQ ID NO: 176629 - DNA, 20 bp, synthetic construct
  source 1..20: mol_type = other DNA
tttgggggacaggccatggg

SEQ ID NO: 176630 - DNA, 20 bp, synthetic construct
  source 1..20: mol_type = other DNA
ttttgggggacaggccatgg

SEQ ID NO: 176631 - DNA, 20 bp, synthetic construct
  source 1..20: mol_type = other DNA
tttttgggggacaggccatg

SEQ ID NO: 176632 - DNA, 20 bp, synthetic construct
  source 1..20: mol_type = other DNA
ctttttgggggacaggccat

SEQ ID NO: 176633 - DNA, 20 bp, synthetic construct
  source 1..20: mol_type = other DNA
tctttttgggggacaggcca

SEQ ID NO: 176634 - DNA, 20 bp, synthetic construct
  source 1..20: mol_type = other DNA
ctctttttgggggacaggcc

SEQ ID NO: 176635 - DNA, 20 bp, synthetic construct
  source 1..20: mol_type = other DNA
tctctttttgggggacaggc

SEQ ID NO: 176636 - DNA, 20 bp, synthetic construct
  source 1..20: mol_type = other DNA
gtctctttttgggggacagg

SEQ ID NO: 176637 - DNA, 20 bp, synthetic construct
  source 1..20: mol_type = other DNA
agtctctttttgggggacag

SEQ ID NO: 176638 - DNA, 20 bp, synthetic construct
  source 1..20: mol_type = other DNA
aagtctctttttgggggaca

SEQ ID NO: 176639 - DNA, 20 bp, synthetic construct
  source 1..20: mol_type = other DNA
gaagtctctttttgggggac

SEQ ID NO: 176640 - DNA, 20 bp, synthetic construct
  source 1..20: mol_type = other DNA
agaagtctctttttggggga

SEQ ID NO: 176641 - DNA, 20 bp, synthetic construct
  source 1..20: mol_type = other DNA
aagaagtctctttttggggg

SEQ ID NO: 176642 - DNA, 20 bp, synthetic construct
  source 1..20: mol_type = other DNA
caagaagtctctttttgggg

SEQ ID NO: 176643 - DNA, 20 bp, synthetic construct
  source 1..20: mol_type = other DNA
ccaagaagtctctttttggg

SEQ ID NO: 176644 - DNA, 20 bp, synthetic construct
  source 1..20: mol_type = other DNA
cccaagaagtctctttttgg

SEQ ID NO: 176645 - DNA, 20 bp, synthetic construct
  source 1..20: mol_type = other DNA
acccaagaagtctctttttg

SEQ ID NO: 176646 - DNA, 20 bp, synthetic construct
  source 1..20: mol_type = other DNA
tacccaagaagtctcttttt

SEQ ID NO: 176647 - DNA, 20 bp, synthetic construct
  source 1..20: mol_type = other DNA
ttacccaagaagtctctttt

SEQ ID NO: 176648 - DNA, 20 bp, synthetic construct
  source 1..20: mol_type = other DNA
attacccaagaagtctcttt

SEQ ID NO: 176649 - DNA, 20 bp, synthetic construct
  source 1..20: mol_type = other DNA
aattacccaagaagtctctt

SEQ ID NO: 176650 - DNA, 20 bp, synthetic construct
  source 1..20: mol_type = other DNA
taattacccaagaagtctct

SEQ ID NO: 176651 - DNA, 20 bp, synthetic construct
  source 1..20: mol_type = other DNA
ttaattacccaagaagtctc

SEQ ID NO: 176652 - DNA, 20 bp, synthetic construct
  source 1..20: mol_type = other DNA
attaattacccaagaagtct

SEQ ID NO: 176653 - DNA, 20 bp, synthetic construct
  source 1..20: mol_type = other DNA
gattaattacccaagaagtc

SEQ ID NO: 176654 - DNA, 20 bp, synthetic construct
  source 1..20: mol_type = other DNA
tgattaattacccaagaagt

SEQ ID NO: 176655 - DNA, 20 bp, synthetic construct
  source 1..20: mol_type = other DNA
ctgattaattacccaagaag

SEQ ID NO: 176656 - DNA, 20 bp, synthetic construct
  source 1..20: mol_type = other DNA
cctgattaattacccaagaa

SEQ ID NO: 176657 - DNA, 20 bp, synthetic construct
  source 1..20: mol_type = other DNA
ccctgattaattacccaaga

SEQ ID NO: 176658 - DNA, 20 bp, synthetic construct
  source 1..20: mol_type = other DNA
gccctgattaattacccaag

SEQ ID NO: 176659 - DNA, 20 bp, synthetic construct
  source 1..20: mol_type = other DNA
tgccctgattaattacccaa

SEQ ID NO: 176660 - DNA, 20 bp, synthetic construct
  source 1..20: mol_type = other DNA
ttgccctgattaattaccca

SEQ ID NO: 176661 - DNA, 20 bp, synthetic construct
  source 1..20: mol_type = other DNA
gttgccctgattaattaccc

SEQ ID NO: 176662 - DNA, 20 bp, synthetic construct
  source 1..20: mol_type = other DNA
tgttgccctgattaattacc

SEQ ID NO: 176663 - DNA, 20 bp, synthetic construct
  source 1..20: mol_type = other DNA
atgttgccctgattaattac

SEQ ID NO: 176664 - DNA, 20 bp, synthetic construct
  source 1..20: mol_type = other DNA
gatgttgccctgattaatta

SEQ ID NO: 176665 - DNA, 20 bp, synthetic construct
  source 1..20: mol_type = other DNA
tgatgttgccctgattaatt

SEQ ID NO: 176666 - DNA, 20 bp, synthetic construct
  source 1..20: mol_type = other DNA
ctgatgttgccctgattaat

SEQ ID NO: 176667 - DNA, 20 bp, synthetic construct
  source 1..20: mol_type = other DNA
cctgatgttgccctgattaa

SEQ ID NO: 176668 - DNA, 20 bp, synthetic construct
  source 1..20: mol_type = other DNA
gcctgatgttgccctgatta

SEQ ID NO: 176669 - DNA, 20 bp, synthetic construct
  source 1..20: mol_type = other DNA
tgcctgatgttgccctgatt

SEQ ID NO: 176670 - DNA, 20 bp, synthetic construct
  source 1..20: mol_type = other DNA
ctgcctgatgttgccctgat

SEQ ID NO: 176671 - DNA, 20 bp, synthetic construct
  source 1..20: mol_type = other DNA
actgcctgatgttgccctga

SEQ ID NO: 176672 - DNA, 20 bp, synthetic construct
  source 1..20: mol_type = other DNA
gactgcctgatgttgccctg

SEQ ID NO: 176673 - DNA, 20 bp, synthetic construct
  source 1..20: mol_type = other DNA
agactgcctgatgttgccct

SEQ ID NO: 176674 - DNA, 20 bp, synthetic construct
  source 1..20: mol_type = other DNA
cagactgcctgatgttgccc

SEQ ID NO: 176675 - DNA, 20 bp, synthetic construct
  source 1..20: mol_type = other DNA
ccagactgcctgatgttgcc

SEQ ID NO: 176676 - DNA, 20 bp, synthetic construct
  source 1..20: mol_type = other DNA
cccagactgcctgatgttgc

SEQ ID NO: 176677 - DNA, 20 bp, synthetic construct
  source 1..20: mol_type = other DNA
gcccagactgcctgatgttg

SEQ ID NO: 176678 - DNA, 20 bp, synthetic construct
  source 1..20: mol_type = other DNA
cgcccagactgcctgatgtt

SEQ ID NO: 176679 - DNA, 20 bp, synthetic construct
  source 1..20: mol_type = other DNA
gcgcccagactgcctgatgt

SEQ ID NO: 176680 - DNA, 20 bp, synthetic construct
  source 1..20: mol_type = other DNA
cgcgcccagactgcctgatg

SEQ ID NO: 176681 - DNA, 20 bp, synthetic construct
  source 1..20: mol_type = other DNA
ccgcgcccagactgcctgat

SEQ ID NO: 176682 - DNA, 20 bp, synthetic construct
  source 1..20: mol_type = other DNA
accgcgcccagactgcctga

SEQ ID NO: 176683 - DNA, 20 bp, synthetic construct
  source 1..20: mol_type = other DNA
caccgcgcccagactgcctg

SEQ ID NO: 176684 - DNA, 20 bp, synthetic construct
  source 1..20: mol_type = other DNA
ccaccgcgcccagactgcct

SEQ ID NO: 176685 - DNA, 20 bp, synthetic construct
  source 1..20: mol_type = other DNA
gccaccgcgcccagactgcc

SEQ ID NO: 176686 - DNA, 20 bp, synthetic construct
  source 1..20: mol_type = other DNA
agccaccgcgcccagactgc

SEQ ID NO: 176687 - DNA, 20 bp, synthetic construct
  source 1..20: mol_type = other DNA
gagccaccgcgcccagactg

SEQ ID NO: 176688 - DNA, 20 bp, synthetic construct
  source 1..20: mol_type = other DNA
tgagccaccgcgcccagact

SEQ ID NO: 176689 - DNA, 20 bp, synthetic construct
  source 1..20: mol_type = other DNA
gtgagccaccgcgcccagac

SEQ ID NO: 176690 - DNA, 20 bp, synthetic construct
  source 1..20: mol_type = other DNA
cgtgagccaccgcgcccaga

SEQ ID NO: 176691 - DNA, 20 bp, synthetic construct
  source 1..20: mol_type = other DNA
gcgtgagccaccgcgcccag

SEQ ID NO: 176692 - DNA, 20 bp, synthetic construct
  source 1..20: mol_type = other DNA
ggcgtgagccaccgcgccca

SEQ ID NO: 176693 - DNA, 20 bp, synthetic construct
  source 1..20: mol_type = other DNA
aggcgtgagccaccgcgccc

SEQ ID NO: 176694 - DNA, 20 bp, synthetic construct
  source 1..20: mol_type = other DNA
caggcgtgagccaccgcgcc

SEQ ID NO: 176695 - DNA, 20 bp, synthetic construct
  source 1..20: mol_type = other DNA
acaggcgtgagccaccgcgc

SEQ ID NO: 176696 - DNA, 20 bp, synthetic construct
  source 1..20: mol_type = other DNA
tacaggcgtgagccaccgcg

SEQ ID NO: 176697 - DNA, 20 bp, synthetic construct
  source 1..20: mol_type = other DNA
ttacaggcgtgagccaccgc

SEQ ID NO: 176698 - DNA, 20 bp, synthetic construct
  source 1..20: mol_type = other DNA
attacaggcgtgagccaccg

SEQ ID NO: 176699 - DNA, 20 bp, synthetic construct
  source 1..20: mol_type = other DNA
gattacaggcgtgagccacc

SEQ ID NO: 176700 - DNA, 20 bp, synthetic construct
  source 1..20: mol_type = other DNA
ggattacaggcgtgagccac

SEQ ID NO: 176701 - DNA, 20 bp, synthetic construct
  source 1..20: mol_type = other DNA
gggattacaggcgtgagcca

SEQ ID NO: 176702 - DNA, 20 bp, synthetic construct
  source 1..20: mol_type = other DNA
tgggattacaggcgtgagcc

SEQ ID NO: 176703 - DNA, 20 bp, synthetic construct
  source 1..20: mol_type = other DNA
ctgggattacaggcgtgagc

SEQ ID NO: 176704 - DNA, 20 bp, synthetic construct
  source 1..20: mol_type = other DNA
gctgggattacaggcgtgag

SEQ ID NO: 176705 - DNA, 20 bp, synthetic construct
  source 1..20: mol_type = other DNA
tgctgggattacaggcgtga

SEQ ID NO: 176706 - DNA, 20 bp, synthetic construct
  source 1..20: mol_type = other DNA
gtgctgggattacaggcgtg

SEQ ID NO: 176707 - DNA, 20 bp, synthetic construct
  source 1..20: mol_type = other DNA
agtgctgggattacaggcgt

SEQ ID NO: 176708 - DNA, 20 bp, synthetic construct
  source 1..20: mol_type = other DNA
aagtgctgggattacaggcg

SEQ ID NO: 176709 - DNA, 20 bp, synthetic construct
  source 1..20: mol_type = other DNA
aaagtgctgggattacaggc

SEQ ID NO: 176710 - DNA, 20 bp, synthetic construct
  source 1..20: mol_type = other DNA
caaagtgctgggattacagg

SEQ ID NO: 176711 - DNA, 20 bp, synthetic construct
  source 1..20: mol_type = other DNA
ccaaagtgctgggattacag

SEQ ID NO: 176712 - DNA, 20 bp, synthetic construct
  source 1..20: mol_type = other DNA
cccaaagtgctgggattaca

SEQ ID NO: 176713 - DNA, 20 bp, synthetic construct
  source 1..20: mol_type = other DNA
tcccaaagtgctgggattac

SEQ ID NO: 176714 - DNA, 20 bp, synthetic construct
  source 1..20: mol_type = other DNA
ctcccaaagtgctgggatta

SEQ ID NO: 176715 - DNA, 20 bp, synthetic construct
  source 1..20: mol_type = other DNA
cctcccaaagtgctgggatt

SEQ ID NO: 176716 - DNA, 20 bp, synthetic construct
  source 1..20: mol_type = other DNA
gcctcccaaagtgctgggat

SEQ ID NO: 176717 - DNA, 20 bp, synthetic construct
  source 1..20: mol_type = other DNA
ggcctcccaaagtgctggga

SEQ ID NO: 176718 - DNA, 20 bp, synthetic construct
  source 1..20: mol_type = other DNA
cggcctcccaaagtgctggg

SEQ ID NO: 176719 - DNA, 20 bp, synthetic construct
  source 1..20: mol_type = other DNA
tcggcctcccaaagtgctgg

SEQ ID NO: 176720 - DNA, 20 bp, synthetic construct
  source 1..20: mol_type = other DNA
ctcggcctcccaaagtgctg

SEQ ID NO: 176721 - DNA, 20 bp, synthetic construct
  source 1..20: mol_type = other DNA
cctcggcctcccaaagtgct

SEQ ID NO: 176722 - DNA, 20 bp, synthetic construct
  source 1..20: mol_type = other DNA
gcctcggcctcccaaagtgc

SEQ ID NO: 176723 - DNA, 20 bp, synthetic construct
  source 1..20: mol_type = other DNA
cgcctcggcctcccaaagtg

SEQ ID NO: 176724 - DNA, 20 bp, synthetic construct
  source 1..20: mol_type = other DNA
ccgcctcggcctcccaaagt

SEQ ID NO: 176725 - DNA, 20 bp, synthetic construct
  source 1..20: mol_type = other DNA
cccgcctcggcctcccaaag

SEQ ID NO: 176726 - DNA, 20 bp, synthetic construct
  source 1..20: mol_type = other DNA
gcccgcctcggcctcccaaa

SEQ ID NO: 176727 - DNA, 20 bp, synthetic construct
  source 1..20: mol_type = other DNA
tgcccgcctcggcctcccaa

SEQ ID NO: 176728 - DNA, 20 bp, synthetic construct
  source 1..20: mol_type = other DNA
ctgcccgcctcggcctccca

SEQ ID NO: 176729 - DNA, 20 bp, synthetic construct
  source 1..20: mol_type = other DNA
tctgcccgcctcggcctccc

SEQ ID NO: 176730 - DNA, 20 bp, synthetic construct
  source 1..20: mol_type = other DNA
atctgcccgcctcggcctcc

SEQ ID NO: 176731 - DNA, 20 bp, synthetic construct
  source 1..20: mol_type = other DNA
gatctgcccgcctcggcctc

SEQ ID NO: 176732 - DNA, 20 bp, synthetic construct
  source 1..20: mol_type = other DNA
tgatctgcccgcctcggcct

SEQ ID NO: 176733 - DNA, 20 bp, synthetic construct
  source 1..20: mol_type = other DNA
atgatctgcccgcctcggcc

SEQ ID NO: 176734 - DNA, 20 bp, synthetic construct
  source 1..20: mol_type = other DNA
catgatctgcccgcctcggc

SEQ ID NO: 176735 - DNA, 20 bp, synthetic construct
  source 1..20: mol_type = other DNA
tcatgatctgcccgcctcgg

SEQ ID NO: 176736 - DNA, 20 bp, synthetic construct
  source 1..20: mol_type = other DNA
ctcatgatctgcccgcctcg

SEQ ID NO: 176737 - DNA, 20 bp, synthetic construct
  source 1..20: mol_type = other DNA
cctcatgatctgcccgcctc

SEQ ID NO: 176738 - DNA, 20 bp, synthetic construct
  source 1..20: mol_type = other DNA
acctcatgatctgcccgcct

SEQ ID NO: 176739 - DNA, 20 bp, synthetic construct
  source 1..20: mol_type = other DNA
aacctcatgatctgcccgcc

SEQ ID NO: 176740 - DNA, 20 bp, synthetic construct
  source 1..20: mol_type = other DNA
taacctcatgatctgcccgc

SEQ ID NO: 176741 - DNA, 20 bp, synthetic construct
  source 1..20: mol_type = other DNA
ctaacctcatgatctgcccg

SEQ ID NO: 176742 - DNA, 20 bp, synthetic construct
  source 1..20: mol_type = other DNA
cctaacctcatgatctgccc

SEQ ID NO: 176743 - DNA, 20 bp, synthetic construct
  source 1..20: mol_type = other DNA
tcctaacctcatgatctgcc

SEQ ID NO: 176744 - DNA, 20 bp, synthetic construct
  source 1..20: mol_type = other DNA
ctcctaacctcatgatctgc

SEQ ID NO: 176745 - DNA, 20 bp, synthetic construct
  source 1..20: mol_type = other DNA
tctcctaacctcatgatctg

SEQ ID NO: 176746 - DNA, 20 bp, synthetic construct
  source 1..20: mol_type = other DNA
atctcctaacctcatgatct

SEQ ID NO: 176747 - DNA, 20 bp, synthetic construct
  source 1..20: mol_type = other DNA
aatctcctaacctcatgatc

SEQ ID NO: 176748 - DNA, 20 bp, synthetic construct
  source 1..20: mol_type = other DNA
caatctcctaacctcatgat

SEQ ID NO: 176749 - DNA, 20 bp, synthetic construct
  source 1..20: mol_type = other DNA
tcaatctcctaacctcatga

SEQ ID NO: 176750 - DNA, 20 bp, synthetic construct
  source 1..20: mol_type = other DNA
ctcaatctcctaacctcatg

SEQ ID NO: 176751 - DNA, 20 bp, synthetic construct
  source 1..20: mol_type = other DNA
tctcaatctcctaacctcat

SEQ ID NO: 176752 - DNA, 20 bp, synthetic construct
  source 1..20: mol_type = other DNA
gtctcaatctcctaacctca

SEQ ID NO: 176753 - DNA, 20 bp, synthetic construct
  source 1..20: mol_type = other DNA
ggtctcaatctcctaacctc

SEQ ID NO: 176754 - DNA, 20 bp, synthetic construct
  source 1..20: mol_type = other DNA
tggtctcaatctcctaacct

SEQ ID NO: 176755 - DNA, 20 bp, synthetic construct
  source 1..20: mol_type = other DNA
atggtctcaatctcctaacc

SEQ ID NO: 176756 - DNA, 20 bp, synthetic construct
  source 1..20: mol_type = other DNA
gatggtctcaatctcctaac

SEQ ID NO: 176757 - DNA, 20 bp, synthetic construct
  source 1..20: mol_type = other DNA
ggatggtctcaatctcctaa

SEQ ID NO: 176758 - DNA, 20 bp, synthetic construct
  source 1..20: mol_type = other DNA
aggatggtctcaatctccta

SEQ ID NO: 176759 - DNA, 20 bp, synthetic construct
  source 1..20: mol_type = other DNA
caggatggtctcaatctcct

SEQ ID NO: 176760 - DNA, 20 bp, synthetic construct
  source 1..20: mol_type = other DNA
ccaggatggtctcaatctcc

SEQ ID NO: 176761 - DNA, 20 bp, synthetic construct
  source 1..20: mol_type = other DNA
gccaggatggtctcaatctc

SEQ ID NO: 176762 - DNA, 20 bp, synthetic construct
  source 1..20: mol_type = other DNA
agccaggatggtctcaatct

SEQ ID NO: 176763 - DNA, 20 bp, synthetic construct
  source 1..20: mol_type = other DNA
aagccaggatggtctcaatc

SEQ ID NO: 176764 - DNA, 20 bp, synthetic construct
  source 1..20: mol_type = other DNA
aaagccaggatggtctcaat

SEQ ID NO: 176765 - DNA, 20 bp, synthetic construct
  source 1..20: mol_type = other DNA
caaagccaggatggtctcaa

SEQ ID NO: 176766 - DNA, 20 bp, synthetic construct
  source 1..20: mol_type = other DNA
acaaagccaggatggtctca

SEQ ID NO: 176767 - DNA, 20 bp, synthetic construct
  source 1..20: mol_type = other DNA
cacaaagccaggatggtctc

SEQ ID NO: 176768 - DNA, 20 bp, synthetic construct
  source 1..20: mol_type = other DNA
tcacaaagccaggatggtct

SEQ ID NO: 176769 - DNA, 20 bp, synthetic construct
  source 1..20: mol_type = other DNA
ttcacaaagccaggatggtc

SEQ ID NO: 176770 - DNA, 20 bp, synthetic construct
  source 1..20: mol_type = other DNA
tttcacaaagccaggatggt

SEQ ID NO: 176771 - DNA, 20 bp, synthetic construct
  source 1..20: mol_type = other DNA
gtttcacaaagccaggatgg

SEQ ID NO: 176772 - DNA, 20 bp, synthetic construct
  source 1..20: mol_type = other DNA
ggtttcacaaagccaggatg

SEQ ID NO: 176773 - DNA, 20 bp, synthetic construct
  source 1..20: mol_type = other DNA
gggtttcacaaagccaggat

SEQ ID NO: 176774 - DNA, 20 bp, synthetic construct
  source 1..20: mol_type = other DNA
ggggtttcacaaagccagga

SEQ ID NO: 176775 - DNA, 20 bp, synthetic construct
  source 1..20: mol_type = other DNA
cggggtttcacaaagccagg

SEQ ID NO: 176776 - DNA, 20 bp, synthetic construct
  source 1..20: mol_type = other DNA
acggggtttcacaaagccag

SEQ ID NO: 176777 - DNA, 20 bp, synthetic construct
  source 1..20: mol_type = other DNA
gacggggtttcacaaagcca

SEQ ID NO: 176778 - DNA, 20 bp, synthetic construct
  source 1..20: mol_type = other DNA
agacggggtttcacaaagcc

SEQ ID NO: 176779 - DNA, 20 bp, synthetic construct
  source 1..20: mol_type = other DNA
gagacggggtttcacaaagc

SEQ ID NO: 176780 - DNA, 20 bp, synthetic construct
  source 1..20: mol_type = other DNA
agagacggggtttcacaaag

SEQ ID NO: 176781 - DNA, 20 bp, synthetic construct
  source 1..20: mol_type = other DNA
tagagacggggtttcacaaa

SEQ ID NO: 176782 - DNA, 20 bp, synthetic construct
  source 1..20: mol_type = other DNA
gtagagacggggtttcacaa

SEQ ID NO: 176783 - DNA, 20 bp, synthetic construct
  source 1..20: mol_type = other DNA
agtagagacggggtttcaca

SEQ ID NO: 176784 - DNA, 20 bp, synthetic construct
  source 1..20: mol_type = other DNA
tagtagagacggggtttcac

SEQ ID NO: 176785 - DNA, 20 bp, synthetic construct
  source 1..20: mol_type = other DNA
ttagtagagacggggtttca

SEQ ID NO: 176786 - DNA, 20 bp, synthetic construct
  source 1..20: mol_type = other DNA
tttagtagagacggggtttc

SEQ ID NO: 176787 - DNA, 20 bp, synthetic construct
  source 1..20: mol_type = other DNA
ttttagtagagacggggttt

SEQ ID NO: 176788 - DNA, 20 bp, synthetic construct
  source 1..20: mol_type = other DNA
tttttagtagagacggggtt

SEQ ID NO: 176789 - DNA, 20 bp, synthetic construct
  source 1..20: mol_type = other DNA
atttttagtagagacggggt

SEQ ID NO: 176790 - DNA, 20 bp, synthetic construct
  source 1..20: mol_type = other DNA
tatttttagtagagacgggg

SEQ ID NO: 176791 - DNA, 20 bp, synthetic construct
  source 1..20: mol_type = other DNA
gtatttttagtagagacggg

SEQ ID NO: 176792 - DNA, 20 bp, synthetic construct
  source 1..20: mol_type = other DNA
tgtatttttagtagagacgg

SEQ ID NO: 176793 - DNA, 20 bp, synthetic construct
  source 1..20: mol_type = other DNA
ttgtatttttagtagagacg

SEQ ID NO: 176794 - DNA, 20 bp, synthetic construct
  source 1..20: mol_type = other DNA
tttgtatttttagtagagac

SEQ ID NO: 176795 - DNA, 20 bp, synthetic construct
  source 1..20: mol_type = other DNA
ttttgtatttttagtagaga

SEQ ID NO: 176796 - DNA, 20 bp, synthetic construct
  source 1..20: mol_type = other DNA
tttttgtatttttagtagag

SEQ ID NO: 176797 - DNA, 20 bp, synthetic construct
  source 1..20: mol_type = other DNA
ttttttgtatttttagtaga

SEQ ID NO: 176798 - DNA, 20 bp, synthetic construct
  source 1..20: mol_type = other DNA
attttttgtatttttagtag

SEQ ID NO: 176799 - DNA, 20 bp, synthetic construct
  source 1..20: mol_type = other DNA
aattttttgtatttttagta

SEQ ID NO: 176800 - DNA, 20 bp, synthetic construct
  source 1..20: mol_type = other DNA
taattttttgtatttttagt

SEQ ID NO: 176801 - DNA, 20 bp, synthetic construct
  source 1..20: mol_type = other DNA
ctaattttttgtatttttag

SEQ ID NO: 176802 - DNA, 20 bp, synthetic construct
  source 1..20: mol_type = other DNA
gctaattttttgtattttta

SEQ ID NO: 176803 - DNA, 20 bp, synthetic construct
  source 1..20: mol_type = other DNA
ggctaattttttgtattttt

SEQ ID NO: 176804 - DNA, 20 bp, synthetic construct
  source 1..20: mol_type = other DNA
cggctaattttttgtatttt

SEQ ID NO: 176805 - DNA, 20 bp, synthetic construct
  source 1..20: mol_type = other DNA
ccggctaattttttgtattt

SEQ ID NO: 176806 - DNA, 20 bp, synthetic construct
  source 1..20: mol_type = other DNA
cccggctaattttttgtatt

SEQ ID NO: 176807 - DNA, 20 bp, synthetic construct
  source 1..20: mol_type = other DNA
gcccggctaattttttgtat

SEQ ID NO: 176808 - DNA, 20 bp, synthetic construct
  source 1..20: mol_type = other DNA
cgcccggctaattttttgta

SEQ ID NO: 176809 - DNA, 20 bp, synthetic construct
  source 1..20: mol_type = other DNA
acgcccggctaattttttgt

SEQ ID NO: 176810 - DNA, 20 bp, synthetic construct
  source 1..20: mol_type = other DNA
cacgcccggctaattttttg

SEQ ID NO: 176811 - DNA, 20 bp, synthetic construct
  source 1..20: mol_type = other DNA
ccacgcccggctaatttttt

SEQ ID NO: 176812 - DNA, 20 bp, synthetic construct
  source 1..20: mol_type = other DNA
accacgcccggctaattttt

SEQ ID NO: 176813 - DNA, 20 bp, synthetic construct
  source 1..20: mol_type = other DNA
caccacgcccggctaatttt

SEQ ID NO: 176814 - DNA, 20 bp, synthetic construct
  source 1..20: mol_type = other DNA
ccaccacgcccggctaattt

SEQ ID NO: 176815 - DNA, 20 bp, synthetic construct
  source 1..20: mol_type = other DNA
gccaccacgcccggctaatt

SEQ ID NO: 176816 - DNA, 20 bp, synthetic construct
  source 1..20: mol_type = other DNA
cgccaccacgcccggctaat

SEQ ID NO: 176817 - DNA, 20 bp, synthetic construct
  source 1..20: mol_type = other DNA
ccgccaccacgcccggctaa

SEQ ID NO: 176818 - DNA, 20 bp, synthetic construct
  source 1..20: mol_type = other DNA
cccgccaccacgcccggcta

SEQ ID NO: 176819 - DNA, 20 bp, synthetic construct
  source 1..20: mol_type = other DNA
gcccgccaccacgcccggct

SEQ ID NO: 176820 - DNA, 20 bp, synthetic construct
  source 1..20: mol_type = other DNA
cgcccgccaccacgcccggc

SEQ ID NO: 176821 - DNA, 20 bp, synthetic construct
  source 1..20: mol_type = other DNA
gcgcccgccaccacgcccgg

SEQ ID NO: 176822 - DNA, 20 bp, synthetic construct
  source 1..20: mol_type = other DNA
ggcgcccgccaccacgcccg

SEQ ID NO: 176823 - DNA, 20 bp, synthetic construct
  source 1..20: mol_type = other DNA
aggcgcccgccaccacgccc

SEQ ID NO: 176824 - DNA, 20 bp, synthetic construct
  source 1..20: mol_type = other DNA
caggcgcccgccaccacgcc

SEQ ID NO: 176825 - DNA, 20 bp, synthetic construct
  source 1..20: mol_type = other DNA
acaggcgcccgccaccacgc

SEQ ID NO: 176826 - DNA, 20 bp, synthetic construct
  source 1..20: mol_type = other DNA
tacaggcgcccgccaccacg

SEQ ID NO: 176827 - DNA, 20 bp, synthetic construct
  source 1..20: mol_type = other DNA
ctacaggcgcccgccaccac

SEQ ID NO: 176828 - DNA, 20 bp, synthetic construct
  source 1..20: mol_type = other DNA
actacaggcgcccgccacca

SEQ ID NO: 176829 - DNA, 20 bp, synthetic construct
  source 1..20: mol_type = other DNA
gactacaggcgcccgccacc

SEQ ID NO: 176830 - DNA, 20 bp, synthetic construct
  source 1..20: mol_type = other DNA
ggactacaggcgcccgccac

SEQ ID NO: 176831 - DNA, 20 bp, synthetic construct
  source 1..20: mol_type = other DNA
gggactacaggcgcccgcca

SEQ ID NO: 176832 - DNA, 20 bp, synthetic construct
  source 1..20: mol_type = other DNA
tgggactacaggcgcccgcc

SEQ ID NO: 176833 - DNA, 20 bp, synthetic construct
  source 1..20: mol_type = other DNA
ctgggactacaggcgcccgc

SEQ ID NO: 176834 - DNA, 20 bp, synthetic construct
  source 1..20: mol_type = other DNA
gctgggactacaggcgcccg

SEQ ID NO: 176835 - DNA, 20 bp, synthetic construct
  source 1..20: mol_type = other DNA
agctgggactacaggcgccc

SEQ ID NO: 176836 - DNA, 20 bp, synthetic construct
  source 1..20: mol_type = other DNA
tagctgggactacaggcgcc

SEQ ID NO: 176837 - DNA, 20 bp, synthetic construct
  source 1..20: mol_type = other DNA
gtagctgggactacaggcgc

SEQ ID NO: 176838 - DNA, 20 bp, synthetic construct
  source 1..20: mol_type = other DNA
agtagctgggactacaggcg

SEQ ID NO: 176839 - DNA, 20 bp, synthetic construct
  source 1..20: mol_type = other DNA
gagtagctgggactacaggc

SEQ ID NO: 176840 - DNA, 20 bp, synthetic construct
  source 1..20: mol_type = other DNA
cgagtagctgggactacagg

SEQ ID NO: 176841 - DNA, 20 bp, synthetic construct
  source 1..20: mol_type = other DNA
tcgagtagctgggactacag

SEQ ID NO: 176842 - DNA, 20 bp, synthetic construct
  source 1..20: mol_type = other DNA
ctcgagtagctgggactaca

SEQ ID NO: 176843 - DNA, 20 bp, synthetic construct
  source 1..20: mol_type = other DNA
tctcgagtagctgggactac

SEQ ID NO: 176844 - DNA, 20 bp, synthetic construct
  source 1..20: mol_type = other DNA
ctctcgagtagctgggacta

SEQ ID NO: 176845 - DNA, 20 bp, synthetic construct
  source 1..20: mol_type = other DNA
cctctcgagtagctgggact

SEQ ID NO: 176846 - DNA, 20 bp, synthetic construct
  source 1..20: mol_type = other DNA
gcctctcgagtagctgggac

SEQ ID NO: 176847 - DNA, 20 bp, synthetic construct
  source 1..20: mol_type = other DNA
agcctctcgagtagctggga

SEQ ID NO: 176848 - DNA, 20 bp, synthetic construct
  source 1..20: mol_type = other DNA
cagcctctcgagtagctggg

SEQ ID NO: 176849 - DNA, 20 bp, synthetic construct
  source 1..20: mol_type = other DNA
tcagcctctcgagtagctgg

SEQ ID NO: 176850 - DNA, 20 bp, synthetic construct
  source 1..20: mol_type = other DNA
ctcagcctctcgagtagctg

SEQ ID NO: 176851 - DNA, 20 bp, synthetic construct
  source 1..20: mol_type = other DNA
cctcagcctctcgagtagct

SEQ ID NO: 176852 - DNA, 20 bp, synthetic construct
  source 1..20: mol_type = other DNA
gcctcagcctctcgagtagc

SEQ ID NO: 176853 - DNA, 20 bp, synthetic construct
  source 1..20: mol_type = other DNA
tgcctcagcctctcgagtag

SEQ ID NO: 176854 - DNA, 20 bp, synthetic construct
  source 1..20: mol_type = other DNA
ctgcctcagcctctcgagta

SEQ ID NO: 176855 - DNA, 20 bp, synthetic construct
  source 1..20: mol_type = other DNA
cctgcctcagcctctcgagt

SEQ ID NO: 176856 - DNA, 20 bp, synthetic construct
  source 1..20: mol_type = other DNA
ccctgcctcagcctctcgag

SEQ ID NO: 176857 - DNA, 20 bp, synthetic construct
  source 1..20: mol_type = other DNA
cccctgcctcagcctctcga

SEQ ID NO: 176858 - DNA, 20 bp, synthetic construct
  source 1..20: mol_type = other DNA
tcccctgcctcagcctctcg

SEQ ID NO: 176859 - DNA, 20 bp, synthetic construct
  source 1..20: mol_type = other DNA
ttcccctgcctcagcctctc

SEQ ID NO: 176860 - DNA, 20 bp, synthetic construct
  source 1..20: mol_type = other DNA
attcccctgcctcagcctct

SEQ ID NO: 176861 - DNA, 20 bp, synthetic construct
  source 1..20: mol_type = other DNA
cattcccctgcctcagcctc

SEQ ID NO: 176862 - DNA, 20 bp, synthetic construct
  source 1..20: mol_type = other DNA
ccattcccctgcctcagcct

SEQ ID NO: 176863 - DNA, 20 bp, synthetic construct
  source 1..20: mol_type = other DNA
gccattcccctgcctcagcc

SEQ ID NO: 176864 - DNA, 20 bp, synthetic construct
  source 1..20: mol_type = other DNA
cgccattcccctgcctcagc

SEQ ID NO: 176865 - DNA, 20 bp, synthetic construct
  source 1..20: mol_type = other DNA
acgccattcccctgcctcag

SEQ ID NO: 176866 - DNA, 20 bp, synthetic construct
  source 1..20: mol_type = other DNA
cacgccattcccctgcctca

SEQ ID NO: 176867 - DNA, 20 bp, synthetic construct
  source 1..20: mol_type = other DNA
tcacgccattcccctgcctc

SEQ ID NO: 176868 - DNA, 20 bp, synthetic construct
  source 1..20: mol_type = other DNA
ttcacgccattcccctgcct

SEQ ID NO: 176869 - DNA, 20 bp, synthetic construct
  source 1..20: mol_type = other DNA
gttcacgccattcccctgcc

SEQ ID NO: 176870 - DNA, 20 bp, synthetic construct
  source 1..20: mol_type = other DNA
ggttcacgccattcccctgc

SEQ ID NO: 176871 - DNA, 20 bp, synthetic construct
  source 1..20: mol_type = other DNA
gggttcacgccattcccctg

SEQ ID NO: 176872 - DNA, 20 bp, synthetic construct
  source 1..20: mol_type = other DNA
cgggttcacgccattcccct

SEQ ID NO: 176873 - DNA, 20 bp, synthetic construct
  source 1..20: mol_type = other DNA
ccgggttcacgccattcccc

SEQ ID NO: 176874 - DNA, 20 bp, synthetic construct
  source 1..20: mol_type = other DNA
cccgggttcacgccattccc

SEQ ID NO: 176875 - DNA, 20 bp, synthetic construct
  source 1..20: mol_type = other DNA
tcccgggttcacgccattcc

SEQ ID NO: 176876 - DNA, 20 bp, synthetic construct
  source 1..20: mol_type = other DNA
ctcccgggttcacgccattc

SEQ ID NO: 176877 - DNA, 20 bp, synthetic construct
  source 1..20: mol_type = other DNA
cctcccgggttcacgccatt

SEQ ID NO: 176878 - DNA, 20 bp, synthetic construct
  source 1..20: mol_type = other DNA
acctcccgggttcacgccat

SEQ ID NO: 176879 - DNA, 20 bp, synthetic construct
  source 1..20: mol_type = other DNA
cacctcccgggttcacgcca

SEQ ID NO: 176880 - DNA, 20 bp, synthetic construct
  source 1..20: mol_type = other DNA
ccacctcccgggttcacgcc

SEQ ID NO: 176881 - DNA, 20 bp, synthetic construct
  source 1..20: mol_type = other DNA
tccacctcccgggttcacgc

SEQ ID NO: 176882 - DNA, 20 bp, synthetic construct
  source 1..20: mol_type = other DNA
ctccacctcccgggttcacg

SEQ ID NO: 176883 - DNA, 20 bp, synthetic construct
  source 1..20: mol_type = other DNA
cctccacctcccgggttcac

SEQ ID NO: 176884 - DNA, 20 bp, synthetic construct
  source 1..20: mol_type = other DNA
acctccacctcccgggttca

SEQ ID NO: 176885 - DNA, 20 bp, synthetic construct
  source 1..20: mol_type = other DNA
aacctccacctcccgggttc

SEQ ID NO: 176886 - DNA, 20 bp, synthetic construct
  source 1..20: mol_type = other DNA
caacctccacctcccgggtt

SEQ ID NO: 176887 - DNA, 20 bp, synthetic construct
  source 1..20: mol_type = other DNA
gcaacctccacctcccgggt

SEQ ID NO: 176888 - DNA, 20 bp, synthetic construct
  source 1..20: mol_type = other DNA
tgcaacctccacctcccggg

SEQ ID NO: 176889 - DNA, 20 bp, synthetic construct
  source 1..20: mol_type = other DNA
ctgcaacctccacctcccgg

SEQ ID NO: 176890 - DNA, 20 bp, synthetic construct
  source 1..20: mol_type = other DNA
actgcaacctccacctcccg

SEQ ID NO: 176891 - DNA, 20 bp, synthetic construct
  source 1..20: mol_type = other DNA
cactgcaacctccacctccc

SEQ ID NO: 176892 - DNA, 20 bp, synthetic construct
  source 1..20: mol_type = other DNA
tcactgcaacctccacctcc

SEQ ID NO: 176893 - DNA, 20 bp, synthetic construct
  source 1..20: mol_type = other DNA
ctcactgcaacctccacctc

SEQ ID NO: 176894 - DNA, 20 bp, synthetic construct
  source 1..20: mol_type = other DNA
gctcactgcaacctccacct

SEQ ID NO: 176895 - DNA, 20 bp, synthetic construct
  source 1..20: mol_type = other DNA
ggctcactgcaacctccacc

SEQ ID NO: 176896 - DNA, 20 bp, synthetic construct
  source 1..20: mol_type = other DNA
cggctcactgcaacctccac

SEQ ID NO: 176897 - DNA, 20 bp, synthetic construct
  source 1..20: mol_type = other DNA
tcggctcactgcaacctcca

SEQ ID NO: 176898 - DNA, 20 bp, synthetic construct
  source 1..20: mol_type = other DNA
ctcggctcactgcaacctcc

SEQ ID NO: 176899 - DNA, 20 bp, synthetic construct
  source 1..20: mol_type = other DNA
tctcggctcactgcaacctc

SEQ ID NO: 176900 - DNA, 20 bp, synthetic construct
  source 1..20: mol_type = other DNA
atctcggctcactgcaacct

SEQ ID NO: 176901 - DNA, 20 bp, synthetic construct
  source 1..20: mol_type = other DNA
gatctcggctcactgcaacc

SEQ ID NO: 176902 - DNA, 20 bp, synthetic construct
  source 1..20: mol_type = other DNA
cgatctcggctcactgcaac

SEQ ID NO: 176903 - DNA, 20 bp, synthetic construct
  source 1..20: mol_type = other DNA
gcgatctcggctcactgcaa

SEQ ID NO: 176904 - DNA, 20 bp, synthetic construct
  source 1..20: mol_type = other DNA
tgcgatctcggctcactgca

SEQ ID NO: 176905 - DNA, 20 bp, synthetic construct
  source 1..20: mol_type = other DNA
gtgcgatctcggctcactgc

SEQ ID NO: 176906 - DNA, 20 bp, synthetic construct
  source 1..20: mol_type = other DNA
ggtgcgatctcggctcactg

SEQ ID NO: 176907 - DNA, 20 bp, synthetic construct
  source 1..20: mol_type = other DNA
tggtgcgatctcggctcact

SEQ ID NO: 176908 - DNA, 20 bp, synthetic construct
  source 1..20: mol_type = other DNA
gtggtgcgatctcggctcac

SEQ ID NO: 176909 - DNA, 20 bp, synthetic construct
  source 1..20: mol_type = other DNA
agtggtgcgatctcggctca

SEQ ID NO: 176910 - DNA, 20 bp, synthetic construct
  source 1..20: mol_type = other DNA
cagtggtgcgatctcggctc

SEQ ID NO: 176911 - DNA, 20 bp, synthetic construct
  source 1..20: mol_type = other DNA
gcagtggtgcgatctcggct

SEQ ID NO: 176912 - DNA, 20 bp, synthetic construct
  source 1..20: mol_type = other DNA
tgcagtggtgcgatctcggc

SEQ ID NO: 176913 - DNA, 20 bp, synthetic construct
  source 1..20: mol_type = other DNA
gtgcagtggtgcgatctcgg

SEQ ID NO: 176914 - DNA, 20 bp, synthetic construct
  source 1..20: mol_type = other DNA
agtgcagtggtgcgatctcg

SEQ ID NO: 176915 - DNA, 20 bp, synthetic construct
  source 1..20: mol_type = other DNA
gagtgcagtggtgcgatctc

SEQ ID NO: 176916 - DNA, 20 bp, synthetic construct
  source 1..20: mol_type = other DNA
agagtgcagtggtgcgatct

SEQ ID NO: 176917 - DNA, 20 bp, synthetic construct
  source 1..20: mol_type = other DNA
tagagtgcagtggtgcgatc

SEQ ID NO: 176918 - DNA, 20 bp, synthetic construct
  source 1..20: mol_type = other DNA
ctagagtgcagtggtgcgat

SEQ ID NO: 176919 - DNA, 20 bp, synthetic construct
  source 1..20: mol_type = other DNA
gctagagtgcagtggtgcga

SEQ ID NO: 176920 - DNA, 20 bp, synthetic construct
  source 1..20: mol_type = other DNA
ggctagagtgcagtggtgcg

SEQ ID NO: 176921 - DNA, 20 bp, synthetic construct
  source 1..20: mol_type = other DNA
aggctagagtgcagtggtgc

SEQ ID NO: 176922 - DNA, 20 bp, synthetic construct
  source 1..20: mol_type = other DNA
caggctagagtgcagtggtg

SEQ ID NO: 176923 - DNA, 20 bp, synthetic construct
  source 1..20: mol_type = other DNA
ccaggctagagtgcagtggt

SEQ ID NO: 176924 - DNA, 20 bp, synthetic construct
  source 1..20: mol_type = other DNA
cccaggctagagtgcagtgg

SEQ ID NO: 176925 - DNA, 20 bp, synthetic construct
  source 1..20: mol_type = other DNA
gcccaggctagagtgcagtg

SEQ ID NO: 176926 - DNA, 20 bp, synthetic construct
  source 1..20: mol_type = other DNA
cgcccaggctagagtgcagt

SEQ ID NO: 176927 - DNA, 20 bp, synthetic construct
  source 1..20: mol_type = other DNA
tcgcccaggctagagtgcag

SEQ ID NO: 176928 - DNA, 20 bp, synthetic construct
  source 1..20: mol_type = other DNA
gtcgcccaggctagagtgca

SEQ ID NO: 176929 - DNA, 20 bp, synthetic construct
  source 1..20: mol_type = other DNA
tgtcgcccaggctagagtgc

SEQ ID NO: 176930 - DNA, 20 bp, synthetic construct
  source 1..20: mol_type = other DNA
ctgtcgcccaggctagagtg

SEQ ID NO: 176931 - DNA, 20 bp, synthetic construct
  source 1..20: mol_type = other DNA
tctgtcgcccaggctagagt

SEQ ID NO: 176932 - DNA, 20 bp, synthetic construct
  source 1..20: mol_type = other DNA
ctctgtcgcccaggctagag

SEQ ID NO: 176933 - DNA, 20 bp, synthetic construct
  source 1..20: mol_type = other DNA
gctctgtcgcccaggctaga

SEQ ID NO: 176934 - DNA, 20 bp, synthetic construct
  source 1..20: mol_type = other DNA
agctctgtcgcccaggctag

SEQ ID NO: 176935 - DNA, 20 bp, synthetic construct
  source 1..20: mol_type = other DNA
tagctctgtcgcccaggcta

SEQ ID NO: 176936 - DNA, 20 bp, synthetic construct
  source 1..20: mol_type = other DNA
ctagctctgtcgcccaggct

SEQ ID NO: 176937 - DNA, 20 bp, synthetic construct
  source 1..20: mol_type = other DNA
tctagctctgtcgcccaggc

SEQ ID NO: 176938 - DNA, 20 bp, synthetic construct
  source 1..20: mol_type = other DNA
gtctagctctgtcgcccagg

SEQ ID NO: 176939 - DNA, 20 bp, synthetic construct
  source 1..20: mol_type = other DNA
agtctagctctgtcgcccag

SEQ ID NO: 176940 - DNA, 20 bp, synthetic construct
  source 1..20: mol_type = other DNA
aagtctagctctgtcgccca

SEQ ID NO: 176941 - DNA, 20 bp, synthetic construct
  source 1..20: mol_type = other DNA
gaagtctagctctgtcgccc

SEQ ID NO: 176942 - DNA, 20 bp, synthetic construct
  source 1..20: mol_type = other DNA
agaagtctagctctgtcgcc

SEQ ID NO: 176943 - DNA, 20 bp, synthetic construct
  source 1..20: mol_type = other DNA
aagaagtctagctctgtcgc

SEQ ID NO: 176944 - DNA, 20 bp, synthetic construct
  source 1..20: mol_type = other DNA
gaagaagtctagctctgtcg

SEQ ID NO: 176945 - DNA, 20 bp, synthetic construct
  source 1..20: mol_type = other DNA
agaagaagtctagctctgtc

SEQ ID NO: 176946 - DNA, 20 bp, synthetic construct
  source 1..20: mol_type = other DNA
gagaagaagtctagctctgt

SEQ ID NO: 176947 - DNA, 20 bp, synthetic construct
  source 1..20: mol_type = other DNA
tgagaagaagtctagctctg

SEQ ID NO: 176948 - DNA, 20 bp, synthetic construct
  source 1..20: mol_type = other DNA
ttgagaagaagtctagctct

SEQ ID NO: 176949 - DNA, 20 bp, synthetic construct
  source 1..20: mol_type = other DNA
tttgagaagaagtctagctc

SEQ ID NO: 176950 - DNA, 20 bp, synthetic construct
  source 1..20: mol_type = other DNA
ttttgagaagaagtctagct

SEQ ID NO: 176951 - DNA, 20 bp, synthetic construct
  source 1..20: mol_type = other DNA
tttttgagaagaagtctagc

SEQ ID NO: 176952 - DNA, 20 bp, synthetic construct
  source 1..20: mol_type = other DNA
ttttttgagaagaagtctag

SEQ ID NO: 176953 - DNA, 20 bp, synthetic construct
  source 1..20: mol_type = other DNA
tttttttgagaagaagtcta

SEQ ID NO: 176954 - DNA, 20 bp, synthetic construct
  source 1..20: mol_type = other DNA
ttttttttgagaagaagtct

SEQ ID NO: 176955 - DNA, 20 bp, synthetic construct
  source 1..20: mol_type = other DNA
tttttttttgagaagaagtc

SEQ ID NO: 176956 - DNA, 20 bp, synthetic construct
  source 1..20: mol_type = other DNA
ttttttttttgagaagaagt

SEQ ID NO: 176957 - DNA, 20 bp, synthetic construct
  source 1..20: mol_type = other DNA
tttttttttttgagaagaag

SEQ ID NO: 176958 - DNA, 20 bp, synthetic construct
  source 1..20: mol_type = other DNA
ttttttttttttgagaagaa

SEQ ID NO: 176959 - DNA, 20 bp, synthetic construct
  source 1..20: mol_type = other DNA
tttttttttttttgagaaga

SEQ ID NO: 176960 - DNA, 20 bp, synthetic construct
  source 1..20: mol_type = other DNA
ttttttttttttttgagaag

SEQ ID NO: 176961 - DNA, 20 bp, synthetic construct
  source 1..20: mol_type = other DNA
tttttttttttttttgagaa

SEQ ID NO: 176962 - DNA, 20 bp, synthetic construct
  source 1..20: mol_type = other DNA
ttttttttttttttttgaga

SEQ ID NO: 176963 - DNA, 20 bp, synthetic construct
  source 1..20: mol_type = other DNA
tttttttttttttttttgag

SEQ ID NO: 176964 - DNA, 20 bp, synthetic construct
  source 1..20: mol_type = other DNA
ctttttttttttttttttga

SEQ ID NO: 176965 - DNA, 20 bp, synthetic construct
  source 1..20: mol_type = other DNA
cctttttttttttttttttg

SEQ ID NO: 176966 - DNA, 20 bp, synthetic construct
  source 1..20: mol_type = other DNA
tccttttttttttttttttt

SEQ ID NO: 176967 - DNA, 20 bp, synthetic construct
  source 1..20: mol_type = other DNA
ttcctttttttttttttttt

SEQ ID NO: 176968 - DNA, 20 bp, synthetic construct
  source 1..20: mol_type = other DNA
attccttttttttttttttt

SEQ ID NO: 176969 - DNA, 20 bp, synthetic construct
  source 1..20: mol_type = other DNA
gattcctttttttttttttt

SEQ ID NO: 176970 - DNA, 20 bp, synthetic construct
  source 1..20: mol_type = other DNA
agattccttttttttttttt

SEQ ID NO: 176971 - DNA, 20 bp, synthetic construct
  source 1..20: mol_type = other DNA
gagattcctttttttttttt

SEQ ID NO: 176972 - DNA, 20 bp, synthetic construct
  source 1..20: mol_type = other DNA
agagattccttttttttttt

SEQ ID NO: 176973 - DNA, 20 bp, synthetic construct
  source 1..20: mol_type = other DNA
aagagattcctttttttttt

SEQ ID NO: 176974 - DNA, 20 bp, synthetic construct
  source 1..20: mol_type = other DNA
aaagagattccttttttttt

SEQ ID NO: 176975 - DNA, 20 bp, synthetic construct
  source 1..20: mol_type = other DNA
caaagagattcctttttttt

SEQ ID NO: 176976 - DNA, 20 bp, synthetic construct
  source 1..20: mol_type = other DNA
ccaaagagattccttttttt

SEQ ID NO: 176977 - DNA, 20 bp, synthetic construct
  source 1..20: mol_type = other DNA
accaaagagattcctttttt

SEQ ID NO: 176978 - DNA, 20 bp, synthetic construct
  source 1..20: mol_type = other DNA
aaccaaagagattccttttt

SEQ ID NO: 176979 - DNA, 20 bp, synthetic construct
  source 1..20: mol_type = other DNA
aaaccaaagagattcctttt

SEQ ID NO: 176980 - DNA, 20 bp, synthetic construct
  source 1..20: mol_type = other DNA
aaaaccaaagagattccttt

SEQ ID NO: 176981 - DNA, 20 bp, synthetic construct
  source 1..20: mol_type = other DNA
taaaaccaaagagattcctt

SEQ ID NO: 176982 - DNA, 20 bp, synthetic construct
  source 1..20: mol_type = other DNA
ataaaaccaaagagattcct

SEQ ID NO: 176983 - DNA, 20 bp, synthetic construct
  source 1..20: mol_type = other DNA
tataaaaccaaagagattcc

SEQ ID NO: 176984 - DNA, 20 bp, synthetic construct
  source 1..20: mol_type = other DNA
atataaaaccaaagagattc

SEQ ID NO: 176985 - DNA, 20 bp, synthetic construct
  source 1..20: mol_type = other DNA
tatataaaaccaaagagatt

SEQ ID NO: 176986 - DNA, 20 bp, synthetic construct
  source 1..20: mol_type = other DNA
atatataaaaccaaagagat

SEQ ID NO: 176987 - DNA, 20 bp, synthetic construct
  source 1..20: mol_type = other DNA
tatatataaaaccaaagaga

SEQ ID NO: 176988 - DNA, 20 bp, synthetic construct
  source 1..20: mol_type = other DNA
atatatataaaaccaaagag

SEQ ID NO: 176989 - DNA, 20 bp, synthetic construct
  source 1..20: mol_type = other DNA
aatatatataaaaccaaaga

SEQ ID NO: 176990 - DNA, 20 bp, synthetic construct
  source 1..20: mol_type = other DNA
aaatatatataaaaccaaag

SEQ ID NO: 176991 - DNA, 20 bp, synthetic construct
  source 1..20: mol_type = other DNA
aaaatatatataaaaccaaa

SEQ ID NO: 176992 - DNA, 20 bp, synthetic construct
  source 1..20: mol_type = other DNA
aaaaatatatataaaaccaa

SEQ ID NO: 176993 - DNA, 20 bp, synthetic construct
  source 1..20: mol_type = other DNA
aaaaaatatatataaaacca

SEQ ID NO: 176994 - DNA, 20 bp, synthetic construct
  source 1..20: mol_type = other DNA
aaaaaaatatatataaaacc

SEQ ID NO: 176995 - DNA, 20 bp, synthetic construct
  source 1..20: mol_type = other DNA
aaaaaaaatatatataaaac

SEQ ID NO: 176996 - DNA, 20 bp, synthetic construct
  source 1..20: mol_type = other DNA
taaaaaaaatatatataaaa

SEQ ID NO: 176997 - DNA, 20 bp, synthetic construct
  source 1..20: mol_type = other DNA
ataaaaaaaatatatataaa

SEQ ID NO: 176998 - DNA, 20 bp, synthetic construct
  source 1..20: mol_type = other DNA
tataaaaaaaatatatataa

SEQ ID NO: 176999 - DNA, 20 bp, synthetic construct
  source 1..20: mol_type = other DNA
atataaaaaaaatatatata

SEQ ID NO: 177000 - DNA, 20 bp, synthetic construct
  source 1..20: mol_type = other DNA
tatataaaaaaaatatatat

SEQ ID NO: 177001 - DNA, 20 bp, synthetic construct
  source 1..20: mol_type = other DNA
atatataaaaaaaatatata

SEQ ID NO: 177002 - DNA, 20 bp, synthetic construct
  source 1..20: mol_type = other DNA
tatatataaaaaaaatatat

SEQ ID NO: 177003 - DNA, 20 bp, synthetic construct
  source 1..20: mol_type = other DNA
atatatataaaaaaaatata

SEQ ID NO: 177004 - DNA, 20 bp, synthetic construct
  source 1..20: mol_type = other DNA
tatatatataaaaaaaatat

SEQ ID NO: 177005 - DNA, 20 bp, synthetic construct
  source 1..20: mol_type = other DNA
ttatatatataaaaaaaata

SEQ ID NO: 177006 - DNA, 20 bp, synthetic construct
  source 1..20: mol_type = other DNA
attatatatataaaaaaaat

SEQ ID NO: 177007 - DNA, 20 bp, synthetic construct
  source 1..20: mol_type = other DNA
tattatatatataaaaaaaa

SEQ ID NO: 177008 - DNA, 20 bp, synthetic construct
  source 1..20: mol_type = other DNA
atattatatatataaaaaaa

SEQ ID NO: 177009 - DNA, 20 bp, synthetic construct
  source 1..20: mol_type = other DNA
tatattatatatataaaaaa

SEQ ID NO: 177010 - DNA, 20 bp, synthetic construct
  source 1..20: mol_type = other DNA
atatattatatatataaaaa

SEQ ID NO: 177011 - DNA, 20 bp, synthetic construct
  source 1..20: mol_type = other DNA
tatatattatatatataaaa

SEQ ID NO: 177012 - DNA, 20 bp, synthetic construct
  source 1..20: mol_type = other DNA
atatatattatatatataaa

SEQ ID NO: 177013 - DNA, 20 bp, synthetic construct
  source 1..20: mol_type = other DNA
aatatatattatatatataa

SEQ ID NO: 177014 - DNA, 20 bp, synthetic construct
  source 1..20: mol_type = other DNA
taatatatattatatatata

SEQ ID NO: 177015 - DNA, 20 bp, synthetic construct
  source 1..20: mol_type = other DNA
ttaatatatattatatatat

SEQ ID NO: 177016 - DNA, 20 bp, synthetic construct
  source 1..20: mol_type = other DNA
tttaatatatattatatata

SEQ ID NO: 177017 - DNA, 20 bp, synthetic construct
  source 1..20: mol_type = other DNA
ttttaatatatattatatat

SEQ ID NO: 177018 - DNA, 20 bp, synthetic construct
  source 1..20: mol_type = other DNA
attttaatatatattatata

SEQ ID NO: 177019 - DNA, 20 bp, synthetic construct
  source 1..20: mol_type = other DNA
tattttaatatatattatat

SEQ ID NO: 177020 - DNA, 20 bp, synthetic construct
  source 1..20: mol_type = other DNA
atattttaatatatattata

SEQ ID NO: 177021 - DNA, 20 bp, synthetic construct
  source 1..20: mol_type = other DNA
tatattttaatatatattat

SEQ ID NO: 177022 - DNA, 20 bp, synthetic construct
  source 1..20: mol_type = other DNA
ttatattttaatatatatta

SEQ ID NO: 177023 - DNA, 20 bp, synthetic construct
  source 1..20: mol_type = other DNA
attatattttaatatatatt

SEQ ID NO: 177024 - DNA, 20 bp, synthetic construct
  source 1..20: mol_type = other DNA
tattatattttaatatatat

SEQ ID NO: 177025 - DNA, 20 bp, synthetic construct
  source 1..20: mol_type = other DNA
atattatattttaatatata

SEQ ID NO: 177026 - DNA, 20 bp, synthetic construct
  source 1..20: mol_type = other DNA
tatattatattttaatatat

SEQ ID NO: 177027 - DNA, 20 bp, synthetic construct
  source 1..20: mol_type = other DNA
atatattatattttaatata

SEQ ID NO: 177028 - DNA, 20 bp, synthetic construct
  source 1..20: mol_type = other DNA
tatatattatattttaatat

SEQ ID NO: 177029 - DNA, 20 bp, synthetic construct
  source 1..20: mol_type = other DNA
atatatattatattttaata

SEQ ID NO: 177030 - DNA, 20 bp, synthetic construct
  source 1..20: mol_type = other DNA
tatatatattatattttaat

SEQ ID NO: 177031 - DNA, 20 bp, synthetic construct
  source 1..20: mol_type = other DNA
atatatatattatattttaa

SEQ ID NO: 177032 - DNA, 20 bp, synthetic construct
  source 1..20: mol_type = other DNA
aatatatatattatatttta

SEQ ID NO: 177033 - DNA, 20 bp, synthetic construct
  source 1..20: mol_type = other DNA
aaatatatatattatatttt

SEQ ID NO: 177034 - DNA, 20 bp, synthetic construct
  source 1..20: mol_type = other DNA
taaatatatatattatattt

SEQ ID NO: 177035 - DNA, 20 bp, synthetic construct
  source 1..20: mol_type = other DNA
ataaatatatatattatatt

SEQ ID NO: 177036 - DNA, 20 bp, synthetic construct
  source 1..20: mol_type = other DNA
tataaatatatatattatat

SEQ ID NO: 177037 - DNA, 20 bp, synthetic construct
  source 1..20: mol_type = other DNA
atataaatatatatattata

SEQ ID NO: 177038 - DNA, 20 bp, synthetic construct
  source 1..20: mol_type = other DNA
tatataaatatatatattat

SEQ ID NO: 177039 - DNA, 20 bp, synthetic construct
  source 1..20: mol_type = other DNA
ttatataaatatatatatta

SEQ ID NO: 177040 - DNA, 20 bp, synthetic construct
  source 1..20: mol_type = other DNA
attatataaatatatatatt

SEQ ID NO: 177041 - DNA, 20 bp, synthetic construct
  source 1..20: mol_type = other DNA
tattatataaatatatatat

SEQ ID NO: 177042 - DNA, 20 bp, synthetic construct
  source 1..20: mol_type = other DNA
atattatataaatatatata

SEQ ID NO: 177043 - DNA, 20 bp, synthetic construct
  source 1..20: mol_type = other DNA
tatattatataaatatatat

SEQ ID NO: 177044 - DNA, 20 bp, synthetic construct
  source 1..20: mol_type = other DNA
ttatattatataaatatata

SEQ ID NO: 177045 - DNA, 20 bp, synthetic construct
  source 1..20: mol_type = other DNA
attatattatataaatatat

SEQ ID NO: 177046 - DNA, 20 bp, synthetic construct
  source 1..20: mol_type = other DNA
tattatattatataaatata

SEQ ID NO: 177047 - DNA, 20 bp, synthetic construct
  source 1..20: mol_type = other DNA
atattatattatataaatat

SEQ ID NO: 177048 - DNA, 20 bp, synthetic construct
  source 1..20: mol_type = other DNA
tatattatattatataaata

SEQ ID NO: 177049 - DNA, 20 bp, synthetic construct
  source 1..20: mol_type = other DNA
atatattatattatataaat

SEQ ID NO: 177050 - DNA, 20 bp, synthetic construct
  source 1..20: mol_type = other DNA
tatatattatattatataaa

SEQ ID NO: 177051 - DNA, 20 bp, synthetic construct
  source 1..20: mol_type = other DNA
ttatatattatattatataa

SEQ ID NO: 177052 - DNA, 20 bp, synthetic construct
  source 1..20: mol_type = other DNA
tttatatattatattatata

SEQ ID NO: 177053 - DNA, 20 bp, synthetic construct
  source 1..20: mol_type = other DNA
atttatatattatattatat

SEQ ID NO: 177054 - DNA, 20 bp, synthetic construct
  source 1..20: mol_type = other DNA
tatttatatattatattata

SEQ ID NO: 177055 - DNA, 20 bp, synthetic construct
  source 1..20: mol_type = other DNA
atatttatatattatattat

SEQ ID NO: 177056 - DNA, 20 bp, synthetic construct
  source 1..20: mol_type = other DNA
tatatttatatattatatta

SEQ ID NO: 177057 - DNA, 20 bp, synthetic construct
  source 1..20: mol_type = other DNA
atatatttatatattatatt

SEQ ID NO: 177058 - DNA, 20 bp, synthetic construct
  source 1..20: mol_type = other DNA
aatatatttatatattatat

SEQ ID NO: 177059 - DNA, 20 bp, synthetic construct
  source 1..20: mol_type = other DNA
taatatatttatatattata

SEQ ID NO: 177060 - DNA, 20 bp, synthetic construct
  source 1..20: mol_type = other DNA
ataatatatttatatattat

SEQ ID NO: 177061 - DNA, 20 bp, synthetic construct
  source 1..20: mol_type = other DNA
tataatatatttatatatta

SEQ ID NO: 177062 - DNA, 20 bp, synthetic construct
  source 1..20: mol_type = other DNA
atataatatatttatatatt

SEQ ID NO: 177063 - DNA, 20 bp, synthetic construct
  source 1..20: mol_type = other DNA
tatataatatatttatatat

SEQ ID NO: 177064 - DNA, 20 bp, synthetic construct
  source 1..20: mol_type = other DNA
atatataatatatttatata

SEQ ID NO: 177065 - DNA, 20 bp, synthetic construct
  source 1..20: mol_type = other DNA
aatatataatatatttatat

SEQ ID NO: 177066 - DNA, 20 bp, synthetic construct
  source 1..20: mol_type = other DNA
taatatataatatatttata

SEQ ID NO: 177067 - DNA, 20 bp, synthetic construct
  source 1..20: mol_type = other DNA
ataatatataatatatttat

SEQ ID NO: 177068 - DNA, 20 bp, synthetic construct
  source 1..20: mol_type = other DNA
tataatatataatatattta

SEQ ID NO: 177069 - DNA, 20 bp, synthetic construct
  source 1..20: mol_type = other DNA
atataatatataatatattt

SEQ ID NO: 177070 - DNA, 20 bp, synthetic construct
  source 1..20: mol_type = other DNA
tatataatatataatatatt

SEQ ID NO: 177071 - DNA, 20 bp, synthetic construct
  source 1..20: mol_type = other DNA
atatataatatataatatat

SEQ ID NO: 177072 - DNA, 20 bp, synthetic construct
  source 1..20: mol_type = other DNA
aatatataatatataatata

SEQ ID NO: 177073 - DNA, 20 bp, synthetic construct
  source 1..20: mol_type = other DNA
aaatatataatatataatat

SEQ ID NO: 177074 - DNA, 20 bp, synthetic construct
  source 1..20: mol_type = other DNA
aaaatatataatatataata

SEQ ID NO: 177075 - DNA, 20 bp, synthetic construct
  source 1..20: mol_type = other DNA
taaaatatataatatataat

SEQ ID NO: 177076 - DNA, 20 bp, synthetic construct
  source 1..20: mol_type = other DNA
ataaaatatataatatataa

SEQ ID NO: 177077 - DNA, 20 bp, synthetic construct
  source 1..20: mol_type = other DNA
tataaaatatataatatata

SEQ ID NO: 177078 - DNA, 20 bp, synthetic construct
  source 1..20: mol_type = other DNA
atataaaatatataatatat

SEQ ID NO: 177079 - DNA, 20 bp, synthetic construct
  source 1..20: mol_type = other DNA
tatataaaatatataatata

SEQ ID NO: 177080 - DNA, 20 bp, synthetic construct
  source 1..20: mol_type = other DNA
atatataaaatatataatat

SEQ ID NO: 177081 - DNA, 20 bp, synthetic construct
  source 1..20: mol_type = other DNA
aatatataaaatatataata

SEQ ID NO: 177082 - DNA, 20 bp, synthetic construct
  source 1..20: mol_type = other DNA
taatatataaaatatataat

SEQ ID NO: 177083 - DNA, 20 bp, synthetic construct
  source 1..20: mol_type = other DNA
ataatatataaaatatataa

SEQ ID NO: 177084 - DNA, 20 bp, synthetic construct
  source 1..20: mol_type = other DNA
tataatatataaaatatata

SEQ ID NO: 177085 - DNA, 20 bp, synthetic construct
  source 1..20: mol_type = other DNA
atataatatataaaatatat

SEQ ID NO: 177086 - DNA, 20 bp, synthetic construct
  source 1..20: mol_type = other DNA
tatataatatataaaatata

SEQ ID NO: 177087 - DNA, 20 bp, synthetic construct
  source 1..20: mol_type = other DNA
atatataatatataaaatat

SEQ ID NO: 177088 - DNA, 20 bp, synthetic construct
  source 1..20: mol_type = other DNA
aatatataatatataaaata

SEQ ID NO: 177089 - DNA, 20 bp, synthetic construct
  source 1..20: mol_type = other DNA
taatatataatatataaaat

SEQ ID NO: 177090 - DNA, 20 bp, synthetic construct
  source 1..20: mol_type = other DNA
ataatatataatatataaaa

SEQ ID NO: 177091 - DNA, 20 bp, synthetic construct
  source 1..20: mol_type = other DNA
tataatatataatatataaa

SEQ ID NO: 177092 - DNA, 20 bp, synthetic construct
  source 1..20: mol_type = other DNA
atataatatataatatataa

SEQ ID NO: 177093 - DNA, 20 bp, synthetic construct
  source 1..20: mol_type = other DNA
tatataatatataatatata

SEQ ID NO: 177094 - DNA, 20 bp, synthetic construct
  source 1..20: mol_type = other DNA
atatataatatataatatat

SEQ ID NO: 177095 - DNA, 20 bp, synthetic construct
  source 1..20: mol_type = other DNA
tatatataatatataatata

SEQ ID NO: 177096 - DNA, 20 bp, synthetic construct
  source 1..20: mol_type = other DNA
atatatataatatataatat

SEQ ID NO: 177097 - DNA, 20 bp, synthetic construct
  source 1..20: mol_type = other DNA
aatatatataatatataata

SEQ ID NO: 177098 - DNA, 20 bp, synthetic construct
  source 1..20: mol_type = other DNA
taatatatataatatataat

SEQ ID NO: 177099 - DNA, 20 bp, synthetic construct
  source 1..20: mol_type = other DNA
ataatatatataatatataa

SEQ ID NO: 177100 - DNA, 20 bp, synthetic construct
  source 1..20: mol_type = other DNA
tataatatatataatatata

SEQ ID NO: 177101 - DNA, 20 bp, synthetic construct
  source 1..20: mol_type = other DNA
atataatatatataatatat

SEQ ID NO: 177102 - DNA, 20 bp, synthetic construct
  source 1..20: mol_type = other DNA
tatataatatatataatata

SEQ ID NO: 177103 - DNA, 20 bp, synthetic construct
  source 1..20: mol_type = other DNA
atatataatatatataatat

SEQ ID NO: 177104 - DNA, 20 bp, synthetic construct
  source 1..20: mol_type = other DNA
aatatataatatatataata

SEQ ID NO: 177105 - DNA, 20 bp, synthetic construct
  source 1..20: mol_type = other DNA
taatatataatatatataat

SEQ ID NO: 177106 - DNA, 20 bp, synthetic construct
  source 1..20: mol_type = other DNA
ataatatataatatatataa

SEQ ID NO: 177107 - DNA, 20 bp, synthetic construct
  source 1..20: mol_type = other DNA
tataatatataatatatata

SEQ ID NO: 177108 - DNA, 20 bp, synthetic construct
  source 1..20: mol_type = other DNA
atataatatataatatatat

SEQ ID NO: 177109 - DNA, 20 bp, synthetic construct
  source 1..20: mol_type = other DNA
tatataatatataatatata

SEQ ID NO: 177110 - DNA, 20 bp, synthetic construct
  source 1..20: mol_type = other DNA
atatataatatataatatat

SEQ ID NO: 177111 - DNA, 20 bp, synthetic construct
  source 1..20: mol_type = other DNA
aatatataatatataatata

SEQ ID NO: 177112 - DNA, 20 bp, synthetic construct
  source 1..20: mol_type = other DNA
aaatatataatatataatat

SEQ ID NO: 177113 - DNA, 20 bp, synthetic construct
  source 1..20: mol_type = other DNA
taaatatataatatataata

SEQ ID NO: 177114 - DNA, 20 bp, synthetic construct
  source 1..20: mol_type = other DNA
ataaatatataatatataat

SEQ ID NO: 177115 - DNA, 20 bp, synthetic construct
  source 1..20: mol_type = other DNA
tataaatatataatatataa

SEQ ID NO: 177116 - DNA, 20 bp, synthetic construct
  source 1..20: mol_type = other DNA
atataaatatataatatata

SEQ ID NO: 177117 - DNA, 20 bp, synthetic construct
  source 1..20: mol_type = other DNA
tatataaatatataatatat

SEQ ID NO: 177118 - DNA, 20 bp, synthetic construct
  source 1..20: mol_type = other DNA
atatataaatatataatata

SEQ ID NO: 177119 - DNA, 20 bp, synthetic construct
  source 1..20: mol_type = other DNA
aatatataaatatataatat

SEQ ID NO: 177120 - DNA, 20 bp, synthetic construct
  source 1..20: mol_type = other DNA
aaatatataaatatataata

SEQ ID NO: 177121 - DNA, 20 bp, synthetic construct
  source 1..20: mol_type = other DNA
taaatatataaatatataat

SEQ ID NO: 177122 - DNA, 20 bp, synthetic construct
  source 1..20: mol_type = other DNA
ataaatatataaatatataa

SEQ ID NO: 177123 - DNA, 20 bp, synthetic construct
  source 1..20: mol_type = other DNA
tataaatatataaatatata

SEQ ID NO: 177124 - DNA, 20 bp, synthetic construct
  source 1..20: mol_type = other DNA
atataaatatataaatatat

SEQ ID NO: 177125 - DNA, 20 bp, synthetic construct
  source 1..20: mol_type = other DNA
tatataaatatataaatata

SEQ ID NO: 177126 - DNA, 20 bp, synthetic construct
  source 1..20: mol_type = other DNA
atatataaatatataaatat

SEQ ID NO: 177127 - DNA, 20 bp, synthetic construct
  source 1..20: mol_type = other DNA
aatatataaatatataaata

SEQ ID NO: 177128 - DNA, 20 bp, synthetic construct
  source 1..20: mol_type = other DNA
taatatataaatatataaat

SEQ ID NO: 177129 - DNA, 20 bp, synthetic construct
  source 1..20: mol_type = other DNA
ataatatataaatatataaa

SEQ ID NO: 177130 - DNA, 20 bp, synthetic construct
  source 1..20: mol_type = other DNA
tataatatataaatatataa

SEQ ID NO: 177131 - DNA, 20 bp, synthetic construct
  source 1..20: mol_type = other DNA
atataatatataaatatata

SEQ ID NO: 177132 - DNA, 20 bp, synthetic construct
  source 1..20: mol_type = other DNA
tatataatatataaatatat

SEQ ID NO: 177133 - DNA, 20 bp, synthetic construct
  source 1..20: mol_type = other DNA
atatataatatataaatata

SEQ ID NO: 177134 - DNA, 20 bp, synthetic construct
  source 1..20: mol_type = other DNA
tatatataatatataaatat

SEQ ID NO: 177135 - DNA, 20 bp, synthetic construct
  source 1..20: mol_type = other DNA
atatatataatatataaata

SEQ ID NO: 177136 - DNA, 20 bp, synthetic construct
  source 1..20: mol_type = other DNA
aatatatataatatataaat

SEQ ID NO: 177137 - DNA, 20 bp, synthetic construct
  source 1..20: mol_type = other DNA
aaatatatataatatataaa

SEQ ID NO: 177138 - DNA, 20 bp, synthetic construct
  source 1..20: mol_type = other DNA
taaatatatataatatataa

SEQ ID NO: 177139 - DNA, 20 bp, synthetic construct
  source 1..20: mol_type = other DNA
ataaatatatataatatata

SEQ ID NO: 177140 - DNA, 20 bp, synthetic construct
  source 1..20: mol_type = other DNA
tataaatatatataatatat

SEQ ID NO: 177141 - DNA, 20 bp, synthetic construct
  source 1..20: mol_type = other DNA
atataaatatatataatata

SEQ ID NO: 177142 - DNA, 20 bp, synthetic construct
  source 1..20: mol_type = other DNA
tatataaatatatataatat

SEQ ID NO: 177143 - DNA, 20 bp, synthetic construct
  source 1..20: mol_type = other DNA
atatataaatatatataata

SEQ ID NO: 177144 - DNA, 20 bp, synthetic construct
  source 1..20: mol_type = other DNA
aatatataaatatatataat

SEQ ID NO: 177145 - DNA, 20 bp, synthetic construct
  source 1..20: mol_type = other DNA
taatatataaatatatataa

SEQ ID NO: 177146 - DNA, 20 bp, synthetic construct
  source 1..20: mol_type = other DNA
ataatatataaatatatata

SEQ ID NO: 177147 - DNA, 20 bp, synthetic construct
  source 1..20: mol_type = other DNA
tataatatataaatatatat

SEQ ID NO: 177148 - DNA, 20 bp, synthetic construct
  source 1..20: mol_type = other DNA
atataatatataaatatata

SEQ ID NO: 177149 - DNA, 20 bp, synthetic construct
  source 1..20: mol_type = other DNA
tatataatatataaatatat

SEQ ID NO: 177150 - DNA, 20 bp, synthetic construct
  source 1..20: mol_type = other DNA
atatataatatataaatata

SEQ ID NO: 177151 - DNA, 20 bp, synthetic construct
  source 1..20: mol_type = other DNA
aatatataatatataaatat

SEQ ID NO: 177152 - DNA, 20 bp, synthetic construct
  source 1..20: mol_type = other DNA
aaatatataatatataaata

SEQ ID NO: 177153 - DNA, 20 bp, synthetic construct
  source 1..20: mol_type = other DNA
taaatatataatatataaat

SEQ ID NO: 177154 - DNA, 20 bp, synthetic construct
  source 1..20: mol_type = other DNA
ataaatatataatatataaa

SEQ ID NO: 177155 - DNA, 20 bp, synthetic construct
  source 1..20: mol_type = other DNA
tataaatatataatatataa

SEQ ID NO: 177156 - DNA, 20 bp, synthetic construct
  source 1..20: mol_type = other DNA
atataaatatataatatata

SEQ ID NO: 177157 - DNA, 20 bp, synthetic construct
  source 1..20: mol_type = other DNA
tatataaatatataatatat

SEQ ID NO: 177158 - DNA, 20 bp, synthetic construct
  source 1..20: mol_type = other DNA
atatataaatatataatata

SEQ ID NO: 177159 - DNA, 20 bp, synthetic construct
  source 1..20: mol_type = other DNA
tatatataaatatataatat

SEQ ID NO: 177160 - DNA, 20 bp, synthetic construct
  source 1..20: mol_type = other DNA
atatatataaatatataata

SEQ ID NO: 177161 - DNA, 20 bp, synthetic construct
  source 1..20: mol_type = other DNA
aatatatataaatatataat

SEQ ID NO: 177162 - DNA, 20 bp, synthetic construct
  source 1..20: mol_type = other DNA
taatatatataaatatataa

SEQ ID NO: 177163 - DNA, 20 bp, synthetic construct
  source 1..20: mol_type = other DNA
ataatatatataaatatata

SEQ ID NO: 177164 - DNA, 20 bp, synthetic construct
  source 1..20: mol_type = other DNA
tataatatatataaatatat

SEQ ID NO: 177165 - DNA, 20 bp, synthetic construct
  source 1..20: mol_type = other DNA
atataatatatataaatata

SEQ ID NO: 177166 - DNA, 20 bp, synthetic construct
  source 1..20: mol_type = other DNA
tatataatatatataaatat

SEQ ID NO: 177167 - DNA, 20 bp, synthetic construct
  source 1..20: mol_type = other DNA
atatataatatatataaata

SEQ ID NO: 177168 - DNA, 20 bp, synthetic construct
  source 1..20: mol_type = other DNA
aatatataatatatataaat

SEQ ID NO: 177169 - DNA, 20 bp, synthetic construct
  source 1..20: mol_type = other DNA
aaatatataatatatataaa

SEQ ID NO: 177170 - DNA, 20 bp, synthetic construct
  source 1..20: mol_type = other DNA
taaatatataatatatataa

SEQ ID NO: 177171 - DNA, 20 bp, synthetic construct
  source 1..20: mol_type = other DNA
ataaatatataatatatata

SEQ ID NO: 177172 - DNA, 20 bp, synthetic construct
  source 1..20: mol_type = other DNA
tataaatatataatatatat

SEQ ID NO: 177173 - DNA, 20 bp, synthetic construct
  source 1..20: mol_type = other DNA
atataaatatataatatata

SEQ ID NO: 177174 - DNA, 20 bp, synthetic construct
  source 1..20: mol_type = other DNA
tatataaatatataatatat

SEQ ID NO: 177175 - DNA, 20 bp, synthetic construct
  source 1..20: mol_type = other DNA
atatataaatatataatata

SEQ ID NO: 177176 - DNA, 20 bp, synthetic construct
  source 1..20: mol_type = other DNA
tatatataaatatataatat

SEQ ID NO: 177177 - DNA, 20 bp, synthetic construct
  source 1..20: mol_type = other DNA
ttatatataaatatataata

SEQ ID NO: 177178 - DNA, 20 bp, synthetic construct
  source 1..20: mol_type = other DNA
attatatataaatatataat

SEQ ID NO: 177179 - DNA, 20 bp, synthetic construct
  source 1..20: mol_type = other DNA
tattatatataaatatataa

SEQ ID NO: 177180 - DNA, 20 bp, synthetic construct
  source 1..20: mol_type = other DNA
atattatatataaatatata

SEQ ID NO: 177181 - DNA, 20 bp, synthetic construct
  source 1..20: mol_type = other DNA
tatattatatataaatatat

SEQ ID NO: 177182 - DNA, 20 bp, synthetic construct
  source 1..20: mol_type = other DNA
atatattatatataaatata

SEQ ID NO: 177183 - DNA, 20 bp, synthetic construct
  source 1..20: mol_type = other DNA
tatatattatatataaatat

SEQ ID NO: 177184 - DNA, 20 bp, synthetic construct
  source 1..20: mol_type = other DNA
atatatattatatataaata

SEQ ID NO: 177185 - DNA, 20 bp, synthetic construct
  source 1..20: mol_type = other DNA
aatatatattatatataaat

SEQ ID NO: 177186 - DNA, 20 bp, synthetic construct
  source 1..20: mol_type = other DNA
taatatatattatatataaa

SEQ ID NO: 177187 - DNA, 20 bp, synthetic construct
  source 1..20: mol_type = other DNA
ataatatatattatatataa

SEQ ID NO: 177188 - DNA, 20 bp, synthetic construct
  source 1..20: mol_type = other DNA
tataatatatattatatata

SEQ ID NO: 177189 - DNA, 20 bp, synthetic construct
  source 1..20: mol_type = other DNA
atataatatatattatatat

SEQ ID NO: 177190 - DNA, 20 bp, synthetic construct
  source 1..20: mol_type = other DNA
tatataatatatattatata

SEQ ID NO: 177191 - DNA, 20 bp, synthetic construct
  source 1..20: mol_type = other DNA
atatataatatatattatat

SEQ ID NO: 177192 - DNA, 20 bp, synthetic construct
  source 1..20: mol_type = other DNA
aatatataatatatattata

SEQ ID NO: 177193 - DNA, 20 bp, synthetic construct
  source 1..20: mol_type = other DNA
taatatataatatatattat

SEQ ID NO: 177194 - DNA, 20 bp, synthetic construct
  source 1..20: mol_type = other DNA
ataatatataatatatatta

SEQ ID NO: 177195 - DNA, 20 bp, synthetic construct
  source 1..20: mol_type = other DNA
tataatatataatatatatt

SEQ ID NO: 177196 - DNA, 20 bp, synthetic construct
  source 1..20: mol_type = other DNA
atataatatataatatatat

SEQ ID NO: 177197 - DNA, 20 bp, synthetic construct
  source 1..20: mol_type = other DNA
tatataatatataatatata

SEQ ID NO: 177198 - DNA, 20 bp, synthetic construct
  source 1..20: mol_type = other DNA
atatataatatataatatat

SEQ ID NO: 177199 - DNA, 20 bp, synthetic construct
  source 1..20: mol_type = other DNA
aatatataatatataatata

SEQ ID NO: 177200 - DNA, 20 bp, synthetic construct
  source 1..20: mol_type = other DNA
taatatataatatataatat

SEQ ID NO: 177201 - DNA, 20 bp, synthetic construct
  source 1..20: mol_type = other DNA
ataatatataatatataata

SEQ ID NO: 177202 - DNA, 20 bp, synthetic construct
  source 1..20: mol_type = other DNA
tataatatataatatataat

SEQ ID NO: 177203 - DNA, 20 bp, synthetic construct
  source 1..20: mol_type = other DNA
atataatatataatatataa

SEQ ID NO: 177204 - DNA, 20 bp, synthetic construct
  source 1..20: mol_type = other DNA
tatataatatataatatata

SEQ ID NO: 177205 - DNA, 20 bp, synthetic construct
  source 1..20: mol_type = other DNA
atatataatatataatatat

SEQ ID NO: 177206 - DNA, 20 bp, synthetic construct
  source 1..20: mol_type = other DNA
aatatataatatataatata

SEQ ID NO: 177207 - DNA, 20 bp, synthetic construct
  source 1..20: mol_type = other DNA
taatatataatatataatat

SEQ ID NO: 177208 - DNA, 20 bp, synthetic construct
  source 1..20: mol_type = other DNA
ataatatataatatataata

SEQ ID NO: 177209 - DNA, 20 bp, synthetic construct
  source 1..20: mol_type = other DNA
tataatatataatatataat

SEQ ID NO: 177210 - DNA, 20 bp, synthetic construct
  source 1..20: mol_type = other DNA
atataatatataatatataa

SEQ ID NO: 177211 - DNA, 20 bp, synthetic construct
  source 1..20: mol_type = other DNA
tatataatatataatatata

SEQ ID NO: 177212 - DNA, 20 bp, synthetic construct
  source 1..20: mol_type = other DNA
atatataatatataatatat

SEQ ID NO: 177213 - DNA, 20 bp, synthetic construct
  source 1..20: mol_type = other DNA
aatatataatatataatata

SEQ ID NO: 177214 - DNA, 20 bp, synthetic construct
  source 1..20: mol_type = other DNA
taatatataatatataatat

SEQ ID NO: 177215 - DNA, 20 bp, synthetic construct
  source 1..20: mol_type = other DNA
ataatatataatatataata

SEQ ID NO: 177216 - DNA, 20 bp, synthetic construct
  source 1..20: mol_type = other DNA
tataatatataatatataat

SEQ ID NO: 177217 - DNA, 20 bp, synthetic construct
  source 1..20: mol_type = other DNA
atataatatataatatataa

SEQ ID NO: 177218 - DNA, 20 bp, synthetic construct
  source 1..20: mol_type = other DNA
tatataatatataatatata

SEQ ID NO: 177219 - DNA, 20 bp, synthetic construct
  source 1..20: mol_type = other DNA
atatataatatataatatat

SEQ ID NO: 177220 - DNA, 20 bp, synthetic construct
  source 1..20: mol_type = other DNA
aatatataatatataatata

SEQ ID NO: 177221 - DNA, 20 bp, synthetic construct
  source 1..20: mol_type = other DNA
aaatatataatatataatat

SEQ ID NO: 177222 - DNA, 20 bp, synthetic construct
  source 1..20: mol_type = other DNA
taaatatataatatataata

SEQ ID NO: 177223 - DNA, 20 bp, synthetic construct
  source 1..20: mol_type = other DNA
ataaatatataatatataat

SEQ ID NO: 177224 - DNA, 20 bp, synthetic construct
  source 1..20: mol_type = other DNA
tataaatatataatatataa

SEQ ID NO: 177225 - DNA, 20 bp, synthetic construct
  source 1..20: mol_type = other DNA
atataaatatataatatata

SEQ ID NO: 177226 - DNA, 20 bp, synthetic construct
  source 1..20: mol_type = other DNA
tatataaatatataatatat

SEQ ID NO: 177227 - DNA, 20 bp, synthetic construct
  source 1..20: mol_type = other DNA
atatataaatatataatata

SEQ ID NO: 177228 - DNA, 20 bp, synthetic construct
  source 1..20: mol_type = other DNA
tatatataaatatataatat

SEQ ID NO: 177229 - DNA, 20 bp, synthetic construct
  source 1..20: mol_type = other DNA
atatatataaatatataata

SEQ ID NO: 177230 - DNA, 20 bp, synthetic construct
  source 1..20: mol_type = other DNA
aatatatataaatatataat

SEQ ID NO: 177231 - DNA, 20 bp, synthetic construct
  source 1..20: mol_type = other DNA
taatatatataaatatataa

SEQ ID NO: 177232 - DNA, 20 bp, synthetic construct
  source 1..20: mol_type = other DNA
ataatatatataaatatata

SEQ ID NO: 177233 - DNA, 20 bp, synthetic construct
  source 1..20: mol_type = other DNA
tataatatatataaatatat

SEQ ID NO: 177234 - DNA, 20 bp, synthetic construct
  source 1..20: mol_type = other DNA
atataatatatataaatata

SEQ ID NO: 177235 - DNA, 20 bp, synthetic construct
  source 1..20: mol_type = other DNA
tatataatatatataaatat

SEQ ID NO: 177236 - DNA, 20 bp, synthetic construct
  source 1..20: mol_type = other DNA
atatataatatatataaata

SEQ ID NO: 177237 - DNA, 20 bp, synthetic construct
  source 1..20: mol_type = other DNA
aatatataatatatataaat

SEQ ID NO: 177238 - DNA, 20 bp, synthetic construct
  source 1..20: mol_type = other DNA
taatatataatatatataaa

SEQ ID NO: 177239 - DNA, 20 bp, synthetic construct
  source 1..20: mol_type = other DNA
ataatatataatatatataa

SEQ ID NO: 177240 - DNA, 20 bp, synthetic construct
  source 1..20: mol_type = other DNA
tataatatataatatatata

SEQ ID NO: 177241 - DNA, 20 bp, synthetic construct
  source 1..20: mol_type = other DNA
atataatatataatatatat

SEQ ID NO: 177242 - DNA, 20 bp, synthetic construct
  source 1..20: mol_type = other DNA
tatataatatataatatata

SEQ ID NO: 177243 - DNA, 20 bp, synthetic construct
  source 1..20: mol_type = other DNA
atatataatatataatatat

SEQ ID NO: 177244 - DNA, 20 bp, synthetic construct
  source 1..20: mol_type = other DNA
tatatataatatataatata

SEQ ID NO: 177245 - DNA, 20 bp, synthetic construct
  source 1..20: mol_type = other DNA
atatatataatatataatat

SEQ ID NO: 177246 - DNA, 20 bp, synthetic construct
  source 1..20: mol_type = other DNA
aatatatataatatataata

SEQ ID NO: 177247 - DNA, 20 bp, synthetic construct
  source 1..20: mol_type = other DNA
taatatatataatatataat

SEQ ID NO: 177248 - DNA, 20 bp, synthetic construct
  source 1..20: mol_type = other DNA
ataatatatataatatataa

SEQ ID NO: 177249 - DNA, 20 bp, synthetic construct
  source 1..20: mol_type = other DNA
tataatatatataatatata

SEQ ID NO: 177250 - DNA, 20 bp, synthetic construct
  source 1..20: mol_type = other DNA
atataatatatataatatat

SEQ ID NO: 177251 - DNA, 20 bp, synthetic construct
  source 1..20: mol_type = other DNA
tatataatatatataatata

SEQ ID NO: 177252 - DNA, 20 bp, synthetic construct
  source 1..20: mol_type = other DNA
atatataatatatataatat

SEQ ID NO: 177253 - DNA, 20 bp, synthetic construct
  source 1..20: mol_type = other DNA
aatatataatatatataata

SEQ ID NO: 177254 - DNA, 20 bp, synthetic construct
  source 1..20: mol_type = other DNA
taatatataatatatataat

SEQ ID NO: 177255 - DNA, 20 bp, synthetic construct
  source 1..20: mol_type = other DNA
ataatatataatatatataa

SEQ ID NO: 177256 - DNA, 20 bp, synthetic construct
  source 1..20: mol_type = other DNA
tataatatataatatatata

SEQ ID NO: 177257 - DNA, 20 bp, synthetic construct
  source 1..20: mol_type = other DNA
atataatatataatatatat

SEQ ID NO: 177258 - DNA, 20 bp, synthetic construct
  source 1..20: mol_type = other DNA
tatataatatataatatata

SEQ ID NO: 177259 - DNA, 20 bp, synthetic construct
  source 1..20: mol_type = other DNA
atatataatatataatatat

SEQ ID NO: 177260 - DNA, 20 bp, synthetic construct
  source 1..20: mol_type = other DNA
aatatataatatataatata

SEQ ID NO: 177261 - DNA, 20 bp, synthetic construct
  source 1..20: mol_type = other DNA
aaatatataatatataatat

SEQ ID NO: 177262 - DNA, 20 bp, synthetic construct
  source 1..20: mol_type = other DNA
taaatatataatatataata

SEQ ID NO: 177263 - DNA, 20 bp, synthetic construct
  source 1..20: mol_type = other DNA
ataaatatataatatataat

SEQ ID NO: 177264 - DNA, 20 bp, synthetic construct
  source 1..20: mol_type = other DNA
tataaatatataatatataa

SEQ ID NO: 177265 - DNA, 20 bp, synthetic construct
  source 1..20: mol_type = other DNA
atataaatatataatatata

SEQ ID NO: 177266 - DNA, 20 bp, synthetic construct
  source 1..20: mol_type = other DNA
tatataaatatataatatat

SEQ ID NO: 177267 - DNA, 20 bp, synthetic construct
  source 1..20: mol_type = other DNA
atatataaatatataatata

SEQ ID NO: 177268 - DNA, 20 bp, synthetic construct
  source 1..20: mol_type = other DNA
aatatataaatatataatat

SEQ ID NO: 177269 - DNA, 20 bp, synthetic construct
  source 1..20: mol_type = other DNA
taatatataaatatataata

SEQ ID NO: 177270 - DNA, 20 bp, synthetic construct
  source 1..20: mol_type = other DNA
ataatatataaatatataat

SEQ ID NO: 177271 - DNA, 20 bp, synthetic construct
  source 1..20: mol_type = other DNA
tataatatataaatatataa

SEQ ID NO: 177272 - DNA, 20 bp, synthetic construct
  source 1..20: mol_type = other DNA
atataatatataaatatata

SEQ ID NO: 177273 - DNA, 20 bp, synthetic construct
  source 1..20: mol_type = other DNA
tatataatatataaatatat

SEQ ID NO: 177274 - DNA, 20 bp, synthetic construct
  source 1..20: mol_type = other DNA
atatataatatataaatata

SEQ ID NO: 177275 - DNA, 20 bp, synthetic construct
  source 1..20: mol_type = other DNA
aatatataatatataaatat

SEQ ID NO: 177276 - DNA, 20 bp, synthetic construct
  source 1..20: mol_type = other DNA
aaatatataatatataaata

SEQ ID NO: 177277 - DNA, 20 bp, synthetic construct
  source 1..20: mol_type = other DNA
taaatatataatatataaat

SEQ ID NO: 177278 - DNA, 20 bp, synthetic construct
  source 1..20: mol_type = other DNA
ataaatatataatatataaa

SEQ ID NO: 177279 - DNA, 20 bp, synthetic construct
  source 1..20: mol_type = other DNA
tataaatatataatatataa

SEQ ID NO: 177280 - DNA, 20 bp, synthetic construct
  source 1..20: mol_type = other DNA
atataaatatataatatata

SEQ ID NO: 177281 - DNA, 20 bp, synthetic construct
  source 1..20: mol_type = other DNA
tatataaatatataatatat

SEQ ID NO: 177282 - DNA, 20 bp, synthetic construct
  source 1..20: mol_type = other DNA
atatataaatatataatata

SEQ ID NO: 177283 - DNA, 20 bp, synthetic construct
  source 1..20: mol_type = other DNA
tatatataaatatataatat

SEQ ID NO: 177284 - DNA, 20 bp, synthetic construct
  source 1..20: mol_type = other DNA
atatatataaatatataata

SEQ ID NO: 177285 - DNA, 20 bp, synthetic construct
  source 1..20: mol_type = other DNA
aatatatataaatatataat

SEQ ID NO: 177286 - DNA, 20 bp, synthetic construct
  source 1..20: mol_type = other DNA
taatatatataaatatataa

SEQ ID NO: 177287 - DNA, 20 bp, synthetic construct
  source 1..20: mol_type = other DNA
ataatatatataaatatata

SEQ ID NO: 177288 - DNA, 20 bp, synthetic construct
  source 1..20: mol_type = other DNA
tataatatatataaatatat

SEQ ID NO: 177289 - DNA, 20 bp, synthetic construct
  source 1..20: mol_type = other DNA
atataatatatataaatata

SEQ ID NO: 177290 - DNA, 20 bp, synthetic construct
  source 1..20: mol_type = other DNA
tatataatatatataaatat

SEQ ID NO: 177291 - DNA, 20 bp, synthetic construct
  source 1..20: mol_type = other DNA
atatataatatatataaata

SEQ ID NO: 177292 - DNA, 20 bp, synthetic construct
  source 1..20: mol_type = other DNA
aatatataatatatataaat

SEQ ID NO: 177293 - DNA, 20 bp, synthetic construct
  source 1..20: mol_type = other DNA
taatatataatatatataaa

SEQ ID NO: 177294 - DNA, 20 bp, synthetic construct
  source 1..20: mol_type = other DNA
ataatatataatatatataa

SEQ ID NO: 177295 - DNA, 20 bp, synthetic construct
  source 1..20: mol_type = other DNA
tataatatataatatatata

SEQ ID NO: 177296 - DNA, 20 bp, synthetic construct
  source 1..20: mol_type = other DNA
atataatatataatatatat

SEQ ID NO: 177297 - DNA, 20 bp, synthetic construct
  source 1..20: mol_type = other DNA
tatataatatataatatata

SEQ ID NO: 177298 - DNA, 20 bp, synthetic construct
  source 1..20: mol_type = other DNA
atatataatatataatatat

SEQ ID NO: 177299 - DNA, 20 bp, synthetic construct
  source 1..20: mol_type = other DNA
aatatataatatataatata

SEQ ID NO: 177300 - DNA, 20 bp, synthetic construct
  source 1..20: mol_type = other DNA
taatatataatatataatat

SEQ ID NO: 177301 - DNA, 20 bp, synthetic construct
  source 1..20: mol_type = other DNA
ataatatataatatataata

SEQ ID NO: 177302 - DNA, 20 bp, synthetic construct
  source 1..20: mol_type = other DNA
tataatatataatatataat

SEQ ID NO: 177303 - DNA, 20 bp, synthetic construct
  source 1..20: mol_type = other DNA
atataatatataatatataa

SEQ ID NO: 177304 - DNA, 20 bp, synthetic construct
  source 1..20: mol_type = other DNA
tatataatatataatatata

SEQ ID NO: 177305 - DNA, 20 bp, synthetic construct
  source 1..20: mol_type = other DNA
atatataatatataatatat

SEQ ID NO: 177306 - DNA, 20 bp, synthetic construct
  source 1..20: mol_type = other DNA
aatatataatatataatata

SEQ ID NO: 177307 - DNA, 20 bp, synthetic construct
  source 1..20: mol_type = other DNA
aaatatataatatataatat

SEQ ID NO: 177308 - DNA, 20 bp, synthetic construct
  source 1..20: mol_type = other DNA
taaatatataatatataata

SEQ ID NO: 177309 - DNA, 20 bp, synthetic construct
  source 1..20: mol_type = other DNA
ataaatatataatatataat

SEQ ID NO: 177310 - DNA, 20 bp, synthetic construct
  source 1..20: mol_type = other DNA
tataaatatataatatataa

SEQ ID NO: 177311 - DNA, 20 bp, synthetic construct
  source 1..20: mol_type = other DNA
atataaatatataatatata

SEQ ID NO: 177312 - DNA, 20 bp, synthetic construct
  source 1..20: mol_type = other DNA
tatataaatatataatatat

SEQ ID NO: 177313 - DNA, 20 bp, synthetic construct
  source 1..20: mol_type = other DNA
atatataaatatataatata

SEQ ID NO: 177314 - DNA, 20 bp, synthetic construct
  source 1..20: mol_type = other DNA
aatatataaatatataatat

SEQ ID NO: 177315 - DNA, 20 bp, synthetic construct
  source 1..20: mol_type = other DNA
taatatataaatatataata

SEQ ID NO: 177316 - DNA, 20 bp, synthetic construct
  source 1..20: mol_type = other DNA
ataatatataaatatataat

SEQ ID NO: 177317 - DNA, 20 bp, synthetic construct
  source 1..20: mol_type = other DNA
tataatatataaatatataa

SEQ ID NO: 177318 - DNA, 20 bp, synthetic construct
  source 1..20: mol_type = other DNA
atataatatataaatatata

SEQ ID NO: 177319 - DNA, 20 bp, synthetic construct
  source 1..20: mol_type = other DNA
tatataatatataaatatat

SEQ ID NO: 177320 - DNA, 20 bp, synthetic construct
  source 1..20: mol_type = other DNA
atatataatatataaatata

SEQ ID NO: 177321 - DNA, 20 bp, synthetic construct
  source 1..20: mol_type = other DNA
aatatataatatataaatat

SEQ ID NO: 177322 - DNA, 20 bp, synthetic construct
  source 1..20: mol_type = other DNA
aaatatataatatataaata

SEQ ID NO: 177323 - DNA, 20 bp, synthetic construct
  source 1..20: mol_type = other DNA
taaatatataatatataaat

SEQ ID NO: 177324 - DNA, 20 bp, synthetic construct
  source 1..20: mol_type = other DNA
ataaatatataatatataaa

SEQ ID NO: 177325 - DNA, 20 bp, synthetic construct
  source 1..20: mol_type = other DNA
tataaatatataatatataa

SEQ ID NO: 177326 - DNA, 20 bp, synthetic construct
  source 1..20: mol_type = other DNA
atataaatatataatatata

SEQ ID NO: 177327 - DNA, 20 bp, synthetic construct
  source 1..20: mol_type = other DNA
tatataaatatataatatat

SEQ ID NO: 177328 - DNA, 20 bp, synthetic construct
  source 1..20: mol_type = other DNA
atatataaatatataatata

SEQ ID NO: 177329 - DNA, 20 bp, synthetic construct
  source 1..20: mol_type = other DNA
aatatataaatatataatat

SEQ ID NO: 177330 - DNA, 20 bp, synthetic construct
  source 1..20: mol_type = other DNA
taatatataaatatataata

SEQ ID NO: 177331 - DNA, 20 bp, synthetic construct
  source 1..20: mol_type = other DNA
ataatatataaatatataat

SEQ ID NO: 177332 - DNA, 20 bp, synthetic construct
  source 1..20: mol_type = other DNA
tataatatataaatatataa

SEQ ID NO: 177333 - DNA, 20 bp, synthetic construct
  source 1..20: mol_type = other DNA
atataatatataaatatata

SEQ ID NO: 177334 - DNA, 20 bp, synthetic construct
  source 1..20: mol_type = other DNA
tatataatatataaatatat

SEQ ID NO: 177335 - DNA, 20 bp, synthetic construct
  source 1..20: mol_type = other DNA
atatataatatataaatata

SEQ ID NO: 177336 - DNA, 20 bp, synthetic construct
  source 1..20: mol_type = other DNA
tatatataatatataaatat

SEQ ID NO: 177337 - DNA, 20 bp, synthetic construct
  source 1..20: mol_type = other DNA
atatatataatatataaata

SEQ ID NO: 177338 - DNA, 20 bp, synthetic construct
  source 1..20: mol_type = other DNA
aatatatataatatataaat

SEQ ID NO: 177339 - DNA, 20 bp, synthetic construct
  source 1..20: mol_type = other DNA
aaatatatataatatataaa

SEQ ID NO: 177340 - DNA, 20 bp, synthetic construct
  source 1..20: mol_type = other DNA
taaatatatataatatataa

SEQ ID NO: 177341 - DNA, 20 bp, synthetic construct
  source 1..20: mol_type = other DNA
ataaatatatataatatata

SEQ ID NO: 177342 - DNA, 20 bp, synthetic construct
  source 1..20: mol_type = other DNA
tataaatatatataatatat

SEQ ID NO: 177343 - DNA, 20 bp, synthetic construct
  source 1..20: mol_type = other DNA
atataaatatatataatata

SEQ ID NO: 177344 - DNA, 20 bp, synthetic construct
  source 1..20: mol_type = other DNA
tatataaatatatataatat

SEQ ID NO: 177345 - DNA, 20 bp, synthetic construct
  source 1..20: mol_type = other DNA
atatataaatatatataata

SEQ ID NO: 177346 - DNA, 20 bp, synthetic construct
  source 1..20: mol_type = other DNA
tatatataaatatatataat

SEQ ID NO: 177347 - DNA, 20 bp, synthetic construct
  source 1..20: mol_type = other DNA
atatatataaatatatataa

SEQ ID NO: 177348 - DNA, 20 bp, synthetic construct
  source 1..20: mol_type = other DNA
aatatatataaatatatata

SEQ ID NO: 177349 - DNA, 20 bp, synthetic construct
  source 1..20: mol_type = other DNA
taatatatataaatatatat

SEQ ID NO: 177350 - DNA, 20 bp, synthetic construct
  source 1..20: mol_type = other DNA
ataatatatataaatatata

SEQ ID NO: 177351 - DNA, 20 bp, synthetic construct
  source 1..20: mol_type = other DNA
tataatatatataaatatat

SEQ ID NO: 177352 - DNA, 20 bp, synthetic construct
  source 1..20: mol_type = other DNA
atataatatatataaatata

SEQ ID NO: 177353 - DNA, 20 bp, synthetic construct
  source 1..20: mol_type = other DNA
tatataatatatataaatat

SEQ ID NO: 177354 - DNA, 20 bp, synthetic construct
  source 1..20: mol_type = other DNA
atatataatatatataaata

SEQ ID NO: 177355 - DNA, 20 bp, synthetic construct
  source 1..20: mol_type = other DNA
aatatataatatatataaat

SEQ ID NO: 177356 - DNA, 20 bp, synthetic construct
  source 1..20: mol_type = other DNA
taatatataatatatataaa

SEQ ID NO: 177357 - DNA, 20 bp, synthetic construct
  source 1..20: mol_type = other DNA
ataatatataatatatataa

SEQ ID NO: 177358 - DNA, 20 bp, synthetic construct
  source 1..20: mol_type = other DNA
tataatatataatatatata

SEQ ID NO: 177359 - DNA, 20 bp, synthetic construct
  source 1..20: mol_type = other DNA
atataatatataatatatat

SEQ ID NO: 177360 - DNA, 20 bp, synthetic construct
  source 1..20: mol_type = other DNA
tatataatatataatatata

SEQ ID NO: 177361 - DNA, 20 bp, synthetic construct
  source 1..20: mol_type = other DNA
atatataatatataatatat

SEQ ID NO: 177362 - DNA, 20 bp, synthetic construct
  source 1..20: mol_type = other DNA
aatatataatatataatata

SEQ ID NO: 177363 - DNA, 20 bp, synthetic construct
  source 1..20: mol_type = other DNA
taatatataatatataatat

SEQ ID NO: 177364 - DNA, 20 bp, synthetic construct
  source 1..20: mol_type = other DNA
ataatatataatatataata

SEQ ID NO: 177365 - DNA, 20 bp, synthetic construct
  source 1..20: mol_type = other DNA
tataatatataatatataat

SEQ ID NO: 177366 - DNA, 20 bp, synthetic construct
  source 1..20: mol_type = other DNA
atataatatataatatataa

SEQ ID NO: 177367 - DNA, 20 bp, synthetic construct
  source 1..20: mol_type = other DNA
tatataatatataatatata

SEQ ID NO: 177368 - DNA, 20 bp, synthetic construct
  source 1..20: mol_type = other DNA
atatataatatataatatat

SEQ ID NO: 177369 - DNA, 20 bp, synthetic construct
  source 1..20: mol_type = other DNA
catatataatatataatata

SEQ ID NO: 177370 - DNA, 20 bp, synthetic construct
  source 1..20: mol_type = other DNA
acatatataatatataatat

SEQ ID NO: 177371 - DNA, 20 bp, synthetic construct
  source 1..20: mol_type = other DNA
tacatatataatatataata

SEQ ID NO: 177372 - DNA, 20 bp, synthetic construct
  source 1..20: mol_type = other DNA
atacatatataatatataat

SEQ ID NO: 177373 - DNA, 20 bp, synthetic construct
  source 1..20: mol_type = other DNA
tatacatatataatatataa

SEQ ID NO: 177374 - DNA, 20 bp, synthetic construct
  source 1..20: mol_type = other DNA
atatacatatataatatata

SEQ ID NO: 177375 - DNA, 20 bp, synthetic construct
  source 1..20: mol_type = other DNA
tatatacatatataatatat

SEQ ID NO: 177376 - DNA, 20 bp, synthetic construct
  source 1..20: mol_type = other DNA
atatatacatatataatata

SEQ ID NO: 177377 - DNA, 20 bp, synthetic construct
  source 1..20: mol_type = other DNA
aatatatacatatataatat

SEQ ID NO: 177378 - DNA, 20 bp, synthetic construct
  source 1..20: mol_type = other DNA
taatatatacatatataata

SEQ ID NO: 177379 - DNA, 20 bp, synthetic construct
  source 1..20: mol_type = other DNA
ataatatatacatatataat

SEQ ID NO: 177380 - DNA, 20 bp, synthetic construct
  source 1..20: mol_type = other DNA
tataatatatacatatataa

SEQ ID NO: 177381 - DNA, 20 bp, synthetic construct
  source 1..20: mol_type = other DNA
atataatatatacatatata

SEQ ID NO: 177382 - DNA, 20 bp, synthetic construct
  source 1..20: mol_type = other DNA
tatataatatatacatatat

SEQ ID NO: 177383 - DNA, 20 bp, synthetic construct
  source 1..20: mol_type = other DNA
atatataatatatacatata

SEQ ID NO: 177384 - DNA, 20 bp, synthetic construct
  source 1..20: mol_type = other DNA
catatataatatatacatat

SEQ ID NO: 177385 - DNA, 20 bp, synthetic construct
  source 1..20: mol_type = other DNA
acatatataatatatacata

SEQ ID NO: 177386 - DNA, 20 bp, synthetic construct
  source 1..20: mol_type = other DNA
aacatatataatatatacat

SEQ ID NO: 177387 - DNA, 20 bp, synthetic construct
  source 1..20: mol_type = other DNA
taacatatataatatataca

SEQ ID NO: 177388 - DNA, 20 bp, synthetic construct
  source 1..20: mol_type = other DNA
ataacatatataatatatac

SEQ ID NO: 177389 - DNA, 20 bp, synthetic construct
  source 1..20: mol_type = other DNA
tataacatatataatatata

SEQ ID NO: 177390 - DNA, 20 bp, synthetic construct
  source 1..20: mol_type = other DNA
atataacatatataatatat

SEQ ID NO: 177391 - DNA, 20 bp, synthetic construct
  source 1..20: mol_type = other DNA
tatataacatatataatata

SEQ ID NO: 177392 - DNA, 20 bp, synthetic construct
  source 1..20: mol_type = other DNA
atatataacatatataatat

SEQ ID NO: 177393 - DNA, 20 bp, synthetic construct
  source 1..20: mol_type = other DNA
aatatataacatatataata

SEQ ID NO: 177394 - DNA, 20 bp, synthetic construct
  source 1..20: mol_type = other DNA
taatatataacatatataat

SEQ ID NO: 177395 - DNA, 20 bp, synthetic construct
  source 1..20: mol_type = other DNA
ataatatataacatatataa

SEQ ID NO: 177396 - DNA, 20 bp, synthetic construct
  source 1..20: mol_type = other DNA
tataatatataacatatata

SEQ ID NO: 177397 - DNA, 20 bp, synthetic construct
  source 1..20: mol_type = other DNA
atataatatataacatatat

SEQ ID NO: 177398 - DNA, 20 bp, synthetic construct
  source 1..20: mol_type = other DNA
tatataatatataacatata

SEQ ID NO: 177399 - DNA, 20 bp, synthetic construct
  source 1..20: mol_type = other DNA
atatataatatataacatat

SEQ ID NO: 177400 - DNA, 20 bp, synthetic construct
  source 1..20: mol_type = other DNA
tatatataatatataacata

SEQ ID NO: 177401 - DNA, 20 bp, synthetic construct
  source 1..20: mol_type = other DNA
atatatataatatataacat

SEQ ID NO: 177402 - DNA, 20 bp, synthetic construct
  source 1..20: mol_type = other DNA
aatatatataatatataaca

SEQ ID NO: 177403 - DNA, 20 bp, synthetic construct
  source 1..20: mol_type = other DNA
aaatatatataatatataac

SEQ ID NO: 177404 - DNA, 20 bp, synthetic construct
  source 1..20: mol_type = other DNA
taaatatatataatatataa

SEQ ID NO: 177405 - DNA, 20 bp, synthetic construct
  source 1..20: mol_type = other DNA
ataaatatatataatatata

SEQ ID NO: 177406 - DNA, 20 bp, synthetic construct
  source 1..20: mol_type = other DNA
tataaatatatataatatat

SEQ ID NO: 177407 - DNA, 20 bp, synthetic construct
  source 1..20: mol_type = other DNA
atataaatatatataatata

SEQ ID NO: 177408 - DNA, 20 bp, synthetic construct
  source 1..20: mol_type = other DNA
tatataaatatatataatat

SEQ ID NO: 177409 - DNA, 20 bp, synthetic construct
  source 1..20: mol_type = other DNA
atatataaatatatataata

SEQ ID NO: 177410 - DNA, 20 bp, synthetic construct
  source 1..20: mol_type = other DNA
tatatataaatatatataat

SEQ ID NO: 177411 - DNA, 20 bp, synthetic construct
  source 1..20: mol_type = other DNA
atatatataaatatatataa

SEQ ID NO: 177412 - DNA, 20 bp, synthetic construct
  source 1..20: mol_type = other DNA
tatatatataaatatatata

SEQ ID NO: 177413 - DNA, 20 bp, synthetic construct
  source 1..20: mol_type = other DNA
ttatatatataaatatatat

SEQ ID NO: 177414 - DNA, 20 bp, synthetic construct
  source 1..20: mol_type = other DNA
attatatatataaatatata

SEQ ID NO: 177415 - DNA, 20 bp, synthetic construct
  source 1..20: mol_type = other DNA
tattatatatataaatatat

SEQ ID NO: 177416 - DNA, 20 bp, synthetic construct
  source 1..20: mol_type = other DNA
atattatatatataaatata

SEQ ID NO: 177417 - DNA, 20 bp, synthetic construct
  source 1..20: mol_type = other DNA
tatattatatatataaatat

SEQ ID NO: 177418 - DNA, 20 bp, synthetic construct
  source 1..20: mol_type = other DNA
atatattatatatataaata

SEQ ID NO: 177419 - DNA, 20 bp, synthetic construct
  source 1..20: mol_type = other DNA
aatatattatatatataaat

SEQ ID NO: 177420 - DNA, 20 bp, synthetic construct
  source 1..20: mol_type = other DNA
caatatattatatatataaa

SEQ ID NO: 177421 - DNA, 20 bp, synthetic construct
  source 1..20: mol_type = other DNA
acaatatattatatatataa

SEQ ID NO: 177422 - DNA, 20 bp, synthetic construct
  source 1..20: mol_type = other DNA
tacaatatattatatatata

SEQ ID NO: 177423 - DNA, 20 bp, synthetic construct
  source 1..20: mol_type = other DNA
atacaatatattatatatat

SEQ ID NO: 177424 - DNA, 20 bp, synthetic construct
  source 1..20: mol_type = other DNA
tatacaatatattatatata

SEQ ID NO: 177425 - DNA, 20 bp, synthetic construct
  source 1..20: mol_type = other DNA
atatacaatatattatatat

SEQ ID NO: 177426 - DNA, 20 bp, synthetic construct
  source 1..20: mol_type = other DNA
tatatacaatatattatata

SEQ ID NO: 177427 - DNA, 20 bp, synthetic construct
  source 1..20: mol_type = other DNA
atatatacaatatattatat

SEQ ID NO: 177428 - DNA, 20 bp, synthetic construct
  source 1..20: mol_type = other DNA
aatatatacaatatattata

SEQ ID NO: 177429 - DNA, 20 bp, synthetic construct
  source 1..20: mol_type = other DNA
taatatatacaatatattat

SEQ ID NO: 177430 - DNA, 20 bp, synthetic construct
  source 1..20: mol_type = other DNA
ataatatatacaatatatta

SEQ ID NO: 177431 - DNA, 20 bp, synthetic construct
  source 1..20: mol_type = other DNA
tataatatatacaatatatt

SEQ ID NO: 177432 - DNA, 20 bp, synthetic construct
  source 1..20: mol_type = other DNA
atataatatatacaatatat

SEQ ID NO: 177433 - DNA, 20 bp, synthetic construct
  source 1..20: mol_type = other DNA
tatataatatatacaatata

SEQ ID NO: 177434 - DNA, 20 bp, synthetic construct
  source 1..20: mol_type = other DNA
atatataatatatacaatat

SEQ ID NO: 177435 - DNA, 20 bp, synthetic construct
  source 1..20: mol_type = other DNA
gatatataatatatacaata

SEQ ID NO: 177436 - DNA, 20 bp, synthetic construct
  source 1..20: mol_type = other DNA
agatatataatatatacaat

SEQ ID NO: 177437 - DNA, 20 bp, synthetic construct
  source 1..20: mol_type = other DNA
tagatatataatatatacaa

SEQ ID NO: 177438 - DNA, 20 bp, synthetic construct
  source 1..20: mol_type = other DNA
ttagatatataatatataca

SEQ ID NO: 177439 - DNA, 20 bp, synthetic construct
  source 1..20: mol_type = other DNA
attagatatataatatatac

SEQ ID NO: 177440 - DNA, 20 bp, synthetic construct
  source 1..20: mol_type = other DNA
tattagatatataatatata

SEQ ID NO: 177441 - DNA, 20 bp, synthetic construct
  source 1..20: mol_type = other DNA
atattagatatataatatat

SEQ ID NO: 177442 - DNA, 20 bp, synthetic construct
  source 1..20: mol_type = other DNA
tatattagatatataatata

SEQ ID NO: 177443 - DNA, 20 bp, synthetic construct
  source 1..20: mol_type = other DNA
atatattagatatataatat

SEQ ID NO: 177444 - DNA, 20 bp, synthetic construct
  source 1..20: mol_type = other DNA
aatatattagatatataata

SEQ ID NO: 177445 - DNA, 20 bp, synthetic construct
  source 1..20: mol_type = other DNA
taatatattagatatataat

SEQ ID NO: 177446 - DNA, 20 bp, synthetic construct
  source 1..20: mol_type = other DNA
ataatatattagatatataa

SEQ ID NO: 177447 - DNA, 20 bp, synthetic construct
  source 1..20: mol_type = other DNA
tataatatattagatatata

SEQ ID NO: 177448 - DNA, 20 bp, synthetic construct
  source 1..20: mol_type = other DNA
atataatatattagatatat

SEQ ID NO: 177449 - DNA, 20 bp, synthetic construct
  source 1..20: mol_type = other DNA
tatataatatattagatata

SEQ ID NO: 177450 - DNA, 20 bp, synthetic construct
  source 1..20: mol_type = other DNA
atatataatatattagatat

SEQ ID NO: 177451 - DNA, 20 bp, synthetic construct
  source 1..20: mol_type = other DNA
tatatataatatattagata

SEQ ID NO: 177452 - DNA, 20 bp, synthetic construct
  source 1..20: mol_type = other DNA
atatatataatatattagat

SEQ ID NO: 177453 - DNA, 20 bp, synthetic construct
  source 1..20: mol_type = other DNA
aatatatataatatattaga

SEQ ID NO: 177454 - DNA, 20 bp, synthetic construct
  source 1..20: mol_type = other DNA
taatatatataatatattag

SEQ ID NO: 177455 - DNA, 20 bp, synthetic construct
  source 1..20: mol_type = other DNA
ataatatatataatatatta

SEQ ID NO: 177456 - DNA, 20 bp, synthetic construct
  source 1..20: mol_type = other DNA
tataatatatataatatatt

SEQ ID NO: 177457 - DNA, 20 bp, synthetic construct
  source 1..20: mol_type = other DNA
atataatatatataatatat

SEQ ID NO: 177458 - DNA, 20 bp, synthetic construct
  source 1..20: mol_type = other DNA
tatataatatatataatata

SEQ ID NO: 177459 - DNA, 20 bp, synthetic construct
  source 1..20: mol_type = other DNA
atatataatatatataatat

SEQ ID NO: 177460 - DNA, 20 bp, synthetic construct
  source 1..20: mol_type = other DNA
tatatataatatatataata

SEQ ID NO: 177461 - DNA, 20 bp, synthetic construct
  source 1..20: mol_type = other DNA
atatatataatatatataat

SEQ ID NO: 177462 - DNA, 20 bp, synthetic construct
  source 1..20: mol_type = other DNA
aatatatataatatatataa

SEQ ID NO: 177463 - DNA, 20 bp, synthetic construct
  source 1..20: mol_type = other DNA
taatatatataatatatata

SEQ ID NO: 177464 - DNA, 20 bp, synthetic construct
  source 1..20: mol_type = other DNA
ataatatatataatatatat

SEQ ID NO: 177465 - DNA, 20 bp, synthetic construct
  source 1..20: mol_type = other DNA
tataatatatataatatata

SEQ ID NO: 177466 - DNA, 20 bp, synthetic construct
  source 1..20: mol_type = other DNA
atataatatatataatatat

SEQ ID NO: 177467 - DNA, 20 bp, synthetic construct
  source 1..20: mol_type = other DNA
tatataatatatataatata

SEQ ID NO: 177468 - DNA, 20 bp, synthetic construct
  source 1..20: mol_type = other DNA
atatataatatatataatat

SEQ ID NO: 177469 - DNA, 20 bp, synthetic construct
  source 1..20: mol_type = other DNA
aatatataatatatataata

SEQ ID NO: 177470 - DNA, 20 bp, synthetic construct
  source 1..20: mol_type = other DNA
taatatataatatatataat

SEQ ID NO: 177471 - DNA, 20 bp, synthetic construct
  source 1..20: mol_type = other DNA
ataatatataatatatataa

SEQ ID NO: 177472 - DNA, 20 bp, synthetic construct
  source 1..20: mol_type = other DNA
tataatatataatatatata

SEQ ID NO: 177473 - DNA, 20 bp, synthetic construct
  source 1..20: mol_type = other DNA
ttataatatataatatatat

SEQ ID NO: 177474 - DNA, 20 bp, synthetic construct
  source 1..20: mol_type = other DNA
attataatatataatatata

SEQ ID NO: 177475 - DNA, 20 bp, synthetic construct
  source 1..20: mol_type = other DNA
tattataatatataatatat

SEQ ID NO: 177476 - DNA, 20 bp, synthetic construct
  source 1..20: mol_type = other DNA
atattataatatataatata

SEQ ID NO: 177477 - DNA, 20 bp, synthetic construct
  source 1..20: mol_type = other DNA
tatattataatatataatat

SEQ ID NO: 177478 - DNA, 20 bp, synthetic construct
  source 1..20: mol_type = other DNA
atatattataatatataata

SEQ ID NO: 177479 - DNA, 20 bp, synthetic construct
  source 1..20: mol_type = other DNA
tatatattataatatataat

SEQ ID NO: 177480 - DNA, 20 bp, synthetic construct
  source 1..20: mol_type = other DNA
atatatattataatatataa

SEQ ID NO: 177481 - DNA, 20 bp, synthetic construct
  source 1..20: mol_type = other DNA
aatatatattataatatata

SEQ ID NO: 177482 - DNA, 20 bp, synthetic construct
  source 1..20: mol_type = other DNA
taatatatattataatatat

SEQ ID NO: 177483 - DNA, 20 bp, synthetic construct
  source 1..20: mol_type = other DNA
ataatatatattataatata

SEQ ID NO: 177484 - DNA, 20 bp, synthetic construct
  source 1..20: mol_type = other DNA
tataatatatattataatat

SEQ ID NO: 177485 - DNA, 20 bp, synthetic construct
  source 1..20: mol_type = other DNA
atataatatatattataata

SEQ ID NO: 177486 - DNA, 20 bp, synthetic construct
  source 1..20: mol_type = other DNA
tatataatatatattataat

SEQ ID NO: 177487 - DNA, 20 bp, synthetic construct
  source 1..20: mol_type = other DNA
atatataatatatattataa

SEQ ID NO: 177488 - DNA, 20 bp, synthetic construct
  source 1..20: mol_type = other DNA
aatatataatatatattata

SEQ ID NO: 177489 - DNA, 20 bp, synthetic construct
  source 1..20: mol_type = other DNA
taatatataatatatattat

SEQ ID NO: 177490 - DNA, 20 bp, synthetic construct
  source 1..20: mol_type = other DNA
ataatatataatatatatta

SEQ ID NO: 177491 - DNA, 20 bp, synthetic construct
  source 1..20: mol_type = other DNA
tataatatataatatatatt

SEQ ID NO: 177492 - DNA, 20 bp, synthetic construct
  source 1..20: mol_type = other DNA
atataatatataatatatat

SEQ ID NO: 177493 - DNA, 20 bp, synthetic construct
  source 1..20: mol_type = other DNA
tatataatatataatatata

SEQ ID NO: 177494 - DNA, 20 bp, synthetic construct
  source 1..20: mol_type = other DNA
atatataatatataatatat

SEQ ID NO: 177495 - DNA, 20 bp, synthetic construct
  source 1..20: mol_type = other DNA
aatatataatatataatata

SEQ ID NO: 177496 - DNA, 20 bp, synthetic construct
  source 1..20: mol_type = other DNA
taatatataatatataatat

SEQ ID NO: 177497 - DNA, 20 bp, synthetic construct
  source 1..20: mol_type = other DNA
ataatatataatatataata

SEQ ID NO: 177498 - DNA, 20 bp, synthetic construct
  source 1..20: mol_type = other DNA
tataatatataatatataat

SEQ ID NO: 177499 - DNA, 20 bp, synthetic construct
  source 1..20: mol_type = other DNA
atataatatataatatataa

SEQ ID NO: 177500 - DNA, 20 bp, synthetic construct
  source 1..20: mol_type = other DNA
tatataatatataatatata

SEQ ID NO: 177501 - DNA, 20 bp, synthetic construct
  source 1..20: mol_type = other DNA
atatataatatataatatat

SEQ ID NO: 177502 - DNA, 20 bp, synthetic construct
  source 1..20: mol_type = other DNA
tatatataatatataatata

SEQ ID NO: 177503 - DNA, 20 bp, synthetic construct
  source 1..20: mol_type = other DNA
atatatataatatataatat

SEQ ID NO: 177504 - DNA, 20 bp, synthetic construct
  source 1..20: mol_type = other DNA
aatatatataatatataata

SEQ ID NO: 177505 - DNA, 20 bp, synthetic construct
  source 1..20: mol_type = other DNA
aaatatatataatatataat

SEQ ID NO: 177506 - DNA, 20 bp, synthetic construct
  source 1..20: mol_type = other DNA
aaaatatatataatatataa

SEQ ID NO: 177507 - DNA, 20 bp, synthetic construct
  source 1..20: mol_type = other DNA
aaaaatatatataatatata

SEQ ID NO: 177508 - DNA, 20 bp, synthetic construct
  source 1..20: mol_type = other DNA
taaaaatatatataatatat

SEQ ID NO: 177509 - DNA, 20 bp, synthetic construct
  source 1..20: mol_type = other DNA
ataaaaatatatataatata

SEQ ID NO: 177510 - DNA, 20 bp, synthetic construct
  source 1..20: mol_type = other DNA
tataaaaatatatataatat

SEQ ID NO: 177511 - DNA, 20 bp, synthetic construct
  source 1..20: mol_type = other DNA
atataaaaatatatataata

SEQ ID NO: 177512 - DNA, 20 bp, synthetic construct
  source 1..20: mol_type = other DNA
tatataaaaatatatataat

SEQ ID NO: 177513 - DNA, 20 bp, synthetic construct
  source 1..20: mol_type = other DNA
atatataaaaatatatataa

SEQ ID NO: 177514 - DNA, 20 bp, synthetic construct
  source 1..20: mol_type = other DNA
tatatataaaaatatatata

SEQ ID NO: 177515 - DNA, 20 bp, synthetic construct
  source 1..20: mol_type = other DNA
atatatataaaaatatatat

SEQ ID NO: 177516 - DNA, 20 bp, synthetic construct
  source 1..20: mol_type = other DNA
tatatatataaaaatatata

SEQ ID NO: 177517 - DNA, 20 bp, synthetic construct
  source 1..20: mol_type = other DNA
ttatatatataaaaatatat

SEQ ID NO: 177518 - DNA, 20 bp, synthetic construct
  source 1..20: mol_type = other DNA
attatatatataaaaatata

SEQ ID NO: 177519 - DNA, 20 bp, synthetic construct
  source 1..20: mol_type = other DNA
tattatatatataaaaatat

SEQ ID NO: 177520 - DNA, 20 bp, synthetic construct
  source 1..20: mol_type = other DNA
atattatatatataaaaata

SEQ ID NO: 177521 - DNA, 20 bp, synthetic construct
  source 1..20: mol_type = other DNA
catattatatatataaaaat

SEQ ID NO: 177522 - DNA, 20 bp, synthetic construct
  source 1..20: mol_type = other DNA
acatattatatatataaaaa

SEQ ID NO: 177523 - DNA, 20 bp, synthetic construct
  source 1..20: mol_type = other DNA
tacatattatatatataaaa

SEQ ID NO: 177524 - DNA, 20 bp, synthetic construct
  source 1..20: mol_type = other DNA
atacatattatatatataaa

SEQ ID NO: 177525 - DNA, 20 bp, synthetic construct
  source 1..20: mol_type = other DNA
tatacatattatatatataa

SEQ ID NO: 177526 - DNA, 20 bp, synthetic construct
  source 1..20: mol_type = other DNA
ttatacatattatatatata

SEQ ID NO: 177527 - DNA, 20 bp, synthetic construct
  source 1..20: mol_type = other DNA
attatacatattatatatat

SEQ ID NO: 177528 - DNA, 20 bp, synthetic construct
  source 1..20: mol_type = other DNA
tattatacatattatatata

SEQ ID NO: 177529 - DNA, 20 bp, synthetic construct
  source 1..20: mol_type = other DNA
atattatacatattatatat

SEQ ID NO: 177530 - DNA, 20 bp, synthetic construct
  source 1..20: mol_type = other DNA
tatattatacatattatata

SEQ ID NO: 177531 - DNA, 20 bp, synthetic construct
  source 1..20: mol_type = other DNA
atatattatacatattatat

SEQ ID NO: 177532 - DNA, 20 bp, synthetic construct
  source 1..20: mol_type = other DNA
tatatattatacatattata

SEQ ID NO: 177533 - DNA, 20 bp, synthetic construct
  source 1..20: mol_type = other DNA
ttatatattatacatattat

SEQ ID NO: 177534 - DNA, 20 bp, synthetic construct
  source 1..20: mol_type = other DNA
attatatattatacatatta

SEQ ID NO: 177535 - DNA, 20 bp, synthetic construct
  source 1..20: mol_type = other DNA
tattatatattatacatatt

SEQ ID NO: 177536 - DNA, 20 bp, synthetic construct
  source 1..20: mol_type = other DNA
atattatatattatacatat

SEQ ID NO: 177537 - DNA, 20 bp, synthetic construct
  source 1..20: mol_type = other DNA
tatattatatattatacata

SEQ ID NO: 177538 - DNA, 20 bp, synthetic construct
  source 1..20: mol_type = other DNA
atatattatatattatacat

SEQ ID NO: 177539 - DNA, 20 bp, synthetic construct
  source 1..20: mol_type = other DNA
tatatattatatattataca

SEQ ID NO: 177540 - DNA, 20 bp, synthetic construct
  source 1..20: mol_type = other DNA
atatatattatatattatac

SEQ ID NO: 177541 - DNA, 20 bp, synthetic construct
  source 1..20: mol_type = other DNA
tatatatattatatattata

SEQ ID NO: 177542 - DNA, 20 bp, synthetic construct
  source 1..20: mol_type = other DNA
ttatatatattatatattat

SEQ ID NO: 177543 - DNA, 20 bp, synthetic construct
  source 1..20: mol_type = other DNA
tttatatatattatatatta

SEQ ID NO: 177544 - DNA, 20 bp, synthetic construct
  source 1..20: mol_type = other DNA
ttttatatatattatatatt

SEQ ID NO: 177545 - DNA, 20 bp, synthetic construct
  source 1..20: mol_type = other DNA
tttttatatatattatatat

SEQ ID NO: 177546 - DNA, 20 bp, synthetic construct
  source 1..20: mol_type = other DNA
gtttttatatatattatata

SEQ ID NO: 177547 - DNA, 20 bp, synthetic construct
  source 1..20: mol_type = other DNA
tgtttttatatatattatat

SEQ ID NO: 177548 - DNA, 20 bp, synthetic construct
  source 1..20: mol_type = other DNA
atgtttttatatatattata

SEQ ID NO: 177549 - DNA, 20 bp, synthetic construct
  source 1..20: mol_type = other DNA
tatgtttttatatatattat

SEQ ID NO: 177550 - DNA, 20 bp, synthetic construct
  source 1..20: mol_type = other DNA
atatgtttttatatatatta

SEQ ID NO: 177551 - DNA, 20 bp, synthetic construct
  source 1..20: mol_type = other DNA
tatatgtttttatatatatt

SEQ ID NO: 177552 - DNA, 20 bp, synthetic construct
  source 1..20: mol_type = other DNA
atatatgtttttatatatat

SEQ ID NO: 177553 - DNA, 20 bp, synthetic construct
  source 1..20: mol_type = other DNA
tatatatgtttttatatata

SEQ ID NO: 177554 - DNA, 20 bp, synthetic construct
  source 1..20: mol_type = other DNA
ttatatatgtttttatatat

SEQ ID NO: 177555 - DNA, 20 bp, synthetic construct
  source 1..20: mol_type = other DNA
attatatatgtttttatata

SEQ ID NO: 177556 - DNA, 20 bp, synthetic construct
  source 1..20: mol_type = other DNA
tattatatatgtttttatat

SEQ ID NO: 177557 - DNA, 20 bp, synthetic construct
  source 1..20: mol_type = other DNA
atattatatatgtttttata

SEQ ID NO: 177558 - DNA, 20 bp, synthetic construct
  source 1..20: mol_type = other DNA
tatattatatatgtttttat

SEQ ID NO: 177559 - DNA, 20 bp, synthetic construct
  source 1..20: mol_type = other DNA
atatattatatatgttttta

SEQ ID NO: 177560 - DNA, 20 bp, synthetic construct
  source 1..20: mol_type = other DNA
tatatattatatatgttttt

SEQ ID NO: 177561 - DNA, 20 bp, synthetic construct
  source 1..20: mol_type = other DNA
atatatattatatatgtttt

SEQ ID NO: 177562 - DNA, 20 bp, synthetic construct
  source 1..20: mol_type = other DNA
aatatatattatatatgttt

SEQ ID NO: 177563 - DNA, 20 bp, synthetic construct
  source 1..20: mol_type = other DNA
taatatatattatatatgtt

SEQ ID NO: 177564 - DNA, 20 bp, synthetic construct
  source 1..20: mol_type = other DNA
ataatatatattatatatgt

SEQ ID NO: 177565 - DNA, 20 bp, synthetic construct
  source 1..20: mol_type = other DNA
tataatatatattatatatg

SEQ ID NO: 177566 - DNA, 20 bp, synthetic construct
  source 1..20: mol_type = other DNA
atataatatatattatatat

SEQ ID NO: 177567 - DNA, 20 bp, synthetic construct
  source 1..20: mol_type = other DNA
tatataatatatattatata

SEQ ID NO: 177568 - DNA, 20 bp, synthetic construct
  source 1..20: mol_type = other DNA
atatataatatatattatat

SEQ ID NO: 177569 - DNA, 20 bp, synthetic construct
  source 1..20: mol_type = other DNA
aatatataatatatattata

SEQ ID NO: 177570 - DNA, 20 bp, synthetic construct
  source 1..20: mol_type = other DNA
taatatataatatatattat

SEQ ID NO: 177571 - DNA, 20 bp, synthetic construct
  source 1..20: mol_type = other DNA
ataatatataatatatatta

SEQ ID NO: 177572 - DNA, 20 bp, synthetic construct
  source 1..20: mol_type = other DNA
tataatatataatatatatt

SEQ ID NO: 177573 - DNA, 20 bp, synthetic construct
  source 1..20: mol_type = other DNA
atataatatataatatatat

SEQ ID NO: 177574 - DNA, 20 bp, synthetic construct
  source 1..20: mol_type = other DNA
tatataatatataatatata

SEQ ID NO: 177575 - DNA, 20 bp, synthetic construct
  source 1..20: mol_type = other DNA
atatataatatataatatat

SEQ ID NO: 177576 - DNA, 20 bp, synthetic construct
  source 1..20: mol_type = other DNA
tatatataatatataatata

SEQ ID NO: 177577 - DNA, 20 bp, synthetic construct
  source 1..20: mol_type = other DNA
atatatataatatataatat

SEQ ID NO: 177578 - DNA, 20 bp, synthetic construct
  source 1..20: mol_type = other DNA
tatatatataatatataata

SEQ ID NO: 177579 - DNA, 20 bp, synthetic construct
  source 1..20: mol_type = other DNA
atatatatataatatataat

SEQ ID NO: 177580 - DNA, 20 bp, synthetic construct
  source 1..20: mol_type = other DNA
aatatatatataatatataa

SEQ ID NO: 177581 - DNA, 20 bp, synthetic construct
  source 1..20: mol_type = other DNA
taatatatatataatatata

SEQ ID NO: 177582 - DNA, 20 bp, synthetic construct
  source 1..20: mol_type = other DNA
ataatatatatataatatat

SEQ ID NO: 177583 - DNA, 20 bp, synthetic construct
  source 1..20: mol_type = other DNA
tataatatatatataatata

SEQ ID NO: 177584 - DNA, 20 bp, synthetic construct
  source 1..20: mol_type = other DNA
atataatatatatataatat

SEQ ID NO: 177585 - DNA, 20 bp, synthetic construct
  source 1..20: mol_type = other DNA
tatataatatatatataata

SEQ ID NO: 177586 - DNA, 20 bp, synthetic construct
  source 1..20: mol_type = other DNA
atatataatatatatataat

SEQ ID NO: 177587 - DNA, 20 bp, synthetic construct
  source 1..20: mol_type = other DNA
tatatataatatatatataa

SEQ ID NO: 177588 - DNA, 20 bp, synthetic construct
  source 1..20: mol_type = other DNA
atatatataatatatatata

SEQ ID NO: 177589 - DNA, 20 bp, synthetic construct
  source 1..20: mol_type = other DNA
aatatatataatatatatat

SEQ ID NO: 177590 - DNA, 20 bp, synthetic construct
  source 1..20: mol_type = other DNA
taatatatataatatatata

SEQ ID NO: 177591 - DNA, 20 bp, synthetic construct
  source 1..20: mol_type = other DNA
ataatatatataatatatat

SEQ ID NO: 177592 - DNA, 20 bp, synthetic construct
  source 1..20: mol_type = other DNA
tataatatatataatatata

SEQ ID NO: 177593 - DNA, 20 bp, synthetic construct
  source 1..20: mol_type = other DNA
atataatatatataatatat

SEQ ID NO: 177594 - DNA, 20 bp, synthetic construct
  source 1..20: mol_type = other DNA
tatataatatatataatata

SEQ ID NO: 177595 - DNA, 20 bp, synthetic construct
  source 1..20: mol_type = other DNA
atatataatatatataatat

SEQ ID NO: 177596 - DNA, 20 bp, synthetic construct
  source 1..20: mol_type = other DNA
tatatataatatatataata

SEQ ID NO: 177597 - DNA, 20 bp, synthetic construct
  source 1..20: mol_type = other DNA
atatatataatatatataat

SEQ ID NO: 177598 - DNA, 20 bp, synthetic construct
  source 1..20: mol_type = other DNA
aatatatataatatatataa

SEQ ID NO: 177599 - DNA, 20 bp, synthetic construct
  source 1..20: mol_type = other DNA
taatatatataatatatata

SEQ ID NO: 177600 - DNA, 20 bp, synthetic construct
  source 1..20: mol_type = other DNA
ttaatatatataatatatat

SEQ ID NO: 177601 - DNA, 20 bp, synthetic construct
  source 1..20: mol_type = other DNA
tttaatatatataatatata

SEQ ID NO: 177602 - DNA, 20 bp, synthetic construct
  source 1..20: mol_type = other DNA
atttaatatatataatatat

SEQ ID NO: 177603 - DNA, 20 bp, synthetic construct
  source 1..20: mol_type = other DNA
tatttaatatatataatata

SEQ ID NO: 177604 - DNA, 20 bp, synthetic construct
  source 1..20: mol_type = other DNA
atatttaatatatataatat

SEQ ID NO: 177605 - DNA, 20 bp, synthetic construct
  source 1..20: mol_type = other DNA
tatatttaatatatataata

SEQ ID NO: 177606 - DNA, 20 bp, synthetic construct
  source 1..20: mol_type = other DNA
atatatttaatatatataat

SEQ ID NO: 177607 - DNA, 20 bp, synthetic construct
  source 1..20: mol_type = other DNA
aatatatttaatatatataa

SEQ ID NO: 177608 - DNA, 20 bp, synthetic construct
  source 1..20: mol_type = other DNA
aaatatatttaatatatata

SEQ ID NO: 177609 - DNA, 20 bp, synthetic construct
  source 1..20: mol_type = other DNA
aaaatatatttaatatatat

SEQ ID NO: 177610 - DNA, 20 bp, synthetic construct
  source 1..20: mol_type = other DNA
taaaatatatttaatatata

SEQ ID NO: 177611 - DNA, 20 bp, synthetic construct
  source 1..20: mol_type = other DNA
ataaaatatatttaatatat

SEQ ID NO: 177612 - DNA, 20 bp, synthetic construct
  source 1..20: mol_type = other DNA
tataaaatatatttaatata

SEQ ID NO: 177613 - DNA, 20 bp, synthetic construct
  source 1..20: mol_type = other DNA
atataaaatatatttaatat

SEQ ID NO: 177614 - DNA, 20 bp, synthetic construct
  source 1..20: mol_type = other DNA
tatataaaatatatttaata

SEQ ID NO: 177615 - DNA, 20 bp, synthetic construct
  source 1..20: mol_type = other DNA
atatataaaatatatttaat

SEQ ID NO: 177616 - DNA, 20 bp, synthetic construct
  source 1..20: mol_type = other DNA
tatatataaaatatatttaa

SEQ ID NO: 177617 - DNA, 20 bp, synthetic construct
  source 1..20: mol_type = other DNA
atatatataaaatatattta

SEQ ID NO: 177618 - DNA, 20 bp, synthetic construct
  source 1..20: mol_type = other DNA
aatatatataaaatatattt

SEQ ID NO: 177619 - DNA, 20 bp, synthetic construct
  source 1..20: mol_type = other DNA
taatatatataaaatatatt

SEQ ID NO: 177620 - DNA, 20 bp, synthetic construct
  source 1..20: mol_type = other DNA
ataatatatataaaatatat

SEQ ID NO: 177621 - DNA, 20 bp, synthetic construct
  source 1..20: mol_type = other DNA
tataatatatataaaatata

SEQ ID NO: 177622 - DNA, 20 bp, synthetic construct
  source 1..20: mol_type = other DNA
atataatatatataaaatat

SEQ ID NO: 177623 - DNA, 20 bp, synthetic construct
  source 1..20: mol_type = other DNA
tatataatatatataaaata

SEQ ID NO: 177624 - DNA, 20 bp, synthetic construct
  source 1..20: mol_type = other DNA
atatataatatatataaaat

SEQ ID NO: 177625 - DNA, 20 bp, synthetic construct
  source 1..20: mol_type = other DNA
tatatataatatatataaaa

SEQ ID NO: 177626 - DNA, 20 bp, synthetic construct
  source 1..20: mol_type = other DNA
atatatataatatatataaa

SEQ ID NO: 177627 - DNA, 20 bp, synthetic construct
  source 1..20: mol_type = other DNA
tatatatataatatatataa

SEQ ID NO: 177628 - DNA, 20 bp, synthetic construct
  source 1..20: mol_type = other DNA
atatatatataatatatata

SEQ ID NO: 177629 - DNA, 20 bp, synthetic construct
  source 1..20: mol_type = other DNA
tatatatatataatatatat

SEQ ID NO: 177630 - DNA, 20 bp, synthetic construct
  source 1..20: mol_type = other DNA
gtatatatatataatatata

SEQ ID NO: 177631 - DNA, 20 bp, synthetic construct
  source 1..20: mol_type = other DNA
tgtatatatatataatatat

SEQ ID NO: 177632 - DNA, 20 bp, synthetic construct
  source 1..20: mol_type = other DNA
gtgtatatatatataatata

SEQ ID NO: 177633 - DNA, 20 bp, synthetic construct
  source 1..20: mol_type = other DNA
tgtgtatatatatataatat

SEQ ID NO: 177634 - DNA, 20 bp, synthetic construct
  source 1..20: mol_type = other DNA
atgtgtatatatatataata

SEQ ID NO: 177635 - DNA, 20 bp, synthetic construct
  source 1..20: mol_type = other DNA
tatgtgtatatatatataat

SEQ ID NO: 177636 - DNA, 20 bp, synthetic construct
  source 1..20: mol_type = other DNA
atatgtgtatatatatataa

SEQ ID NO: 177637 - DNA, 20 bp, synthetic construct
  source 1..20: mol_type = other DNA
tatatgtgtatatatatata

SEQ ID NO: 177638 - DNA, 20 bp, synthetic construct
  source 1..20: mol_type = other DNA
atatatgtgtatatatatat

SEQ ID NO: 177639 - DNA, 20 bp, synthetic construct
  source 1..20: mol_type = other DNA
tatatatgtgtatatatata

SEQ ID NO: 177640 - DNA, 20 bp, synthetic construct
  source 1..20: mol_type = other DNA
atatatatgtgtatatatat

SEQ ID NO: 177641 - DNA, 20 bp, synthetic construct
  source 1..20: mol_type = other DNA
tatatatatgtgtatatata

SEQ ID NO: 177642 - DNA, 20 bp, synthetic construct
  source 1..20: mol_type = other DNA
atatatatatgtgtatatat

SEQ ID NO: 177643 - DNA, 20 bp, synthetic construct
  source 1..20: mol_type = other DNA
tatatatatatgtgtatata

SEQ ID NO: 177644 - DNA, 20 bp, synthetic construct
  source 1..20: mol_type = other DNA
atatatatatatgtgtatat

SEQ ID NO: 177645 - DNA, 20 bp, synthetic construct
  source 1..20: mol_type = other DNA
tatatatatatatgtgtata

SEQ ID NO: 177646 - DNA, 20 bp, synthetic construct
  source 1..20: mol_type = other DNA
ttatatatatatatgtgtat

SEQ ID NO: 177647 - DNA, 20 bp, synthetic construct
  source 1..20: mol_type = other DNA
tttatatatatatatgtgta

SEQ ID NO: 177648 - DNA, 20 bp, synthetic construct
  source 1..20: mol_type = other DNA
atttatatatatatatgtgt

SEQ ID NO: 177649 - DNA, 20 bp, synthetic construct
  source 1..20: mol_type = other DNA
catttatatatatatatgtg

SEQ ID NO: 177650 - DNA, 20 bp, synthetic construct
  source 1..20: mol_type = other DNA
tcatttatatatatatatgt

SEQ ID NO: 177651 - DNA, 20 bp, synthetic construct
  source 1..20: mol_type = other DNA
ctcatttatatatatatatg

SEQ ID NO: 177652 - DNA, 20 bp, synthetic construct
  source 1..20: mol_type = other DNA
cctcatttatatatatatat

SEQ ID NO: 177653 - DNA, 20 bp, synthetic construct
  source 1..20: mol_type = other DNA
gcctcatttatatatatata

SEQ ID NO: 177654 - DNA, 20 bp, synthetic construct
  source 1..20: mol_type = other DNA
ggcctcatttatatatatat

SEQ ID NO: 177655 - DNA, 20 bp, synthetic construct
  source 1..20: mol_type = other DNA
tggcctcatttatatatata

SEQ ID NO: 177656 - DNA, 20 bp, synthetic construct
  source 1..20: mol_type = other DNA
ctggcctcatttatatatat

SEQ ID NO: 177657 - DNA, 20 bp, synthetic construct
  source 1..20: mol_type = other DNA
cctggcctcatttatatata

SEQ ID NO: 177658 - DNA, 20 bp, synthetic construct
  source 1..20: mol_type = other DNA
gcctggcctcatttatatat

SEQ ID NO: 177659 - DNA, 20 bp, synthetic construct
  source 1..20: mol_type = other DNA
agcctggcctcatttatata

SEQ ID NO: 177660 - DNA, 20 bp, synthetic construct
  source 1..20: mol_type = other DNA
gagcctggcctcatttatat

SEQ ID NO: 177661 - DNA, 20 bp, synthetic construct
  source 1..20: mol_type = other DNA
cgagcctggcctcatttata

SEQ ID NO: 177662 - DNA, 20 bp, synthetic construct
  source 1..20: mol_type = other DNA
ccgagcctggcctcatttat

SEQ ID NO: 177663 - DNA, 20 bp, synthetic construct
  source 1..20: mol_type = other DNA
accgagcctggcctcattta

SEQ ID NO: 177664 - DNA, 20 bp, synthetic construct
  source 1..20: mol_type = other DNA
caccgagcctggcctcattt

SEQ ID NO: 177665 - DNA, 20 bp, synthetic construct
  source 1..20: mol_type = other DNA
ccaccgagcctggcctcatt

SEQ ID NO: 177666 - DNA, 20 bp, synthetic construct
  source 1..20: mol_type = other DNA
gccaccgagcctggcctcat

SEQ ID NO: 177667 - DNA, 20 bp, synthetic construct
  source 1..20: mol_type = other DNA
agccaccgagcctggcctca

SEQ ID NO: 177668 - DNA, 20 bp, synthetic construct
  source 1..20: mol_type = other DNA
gagccaccgagcctggcctc

SEQ ID NO: 177669 - DNA, 20 bp, synthetic construct
  source 1..20: mol_type = other DNA
tgagccaccgagcctggcct

SEQ ID NO: 177670 - DNA, 20 bp, synthetic construct
  source 1..20: mol_type = other DNA
gtgagccaccgagcctggcc

SEQ ID NO: 177671 - DNA, 20 bp, synthetic construct
  source 1..20: mol_type = other DNA
tgtgagccaccgagcctggc

SEQ ID NO: 177672 - DNA, 20 bp, synthetic construct
  source 1..20: mol_type = other DNA
gtgtgagccaccgagcctgg

SEQ ID NO: 177673 - DNA, 20 bp, synthetic construct
  source 1..20: mol_type = other DNA
agtgtgagccaccgagcctg

SEQ ID NO: 177674 - DNA, 20 bp, synthetic construct
  source 1..20: mol_type = other DNA
aagtgtgagccaccgagcct

SEQ ID NO: 177675 - DNA, 20 bp, synthetic construct
  source 1..20: mol_type = other DNA
caagtgtgagccaccgagcc

SEQ ID NO: 177676 - DNA, 20 bp, synthetic construct
  source 1..20: mol_type = other DNA
acaagtgtgagccaccgagc

SEQ ID NO: 177677 - DNA, 20 bp, synthetic construct
  source 1..20: mol_type = other DNA
tacaagtgtgagccaccgag

SEQ ID NO: 177678 - DNA, 20 bp, synthetic construct
  source 1..20: mol_type = other DNA
ttacaagtgtgagccaccga

SEQ ID NO: 177679 - DNA, 20 bp, synthetic construct
  source 1..20: mol_type = other DNA
attacaagtgtgagccaccg

SEQ ID NO: 177680 - DNA, 20 bp, synthetic construct
  source 1..20: mol_type = other DNA
gattacaagtgtgagccacc

SEQ ID NO: 177681 - DNA, 20 bp, synthetic construct
  source 1..20: mol_type = other DNA
ggattacaagtgtgagccac

SEQ ID NO: 177682 - DNA, 20 bp, synthetic construct
  source 1..20: mol_type = other DNA
gggattacaagtgtgagcca

SEQ ID NO: 177683 - DNA, 20 bp, synthetic construct
  source 1..20: mol_type = other DNA
tgggattacaagtgtgagcc

SEQ ID NO: 177684 - DNA, 20 bp, synthetic construct
  source 1..20: mol_type = other DNA
ctgggattacaagtgtgagc

SEQ ID NO: 177685 - DNA, 20 bp, synthetic construct
  source 1..20: mol_type = other DNA
gctgggattacaagtgtgag

SEQ ID NO: 177686 - DNA, 20 bp, synthetic construct
  source 1..20: mol_type = other DNA
tgctgggattacaagtgtga

SEQ ID NO: 177687 - DNA, 20 bp, synthetic construct
  source 1..20: mol_type = other DNA
gtgctgggattacaagtgtg

SEQ ID NO: 177688 - DNA, 20 bp, synthetic construct
  source 1..20: mol_type = other DNA
agtgctgggattacaagtgt

SEQ ID NO: 177689 - DNA, 20 bp, synthetic construct
  source 1..20: mol_type = other DNA
cagtgctgggattacaagtg

SEQ ID NO: 177690 - DNA, 20 bp, synthetic construct
  source 1..20: mol_type = other DNA
acagtgctgggattacaagt

SEQ ID NO: 177691 - DNA, 20 bp, synthetic construct
  source 1..20: mol_type = other DNA
cacagtgctgggattacaag

SEQ ID NO: 177692 - DNA, 20 bp, synthetic construct
  source 1..20: mol_type = other DNA
ccacagtgctgggattacaa

SEQ ID NO: 177693 - DNA, 20 bp, synthetic construct
  source 1..20: mol_type = other DNA
cccacagtgctgggattaca

SEQ ID NO: 177694 - DNA, 20 bp, synthetic construct
  source 1..20: mol_type = other DNA
tcccacagtgctgggattac

SEQ ID NO: 177695 - DNA, 20 bp, synthetic construct
  source 1..20: mol_type = other DNA
ctcccacagtgctgggatta

SEQ ID NO: 177696 - DNA, 20 bp, synthetic construct
  source 1..20: mol_type = other DNA
cctcccacagtgctgggatt

SEQ ID NO: 177697 - DNA, 20 bp, synthetic construct
  source 1..20: mol_type = other DNA
tcctcccacagtgctgggat

SEQ ID NO: 177698 - DNA, 20 bp, synthetic construct
  source 1..20: mol_type = other DNA
atcctcccacagtgctggga

SEQ ID NO: 177699 - DNA, 20 bp, synthetic construct
  source 1..20: mol_type = other DNA
gatcctcccacagtgctggg

SEQ ID NO: 177700 - DNA, 20 bp, synthetic construct
  source 1..20: mol_type = other DNA
tgatcctcccacagtgctgg

SEQ ID NO: 177701 - DNA, 20 bp, synthetic construct
  source 1..20: mol_type = other DNA
gtgatcctcccacagtgctg

SEQ ID NO: 177702 - DNA, 20 bp, synthetic construct
  source 1..20: mol_type = other DNA
agtgatcctcccacagtgct

SEQ ID NO: 177703 - DNA, 20 bp, synthetic construct
  source 1..20: mol_type = other DNA
aagtgatcctcccacagtgc

SEQ ID NO: 177704 - DNA, 20 bp, synthetic construct
  source 1..20: mol_type = other DNA
caagtgatcctcccacagtg

SEQ ID NO: 177705 - DNA, 20 bp, synthetic construct
  source 1..20: mol_type = other DNA
tcaagtgatcctcccacagt

SEQ ID NO: 177706 - DNA, 20 bp, synthetic construct
  source 1..20: mol_type = other DNA
ttcaagtgatcctcccacag

SEQ ID NO: 177707 - DNA, 20 bp, synthetic construct
  source 1..20: mol_type = other DNA
cttcaagtgatcctcccaca

SEQ ID NO: 177708 - DNA, 20 bp, synthetic construct
  source 1..20: mol_type = other DNA
gcttcaagtgatcctcccac

SEQ ID NO: 177709 - DNA, 20 bp, synthetic construct
  source 1..20: mol_type = other DNA
ggcttcaagtgatcctccca

SEQ ID NO: 177710 - DNA, 20 bp, synthetic construct
  source 1..20: mol_type = other DNA
tggcttcaagtgatcctccc

SEQ ID NO: 177711 - DNA, 20 bp, synthetic construct
  source 1..20: mol_type = other DNA
ctggcttcaagtgatcctcc

SEQ ID NO: 177712 - DNA, 20 bp, synthetic construct
  source 1..20: mol_type = other DNA
cctggcttcaagtgatcctc

SEQ ID NO: 177713 - DNA, 20 bp, synthetic construct
  source 1..20: mol_type = other DNA
tcctggcttcaagtgatcct

SEQ ID NO: 177714 - DNA, 20 bp, synthetic construct
  source 1..20: mol_type = other DNA
ctcctggcttcaagtgatcc

SEQ ID NO: 177715 - DNA, 20 bp, synthetic construct
  source 1..20: mol_type = other DNA
actcctggcttcaagtgatc

SEQ ID NO: 177716 - DNA, 20 bp, synthetic construct
  source 1..20: mol_type = other DNA
gactcctggcttcaagtgat

SEQ ID NO: 177717 - DNA, 20 bp, synthetic construct
  source 1..20: mol_type = other DNA
agactcctggcttcaagtga

SEQ ID NO: 177718 - DNA, 20 bp, synthetic construct
  source 1..20: mol_type = other DNA
cagactcctggcttcaagtg

SEQ ID NO: 177719 - DNA, 20 bp, synthetic construct
  source 1..20: mol_type = other DNA
tcagactcctggcttcaagt

SEQ ID NO: 177720 - DNA, 20 bp, synthetic construct
  source 1..20: mol_type = other DNA
ctcagactcctggcttcaag

SEQ ID NO: 177721 - DNA, 20 bp, synthetic construct
  source 1..20: mol_type = other DNA
tctcagactcctggcttcaa

SEQ ID NO: 177722 - DNA, 20 bp, synthetic construct
  source 1..20: mol_type = other DNA
gtctcagactcctggcttca

SEQ ID NO: 177723 - DNA, 20 bp, synthetic construct
  source 1..20: mol_type = other DNA
agtctcagactcctggcttc

SEQ ID NO: 177724 - DNA, 20 bp, synthetic construct
  source 1..20: mol_type = other DNA
tagtctcagactcctggctt

SEQ ID NO: 177725 - DNA, 20 bp, synthetic construct
  source 1..20: mol_type = other DNA
ctagtctcagactcctggct

SEQ ID NO: 177726 - DNA, 20 bp, synthetic construct
  source 1..20: mol_type = other DNA
gctagtctcagactcctggc

SEQ ID NO: 177727 - DNA, 20 bp, synthetic construct
  source 1..20: mol_type = other DNA
ggctagtctcagactcctgg

SEQ ID NO: 177728 - DNA, 20 bp, synthetic construct
  source 1..20: mol_type = other DNA
aggctagtctcagactcctg

SEQ ID NO: 177729 - DNA, 20 bp, synthetic construct
  source 1..20: mol_type = other DNA
caggctagtctcagactcct

SEQ ID NO: 177730 - DNA, 20 bp, synthetic construct
  source 1..20: mol_type = other DNA
ccaggctagtctcagactcc

SEQ ID NO: 177731 - DNA, 20 bp, synthetic construct
  source 1..20: mol_type = other DNA
cccaggctagtctcagactc

SEQ ID NO: 177732 - DNA, 20 bp, synthetic construct
  source 1..20: mol_type = other DNA
gcccaggctagtctcagact

SEQ ID NO: 177733 - DNA, 20 bp, synthetic construct
  source 1..20: mol_type = other DNA
tgcccaggctagtctcagac

SEQ ID NO: 177734 - DNA, 20 bp, synthetic construct
  source 1..20: mol_type = other DNA
ttgcccaggctagtctcaga

SEQ ID NO: 177735 - DNA, 20 bp, synthetic construct
  source 1..20: mol_type = other DNA
gttgcccaggctagtctcag

SEQ ID NO: 177736 - DNA, 20 bp, synthetic construct
  source 1..20: mol_type = other DNA
tgttgcccaggctagtctca

SEQ ID NO: 177737 - DNA, 20 bp, synthetic construct
  source 1..20: mol_type = other DNA
ttgttgcccaggctagtctc

SEQ ID NO: 177738 - DNA, 20 bp, synthetic construct
  source 1..20: mol_type = other DNA
tttgttgcccaggctagtct

SEQ ID NO: 177739 - DNA, 20 bp, synthetic construct
  source 1..20: mol_type = other DNA
ttttgttgcccaggctagtc

SEQ ID NO: 177740 - DNA, 20 bp, synthetic construct
  source 1..20: mol_type = other DNA
gttttgttgcccaggctagt

SEQ ID NO: 177741 - DNA, 20 bp, synthetic construct
  source 1..20: mol_type = other DNA
tgttttgttgcccaggctag

SEQ ID NO: 177742 - DNA, 20 bp, synthetic construct
  source 1..20: mol_type = other DNA
ttgttttgttgcccaggcta

SEQ ID NO: 177743 - DNA, 20 bp, synthetic construct
  source 1..20: mol_type = other DNA
cttgttttgttgcccaggct

SEQ ID NO: 177744 - DNA, 20 bp, synthetic construct
  source 1..20: mol_type = other DNA
tcttgttttgttgcccaggc

SEQ ID NO: 177745 - DNA, 20 bp, synthetic construct
  source 1..20: mol_type = other DNA
atcttgttttgttgcccagg

SEQ ID NO: 177746 - DNA, 20 bp, synthetic construct
  source 1..20: mol_type = other DNA
gatcttgttttgttgcccag

SEQ ID NO: 177747 - DNA, 20 bp, synthetic construct
  source 1..20: mol_type = other DNA
ggatcttgttttgttgccca

SEQ ID NO: 177748 - DNA, 20 bp, synthetic construct
  source 1..20: mol_type = other DNA
aggatcttgttttgttgccc

SEQ ID NO: 177749 - DNA, 20 bp, synthetic construct
  source 1..20: mol_type = other DNA
caggatcttgttttgttgcc

SEQ ID NO: 177750 - DNA, 20 bp, synthetic construct
  source 1..20: mol_type = other DNA
acaggatcttgttttgttgc

SEQ ID NO: 177751 - DNA, 20 bp, synthetic construct
  source 1..20: mol_type = other DNA
gacaggatcttgttttgttg

SEQ ID NO: 177752 - DNA, 20 bp, synthetic construct
  source 1..20: mol_type = other DNA
agacaggatcttgttttgtt

SEQ ID NO: 177753 - DNA, 20 bp, synthetic construct
  source 1..20: mol_type = other DNA
gagacaggatcttgttttgt

SEQ ID NO: 177754 - DNA, 20 bp, synthetic construct
  source 1..20: mol_type = other DNA
agagacaggatcttgttttg

SEQ ID NO: 177755 - DNA, 20 bp, synthetic construct
  source 1..20: mol_type = other DNA
tagagacaggatcttgtttt

SEQ ID NO: 177756 - DNA, 20 bp, synthetic construct
  source 1..20: mol_type = other DNA
gtagagacaggatcttgttt

SEQ ID NO: 177757 - DNA, 20 bp, synthetic construct
  source 1..20: mol_type = other DNA
tgtagagacaggatcttgtt

SEQ ID NO: 177758 - DNA, 20 bp, synthetic construct
  source 1..20: mol_type = other DNA
ttgtagagacaggatcttgt

SEQ ID NO: 177759 - DNA, 20 bp, synthetic construct
  source 1..20: mol_type = other DNA
tttgtagagacaggatcttg

SEQ ID NO: 177760 - DNA, 20 bp, synthetic construct
  source 1..20: mol_type = other DNA
ttttgtagagacaggatctt

SEQ ID NO: 177761 - DNA, 20 bp, synthetic construct
  source 1..20: mol_type = other DNA
cttttgtagagacaggatct

SEQ ID NO: 177762 - DNA, 20 bp, synthetic construct
  source 1..20: mol_type = other DNA
ccttttgtagagacaggatc

SEQ ID NO: 177763 - DNA, 20 bp, synthetic construct
  source 1..20: mol_type = other DNA
tccttttgtagagacaggat

SEQ ID NO: 177764 - DNA, 20 bp, synthetic construct
  source 1..20: mol_type = other DNA
ttccttttgtagagacagga

SEQ ID NO: 177765 - DNA, 20 bp, synthetic construct
  source 1..20: mol_type = other DNA
tttccttttgtagagacagg

SEQ ID NO: 177766 - DNA, 20 bp, synthetic construct
  source 1..20: mol_type = other DNA
gtttccttttgtagagacag

SEQ ID NO: 177767 - DNA, 20 bp, synthetic construct
  source 1..20: mol_type = other DNA
agtttccttttgtagagaca

SEQ ID NO: 177768 - DNA, 20 bp, synthetic construct
  source 1..20: mol_type = other DNA
cagtttccttttgtagagac

SEQ ID NO: 177769 - DNA, 20 bp, synthetic construct
  source 1..20: mol_type = other DNA
acagtttccttttgtagaga

SEQ ID NO: 177770 - DNA, 20 bp, synthetic construct
  source 1..20: mol_type = other DNA
tacagtttccttttgtagag

SEQ ID NO: 177771 - DNA, 20 bp, synthetic construct
  source 1..20: mol_type = other DNA
ttacagtttccttttgtaga

SEQ ID NO: 177772 - DNA, 20 bp, synthetic construct
  source 1..20: mol_type = other DNA
tttacagtttccttttgtag

SEQ ID NO: 177773 - DNA, 20 bp, synthetic construct
  source 1..20: mol_type = other DNA
ttttacagtttccttttgta

SEQ ID NO: 177774 - DNA, 20 bp, synthetic construct
  source 1..20: mol_type = other DNA
tttttacagtttccttttgt

SEQ ID NO: 177775 - DNA, 20 bp, synthetic construct
  source 1..20: mol_type = other DNA
atttttacagtttccttttg

SEQ ID NO: 177776 - DNA, 20 bp, synthetic construct
  source 1..20: mol_type = other DNA
aatttttacagtttcctttt

SEQ ID NO: 177777 - DNA, 20 bp, synthetic construct
  source 1..20: mol_type = other DNA
taatttttacagtttccttt

SEQ ID NO: 177778 - DNA, 20 bp, synthetic construct
  source 1..20: mol_type = other DNA
ctaatttttacagtttcctt

SEQ ID NO: 177779 - DNA, 20 bp, synthetic construct
  source 1..20: mol_type = other DNA
gctaatttttacagtttcct

SEQ ID NO: 177780 - DNA, 20 bp, synthetic construct
  source 1..20: mol_type = other DNA
agctaatttttacagtttcc

SEQ ID NO: 177781 - DNA, 20 bp, synthetic construct
  source 1..20: mol_type = other DNA
cagctaatttttacagtttc

SEQ ID NO: 177782 - DNA, 20 bp, synthetic construct
  source 1..20: mol_type = other DNA
ccagctaatttttacagttt

SEQ ID NO: 177783 - DNA, 20 bp, synthetic construct
  source 1..20: mol_type = other DNA
cccagctaatttttacagtt

SEQ ID NO: 177784 - DNA, 20 bp, synthetic construct
  source 1..20: mol_type = other DNA
gcccagctaatttttacagt

SEQ ID NO: 177785 - DNA, 20 bp, synthetic construct
  source 1..20: mol_type = other DNA
tgcccagctaatttttacag

SEQ ID NO: 177786 - DNA, 20 bp, synthetic construct
  source 1..20: mol_type = other DNA
atgcccagctaatttttaca

SEQ ID NO: 177787 - DNA, 20 bp, synthetic construct
  source 1..20: mol_type = other DNA
catgcccagctaatttttac

SEQ ID NO: 177788 - DNA, 20 bp, synthetic construct
  source 1..20: mol_type = other DNA
tcatgcccagctaattttta

SEQ ID NO: 177789 - DNA, 20 bp, synthetic construct
  source 1..20: mol_type = other DNA
atcatgcccagctaattttt

SEQ ID NO: 177790 - DNA, 20 bp, synthetic construct
  source 1..20: mol_type = other DNA
catcatgcccagctaatttt

SEQ ID NO: 177791 - DNA, 20 bp, synthetic construct
  source 1..20: mol_type = other DNA
ccatcatgcccagctaattt

SEQ ID NO: 177792 - DNA, 20 bp, synthetic construct
  source 1..20: mol_type = other DNA
gccatcatgcccagctaatt

SEQ ID NO: 177793 - DNA, 20 bp, synthetic construct
  source 1..20: mol_type = other DNA
tgccatcatgcccagctaat

SEQ ID NO: 177794 - DNA, 20 bp, synthetic construct
  source 1..20: mol_type = other DNA
atgccatcatgcccagctaa

SEQ ID NO: 177795 - DNA, 20 bp, synthetic construct
  source 1..20: mol_type = other DNA
catgccatcatgcccagcta

SEQ ID NO: 177796 - DNA, 20 bp, synthetic construct
  source 1..20: mol_type = other DNA
acatgccatcatgcccagct

SEQ ID NO: 177797 - DNA, 20 bp, synthetic construct
  source 1..20: mol_type = other DNA
cacatgccatcatgcccagc

SEQ ID NO: 177798 - DNA, 20 bp, synthetic construct
  source 1..20: mol_type = other DNA
acacatgccatcatgcccag

SEQ ID NO: 177799 - DNA, 20 bp, synthetic construct
  source 1..20: mol_type = other DNA
gacacatgccatcatgccca

SEQ ID NO: 177800 - DNA, 20 bp, synthetic construct
  source 1..20: mol_type = other DNA
agacacatgccatcatgccc

SEQ ID NO: 177801 - DNA, 20 bp, synthetic construct
  source 1..20: mol_type = other DNA
cagacacatgccatcatgcc

SEQ ID NO: 177802 - DNA, 20 bp, synthetic construct
  source 1..20: mol_type = other DNA
acagacacatgccatcatgc

SEQ ID NO: 177803 - DNA, 20 bp, synthetic construct
  source 1..20: mol_type = other DNA
tacagacacatgccatcatg

SEQ ID NO: 177804 - DNA, 20 bp, synthetic construct
  source 1..20: mol_type = other DNA
ctacagacacatgccatcat

SEQ ID NO: 177805 - DNA, 20 bp, synthetic construct
  source 1..20: mol_type = other DNA
gctacagacacatgccatca

SEQ ID NO: 177806 - DNA, 20 bp, synthetic construct
  source 1..20: mol_type = other DNA
ggctacagacacatgccatc

SEQ ID NO: 177807 - DNA, 20 bp, synthetic construct
  source 1..20: mol_type = other DNA
gggctacagacacatgccat

SEQ ID NO: 177808 - DNA, 20 bp, synthetic construct
  source 1..20: mol_type = other DNA
agggctacagacacatgcca

SEQ ID NO: 177809 - DNA, 20 bp, synthetic construct
  source 1..20: mol_type = other DNA
tagggctacagacacatgcc

SEQ ID NO: 177810 - DNA, 20 bp, synthetic construct
  source 1..20: mol_type = other DNA
ctagggctacagacacatgc

SEQ ID NO: 177811 - DNA, 20 bp, synthetic construct
  source 1..20: mol_type = other DNA
gctagggctacagacacatg

SEQ ID NO: 177812 - DNA, 20 bp, synthetic construct
  source 1..20: mol_type = other DNA
agctagggctacagacacat

SEQ ID NO: 177813 - DNA, 20 bp, synthetic construct
  source 1..20: mol_type = other DNA
tagctagggctacagacaca

SEQ ID NO: 177814 - DNA, 20 bp, synthetic construct
  source 1..20: mol_type = other DNA
gtagctagggctacagacac

SEQ ID NO: 177815 - DNA, 20 bp, synthetic construct
  source 1..20: mol_type = other DNA
agtagctagggctacagaca

SEQ ID NO: 177816 - DNA, 20 bp, synthetic construct
  source 1..20: mol_type = other DNA
aagtagctagggctacagac

SEQ ID NO: 177817 - DNA, 20 bp, synthetic construct
  source 1..20: mol_type = other DNA
caagtagctagggctacaga

SEQ ID NO: 177818 - DNA, 20 bp, synthetic construct
  source 1..20: mol_type = other DNA
ccaagtagctagggctacag

SEQ ID NO: 177819 - DNA, 20 bp, synthetic construct
  source 1..20: mol_type = other DNA
cccaagtagctagggctaca

SEQ ID NO: 177820 - DNA, 20 bp, synthetic construct
  source 1..20: mol_type = other DNA
tcccaagtagctagggctac

SEQ ID NO: 177821 - DNA, 20 bp, synthetic construct
  source 1..20: mol_type = other DNA
ctcccaagtagctagggcta

SEQ ID NO: 177822 - DNA, 20 bp, synthetic construct
  source 1..20: mol_type = other DNA
cctcccaagtagctagggct

SEQ ID NO: 177823 - DNA, 20 bp, synthetic construct
  source 1..20: mol_type = other DNA
gcctcccaagtagctagggc

SEQ ID NO: 177824 - DNA, 20 bp, synthetic construct
  source 1..20: mol_type = other DNA
ggcctcccaagtagctaggg

SEQ ID NO: 177825 - DNA, 20 bp, synthetic construct
  source 1..20: mol_type = other DNA
cggcctcccaagtagctagg

SEQ ID NO: 177826 - DNA, 20 bp, synthetic construct
  source 1..20: mol_type = other DNA
tcggcctcccaagtagctag

SEQ ID NO: 177827 - DNA, 20 bp, synthetic construct
  source 1..20: mol_type = other DNA
ttcggcctcccaagtagcta

SEQ ID NO: 177828 - DNA, 20 bp, synthetic construct
  source 1..20: mol_type = other DNA
cttcggcctcccaagtagct

SEQ ID NO: 177829 - DNA, 20 bp, synthetic construct
  source 1..20: mol_type = other DNA
gcttcggcctcccaagtagc

SEQ ID NO: 177830 - DNA, 20 bp, synthetic construct
  source 1..20: mol_type = other DNA
tgcttcggcctcccaagtag

SEQ ID NO: 177831 - DNA, 20 bp, synthetic construct
  source 1..20: mol_type = other DNA
ctgcttcggcctcccaagta

SEQ ID NO: 177832 - DNA, 20 bp, synthetic construct
  source 1..20: mol_type = other DNA
cctgcttcggcctcccaagt

SEQ ID NO: 177833 - DNA, 20 bp, synthetic construct
  source 1..20: mol_type = other DNA
tcctgcttcggcctcccaag

SEQ ID NO: 177834 - DNA, 20 bp, synthetic construct
  source 1..20: mol_type = other DNA
ctcctgcttcggcctcccaa

SEQ ID NO: 177835 - DNA, 20 bp, synthetic construct
  source 1..20: mol_type = other DNA
cctcctgcttcggcctccca

SEQ ID NO: 177836 - DNA, 20 bp, synthetic construct
  source 1..20: mol_type = other DNA
tcctcctgcttcggcctccc

SEQ ID NO: 177837 - DNA, 20 bp, synthetic construct
  source 1..20: mol_type = other DNA
atcctcctgcttcggcctcc

SEQ ID NO: 177838 - DNA, 20 bp, synthetic construct
  source 1..20: mol_type = other DNA
gatcctcctgcttcggcctc

SEQ ID NO: 177839 - DNA, 20 bp, synthetic construct
  source 1..20: mol_type = other DNA
cgatcctcctgcttcggcct

SEQ ID NO: 177840 - DNA, 20 bp, synthetic construct
  source 1..20: mol_type = other DNA
gcgatcctcctgcttcggcc

SEQ ID NO: 177841 - DNA, 20 bp, synthetic construct
  source 1..20: mol_type = other DNA
agcgatcctcctgcttcggc

SEQ ID NO: 177842 - DNA, 20 bp, synthetic construct
  source 1..20: mol_type = other DNA
aagcgatcctcctgcttcgg

SEQ ID NO: 177843 - DNA, 20 bp, synthetic construct
  source 1..20: mol_type = other DNA
caagcgatcctcctgcttcg

SEQ ID NO: 177844 - DNA, 20 bp, synthetic construct
  source 1..20: mol_type = other DNA
tcaagcgatcctcctgcttc

SEQ ID NO: 177845 - DNA, 20 bp, synthetic construct
  source 1..20: mol_type = other DNA
ctcaagcgatcctcctgctt

SEQ ID NO: 177846 - DNA, 20 bp, synthetic construct
  source 1..20: mol_type = other DNA
gctcaagcgatcctcctgct

SEQ ID NO: 177847 - DNA, 20 bp, synthetic construct
  source 1..20: mol_type = other DNA
ggctcaagcgatcctcctgc

SEQ ID NO: 177848 - DNA, 20 bp, synthetic construct
  source 1..20: mol_type = other DNA
gggctcaagcgatcctcctg

SEQ ID NO: 177849 - DNA, 20 bp, synthetic construct
  source 1..20: mol_type = other DNA
tgggctcaagcgatcctcct

SEQ ID NO: 177850 - DNA, 20 bp, synthetic construct
  source 1..20: mol_type = other DNA
ctgggctcaagcgatcctcc

SEQ ID NO: 177851 - DNA, 20 bp, synthetic construct
  source 1..20: mol_type = other DNA
cctgggctcaagcgatcctc

SEQ ID NO: 177852 - DNA, 20 bp, synthetic construct
  source 1..20: mol_type = other DNA
tcctgggctcaagcgatcct

SEQ ID NO: 177853 - DNA, 20 bp, synthetic construct
  source 1..20: mol_type = other DNA
ctcctgggctcaagcgatcc

SEQ ID NO: 177854 - DNA, 20 bp, synthetic construct
  source 1..20: mol_type = other DNA
actcctgggctcaagcgatc

SEQ ID NO: 177855 - DNA, 20 bp, synthetic construct
  source 1..20: mol_type = other DNA
aactcctgggctcaagcgat

SEQ ID NO: 177856 - DNA, 20 bp, synthetic construct
  source 1..20: mol_type = other DNA
gaactcctgggctcaagcga

SEQ ID NO: 177857 - DNA, 20 bp, synthetic construct
  source 1..20: mol_type = other DNA
tgaactcctgggctcaagcg

SEQ ID NO: 177858 - DNA, 20 bp, synthetic construct
  source 1..20: mol_type = other DNA
ttgaactcctgggctcaagc

SEQ ID NO: 177859 - DNA, 20 bp, synthetic construct
  source 1..20: mol_type = other DNA
cttgaactcctgggctcaag

SEQ ID NO: 177860 - DNA, 20 bp, synthetic construct
  source 1..20: mol_type = other DNA
ccttgaactcctgggctcaa

SEQ ID NO: 177861 - DNA, 20 bp, synthetic construct
  source 1..20: mol_type = other DNA
gccttgaactcctgggctca

SEQ ID NO: 177862 - DNA, 20 bp, synthetic construct
  source 1..20: mol_type = other DNA
agccttgaactcctgggctc

SEQ ID NO: 177863 - DNA, 20 bp, synthetic construct
  source 1..20: mol_type = other DNA
tagccttgaactcctgggct

SEQ ID NO: 177864 - DNA, 20 bp, synthetic construct
  source 1..20: mol_type = other DNA
gtagccttgaactcctgggc

SEQ ID NO: 177865 - DNA, 20 bp, synthetic construct
  source 1..20: mol_type = other DNA
tgtagccttgaactcctggg

SEQ ID NO: 177866 - DNA, 20 bp, synthetic construct
  source 1..20: mol_type = other DNA
ctgtagccttgaactcctgg

SEQ ID NO: 177867 - DNA, 20 bp, synthetic construct
  source 1..20: mol_type = other DNA
actgtagccttgaactcctg

SEQ ID NO: 177868 - DNA, 20 bp, synthetic construct
  source 1..20: mol_type = other DNA
cactgtagccttgaactcct

SEQ ID NO: 177869 - DNA, 20 bp, synthetic construct
  source 1..20: mol_type = other DNA
tcactgtagccttgaactcc

SEQ ID NO: 177870 - DNA, 20 bp, synthetic construct
  source 1..20: mol_type = other DNA
ctcactgtagccttgaactc

SEQ ID NO: 177871 - DNA, 20 bp, synthetic construct
  source 1..20: mol_type = other DNA
gctcactgtagccttgaact

SEQ ID NO: 177872 - DNA, 20 bp, synthetic construct
  source 1..20: mol_type = other DNA
agctcactgtagccttgaac

SEQ ID NO: 177873 - DNA, 20 bp, synthetic construct
  source 1..20: mol_type = other DNA
tagctcactgtagccttgaa

SEQ ID NO: 177874 - DNA, 20 bp, synthetic construct
  source 1..20: mol_type = other DNA
atagctcactgtagccttga

SEQ ID NO: 177875 - DNA, 20 bp, synthetic construct
  source 1..20: mol_type = other DNA
catagctcactgtagccttg

SEQ ID NO: 177876 - DNA, 20 bp, synthetic construct
  source 1..20: mol_type = other DNA
tcatagctcactgtagcctt

SEQ ID NO: 177877 - DNA, 20 bp, synthetic construct
  source 1..20: mol_type = other DNA
atcatagctcactgtagcct

SEQ ID NO: 177878 - DNA, 20 bp, synthetic construct
  source 1..20: mol_type = other DNA
aatcatagctcactgtagcc

SEQ ID NO: 177879 - DNA, 20 bp, synthetic construct
  source 1..20: mol_type = other DNA
caatcatagctcactgtagc

SEQ ID NO: 177880 - DNA, 20 bp, synthetic construct
  source 1..20: mol_type = other DNA
acaatcatagctcactgtag

SEQ ID NO: 177881 - DNA, 20 bp, synthetic construct
  source 1..20: mol_type = other DNA
gacaatcatagctcactgta

SEQ ID NO: 177882 - DNA, 20 bp, synthetic construct
  source 1..20: mol_type = other DNA
ggacaatcatagctcactgt

SEQ ID NO: 177883 - DNA, 20 bp, synthetic construct
  source 1..20: mol_type = other DNA
gggacaatcatagctcactg

SEQ ID NO: 177884 - DNA, 20 bp, synthetic construct
  source 1..20: mol_type = other DNA
tgggacaatcatagctcact

SEQ ID NO: 177885 - DNA, 20 bp, synthetic construct
  source 1..20: mol_type = other DNA
atgggacaatcatagctcac

SEQ ID NO: 177886 - DNA, 20 bp, synthetic construct
  source 1..20: mol_type = other DNA
tatgggacaatcatagctca

SEQ ID NO: 177887 - DNA, 20 bp, synthetic construct
  source 1..20: mol_type = other DNA
ctatgggacaatcatagctc

SEQ ID NO: 177888 - DNA, 20 bp, synthetic construct
  source 1..20: mol_type = other DNA
gctatgggacaatcatagct

SEQ ID NO: 177889 - DNA, 20 bp, synthetic construct
  source 1..20: mol_type = other DNA
tgctatgggacaatcatagc

SEQ ID NO: 177890 - DNA, 20 bp, synthetic construct
  source 1..20: mol_type = other DNA
gtgctatgggacaatcatag

SEQ ID NO: 177891 - DNA, 20 bp, synthetic construct
  source 1..20: mol_type = other DNA
agtgctatgggacaatcata

SEQ ID NO: 177892 - DNA, 20 bp, synthetic construct
  source 1..20: mol_type = other DNA
gagtgctatgggacaatcat

SEQ ID NO: 177893 - DNA, 20 bp, synthetic construct
  source 1..20: mol_type = other DNA
ggagtgctatgggacaatca

SEQ ID NO: 177894 - DNA, 20 bp, synthetic construct
  source 1..20: mol_type = other DNA
tggagtgctatgggacaatc

SEQ ID NO: 177895 - DNA, 20 bp, synthetic construct
  source 1..20: mol_type = other DNA
ctggagtgctatgggacaat

SEQ ID NO: 177896 - DNA, 20 bp, synthetic construct
  source 1..20: mol_type = other DNA
gctggagtgctatgggacaa

SEQ ID NO: 177897 - DNA, 20 bp, synthetic construct
  source 1..20: mol_type = other DNA
ggctggagtgctatgggaca

SEQ ID NO: 177898 - DNA, 20 bp, synthetic construct
  source 1..20: mol_type = other DNA
aggctggagtgctatgggac

SEQ ID NO: 177899 - DNA, 20 bp, synthetic construct
  source 1..20: mol_type = other DNA
caggctggagtgctatggga

SEQ ID NO: 177900 - DNA, 20 bp, synthetic construct
  source 1..20: mol_type = other DNA
ccaggctggagtgctatggg

SEQ ID NO: 177901 - DNA, 20 bp, synthetic construct
  source 1..20: mol_type = other DNA
cccaggctggagtgctatgg

SEQ ID NO: 177902 - DNA, 20 bp, synthetic construct
  source 1..20: mol_type = other DNA
acccaggctggagtgctatg

SEQ ID NO: 177903 - DNA, 20 bp, synthetic construct
  source 1..20: mol_type = other DNA
tacccaggctggagtgctat

SEQ ID NO: 177904 - DNA, 20 bp, synthetic construct
  source 1..20: mol_type = other DNA
ttacccaggctggagtgcta

SEQ ID NO: 177905 - DNA, 20 bp, synthetic construct
  source 1..20: mol_type = other DNA
gttacccaggctggagtgct

SEQ ID NO: 177906 - DNA, 20 bp, synthetic construct
  source 1..20: mol_type = other DNA
tgttacccaggctggagtgc

SEQ ID NO: 177907 - DNA, 20 bp, synthetic construct
  source 1..20: mol_type = other DNA
gtgttacccaggctggagtg

SEQ ID NO: 177908 - DNA, 20 bp, synthetic construct
  source 1..20: mol_type = other DNA
tgtgttacccaggctggagt

SEQ ID NO: 177909 - DNA, 20 bp, synthetic construct
  source 1..20: mol_type = other DNA
ctgtgttacccaggctggag

SEQ ID NO: 177910 - DNA, 20 bp, synthetic construct
  source 1..20: mol_type = other DNA
gctgtgttacccaggctgga

SEQ ID NO: 177911 - DNA, 20 bp, synthetic construct
  source 1..20: mol_type = other DNA
tgctgtgttacccaggctgg

SEQ ID NO: 177912 - DNA, 20 bp, synthetic construct
  source 1..20: mol_type = other DNA
ttgctgtgttacccaggctg

SEQ ID NO: 177913 - DNA, 20 bp, synthetic construct
  source 1..20: mol_type = other DNA
cttgctgtgttacccaggct

SEQ ID NO: 177914 - DNA, 20 bp, synthetic construct
  source 1..20: mol_type = other DNA
ccttgctgtgttacccaggc

SEQ ID NO: 177915 - DNA, 20 bp, synthetic construct
  source 1..20: mol_type = other DNA
gccttgctgtgttacccagg

SEQ ID NO: 177916 - DNA, 20 bp, synthetic construct
  source 1..20: mol_type = other DNA
ggccttgctgtgttacccag

SEQ ID NO: 177917 - DNA, 20 bp, synthetic construct
  source 1..20: mol_type = other DNA
gggccttgctgtgttaccca

SEQ ID NO: 177918 - DNA, 20 bp, synthetic construct
  source 1..20: mol_type = other DNA
agggccttgctgtgttaccc

SEQ ID NO: 177919 - DNA, 20 bp, synthetic construct
  source 1..20: mol_type = other DNA
cagggccttgctgtgttacc

SEQ ID NO: 177920 - DNA, 20 bp, synthetic construct
  source 1..20: mol_type = other DNA
acagggccttgctgtgttac

SEQ ID NO: 177921 - DNA, 20 bp, synthetic construct
  source 1..20: mol_type = other DNA
gacagggccttgctgtgtta

SEQ ID NO: 177922 - DNA, 20 bp, synthetic construct
  source 1..20: mol_type = other DNA
agacagggccttgctgtgtt

SEQ ID NO: 177923 - DNA, 20 bp, synthetic construct
  source 1..20: mol_type = other DNA
gagacagggccttgctgtgt

SEQ ID NO: 177924 - DNA, 20 bp, synthetic construct
  source 1..20: mol_type = other DNA
agagacagggccttgctgtg

SEQ ID NO: 177925 - DNA, 20 bp, synthetic construct
  source 1..20: mol_type = other DNA
tagagacagggccttgctgt

SEQ ID NO: 177926 - DNA, 20 bp, synthetic construct
  source 1..20: mol_type = other DNA
ttagagacagggccttgctg

SEQ ID NO: 177927 - DNA, 20 bp, synthetic construct
  source 1..20: mol_type = other DNA
tttagagacagggccttgct

SEQ ID NO: 177928 - DNA, 20 bp, synthetic construct
  source 1..20: mol_type = other DNA
gtttagagacagggccttgc

SEQ ID NO: 177929 - DNA, 20 bp, synthetic construct
  source 1..20: mol_type = other DNA
agtttagagacagggccttg

SEQ ID NO: 177930 - DNA, 20 bp, synthetic construct
  source 1..20: mol_type = other DNA
aagtttagagacagggcctt

SEQ ID NO: 177931 - DNA, 20 bp, synthetic construct
  source 1..20: mol_type = other DNA
aaagtttagagacagggcct

SEQ ID NO: 177932 - DNA, 20 bp, synthetic construct
  source 1..20: mol_type = other DNA
aaaagtttagagacagggcc

SEQ ID NO: 177933 - DNA, 20 bp, synthetic construct
  source 1..20: mol_type = other DNA
aaaaagtttagagacagggc

SEQ ID NO: 177934 - DNA, 20 bp, synthetic construct
  source 1..20: mol_type = other DNA
aaaaaagtttagagacaggg

SEQ ID NO: 177935 - DNA, 20 bp, synthetic construct
  source 1..20: mol_type = other DNA
aaaaaaagtttagagacagg

SEQ ID NO: 177936 - DNA, 20 bp, synthetic construct
  source 1..20: mol_type = other DNA
aaaaaaaagtttagagacag

SEQ ID NO: 177937 - DNA, 20 bp, synthetic construct
  source 1..20: mol_type = other DNA
aaaaaaaaagtttagagaca

SEQ ID NO: 177938 - DNA, 20 bp, synthetic construct
  source 1..20: mol_type = other DNA
aaaaaaaaaagtttagagac

SEQ ID NO: 177939 - DNA, 20 bp, synthetic construct
  source 1..20: mol_type = other DNA
aaaaaaaaaaagtttagaga

SEQ ID NO: 177940 - DNA, 20 bp, synthetic construct
  source 1..20: mol_type = other DNA
taaaaaaaaaaagtttagag

SEQ ID NO: 177941 - DNA, 20 bp, synthetic construct
  source 1..20: mol_type = other DNA
ttaaaaaaaaaaagtttaga

SEQ ID NO: 177942 - DNA, 20 bp, synthetic construct
  source 1..20: mol_type = other DNA
attaaaaaaaaaaagtttag

SEQ ID NO: 177943 - DNA, 20 bp, synthetic construct
  source 1..20: mol_type = other DNA
aattaaaaaaaaaaagttta

SEQ ID NO: 177944 - DNA, 20 bp, synthetic construct
  source 1..20: mol_type = other DNA
gaattaaaaaaaaaaagttt

SEQ ID NO: 177945 - DNA, 20 bp, synthetic construct
  source 1..20: mol_type = other DNA
agaattaaaaaaaaaaagtt

SEQ ID NO: 177946 - DNA, 20 bp, synthetic construct
  source 1..20: mol_type = other DNA
tagaattaaaaaaaaaaagt

SEQ ID NO: 177947 - DNA, 20 bp, synthetic construct
  source 1..20: mol_type = other DNA
atagaattaaaaaaaaaaag

SEQ ID NO: 177948 - DNA, 20 bp, synthetic construct
  source 1..20: mol_type = other DNA
aatagaattaaaaaaaaaaa

SEQ ID NO: 177949 - DNA, 20 bp, synthetic construct
  source 1..20: mol_type = other DNA
aaatagaattaaaaaaaaaa

SEQ ID NO: 177950 - DNA, 20 bp, synthetic construct
  source 1..20: mol_type = other DNA
taaatagaattaaaaaaaaa

SEQ ID NO: 177951 - DNA, 20 bp, synthetic construct
  source 1..20: mol_type = other DNA
ataaatagaattaaaaaaaa

SEQ ID NO: 177952 - DNA, 20 bp, synthetic construct
  source 1..20: mol_type = other DNA
tataaatagaattaaaaaaa

SEQ ID NO: 177953 - DNA, 20 bp, synthetic construct
  source 1..20: mol_type = other DNA
atataaatagaattaaaaaa

SEQ ID NO: 177954 - DNA, 20 bp, synthetic construct
  source 1..20: mol_type = other DNA
aatataaatagaattaaaaa

SEQ ID NO: 177955 - DNA, 20 bp, synthetic construct
  source 1..20: mol_type = other DNA
aaatataaatagaattaaaa

SEQ ID NO: 177956 - DNA, 20 bp, synthetic construct
  source 1..20: mol_type = other DNA
taaatataaatagaattaaa

SEQ ID NO: 177957 - DNA, 20 bp, synthetic construct
  source 1..20: mol_type = other DNA
gtaaatataaatagaattaa

SEQ ID NO: 177958 - DNA, 20 bp, synthetic construct
  source 1..20: mol_type = other DNA
tgtaaatataaatagaatta

SEQ ID NO: 177959 - DNA, 20 bp, synthetic construct
  source 1..20: mol_type = other DNA
atgtaaatataaatagaatt

SEQ ID NO: 177960 - DNA, 20 bp, synthetic construct
  source 1..20: mol_type = other DNA
catgtaaatataaatagaat

SEQ ID NO: 177961 - DNA, 20 bp, synthetic construct
  source 1..20: mol_type = other DNA
acatgtaaatataaatagaa

SEQ ID NO: 177962 - DNA, 20 bp, synthetic construct
  source 1..20: mol_type = other DNA
tacatgtaaatataaataga

SEQ ID NO: 177963 - DNA, 20 bp, synthetic construct
  source 1..20: mol_type = other DNA
atacatgtaaatataaatag

SEQ ID NO: 177964 - DNA, 20 bp, synthetic construct
  source 1..20: mol_type = other DNA
aatacatgtaaatataaata

SEQ ID NO: 177965 - DNA, 20 bp, synthetic construct
  source 1..20: mol_type = other DNA
aaatacatgtaaatataaat

SEQ ID NO: 177966 - DNA, 20 bp, synthetic construct
  source 1..20: mol_type = other DNA
taaatacatgtaaatataaa

SEQ ID NO: 177967 - DNA, 20 bp, synthetic construct
  source 1..20: mol_type = other DNA
ttaaatacatgtaaatataa

SEQ ID NO: 177968 - DNA, 20 bp, synthetic construct
  source 1..20: mol_type = other DNA
tttaaatacatgtaaatata

SEQ ID NO: 177969 - DNA, 20 bp, synthetic construct
  source 1..20: mol_type = other DNA
atttaaatacatgtaaatat

SEQ ID NO: 177970 - DNA, 20 bp, synthetic construct
  source 1..20: mol_type = other DNA
catttaaatacatgtaaata

SEQ ID NO: 177971 - DNA, 20 bp, synthetic construct
  source 1..20: mol_type = other DNA
acatttaaatacatgtaaat

SEQ ID NO: 177972 - DNA, 20 bp, synthetic construct
  source 1..20: mol_type = other DNA
cacatttaaatacatgtaaa

SEQ ID NO: 177973 - DNA, 20 bp, synthetic construct
  source 1..20: mol_type = other DNA
tcacatttaaatacatgtaa

SEQ ID NO: 177974 - DNA, 20 bp, synthetic construct
  source 1..20: mol_type = other DNA
ttcacatttaaatacatgta

SEQ ID NO: 177975 - DNA, 20 bp, synthetic construct
  source 1..20: mol_type = other DNA
attcacatttaaatacatgt

SEQ ID NO: 177976 - DNA, 20 bp, synthetic construct
  source 1..20: mol_type = other DNA
tattcacatttaaatacatg

SEQ ID NO: 177977 - DNA, 20 bp, synthetic construct
  source 1..20: mol_type = other DNA
atattcacatttaaatacat

SEQ ID NO: 177978 - DNA, 20 bp, synthetic construct
  source 1..20: mol_type = other DNA
aatattcacatttaaataca

SEQ ID NO: 177979 - DNA, 20 bp, synthetic construct
  source 1..20: mol_type = other DNA
gaatattcacatttaaatac

SEQ ID NO: 177980 - DNA, 20 bp, synthetic construct
  source 1..20: mol_type = other DNA
tgaatattcacatttaaata

SEQ ID NO: 177981 - DNA, 20 bp, synthetic construct
  source 1..20: mol_type = other DNA
gtgaatattcacatttaaat

SEQ ID NO: 177982 - DNA, 20 bp, synthetic construct
  source 1..20: mol_type = other DNA
agtgaatattcacatttaaa

SEQ ID NO: 177983 - DNA, 20 bp, synthetic construct
  source 1..20: mol_type = other DNA
tagtgaatattcacatttaa

SEQ ID NO: 177984 - DNA, 20 bp, synthetic construct
  source 1..20: mol_type = other DNA
gtagtgaatattcacattta

SEQ ID NO: 177985 - DNA, 20 bp, synthetic construct
  source 1..20: mol_type = other DNA
ggtagtgaatattcacattt

SEQ ID NO: 177986 - DNA, 20 bp, synthetic construct
  source 1..20: mol_type = other DNA
aggtagtgaatattcacatt

SEQ ID NO: 177987 - DNA, 20 bp, synthetic construct
  source 1..20: mol_type = other DNA
taggtagtgaatattcacat

SEQ ID NO: 177988 - DNA, 20 bp, synthetic construct
  source 1..20: mol_type = other DNA
ataggtagtgaatattcaca

SEQ ID NO: 177989 - DNA, 20 bp, synthetic construct
  source 1..20: mol_type = other DNA
aataggtagtgaatattcac

SEQ ID NO: 177990 - DNA, 20 bp, synthetic construct
  source 1..20: mol_type = other DNA
aaataggtagtgaatattca

SEQ ID NO: 177991 - DNA, 20 bp, synthetic construct
  source 1..20: mol_type = other DNA
caaataggtagtgaatattc

SEQ ID NO: 177992 - DNA, 20 bp, synthetic construct
  source 1..20: mol_type = other DNA
acaaataggtagtgaatatt

SEQ ID NO: 177993 - DNA, 20 bp, synthetic construct
  source 1..20: mol_type = other DNA
aacaaataggtagtgaatat

SEQ ID NO: 177994 - DNA, 20 bp, synthetic construct
  source 1..20: mol_type = other DNA
caacaaataggtagtgaata

SEQ ID NO: 177995 - DNA, 20 bp, synthetic construct
  source 1..20: mol_type = other DNA
gcaacaaataggtagtgaat

SEQ ID NO: 177996 - DNA, 20 bp, synthetic construct
  source 1..20: mol_type = other DNA
tgcaacaaataggtagtgaa

SEQ ID NO: 177997 - DNA, 20 bp, synthetic construct
  source 1..20: mol_type = other DNA
atgcaacaaataggtagtga

SEQ ID NO: 177998 - DNA, 20 bp, synthetic construct
  source 1..20: mol_type = other DNA
catgcaacaaataggtagtg

SEQ ID NO: 177999 - DNA, 20 bp, synthetic construct
  source 1..20: mol_type = other DNA
gcatgcaacaaataggtagt

SEQ ID NO: 178000 - DNA, 20 bp, synthetic construct
  source 1..20: mol_type = other DNA
ggcatgcaacaaataggtag

SEQ ID NO: 178001 - DNA, 20 bp, synthetic construct
  source 1..20: mol_type = other DNA
aggcatgcaacaaataggta

SEQ ID NO: 178002 - DNA, 20 bp, synthetic construct
  source 1..20: mol_type = other DNA
caggcatgcaacaaataggt

SEQ ID NO: 178003 - DNA, 20 bp, synthetic construct
  source 1..20: mol_type = other DNA
gcaggcatgcaacaaatagg

SEQ ID NO: 178004 - DNA, 20 bp, synthetic construct
  source 1..20: mol_type = other DNA
tgcaggcatgcaacaaatag

SEQ ID NO: 178005 - DNA, 20 bp, synthetic construct
  source 1..20: mol_type = other DNA
atgcaggcatgcaacaaata

SEQ ID NO: 178006 - DNA, 20 bp, synthetic construct
  source 1..20: mol_type = other DNA
aatgcaggcatgcaacaaat

SEQ ID NO: 178007 - DNA, 20 bp, synthetic construct
  source 1..20: mol_type = other DNA
aaatgcaggcatgcaacaaa

SEQ ID NO: 178008 - DNA, 20 bp, synthetic construct
  source 1..20: mol_type = other DNA
aaaatgcaggcatgcaacaa

SEQ ID NO: 178009 - DNA, 20 bp, synthetic construct
  source 1..20: mol_type = other DNA
aaaaatgcaggcatgcaaca

SEQ ID NO: 178010 - DNA, 20 bp, synthetic construct
  source 1..20: mol_type = other DNA
aaaaaatgcaggcatgcaac

SEQ ID NO: 178011 - DNA, 20 bp, synthetic construct
  source 1..20: mol_type = other DNA
taaaaaatgcaggcatgcaa

SEQ ID NO: 178012 - DNA, 20 bp, synthetic construct
  source 1..20: mol_type = other DNA
ataaaaaatgcaggcatgca

SEQ ID NO: 178013 - DNA, 20 bp, synthetic construct
  source 1..20: mol_type = other DNA
tataaaaaatgcaggcatgc

SEQ ID NO: 178014 - DNA, 20 bp, synthetic construct
  source 1..20: mol_type = other DNA
gtataaaaaatgcaggcatg

SEQ ID NO: 178015 - DNA, 20 bp, synthetic construct
  source 1..20: mol_type = other DNA
agtataaaaaatgcaggcat

SEQ ID NO: 178016 - DNA, 20 bp, synthetic construct
  source 1..20: mol_type = other DNA
cagtataaaaaatgcaggca

SEQ ID NO: 178017 - DNA, 20 bp, synthetic construct
  source 1..20: mol_type = other DNA
ccagtataaaaaatgcaggc

SEQ ID NO: 178018 - DNA, 20 bp, synthetic construct
  source 1..20: mol_type = other DNA
cccagtataaaaaatgcagg

SEQ ID NO: 178019 - DNA, 20 bp, synthetic construct
  source 1..20: mol_type = other DNA
gcccagtataaaaaatgcag

SEQ ID NO: 178020 - DNA, 20 bp, synthetic construct
  source 1..20: mol_type = other DNA
agcccagtataaaaaatgca

SEQ ID NO: 178021 - DNA, 20 bp, synthetic construct
  source 1..20: mol_type = other DNA
aagcccagtataaaaaatgc

SEQ ID NO: 178022 - DNA, 20 bp, synthetic construct
  source 1..20: mol_type = other DNA
caagcccagtataaaaaatg

SEQ ID NO: 178023 - DNA, 20 bp, synthetic construct
  source 1..20: mol_type = other DNA
gcaagcccagtataaaaaat

SEQ ID NO: 178024 - DNA, 20 bp, synthetic construct
  source 1..20: mol_type = other DNA
ggcaagcccagtataaaaaa

SEQ ID NO: 178025 - DNA, 20 bp, synthetic construct
  source 1..20: mol_type = other DNA
tggcaagcccagtataaaaa

SEQ ID NO: 178026 - DNA, 20 bp, synthetic construct
  source 1..20: mol_type = other DNA
ttggcaagcccagtataaaa

SEQ ID NO: 178027 - DNA, 20 bp, synthetic construct
  source 1..20: mol_type = other DNA
tttggcaagcccagtataaa

SEQ ID NO: 178028 - DNA, 20 bp, synthetic construct
  source 1..20: mol_type = other DNA
ttttggcaagcccagtataa

SEQ ID NO: 178029 - DNA, 20 bp, synthetic construct
  source 1..20: mol_type = other DNA
tttttggcaagcccagtata

SEQ ID NO: 178030 - DNA, 20 bp, synthetic construct
  source 1..20: mol_type = other DNA
gtttttggcaagcccagtat

SEQ ID NO: 178031 - DNA, 20 bp, synthetic construct
  source 1..20: mol_type = other DNA
ggtttttggcaagcccagta

SEQ ID NO: 178032 - DNA, 20 bp, synthetic construct
  source 1..20: mol_type = other DNA
gggtttttggcaagcccagt

SEQ ID NO: 178033 - DNA, 20 bp, synthetic construct
  source 1..20: mol_type = other DNA
cgggtttttggcaagcccag

SEQ ID NO: 178034 - DNA, 20 bp, synthetic construct
  source 1..20: mol_type = other DNA
tcgggtttttggcaagccca

SEQ ID NO: 178035 - DNA, 20 bp, synthetic construct
  source 1..20: mol_type = other DNA
ttcgggtttttggcaagccc

SEQ ID NO: 178036 - DNA, 20 bp, synthetic construct
  source 1..20: mol_type = other DNA
gttcgggtttttggcaagcc

SEQ ID NO: 178037 - DNA, 20 bp, synthetic construct
  source 1..20: mol_type = other DNA
tgttcgggtttttggcaagc

SEQ ID NO: 178038 - DNA, 20 bp, synthetic construct
  source 1..20: mol_type = other DNA
ctgttcgggtttttggcaag

SEQ ID NO: 178039 - DNA, 20 bp, synthetic construct
  source 1..20: mol_type = other DNA
gctgttcgggtttttggcaa

SEQ ID NO: 178040 - DNA, 20 bp, synthetic construct
  source 1..20: mol_type = other DNA
agctgttcgggtttttggca

SEQ ID NO: 178041 - DNA, 20 bp, synthetic construct
  source 1..20: mol_type = other DNA
aagctgttcgggtttttggc

SEQ ID NO: 178042 - DNA, 20 bp, synthetic construct
  source 1..20: mol_type = other DNA
aaagctgttcgggtttttgg

SEQ ID NO: 178043 - DNA, 20 bp, synthetic construct
  source 1..20: mol_type = other DNA
gaaagctgttcgggtttttg

SEQ ID NO: 178044 - DNA, 20 bp, synthetic construct
  source 1..20: mol_type = other DNA
agaaagctgttcgggttttt

SEQ ID NO: 178045 - DNA, 20 bp, synthetic construct
  source 1..20: mol_type = other DNA
tagaaagctgttcgggtttt

SEQ ID NO: 178046 - DNA, 20 bp, synthetic construct
  source 1..20: mol_type = other DNA
gtagaaagctgttcgggttt

SEQ ID NO: 178047 - DNA, 20 bp, synthetic construct
  source 1..20: mol_type = other DNA
agtagaaagctgttcgggtt

SEQ ID NO: 178048 - DNA, 20 bp, synthetic construct
  source 1..20: mol_type = other DNA
aagtagaaagctgttcgggt

SEQ ID NO: 178049 - DNA, 20 bp, synthetic construct
  source 1..20: mol_type = other DNA
aaagtagaaagctgttcggg

SEQ ID NO: 178050 - DNA, 20 bp, synthetic construct
  source 1..20: mol_type = other DNA
caaagtagaaagctgttcgg

SEQ ID NO: 178051 - DNA, 20 bp, synthetic construct
  source 1..20: mol_type = other DNA
tcaaagtagaaagctgttcg

SEQ ID NO: 178052 - DNA, 20 bp, synthetic construct
  source 1..20: mol_type = other DNA
gtcaaagtagaaagctgttc

SEQ ID NO: 178053 - DNA, 20 bp, synthetic construct
  source 1..20: mol_type = other DNA
tgtcaaagtagaaagctgtt

SEQ ID NO: 178054 - DNA, 20 bp, synthetic construct
  source 1..20: mol_type = other DNA
ttgtcaaagtagaaagctgt

SEQ ID NO: 178055 - DNA, 20 bp, synthetic construct
  source 1..20: mol_type = other DNA
attgtcaaagtagaaagctg

SEQ ID NO: 178056 - DNA, 20 bp, synthetic construct
  source 1..20: mol_type = other DNA
cattgtcaaagtagaaagct

SEQ ID NO: 178057 - DNA, 20 bp, synthetic construct
  source 1..20: mol_type = other DNA
acattgtcaaagtagaaagc

SEQ ID NO: 178058 - DNA, 20 bp, synthetic construct
  source 1..20: mol_type = other DNA
tacattgtcaaagtagaaag

SEQ ID NO: 178059 - DNA, 20 bp, synthetic construct
  source 1..20: mol_type = other DNA
atacattgtcaaagtagaaa

SEQ ID NO: 178060 - DNA, 20 bp, synthetic construct
  source 1..20: mol_type = other DNA
gatacattgtcaaagtagaa

SEQ ID NO: 178061 - DNA, 20 bp, synthetic construct
  source 1..20: mol_type = other DNA
tgatacattgtcaaagtaga

SEQ ID NO: 178062 - DNA, 20 bp, synthetic construct
  source 1..20: mol_type = other DNA
ctgatacattgtcaaagtag

SEQ ID NO: 178063 - DNA, 20 bp, synthetic construct
  source 1..20: mol_type = other DNA
tctgatacattgtcaaagta

SEQ ID NO: 178064 - DNA, 20 bp, synthetic construct
  source 1..20: mol_type = other DNA
ttctgatacattgtcaaagt

SEQ ID NO: 178065 - DNA, 20 bp, synthetic construct
  source 1..20: mol_type = other DNA
attctgatacattgtcaaag

SEQ ID NO: 178066 - DNA, 20 bp, synthetic construct
  source 1..20: mol_type = other DNA
aattctgatacattgtcaaa

SEQ ID NO: 178067 - DNA, 20 bp, synthetic construct
  source 1..20: mol_type = other DNA
aaattctgatacattgtcaa

SEQ ID NO: 178068 - DNA, 20 bp, synthetic construct
  source 1..20: mol_type = other DNA
taaattctgatacattgtca

SEQ ID NO: 178069 - DNA, 20 bp, synthetic construct
  source 1..20: mol_type = other DNA
ttaaattctgatacattgtc

SEQ ID NO: 178070 - DNA, 20 bp, synthetic construct
  source 1..20: mol_type = other DNA
tttaaattctgatacattgt

SEQ ID NO: 178071 - DNA, 20 bp, synthetic construct
  source 1..20: mol_type = other DNA
atttaaattctgatacattg

SEQ ID NO: 178072 - DNA, 20 bp, synthetic construct
  source 1..20: mol_type = other DNA
gatttaaattctgatacatt

SEQ ID NO: 178073 - DNA, 20 bp, synthetic construct
  source 1..20: mol_type = other DNA
tgatttaaattctgatacat

SEQ ID NO: 178074 - DNA, 20 bp, synthetic construct
  source 1..20: mol_type = other DNA
ctgatttaaattctgataca

SEQ ID NO: 178075 - DNA, 20 bp, synthetic construct
  source 1..20: mol_type = other DNA
gctgatttaaattctgatac

SEQ ID NO: 178076 - DNA, 20 bp, synthetic construct
  source 1..20: mol_type = other DNA
tgctgatttaaattctgata

SEQ ID NO: 178077 - DNA, 20 bp, synthetic construct
  source 1..20: mol_type = other DNA
ttgctgatttaaattctgat

SEQ ID NO: 178078 - DNA, 20 bp, synthetic construct
  source 1..20: mol_type = other DNA
attgctgatttaaattctga

SEQ ID NO: 178079 - DNA, 20 bp, synthetic construct
  source 1..20: mol_type = other DNA
tattgctgatttaaattctg

SEQ ID NO: 178080 - DNA, 20 bp, synthetic construct
  source 1..20: mol_type = other DNA
atattgctgatttaaattct

SEQ ID NO: 178081 - DNA, 20 bp, synthetic construct
  source 1..20: mol_type = other DNA
catattgctgatttaaattc

SEQ ID NO: 178082 - DNA, 20 bp, synthetic construct
  source 1..20: mol_type = other DNA
acatattgctgatttaaatt

SEQ ID NO: 178083 - DNA, 20 bp, synthetic construct
  source 1..20: mol_type = other DNA
aacatattgctgatttaaat

SEQ ID NO: 178084 - DNA, 20 bp, synthetic construct
  source 1..20: mol_type = other DNA
taacatattgctgatttaaa

SEQ ID NO: 178085 - DNA, 20 bp, synthetic construct
  source 1..20: mol_type = other DNA
ttaacatattgctgatttaa

SEQ ID NO: 178086 - DNA, 20 bp, synthetic construct
  source 1..20: mol_type = other DNA
attaacatattgctgattta

SEQ ID NO: 178087 - DNA, 20 bp, synthetic construct
  source 1..20: mol_type = other DNA
tattaacatattgctgattt

SEQ ID NO: 178088 - DNA, 20 bp, synthetic construct
  source 1..20: mol_type = other DNA
ttattaacatattgctgatt

SEQ ID NO: 178089 - DNA, 20 bp, synthetic construct
  source 1..20: mol_type = other DNA
cttattaacatattgctgat

SEQ ID NO: 178090 - DNA, 20 bp, synthetic construct
  source 1..20: mol_type = other DNA
gcttattaacatattgctga

SEQ ID NO: 178091 - DNA, 20 bp, synthetic construct
  source 1..20: mol_type = other DNA
ggcttattaacatattgctg

SEQ ID NO: 178092 - DNA, 20 bp, synthetic construct
  source 1..20: mol_type = other DNA
tggcttattaacatattgct

SEQ ID NO: 178093 - DNA, 20 bp, synthetic construct
  source 1..20: mol_type = other DNA
ttggcttattaacatattgc

SEQ ID NO: 178094 - DNA, 20 bp, synthetic construct
  source 1..20: mol_type = other DNA
cttggcttattaacatattg

SEQ ID NO: 178095 - DNA, 20 bp, synthetic construct
  source 1..20: mol_type = other DNA
gcttggcttattaacatatt

SEQ ID NO: 178096 - DNA, 20 bp, synthetic construct
  source 1..20: mol_type = other DNA
tgcttggcttattaacatat

SEQ ID NO: 178097 - DNA, 20 bp, synthetic construct
  source 1..20: mol_type = other DNA
ttgcttggcttattaacata

SEQ ID NO: 178098 - DNA, 20 bp, synthetic construct
  source 1..20: mol_type = other DNA
tttgcttggcttattaacat

SEQ ID NO: 178099 - DNA, 20 bp, synthetic construct
  source 1..20: mol_type = other DNA
ctttgcttggcttattaaca

SEQ ID NO: 178100 - DNA, 20 bp, synthetic construct
  source 1..20: mol_type = other DNA
cctttgcttggcttattaac

SEQ ID NO: 178101 - DNA, 20 bp, synthetic construct
  source 1..20: mol_type = other DNA
acctttgcttggcttattaa

SEQ ID NO: 178102 - DNA, 20 bp, synthetic construct
  source 1..20: mol_type = other DNA
aacctttgcttggcttatta

SEQ ID NO: 178103 - DNA, 20 bp, synthetic construct
  source 1..20: mol_type = other DNA
taacctttgcttggcttatt

SEQ ID NO: 178104 - DNA, 20 bp, synthetic construct
  source 1..20: mol_type = other DNA
ataacctttgcttggcttat

SEQ ID NO: 178105 - DNA, 20 bp, synthetic construct
  source 1..20: mol_type = other DNA
tataacctttgcttggctta

SEQ ID NO: 178106 - DNA, 20 bp, synthetic construct
  source 1..20: mol_type = other DNA
atataacctttgcttggctt

SEQ ID NO: 178107 - DNA, 20 bp, synthetic construct
  source 1..20: mol_type = other DNA
tatataacctttgcttggct

SEQ ID NO: 178108 - DNA, 20 bp, synthetic construct
  source 1..20: mol_type = other DNA
atatataacctttgcttggc

SEQ ID NO: 178109 - DNA, 20 bp, synthetic construct
  source 1..20: mol_type = other DNA
catatataacctttgcttgg

SEQ ID NO: 178110 - DNA, 20 bp, synthetic construct
  source 1..20: mol_type = other DNA
gcatatataacctttgcttg

SEQ ID NO: 178111 - DNA, 20 bp, synthetic construct
  source 1..20: mol_type = other DNA
tgcatatataacctttgctt

SEQ ID NO: 178112 - DNA, 20 bp, synthetic construct
  source 1..20: mol_type = other DNA
ttgcatatataacctttgct

SEQ ID NO: 178113 - DNA, 20 bp, synthetic construct
  source 1..20: mol_type = other DNA
tttgcatatataacctttgc

SEQ ID NO: 178114 - DNA, 20 bp, synthetic construct
  source 1..20: mol_type = other DNA
atttgcatatataacctttg

SEQ ID NO: 178115 - DNA, 20 bp, synthetic construct
  source 1..20: mol_type = other DNA
tatttgcatatataaccttt

SEQ ID NO: 178116 - DNA, 20 bp, synthetic construct
  source 1..20: mol_type = other DNA
ttatttgcatatataacctt

SEQ ID NO: 178117 - DNA, 20 bp, synthetic construct
  source 1..20: mol_type = other DNA
tttatttgcatatataacct

SEQ ID NO: 178118 - DNA, 20 bp, synthetic construct
  source 1..20: mol_type = other DNA
ttttatttgcatatataacc

SEQ ID NO: 178119 - DNA, 20 bp, synthetic construct
  source 1..20: mol_type = other DNA
gttttatttgcatatataac

SEQ ID NO: 178120 - DNA, 20 bp, synthetic construct
  source 1..20: mol_type = other DNA
agttttatttgcatatataa

SEQ ID NO: 178121 - DNA, 20 bp, synthetic construct
  source 1..20: mol_type = other DNA
cagttttatttgcatatata

SEQ ID NO: 178122 - DNA, 20 bp, synthetic construct
  source 1..20: mol_type = other DNA
acagttttatttgcatatat

SEQ ID NO: 178123 - DNA, 20 bp, synthetic construct
  source 1..20: mol_type = other DNA
aacagttttatttgcatata

SEQ ID NO: 178124 - DNA, 20 bp, synthetic construct
  source 1..20: mol_type = other DNA
caacagttttatttgcatat

SEQ ID NO: 178125 - DNA, 20 bp, synthetic construct
  source 1..20: mol_type = other DNA
acaacagttttatttgcata

SEQ ID NO: 178126 - DNA, 20 bp, synthetic construct
  source 1..20: mol_type = other DNA
gacaacagttttatttgcat

SEQ ID NO: 178127 - DNA, 20 bp, synthetic construct
  source 1..20: mol_type = other DNA
agacaacagttttatttgca

SEQ ID NO: 178128 - DNA, 20 bp, synthetic construct
  source 1..20: mol_type = other DNA
tagacaacagttttatttgc

SEQ ID NO: 178129 - DNA, 20 bp, synthetic construct
  source 1..20: mol_type = other DNA
atagacaacagttttatttg

SEQ ID NO: 178130 - DNA, 20 bp, synthetic construct
  source 1..20: mol_type = other DNA
tatagacaacagttttattt

SEQ ID NO: 178131 - DNA, 20 bp, synthetic construct
  source 1..20: mol_type = other DNA
ttatagacaacagttttatt

SEQ ID NO: 178132 - DNA, 20 bp, synthetic construct
  source 1..20: mol_type = other DNA
gttatagacaacagttttat

SEQ ID NO: 178133 - DNA, 20 bp, synthetic construct
  source 1..20: mol_type = other DNA
ggttatagacaacagtttta

SEQ ID NO: 178134 - DNA, 20 bp, synthetic construct
  source 1..20: mol_type = other DNA
aggttatagacaacagtttt

SEQ ID NO: 178135 - DNA, 20 bp, synthetic construct
  source 1..20: mol_type = other DNA
gaggttatagacaacagttt

SEQ ID NO: 178136 - DNA, 20 bp, synthetic construct
  source 1..20: mol_type = other DNA
ggaggttatagacaacagtt

SEQ ID NO: 178137 - DNA, 20 bp, synthetic construct
  source 1..20: mol_type = other DNA
aggaggttatagacaacagt

SEQ ID NO: 178138 - DNA, 20 bp, synthetic construct
  source 1..20: mol_type = other DNA
caggaggttatagacaacag

SEQ ID NO: 178139 - DNA, 20 bp, synthetic construct
  source 1..20: mol_type = other DNA
acaggaggttatagacaaca

SEQ ID NO: 178140 - DNA, 20 bp, synthetic construct
  source 1..20: mol_type = other DNA
aacaggaggttatagacaac

SEQ ID NO: 178141 - DNA, 20 bp, synthetic construct
  source 1..20: mol_type = other DNA
taacaggaggttatagacaa

SEQ ID NO: 178142 - DNA, 20 bp, synthetic construct
  source 1..20: mol_type = other DNA
gtaacaggaggttatagaca

SEQ ID NO: 178143 - DNA, 20 bp, synthetic construct
  source 1..20: mol_type = other DNA
tgtaacaggaggttatagac

SEQ ID NO: 178144 - DNA, 20 bp, synthetic construct
  source 1..20: mol_type = other DNA
gtgtaacaggaggttataga

SEQ ID NO: 178145 - DNA, 20 bp, synthetic construct
  source 1..20: mol_type = other DNA
agtgtaacaggaggttatag

SEQ ID NO: 178146 - DNA, 20 bp, synthetic construct
  source 1..20: mol_type = other DNA
cagtgtaacaggaggttata

SEQ ID NO: 178147 - DNA, 20 bp, synthetic construct
  source 1..20: mol_type = other DNA
ccagtgtaacaggaggttat

SEQ ID NO: 178148 - DNA, 20 bp, synthetic construct
  source 1..20: mol_type = other DNA
cccagtgtaacaggaggtta

SEQ ID NO: 178149 - DNA, 20 bp, synthetic construct
  source 1..20: mol_type = other DNA
ccccagtgtaacaggaggtt

SEQ ID NO: 178150 - DNA, 20 bp, synthetic construct
  source 1..20: mol_type = other DNA
gccccagtgtaacaggaggt

SEQ ID NO: 178151 - DNA, 20 bp, synthetic construct
  source 1..20: mol_type = other DNA
tgccccagtgtaacaggagg

SEQ ID NO: 178152 - DNA, 20 bp, synthetic construct
  source 1..20: mol_type = other DNA
gtgccccagtgtaacaggag

SEQ ID NO: 178153 - DNA, 20 bp, synthetic construct
  source 1..20: mol_type = other DNA
tgtgccccagtgtaacagga

SEQ ID NO: 178154 - DNA, 20 bp, synthetic construct
  source 1..20: mol_type = other DNA
ctgtgccccagtgtaacagg

SEQ ID NO: 178155 - DNA, 20 bp, synthetic construct
  source 1..20: mol_type = other DNA
gctgtgccccagtgtaacag

SEQ ID NO: 178156 - DNA, 20 bp, synthetic construct
  source 1..20: mol_type = other DNA
tgctgtgccccagtgtaaca

SEQ ID NO: 178157 - DNA, 20 bp, synthetic construct
  source 1..20: mol_type = other DNA
ttgctgtgccccagtgtaac

SEQ ID NO: 178158 - DNA, 20 bp, synthetic construct
  source 1..20: mol_type = other DNA
tttgctgtgccccagtgtaa

SEQ ID NO: 178159 - DNA, 20 bp, synthetic construct
  source 1..20: mol_type = other DNA
ttttgctgtgccccagtgta

SEQ ID NO: 178160 - DNA, 20 bp, synthetic construct
  source 1..20: mol_type = other DNA
cttttgctgtgccccagtgt

SEQ ID NO: 178161 - DNA, 20 bp, synthetic construct
  source 1..20: mol_type = other DNA
acttttgctgtgccccagtg

SEQ ID NO: 178162 - DNA, 20 bp, synthetic construct
  source 1..20: mol_type = other DNA
gacttttgctgtgccccagt

SEQ ID NO: 178163 - DNA, 20 bp, synthetic construct
  source 1..20: mol_type = other DNA
tgacttttgctgtgccccag

SEQ ID NO: 178164 - DNA, 20 bp, synthetic construct
  source 1..20: mol_type = other DNA
atgacttttgctgtgcccca

SEQ ID NO: 178165 - DNA, 20 bp, synthetic construct
  source 1..20: mol_type = other DNA
catgacttttgctgtgcccc

SEQ ID NO: 178166 - DNA, 20 bp, synthetic construct
  source 1..20: mol_type = other DNA
ccatgacttttgctgtgccc

SEQ ID NO: 178167 - DNA, 20 bp, synthetic construct
  source 1..20: mol_type = other DNA
accatgacttttgctgtgcc

SEQ ID NO: 178168 - DNA, 20 bp, synthetic construct
  source 1..20: mol_type = other DNA
caccatgacttttgctgtgc

SEQ ID NO: 178169 - DNA, 20 bp, synthetic construct
  source 1..20: mol_type = other DNA
acaccatgacttttgctgtg

SEQ ID NO: 178170 - DNA, 20 bp, synthetic construct
  source 1..20: mol_type = other DNA
tacaccatgacttttgctgt

SEQ ID NO: 178171 - DNA, 20 bp, synthetic construct
  source 1..20: mol_type = other DNA
ctacaccatgacttttgctg

SEQ ID NO: 178172 - DNA, 20 bp, synthetic construct
  source 1..20: mol_type = other DNA
actacaccatgacttttgct

SEQ ID NO: 178173 - DNA, 20 bp, synthetic construct
  source 1..20: mol_type = other DNA
gactacaccatgacttttgc

SEQ ID NO: 178174 - DNA, 20 bp, synthetic construct
  source 1..20: mol_type = other DNA
cgactacaccatgacttttg

SEQ ID NO: 178175 - DNA, 20 bp, synthetic construct
  source 1..20: mol_type = other DNA
gcgactacaccatgactttt

SEQ ID NO: 178176 - DNA, 20 bp, synthetic construct
  source 1..20: mol_type = other DNA
tgcgactacaccatgacttt

SEQ ID NO: 178177 - DNA, 20 bp, synthetic construct
  source 1..20: mol_type = other DNA
atgcgactacaccatgactt

SEQ ID NO: 178178 - DNA, 20 bp, synthetic construct
  source 1..20: mol_type = other DNA
catgcgactacaccatgact

SEQ ID NO: 178179 - DNA, 20 bp, synthetic construct
  source 1..20: mol_type = other DNA
acatgcgactacaccatgac

SEQ ID NO: 178180 - DNA, 20 bp, synthetic construct
  source 1..20: mol_type = other DNA
cacatgcgactacaccatga

SEQ ID NO: 178181 - DNA, 20 bp, synthetic construct
  source 1..20: mol_type = other DNA
tcacatgcgactacaccatg

SEQ ID NO: 178182 - DNA, 20 bp, synthetic construct
  source 1..20: mol_type = other DNA
ttcacatgcgactacaccat

SEQ ID NO: 178183 - DNA, 20 bp, synthetic construct
  source 1..20: mol_type = other DNA
gttcacatgcgactacacca

SEQ ID NO: 178184 - DNA, 20 bp, synthetic construct
  source 1..20: mol_type = other DNA
ggttcacatgcgactacacc

SEQ ID NO: 178185 - DNA, 20 bp, synthetic construct
  source 1..20: mol_type = other DNA
aggttcacatgcgactacac

SEQ ID NO: 178186 - DNA, 20 bp, synthetic construct
  source 1..20: mol_type = other DNA
caggttcacatgcgactaca

SEQ ID NO: 178187 - DNA, 20 bp, synthetic construct
  source 1..20: mol_type = other DNA
acaggttcacatgcgactac

SEQ ID NO: 178188 - DNA, 20 bp, synthetic construct
  source 1..20: mol_type = other DNA
gacaggttcacatgcgacta

SEQ ID NO: 178189 - DNA, 20 bp, synthetic construct
  source 1..20: mol_type = other DNA
ggacaggttcacatgcgact

SEQ ID NO: 178190 - DNA, 20 bp, synthetic construct
  source 1..20: mol_type = other DNA
gggacaggttcacatgcgac

SEQ ID NO: 178191 - DNA, 20 bp, synthetic construct
  source 1..20: mol_type = other DNA
agggacaggttcacatgcga

SEQ ID NO: 178192 - DNA, 20 bp, synthetic construct
  source 1..20: mol_type = other DNA
aagggacaggttcacatgcg

SEQ ID NO: 178193 - DNA, 20 bp, synthetic construct
  source 1..20: mol_type = other DNA
aaagggacaggttcacatgc

SEQ ID NO: 178194 - DNA, 20 bp, synthetic construct
  source 1..20: mol_type = other DNA
gaaagggacaggttcacatg

SEQ ID NO: 178195 - DNA, 20 bp, synthetic construct
  source 1..20: mol_type = other DNA
tgaaagggacaggttcacat

SEQ ID NO: 178196 - DNA, 20 bp, synthetic construct
  source 1..20: mol_type = other DNA
atgaaagggacaggttcaca

SEQ ID NO: 178197 - DNA, 20 bp, synthetic construct
  source 1..20: mol_type = other DNA
tatgaaagggacaggttcac

SEQ ID NO: 178198 - DNA, 20 bp, synthetic construct
  source 1..20: mol_type = other DNA
ctatgaaagggacaggttca

SEQ ID NO: 178199 - DNA, 20 bp, synthetic construct
  source 1..20: mol_type = other DNA
gctatgaaagggacaggttc

SEQ ID NO: 178200 - DNA, 20 bp, synthetic construct
  source 1..20: mol_type = other DNA
agctatgaaagggacaggtt

SEQ ID NO: 178201 - DNA, 20 bp, synthetic construct
  source 1..20: mol_type = other DNA
cagctatgaaagggacaggt

SEQ ID NO: 178202 - DNA, 20 bp, synthetic construct
  source 1..20: mol_type = other DNA
gcagctatgaaagggacagg

SEQ ID NO: 178203 - DNA, 20 bp, synthetic construct
  source 1..20: mol_type = other DNA
agcagctatgaaagggacag

SEQ ID NO: 178204 - DNA, 20 bp, synthetic construct
  source 1..20: mol_type = other DNA
gagcagctatgaaagggaca

SEQ ID NO: 178205 - DNA, 20 bp, synthetic construct
  source 1..20: mol_type = other DNA
tgagcagctatgaaagggac

SEQ ID NO: 178206 - DNA, 20 bp, synthetic construct
  source 1..20: mol_type = other DNA
atgagcagctatgaaaggga

SEQ ID NO: 178207 - DNA, 20 bp, synthetic construct
  source 1..20: mol_type = other DNA
aatgagcagctatgaaaggg

SEQ ID NO: 178208 - DNA, 20 bp, synthetic construct
  source 1..20: mol_type = other DNA
caatgagcagctatgaaagg

SEQ ID NO: 178209 - DNA, 20 bp, synthetic construct
  source 1..20: mol_type = other DNA
gcaatgagcagctatgaaag

SEQ ID NO: 178210 - DNA, 20 bp, synthetic construct
  source 1..20: mol_type = other DNA
ggcaatgagcagctatgaaa

SEQ ID NO: 178211 - DNA, 20 bp, synthetic construct
  source 1..20: mol_type = other DNA
tggcaatgagcagctatgaa

SEQ ID NO: 178212 - DNA, 20 bp, synthetic construct
  source 1..20: mol_type = other DNA
ctggcaatgagcagctatga

SEQ ID NO: 178213 - DNA, 20 bp, synthetic construct
  source 1..20: mol_type = other DNA
cctggcaatgagcagctatg

SEQ ID NO: 178214 - DNA, 20 bp, synthetic construct
  source 1..20: mol_type = other DNA
tcctggcaatgagcagctat

SEQ ID NO: 178215 - DNA, 20 bp, synthetic construct
  source 1..20: mol_type = other DNA
ttcctggcaatgagcagcta

SEQ ID NO: 178216 - DNA, 20 bp, synthetic construct
  source 1..20: mol_type = other DNA
tttcctggcaatgagcagct

SEQ ID NO: 178217 - DNA, 20 bp, synthetic construct
  source 1..20: mol_type = other DNA
gtttcctggcaatgagcagc

SEQ ID NO: 178218 - DNA, 20 bp, synthetic construct
  source 1..20: mol_type = other DNA
tgtttcctggcaatgagcag

SEQ ID NO: 178219 - DNA, 20 bp, synthetic construct
  source 1..20: mol_type = other DNA
atgtttcctggcaatgagca

SEQ ID NO: 178220 - DNA, 20 bp, synthetic construct
  source 1..20: mol_type = other DNA
gatgtttcctggcaatgagc

SEQ ID NO: 178221 - DNA, 20 bp, synthetic construct
  source 1..20: mol_type = other DNA
tgatgtttcctggcaatgag

SEQ ID NO: 178222 - DNA, 20 bp, synthetic construct
  source 1..20: mol_type = other DNA
ctgatgtttcctggcaatga

SEQ ID NO: 178223 - DNA, 20 bp, synthetic construct
  source 1..20: mol_type = other DNA
cctgatgtttcctggcaatg

SEQ ID NO: 178224 - DNA, 20 bp, synthetic construct
  source 1..20: mol_type = other DNA
tcctgatgtttcctggcaat

SEQ ID NO: 178225 - DNA, 20 bp, synthetic construct
  source 1..20: mol_type = other DNA
ttcctgatgtttcctggcaa

SEQ ID NO: 178226 - DNA, 20 bp, synthetic construct
  source 1..20: mol_type = other DNA
attcctgatgtttcctggca

SEQ ID NO: 178227 - DNA, 20 bp, synthetic construct
  source 1..20: mol_type = other DNA
tattcctgatgtttcctggc

SEQ ID NO: 178228 - DNA, 20 bp, synthetic construct
  source 1..20: mol_type = other DNA
ctattcctgatgtttcctgg

SEQ ID NO: 178229 - DNA, 20 bp, synthetic construct
  source 1..20: mol_type = other DNA
gctattcctgatgtttcctg

SEQ ID NO: 178230 - DNA, 20 bp, synthetic construct
  source 1..20: mol_type = other DNA
ggctattcctgatgtttcct

SEQ ID NO: 178231 - DNA, 20 bp, synthetic construct
  source 1..20: mol_type = other DNA
tggctattcctgatgtttcc

SEQ ID NO: 178232 - DNA, 20 bp, synthetic construct
  source 1..20: mol_type = other DNA
atggctattcctgatgtttc

SEQ ID NO: 178233 - DNA, 20 bp, synthetic construct
  source 1..20: mol_type = other DNA
aatggctattcctgatgttt

SEQ ID NO: 178234 - DNA, 20 bp, synthetic construct
  source 1..20: mol_type = other DNA
aaatggctattcctgatgtt

SEQ ID NO: 178235 - DNA, 20 bp, synthetic construct
  source 1..20: mol_type = other DNA
caaatggctattcctgatgt

SEQ ID NO: 178236 - DNA, 20 bp, synthetic construct
  source 1..20: mol_type = other DNA
ccaaatggctattcctgatg

SEQ ID NO: 178237 - DNA, 20 bp, synthetic construct
  source 1..20: mol_type = other DNA
tccaaatggctattcctgat

SEQ ID NO: 178238 - DNA, 20 bp, synthetic construct
  source 1..20: mol_type = other DNA
ttccaaatggctattcctga

SEQ ID NO: 178239 - DNA, 20 bp, synthetic construct
  source 1..20: mol_type = other DNA
cttccaaatggctattcctg

SEQ ID NO: 178240 - DNA, 20 bp, synthetic construct
  source 1..20: mol_type = other DNA
tcttccaaatggctattcct

SEQ ID NO: 178241 - DNA, 20 bp, synthetic construct
  source 1..20: mol_type = other DNA
ctcttccaaatggctattcc

SEQ ID NO: 178242 - DNA, 20 bp, synthetic construct
  source 1..20: mol_type = other DNA
actcttccaaatggctattc

SEQ ID NO: 178243 - DNA, 20 bp, synthetic construct
  source 1..20: mol_type = other DNA
gactcttccaaatggctatt

SEQ ID NO: 178244 - DNA, 20 bp, synthetic construct
  source 1..20: mol_type = other DNA
tgactcttccaaatggctat

SEQ ID NO: 178245 - DNA, 20 bp, synthetic construct
  source 1..20: mol_type = other DNA
atgactcttccaaatggcta

SEQ ID NO: 178246 - DNA, 20 bp, synthetic construct
  source 1..20: mol_type = other DNA
gatgactcttccaaatggct

SEQ ID NO: 178247 - DNA, 20 bp, synthetic construct
  source 1..20: mol_type = other DNA
tgatgactcttccaaatggc

SEQ ID NO: 178248 - DNA, 20 bp, synthetic construct
  source 1..20: mol_type = other DNA
ctgatgactcttccaaatgg

SEQ ID NO: 178249 - DNA, 20 bp, synthetic construct
  source 1..20: mol_type = other DNA
gctgatgactcttccaaatg

SEQ ID NO: 178250 - DNA, 20 bp, synthetic construct
  source 1..20: mol_type = other DNA
ggctgatgactcttccaaat

SEQ ID NO: 178251 - DNA, 20 bp, synthetic construct
  source 1..20: mol_type = other DNA
gggctgatgactcttccaaa

SEQ ID NO: 178252 - DNA, 20 bp, synthetic construct
  source 1..20: mol_type = other DNA
agggctgatgactcttccaa

SEQ ID NO: 178253 - DNA, 20 bp, synthetic construct
  source 1..20: mol_type = other DNA
gagggctgatgactcttcca

SEQ ID NO: 178254 - DNA, 20 bp, synthetic construct
  source 1..20: mol_type = other DNA
ggagggctgatgactcttcc

SEQ ID NO: 178255 - DNA, 20 bp, synthetic construct
  source 1..20: mol_type = other DNA
gggagggctgatgactcttc

SEQ ID NO: 178256 - DNA, 20 bp, synthetic construct
  source 1..20: mol_type = other DNA
tgggagggctgatgactctt

SEQ ID NO: 178257 - DNA, 20 bp, synthetic construct
  source 1..20: mol_type = other DNA
gtgggagggctgatgactct

SEQ ID NO: 178258 - DNA, 20 bp, synthetic construct
  source 1..20: mol_type = other DNA
ggtgggagggctgatgactc

SEQ ID NO: 178259 - DNA, 20 bp, synthetic construct
  source 1..20: mol_type = other DNA
tggtgggagggctgatgact

SEQ ID NO: 178260 - DNA, 20 bp, synthetic construct
  source 1..20: mol_type = other DNA
atggtgggagggctgatgac

SEQ ID NO: 178261 - DNA, 20 bp, synthetic construct
  source 1..20: mol_type = other DNA
gatggtgggagggctgatga

SEQ ID NO: 178262 - DNA, 20 bp, synthetic construct
  source 1..20: mol_type = other DNA
ggatggtgggagggctgatg

SEQ ID NO: 178263 - DNA, 20 bp, synthetic construct
  source 1..20: mol_type = other DNA
cggatggtgggagggctgat

SEQ ID NO: 178264 - DNA, 20 bp, synthetic construct
  source 1..20: mol_type = other DNA
acggatggtgggagggctga

SEQ ID NO: 178265 - DNA, 20 bp, synthetic construct
  source 1..20: mol_type = other DNA
aacggatggtgggagggctg

SEQ ID NO: 178266 - DNA, 20 bp, synthetic construct
  source 1..20: mol_type = other DNA
aaacggatggtgggagggct

SEQ ID NO: 178267 - DNA, 20 bp, synthetic construct
  source 1..20: mol_type = other DNA
aaaacggatggtgggagggc

SEQ ID NO: 178268 - DNA, 20 bp, synthetic construct
  source 1..20: mol_type = other DNA
gaaaacggatggtgggaggg

SEQ ID NO: 178269 - DNA, 20 bp, synthetic construct
  source 1..20: mol_type = other DNA
agaaaacggatggtgggagg

SEQ ID NO: 178270 - DNA, 20 bp, synthetic construct
  source 1..20: mol_type = other DNA
cagaaaacggatggtgggag

SEQ ID NO: 178271 - DNA, 20 bp, synthetic construct
  source 1..20: mol_type = other DNA
acagaaaacggatggtggga

SEQ ID NO: 178272 - DNA, 20 bp, synthetic construct
  source 1..20: mol_type = other DNA
gacagaaaacggatggtggg

SEQ ID NO: 178273 - DNA, 20 bp, synthetic construct
  source 1..20: mol_type = other DNA
agacagaaaacggatggtgg

SEQ ID NO: 178274 - DNA, 20 bp, synthetic construct
  source 1..20: mol_type = other DNA
aagacagaaaacggatggtg

SEQ ID NO: 178275 - DNA, 20 bp, synthetic construct
  source 1..20: mol_type = other DNA
caagacagaaaacggatggt

SEQ ID NO: 178276 - DNA, 20 bp, synthetic construct
  source 1..20: mol_type = other DNA
acaagacagaaaacggatgg

SEQ ID NO: 178277 - DNA, 20 bp, synthetic construct
  source 1..20: mol_type = other DNA
gacaagacagaaaacggatg

SEQ ID NO: 178278 - DNA, 20 bp, synthetic construct
  source 1..20: mol_type = other DNA
agacaagacagaaaacggat

SEQ ID NO: 178279 - DNA, 20 bp, synthetic construct
  source 1..20: mol_type = other DNA
aagacaagacagaaaacgga

SEQ ID NO: 178280 - DNA, 20 bp, synthetic construct
  source 1..20: mol_type = other DNA
aaagacaagacagaaaacgg

SEQ ID NO: 178281 - DNA, 20 bp, synthetic construct
  source 1..20: mol_type = other DNA
aaaagacaagacagaaaacg

SEQ ID NO: 178282 - DNA, 20 bp, synthetic construct
  source 1..20: mol_type = other DNA
gaaaagacaagacagaaaac

SEQ ID NO: 178283 - DNA, 20 bp, synthetic construct
  source 1..20: mol_type = other DNA
ggaaaagacaagacagaaaa

SEQ ID NO: 178284 - DNA, 20 bp, synthetic construct
  source 1..20: mol_type = other DNA
gggaaaagacaagacagaaa

SEQ ID NO: 178285 - DNA, 20 bp, synthetic construct
  source 1..20: mol_type = other DNA
agggaaaagacaagacagaa

SEQ ID NO: 178286 - DNA, 20 bp, synthetic construct
  source 1..20: mol_type = other DNA
tagggaaaagacaagacaga

SEQ ID NO: 178287 - DNA, 20 bp, synthetic construct
  source 1..20: mol_type = other DNA
atagggaaaagacaagacag

SEQ ID NO: 178288 - DNA, 20 bp, synthetic construct
  source 1..20: mol_type = other DNA
catagggaaaagacaagaca

SEQ ID NO: 178289 - DNA, 20 bp, synthetic construct
  source 1..20: mol_type = other DNA
tcatagggaaaagacaagac

SEQ ID NO: 178290 - DNA, 20 bp, synthetic construct
  source 1..20: mol_type = other DNA
ctcatagggaaaagacaaga

SEQ ID NO: 178291 - DNA, 20 bp, synthetic construct
  source 1..20: mol_type = other DNA
gctcatagggaaaagacaag

SEQ ID NO: 178292 - DNA, 20 bp, synthetic construct
  source 1..20: mol_type = other DNA
tgctcatagggaaaagacaa

SEQ ID NO: 178293 - DNA, 20 bp, synthetic construct
  source 1..20: mol_type = other DNA
ctgctcatagggaaaagaca

SEQ ID NO: 178294 - DNA, 20 bp, synthetic construct
  source 1..20: mol_type = other DNA
cctgctcatagggaaaagac

SEQ ID NO: 178295 - DNA, 20 bp, synthetic construct
  source 1..20: mol_type = other DNA
ccctgctcatagggaaaaga

SEQ ID NO: 178296 - DNA, 20 bp, synthetic construct
  source 1..20: mol_type = other DNA
cccctgctcatagggaaaag

SEQ ID NO: 178297 - DNA, 20 bp, synthetic construct
  source 1..20: mol_type = other DNA
tcccctgctcatagggaaaa

SEQ ID NO: 178298 - DNA, 20 bp, synthetic construct
  source 1..20: mol_type = other DNA
ttcccctgctcatagggaaa

SEQ ID NO: 178299 - DNA, 20 bp, synthetic construct
  source 1..20: mol_type = other DNA
tttcccctgctcatagggaa

SEQ ID NO: 178300 - DNA, 20 bp, synthetic construct
  source 1..20: mol_type = other DNA
atttcccctgctcataggga

SEQ ID NO: 178301 - DNA, 20 bp, synthetic construct
  source 1..20: mol_type = other DNA
aatttcccctgctcataggg

SEQ ID NO: 178302 - DNA, 20 bp, synthetic construct
  source 1..20: mol_type = other DNA
gaatttcccctgctcatagg

SEQ ID NO: 178303 - DNA, 20 bp, synthetic construct
  source 1..20: mol_type = other DNA
ggaatttcccctgctcatag

SEQ ID NO: 178304 - DNA, 20 bp, synthetic construct
  source 1..20: mol_type = other DNA
tggaatttcccctgctcata

SEQ ID NO: 178305 - DNA, 20 bp, synthetic construct
  source 1..20: mol_type = other DNA
gtggaatttcccctgctcat

SEQ ID NO: 178306 - DNA, 20 bp, synthetic construct
  source 1..20: mol_type = other DNA
cgtggaatttcccctgctca

SEQ ID NO: 178307 - DNA, 20 bp, synthetic construct
  source 1..20: mol_type = other DNA
gcgtggaatttcccctgctc

SEQ ID NO: 178308 - DNA, 20 bp, synthetic construct
  source 1..20: mol_type = other DNA
agcgtggaatttcccctgct

SEQ ID NO: 178309 - DNA, 20 bp, synthetic construct
  source 1..20: mol_type = other DNA
cagcgtggaatttcccctgc

SEQ ID NO: 178310 - DNA, 20 bp, synthetic construct
  source 1..20: mol_type = other DNA
ccagcgtggaatttcccctg

SEQ ID NO: 178311 - DNA, 20 bp, synthetic construct
  source 1..20: mol_type = other DNA
gccagcgtggaatttcccct

SEQ ID NO: 178312 - DNA, 20 bp, synthetic construct
  source 1..20: mol_type = other DNA
ggccagcgtggaatttcccc

SEQ ID NO: 178313 - DNA, 20 bp, synthetic construct
  source 1..20: mol_type = other DNA
gggccagcgtggaatttccc

SEQ ID NO: 178314 - DNA, 20 bp, synthetic construct
  source 1..20: mol_type = other DNA
ggggccagcgtggaatttcc

SEQ ID NO: 178315 - DNA, 20 bp, synthetic construct
  source 1..20: mol_type = other DNA
tggggccagcgtggaatttc

SEQ ID NO: 178316 - DNA, 20 bp, synthetic construct
  source 1..20: mol_type = other DNA
ttggggccagcgtggaattt

SEQ ID NO: 178317 - DNA, 20 bp, synthetic construct
  source 1..20: mol_type = other DNA
attggggccagcgtggaatt

SEQ ID NO: 178318 - DNA, 20 bp, synthetic construct
  source 1..20: mol_type = other DNA
gattggggccagcgtggaat

SEQ ID NO: 178319 - DNA, 20 bp, synthetic construct
  source 1..20: mol_type = other DNA
ggattggggccagcgtggaa

SEQ ID NO: 178320 - DNA, 20 bp, synthetic construct
  source 1..20: mol_type = other DNA
gggattggggccagcgtgga

SEQ ID NO: 178321 - DNA, 20 bp, synthetic construct
  source 1..20: mol_type = other DNA
ggggattggggccagcgtgg

SEQ ID NO: 178322 - DNA, 20 bp, synthetic construct
  source 1..20: mol_type = other DNA
tggggattggggccagcgtg

SEQ ID NO: 178323 - DNA, 20 bp, synthetic construct
  source 1..20: mol_type = other DNA
ctggggattggggccagcgt

SEQ ID NO: 178324 - DNA, 20 bp, synthetic construct
  source 1..20: mol_type = other DNA
actggggattggggccagcg

SEQ ID NO: 178325 - DNA, 20 bp, synthetic construct
  source 1..20: mol_type = other DNA
cactggggattggggccagc

SEQ ID NO: 178326 - DNA, 20 bp, synthetic construct
  source 1..20: mol_type = other DNA
gcactggggattggggccag

SEQ ID NO: 178327 - DNA, 20 bp, synthetic construct
  source 1..20: mol_type = other DNA
tgcactggggattggggcca

SEQ ID NO: 178328 - DNA, 20 bp, synthetic construct
  source 1..20: mol_type = other DNA
ctgcactggggattggggcc

SEQ ID NO: 178329 - DNA, 20 bp, synthetic construct
  source 1..20: mol_type = other DNA
gctgcactggggattggggc

SEQ ID NO: 178330 - DNA, 20 bp, synthetic construct
  source 1..20: mol_type = other DNA
cgctgcactggggattgggg

SEQ ID NO: 178331 - DNA, 20 bp, synthetic construct
  source 1..20: mol_type = other DNA
ccgctgcactggggattggg

SEQ ID NO: 178332 - DNA, 20 bp, synthetic construct
  source 1..20: mol_type = other DNA
gccgctgcactggggattgg

SEQ ID NO: 178333 - DNA, 20 bp, synthetic construct
  source 1..20: mol_type = other DNA
agccgctgcactggggattg

SEQ ID NO: 178334 - DNA, 20 bp, synthetic construct
  source 1..20: mol_type = other DNA
gagccgctgcactggggatt

SEQ ID NO: 178335 - DNA, 20 bp, synthetic construct
  source 1..20: mol_type = other DNA
tgagccgctgcactggggat

SEQ ID NO: 178336 - DNA, 20 bp, synthetic construct
  source 1..20: mol_type = other DNA
ctgagccgctgcactgggga

SEQ ID NO: 178337 - DNA, 20 bp, synthetic construct
  source 1..20: mol_type = other DNA
gctgagccgctgcactgggg

SEQ ID NO: 178338 - DNA, 20 bp, synthetic construct
  source 1..20: mol_type = other DNA
ggctgagccgctgcactggg

SEQ ID NO: 178339 - DNA, 20 bp, synthetic construct
  source 1..20: mol_type = other DNA
aggctgagccgctgcactgg

SEQ ID NO: 178340 - DNA, 20 bp, synthetic construct
  source 1..20: mol_type = other DNA
gaggctgagccgctgcactg

SEQ ID NO: 178341 - DNA, 20 bp, synthetic construct
  source 1..20: mol_type = other DNA
agaggctgagccgctgcact

SEQ ID NO: 178342 - DNA, 20 bp, synthetic construct
  source 1..20: mol_type = other DNA
cagaggctgagccgctgcac

SEQ ID NO: 178343 - DNA, 20 bp, synthetic construct
  source 1..20: mol_type = other DNA
gcagaggctgagccgctgca

SEQ ID NO: 178344 - DNA, 20 bp, synthetic construct
  source 1..20: mol_type = other DNA
ggcagaggctgagccgctgc

SEQ ID NO: 178345 - DNA, 20 bp, synthetic construct
  source 1..20: mol_type = other DNA
aggcagaggctgagccgctg

SEQ ID NO: 178346 - DNA, 20 bp, synthetic construct
  source 1..20: mol_type = other DNA
gaggcagaggctgagccgct

SEQ ID NO: 178347 - DNA, 20 bp, synthetic construct
  source 1..20: mol_type = other DNA
agaggcagaggctgagccgc

SEQ ID NO: 178348 - DNA, 20 bp, synthetic construct
  source 1..20: mol_type = other DNA
cagaggcagaggctgagccg

SEQ ID NO: 178349 - DNA, 20 bp, synthetic construct
  source 1..20: mol_type = other DNA
gcagaggcagaggctgagcc

SEQ ID NO: 178350 - DNA, 20 bp, synthetic construct
  source 1..20: mol_type = other DNA
agcagaggcagaggctgagc

SEQ ID NO: 178351 - DNA, 20 bp, synthetic construct
  source 1..20: mol_type = other DNA
cagcagaggcagaggctgag

SEQ ID NO: 178352 - DNA, 20 bp, synthetic construct
  source 1..20: mol_type = other DNA
gcagcagaggcagaggctga

SEQ ID NO: 178353 - DNA, 20 bp, synthetic construct
  source 1..20: mol_type = other DNA
agcagcagaggcagaggctg

SEQ ID NO: 178354 - DNA, 20 bp, synthetic construct
  source 1..20: mol_type = other DNA
cagcagcagaggcagaggct

SEQ ID NO: 178355 - DNA, 20 bp, synthetic construct
  source 1..20: mol_type = other DNA
ccagcagcagaggcagaggc

SEQ ID NO: 178356 - DNA, 20 bp, synthetic construct
  source 1..20: mol_type = other DNA
accagcagcagaggcagagg

SEQ ID NO: 178357 - DNA, 20 bp, synthetic construct
  source 1..20: mol_type = other DNA
gaccagcagcagaggcagag

SEQ ID NO: 178358 - DNA, 20 bp, synthetic construct
  source 1..20: mol_type = other DNA
ggaccagcagcagaggcaga

SEQ ID NO: 178359 - DNA, 20 bp, synthetic construct
  source 1..20: mol_type = other DNA
gggaccagcagcagaggcag

SEQ ID NO: 178360 - DNA, 20 bp, synthetic construct
  source 1..20: mol_type = other DNA
ggggaccagcagcagaggca

SEQ ID NO: 178361 - DNA, 20 bp, synthetic construct
  source 1..20: mol_type = other DNA
tggggaccagcagcagaggc

SEQ ID NO: 178362 - DNA, 20 bp, synthetic construct
  source 1..20: mol_type = other DNA
atggggaccagcagcagagg

SEQ ID NO: 178363 - DNA, 20 bp, synthetic construct
  source 1..20: mol_type = other DNA
catggggaccagcagcagag

SEQ ID NO: 178364 - DNA, 20 bp, synthetic construct
  source 1..20: mol_type = other DNA
tcatggggaccagcagcaga

SEQ ID NO: 178365 - DNA, 20 bp, synthetic construct
  source 1..20: mol_type = other DNA
ctcatggggaccagcagcag

SEQ ID NO: 178366 - DNA, 20 bp, synthetic construct
  source 1..20: mol_type = other DNA
cctcatggggaccagcagca

SEQ ID NO: 178367 - DNA, 20 bp, synthetic construct
  source 1..20: mol_type = other DNA
gcctcatggggaccagcagc

SEQ ID NO: 178368 - DNA, 20 bp, synthetic construct
  source 1..20: mol_type = other DNA
ggcctcatggggaccagcag

SEQ ID NO: 178369 - DNA, 20 bp, synthetic construct
  source 1..20: mol_type = other DNA
tggcctcatggggaccagca

SEQ ID NO: 178370 - DNA, 20 bp, synthetic construct
  source 1..20: mol_type = other DNA
ctggcctcatggggaccagc

SEQ ID NO: 178371 - DNA, 20 bp, synthetic construct
  source 1..20: mol_type = other DNA
gctggcctcatggggaccag

SEQ ID NO: 178372 - DNA, 20 bp, synthetic construct
  source 1..20: mol_type = other DNA
agctggcctcatggggacca

SEQ ID NO: 178373 - DNA, 20 bp, synthetic construct
  source 1..20: mol_type = other DNA
aagctggcctcatggggacc

SEQ ID NO: 178374 - DNA, 20 bp, synthetic construct
  source 1..20: mol_type = other DNA
taagctggcctcatggggac

SEQ ID NO: 178375 - DNA, 20 bp, synthetic construct
  source 1..20: mol_type = other DNA
ctaagctggcctcatgggga

SEQ ID NO: 178376 - DNA, 20 bp, synthetic construct
  source 1..20: mol_type = other DNA
tctaagctggcctcatgggg

SEQ ID NO: 178377 - DNA, 20 bp, synthetic construct
  source 1..20: mol_type = other DNA
ttctaagctggcctcatggg

SEQ ID NO: 178378 - DNA, 20 bp, synthetic construct
  source 1..20: mol_type = other DNA
tttctaagctggcctcatgg

SEQ ID NO: 178379 - DNA, 20 bp, synthetic construct
  source 1..20: mol_type = other DNA
gtttctaagctggcctcatg

SEQ ID NO: 178380 - DNA, 20 bp, synthetic construct
  source 1..20: mol_type = other DNA
cgtttctaagctggcctcat

SEQ ID NO: 178381 - DNA, 20 bp, synthetic construct
  source 1..20: mol_type = other DNA
ccgtttctaagctggcctca

SEQ ID NO: 178382 - DNA, 20 bp, synthetic construct
  source 1..20: mol_type = other DNA
tccgtttctaagctggcctc

SEQ ID NO: 178383 - DNA, 20 bp, synthetic construct
  source 1..20: mol_type = other DNA
ctccgtttctaagctggcct

SEQ ID NO: 178384 - DNA, 20 bp, synthetic construct
  source 1..20: mol_type = other DNA
cctccgtttctaagctggcc

SEQ ID NO: 178385 - DNA, 20 bp, synthetic construct
  source 1..20: mol_type = other DNA
tcctccgtttctaagctggc

SEQ ID NO: 178386 - DNA, 20 bp, synthetic construct
  source 1..20: mol_type = other DNA
atcctccgtttctaagctgg

SEQ ID NO: 178387 - DNA, 20 bp, synthetic construct
  source 1..20: mol_type = other DNA
aatcctccgtttctaagctg

SEQ ID NO: 178388 - DNA, 20 bp, synthetic construct
  source 1..20: mol_type = other DNA
aaatcctccgtttctaagct

SEQ ID NO: 178389 - DNA, 20 bp, synthetic construct
  source 1..20: mol_type = other DNA
aaaatcctccgtttctaagc

SEQ ID NO: 178390 - DNA, 20 bp, synthetic construct
  source 1..20: mol_type = other DNA
caaaatcctccgtttctaag

SEQ ID NO: 178391 - DNA, 20 bp, synthetic construct
  source 1..20: mol_type = other DNA
gcaaaatcctccgtttctaa

SEQ ID NO: 178392 - DNA, 20 bp, synthetic construct
  source 1..20: mol_type = other DNA
tgcaaaatcctccgtttcta

SEQ ID NO: 178393 - DNA, 20 bp, synthetic construct
  source 1..20: mol_type = other DNA
ctgcaaaatcctccgtttct

SEQ ID NO: 178394 - DNA, 20 bp, synthetic construct
  source 1..20: mol_type = other DNA
tctgcaaaatcctccgtttc

SEQ ID NO: 178395 - DNA, 20 bp, synthetic construct
  source 1..20: mol_type = other DNA
ttctgcaaaatcctccgttt

SEQ ID NO: 178396 - DNA, 20 bp, synthetic construct
  source 1..20: mol_type = other DNA
gttctgcaaaatcctccgtt

SEQ ID NO: 178397 - DNA, 20 bp, synthetic construct
  source 1..20: mol_type = other DNA
tgttctgcaaaatcctccgt

SEQ ID NO: 178398 - DNA, 20 bp, synthetic construct
  source 1..20: mol_type = other DNA
atgttctgcaaaatcctccg

SEQ ID NO: 178399 - DNA, 20 bp, synthetic construct
  source 1..20: mol_type = other DNA
gatgttctgcaaaatcctcc

SEQ ID NO: 178400 - DNA, 20 bp, synthetic construct
  source 1..20: mol_type = other DNA
ggatgttctgcaaaatcctc

SEQ ID NO: 178401 - DNA, 20 bp, synthetic construct
  source 1..20: mol_type = other DNA
gggatgttctgcaaaatcct

SEQ ID NO: 178402 - DNA, 20 bp, synthetic construct
  source 1..20: mol_type = other DNA
agggatgttctgcaaaatcc

SEQ ID NO: 178403 - DNA, 20 bp, synthetic construct
  source 1..20: mol_type = other DNA
tagggatgttctgcaaaatc

SEQ ID NO: 178404 - DNA, 20 bp, synthetic construct
  source 1..20: mol_type = other DNA
ttagggatgttctgcaaaat

SEQ ID NO: 178405 - DNA, 20 bp, synthetic construct
  source 1..20: mol_type = other DNA
tttagggatgttctgcaaaa

SEQ ID NO: 178406 - DNA, 20 bp, synthetic construct
  source 1..20: mol_type = other DNA
atttagggatgttctgcaaa

SEQ ID NO: 178407 - DNA, 20 bp, synthetic construct
  source 1..20: mol_type = other DNA
gatttagggatgttctgcaa

SEQ ID NO: 178408 - DNA, 20 bp, synthetic construct
  source 1..20: mol_type = other DNA
ggatttagggatgttctgca

SEQ ID NO: 178409 - DNA, 20 bp, synthetic construct
  source 1..20: mol_type = other DNA
cggatttagggatgttctgc

SEQ ID NO: 178410 - DNA, 20 bp, synthetic construct
  source 1..20: mol_type = other DNA
gcggatttagggatgttctg

SEQ ID NO: 178411 - DNA, 20 bp, synthetic construct
  source 1..20: mol_type = other DNA
agcggatttagggatgttct

SEQ ID NO: 178412 - DNA, 20 bp, synthetic construct
  source 1..20: mol_type = other DNA
aagcggatttagggatgttc

SEQ ID NO: 178413 - DNA, 20 bp, synthetic construct
  source 1..20: mol_type = other DNA
caagcggatttagggatgtt

SEQ ID NO: 178414 - DNA, 20 bp, synthetic construct
  source 1..20: mol_type = other DNA
tcaagcggatttagggatgt

SEQ ID NO: 178415 - DNA, 20 bp, synthetic construct
  source 1..20: mol_type = other DNA
ttcaagcggatttagggatg

SEQ ID NO: 178416 - DNA, 20 bp, synthetic construct
  source 1..20: mol_type = other DNA
attcaagcggatttagggat

SEQ ID NO: 178417 - DNA, 20 bp, synthetic construct
  source 1..20: mol_type = other DNA
tattcaagcggatttaggga

SEQ ID NO: 178418 - DNA, 20 bp, synthetic construct
  source 1..20: mol_type = other DNA
ttattcaagcggatttaggg

SEQ ID NO: 178419 - DNA, 20 bp, synthetic construct
  source 1..20: mol_type = other DNA
attattcaagcggatttagg

SEQ ID NO: 178420 - DNA, 20 bp, synthetic construct
  source 1..20: mol_type = other DNA
cattattcaagcggatttag

SEQ ID NO: 178421 - DNA, 20 bp, synthetic construct
  source 1..20: mol_type = other DNA
tcattattcaagcggattta

SEQ ID NO: 178422 - DNA, 20 bp, synthetic construct
  source 1..20: mol_type = other DNA
ttcattattcaagcggattt

SEQ ID NO: 178423 - DNA, 20 bp, synthetic construct
  source 1..20: mol_type = other DNA
cttcattattcaagcggatt

SEQ ID NO: 178424 - DNA, 20 bp, synthetic construct
  source 1..20: mol_type = other DNA
acttcattattcaagcggat

SEQ ID NO: 178425 - DNA, 20 bp, synthetic construct
  source 1..20: mol_type = other DNA
cacttcattattcaagcgga

SEQ ID NO: 178426 - DNA, 20 bp, synthetic construct
  source 1..20: mol_type = other DNA
tcacttcattattcaagcgg

SEQ ID NO: 178427 - DNA, 20 bp, synthetic construct
  source 1..20: mol_type = other DNA
atcacttcattattcaagcg

SEQ ID NO: 178428 - DNA, 20 bp, synthetic construct
  source 1..20: mol_type = other DNA
gatcacttcattattcaagc

SEQ ID NO: 178429 - DNA, 20 bp, synthetic construct
  source 1..20: mol_type = other DNA
tgatcacttcattattcaag

SEQ ID NO: 178430 - DNA, 20 bp, synthetic construct
  source 1..20: mol_type = other DNA
atgatcacttcattattcaa

SEQ ID NO: 178431 - DNA, 20 bp, synthetic construct
  source 1..20: mol_type = other DNA
aatgatcacttcattattca

SEQ ID NO: 178432 - DNA, 20 bp, synthetic construct
  source 1..20: mol_type = other DNA
gaatgatcacttcattattc

SEQ ID NO: 178433 - DNA, 20 bp, synthetic construct
  source 1..20: mol_type = other DNA
tgaatgatcacttcattatt

SEQ ID NO: 178434 - DNA, 20 bp, synthetic construct
  source 1..20: mol_type = other DNA
atgaatgatcacttcattat

SEQ ID NO: 178435 - DNA, 20 bp, synthetic construct
  source 1..20: mol_type = other DNA
tatgaatgatcacttcatta

SEQ ID NO: 178436 - DNA, 20 bp, synthetic construct
  source 1..20: mol_type = other DNA
ttatgaatgatcacttcatt

SEQ ID NO: 178437 - DNA, 20 bp, synthetic construct
  source 1..20: mol_type = other DNA
tttatgaatgatcacttcat

SEQ ID NO: 178438 - DNA, 20 bp, synthetic construct
  source 1..20: mol_type = other DNA
gtttatgaatgatcacttca

SEQ ID NO: 178439 - DNA, 20 bp, synthetic construct
  source 1..20: mol_type = other DNA
agtttatgaatgatcacttc

SEQ ID NO: 178440 - DNA, 20 bp, synthetic construct
  source 1..20: mol_type = other DNA
gagtttatgaatgatcactt

SEQ ID NO: 178441 - DNA, 20 bp, synthetic construct
  source 1..20: mol_type = other DNA
tgagtttatgaatgatcact

SEQ ID NO: 178442 - DNA, 20 bp, synthetic construct
  source 1..20: mol_type = other DNA
gtgagtttatgaatgatcac

SEQ ID NO: 178443 - DNA, 20 bp, synthetic construct
  source 1..20: mol_type = other DNA
ggtgagtttatgaatgatca

SEQ ID NO: 178444 - DNA, 20 bp, synthetic construct
  source 1..20: mol_type = other DNA
aggtgagtttatgaatgatc

SEQ ID NO: 178445 - DNA, 20 bp, synthetic construct
  source 1..20: mol_type = other DNA
caggtgagtttatgaatgat

SEQ ID NO: 178446 - DNA, 20 bp, synthetic construct
  source 1..20: mol_type = other DNA
tcaggtgagtttatgaatga

SEQ ID NO: 178447 - DNA, 20 bp, synthetic construct
  source 1..20: mol_type = other DNA
ttcaggtgagtttatgaatg

SEQ ID NO: 178448 - DNA, 20 bp, synthetic construct
  source 1..20: mol_type = other DNA
gttcaggtgagtttatgaat

SEQ ID NO: 178449 - DNA, 20 bp, synthetic construct
  source 1..20: mol_type = other DNA
ggttcaggtgagtttatgaa

SEQ ID NO: 178450 - DNA, 20 bp, synthetic construct
  source 1..20: mol_type = other DNA
aggttcaggtgagtttatga

SEQ ID NO: 178451 - DNA, 20 bp, synthetic construct
  source 1..20: mol_type = other DNA
aaggttcaggtgagtttatg

SEQ ID NO: 178452 - DNA, 20 bp, synthetic construct
  source 1..20: mol_type = other DNA
taaggttcaggtgagtttat

SEQ ID NO: 178453 - DNA, 20 bp, synthetic construct
  source 1..20: mol_type = other DNA
ataaggttcaggtgagttta

SEQ ID NO: 178454 - DNA, 20 bp, synthetic construct
  source 1..20: mol_type = other DNA
aataaggttcaggtgagttt

SEQ ID NO: 178455 - DNA, 20 bp, synthetic construct
  source 1..20: mol_type = other DNA
taataaggttcaggtgagtt

SEQ ID NO: 178456 - DNA, 20 bp, synthetic construct
  source 1..20: mol_type = other DNA
ttaataaggttcaggtgagt

SEQ ID NO: 178457 - DNA, 20 bp, synthetic construct
  source 1..20: mol_type = other DNA
tttaataaggttcaggtgag

SEQ ID NO: 178458 - DNA, 20 bp, synthetic construct
  source 1..20: mol_type = other DNA
ttttaataaggttcaggtga

SEQ ID NO: 178459 - DNA, 20 bp, synthetic construct
  source 1..20: mol_type = other DNA
gttttaataaggttcaggtg

SEQ ID NO: 178460 - DNA, 20 bp, synthetic construct
  source 1..20: mol_type = other DNA
ggttttaataaggttcaggt

SEQ ID NO: 178461 - DNA, 20 bp, synthetic construct
  source 1..20: mol_type = other DNA
aggttttaataaggttcagg

SEQ ID NO: 178462 - DNA, 20 bp, synthetic construct
  source 1..20: mol_type = other DNA
taggttttaataaggttcag

SEQ ID NO: 178463 - DNA, 20 bp, synthetic construct
  source 1..20: mol_type = other DNA
ataggttttaataaggttca

SEQ ID NO: 178464 - DNA, 20 bp, synthetic construct
  source 1..20: mol_type = other DNA
aataggttttaataaggttc

SEQ ID NO: 178465 - DNA, 20 bp, synthetic construct
  source 1..20: mol_type = other DNA
aaataggttttaataaggtt

SEQ ID NO: 178466 - DNA, 20 bp, synthetic construct
  source 1..20: mol_type = other DNA
taaataggttttaataaggt

SEQ ID NO: 178467 - DNA, 20 bp, synthetic construct
  source 1..20: mol_type = other DNA
ttaaataggttttaataagg

SEQ ID NO: 178468 - DNA, 20 bp, synthetic construct
  source 1..20: mol_type = other DNA
attaaataggttttaataag

SEQ ID NO: 178469 - DNA, 20 bp, synthetic construct
  source 1..20: mol_type = other DNA
tattaaataggttttaataa

SEQ ID NO: 178470 - DNA, 20 bp, synthetic construct
  source 1..20: mol_type = other DNA
atattaaataggttttaata

SEQ ID NO: 178471 - DNA, 20 bp, synthetic construct
  source 1..20: mol_type = other DNA
aatattaaataggttttaat

SEQ ID NO: 178472 - DNA, 20 bp, synthetic construct
  source 1..20: mol_type = other DNA
aaatattaaataggttttaa

SEQ ID NO: 178473 - DNA, 20 bp, synthetic construct
  source 1..20: mol_type = other DNA
aaaatattaaataggtttta

SEQ ID NO: 178474 - DNA, 20 bp, synthetic construct
  source 1..20: mol_type = other DNA
aaaaatattaaataggtttt

SEQ ID NO: 178475 - DNA, 20 bp, synthetic construct
  source 1..20: mol_type = other DNA
gaaaaatattaaataggttt

SEQ ID NO: 178476 - DNA, 20 bp, synthetic construct
  source 1..20: mol_type = other DNA
ggaaaaatattaaataggtt

SEQ ID NO: 178477 - DNA, 20 bp, synthetic construct
  source 1..20: mol_type = other DNA
aggaaaaatattaaataggt

SEQ ID NO: 178478 - DNA, 20 bp, synthetic construct
  source 1..20: mol_type = other DNA
caggaaaaatattaaatagg

SEQ ID NO: 178479 - DNA, 20 bp, synthetic construct
  source 1..20: mol_type = other DNA
ccaggaaaaatattaaatag

SEQ ID NO: 178480 - DNA, 20 bp, synthetic construct
  source 1..20: mol_type = other DNA
tccaggaaaaatattaaata

SEQ ID NO: 178481 - DNA, 20 bp, synthetic construct
  source 1..20: mol_type = other DNA
atccaggaaaaatattaaat

SEQ ID NO: 178482 - DNA, 20 bp, synthetic construct
  source 1..20: mol_type = other DNA
tatccaggaaaaatattaaa

SEQ ID NO: 178483 - DNA, 20 bp, synthetic construct
  source 1..20: mol_type = other DNA
ttatccaggaaaaatattaa

SEQ ID NO: 178484 - DNA, 20 bp, synthetic construct
  source 1..20: mol_type = other DNA
attatccaggaaaaatatta

SEQ ID NO: 178485 - DNA, 20 bp, synthetic construct
  source 1..20: mol_type = other DNA
gattatccaggaaaaatatt

SEQ ID NO: 178486 - DNA, 20 bp, synthetic construct
  source 1..20: mol_type = other DNA
ggattatccaggaaaaatat

SEQ ID NO: 178487 - DNA, 20 bp, synthetic construct
  source 1..20: mol_type = other DNA
aggattatccaggaaaaata

SEQ ID NO: 178488 - DNA, 20 bp, synthetic construct
  source 1..20: mol_type = other DNA
taggattatccaggaaaaat

SEQ ID NO: 178489 - DNA, 20 bp, synthetic construct
  source 1..20: mol_type = other DNA
ataggattatccaggaaaaa

SEQ ID NO: 178490 - DNA, 20 bp, synthetic construct
  source 1..20: mol_type = other DNA
tataggattatccaggaaaa

SEQ ID NO: 178491 - DNA, 20 bp, synthetic construct
  source 1..20: mol_type = other DNA
ctataggattatccaggaaa

SEQ ID NO: 178492 - DNA, 20 bp, synthetic construct
  source 1..20: mol_type = other DNA
cctataggattatccaggaa

SEQ ID NO: 178493 - DNA, 20 bp, synthetic construct
  source 1..20: mol_type = other DNA
ccctataggattatccagga

SEQ ID NO: 178494 - DNA, 20 bp, synthetic construct
  source 1..20: mol_type = other DNA
tccctataggattatccagg

SEQ ID NO: 178495 - DNA, 20 bp, synthetic construct
  source 1..20: mol_type = other DNA
atccctataggattatccag

SEQ ID NO: 178496 - DNA, 20 bp, synthetic construct
  source 1..20: mol_type = other DNA
tatccctataggattatcca

SEQ ID NO: 178497 - DNA, 20 bp, synthetic construct
  source 1..20: mol_type = other DNA
ttatccctataggattatcc

SEQ ID NO: 178498 - DNA, 20 bp, synthetic construct
  source 1..20: mol_type = other DNA
gttatccctataggattatc

SEQ ID NO: 178499 - DNA, 20 bp, synthetic construct
  source 1..20: mol_type = other DNA
agttatccctataggattat

SEQ ID NO: 178500 - DNA, 20 bp, synthetic construct
  source 1..20: mol_type = other DNA
aagttatccctataggatta

SEQ ID NO: 178501 - DNA, 20 bp, synthetic construct
  source 1..20: mol_type = other DNA
caagttatccctataggatt

SEQ ID NO: 178502 - DNA, 20 bp, synthetic construct
  source 1..20: mol_type = other DNA
gcaagttatccctataggat

SEQ ID NO: 178503 - DNA, 20 bp, synthetic construct
  source 1..20: mol_type = other DNA
ggcaagttatccctatagga

SEQ ID NO: 178504 - DNA, 20 bp, synthetic construct
  source 1..20: mol_type = other DNA
aggcaagttatccctatagg

SEQ ID NO: 178505 - DNA, 20 bp, synthetic construct
  source 1..20: mol_type = other DNA
gaggcaagttatccctatag

SEQ ID NO: 178506 - DNA, 20 bp, synthetic construct
  source 1..20: mol_type = other DNA
ggaggcaagttatccctata

SEQ ID NO: 178507 - DNA, 20 bp, synthetic construct
  source 1..20: mol_type = other DNA
aggaggcaagttatccctat

SEQ ID NO: 178508 - DNA, 20 bp, synthetic construct
  source 1..20: mol_type = other DNA
caggaggcaagttatcccta

SEQ ID NO: 178509 - DNA, 20 bp, synthetic construct
  source 1..20: mol_type = other DNA
ccaggaggcaagttatccct

SEQ ID NO: 178510 - DNA, 20 bp, synthetic construct
  source 1..20: mol_type = other DNA
cccaggaggcaagttatccc

SEQ ID NO: 178511 - DNA, 20 bp, synthetic construct
  source 1..20: mol_type = other DNA
gcccaggaggcaagttatcc

SEQ ID NO: 178512 - DNA, 20 bp, synthetic construct
  source 1..20: mol_type = other DNA
agcccaggaggcaagttatc

SEQ ID NO: 178513 - DNA, 20 bp, synthetic construct
  source 1..20: mol_type = other DNA
aagcccaggaggcaagttat

SEQ ID NO: 178514 - DNA, 20 bp, synthetic construct
  source 1..20: mol_type = other DNA
gaagcccaggaggcaagtta

SEQ ID NO: 178515 - DNA, 20 bp, synthetic construct
  source 1..20: mol_type = other DNA
agaagcccaggaggcaagtt

SEQ ID NO: 178516 - DNA, 20 bp, synthetic construct
  source 1..20: mol_type = other DNA
gagaagcccaggaggcaagt

SEQ ID NO: 178517 - DNA, 20 bp, synthetic construct
  source 1..20: mol_type = other DNA
agagaagcccaggaggcaag

SEQ ID NO: 178518 - DNA, 20 bp, synthetic construct
  source 1..20: mol_type = other DNA
gagagaagcccaggaggcaa

SEQ ID NO: 178519 - DNA, 20 bp, synthetic construct
  source 1..20: mol_type = other DNA
ggagagaagcccaggaggca

SEQ ID NO: 178520 - DNA, 20 bp, synthetic construct
  source 1..20: mol_type = other DNA
tggagagaagcccaggaggc

SEQ ID NO: 178521 - DNA, 20 bp, synthetic construct
  source 1..20: mol_type = other DNA
gtggagagaagcccaggagg

SEQ ID NO: 178522 - DNA, 20 bp, synthetic construct
  source 1..20: mol_type = other DNA
ggtggagagaagcccaggag

SEQ ID NO: 178523 - DNA, 20 bp, synthetic construct
  source 1..20: mol_type = other DNA
cggtggagagaagcccagga

SEQ ID NO: 178524 - DNA, 20 bp, synthetic construct
  source 1..20: mol_type = other DNA
ccggtggagagaagcccagg

SEQ ID NO: 178525 - DNA, 20 bp, synthetic construct
  source 1..20: mol_type = other DNA
cccggtggagagaagcccag

SEQ ID NO: 178526 - DNA, 20 bp, synthetic construct
  source 1..20: mol_type = other DNA
acccggtggagagaagccca

SEQ ID NO: 178527 - DNA, 20 bp, synthetic construct
  source 1..20: mol_type = other DNA
aacccggtggagagaagccc

SEQ ID NO: 178528 - DNA, 20 bp, synthetic construct
  source 1..20: mol_type = other DNA
gaacccggtggagagaagcc

SEQ ID NO: 178529 - DNA, 20 bp, synthetic construct
  source 1..20: mol_type = other DNA
tgaacccggtggagagaagc

SEQ ID NO: 178530 - DNA, 20 bp, synthetic construct
  source 1..20: mol_type = other DNA
ctgaacccggtggagagaag

SEQ ID NO: 178531 - DNA, 20 bp, synthetic construct
  source 1..20: mol_type = other DNA
actgaacccggtggagagaa

SEQ ID NO: 178532 - DNA, 20 bp, synthetic construct
  source 1..20: mol_type = other DNA
aactgaacccggtggagaga

SEQ ID NO: 178533 - DNA, 20 bp, synthetic construct
  source 1..20: mol_type = other DNA
gaactgaacccggtggagag

SEQ ID NO: 178534 - DNA, 20 bp, synthetic construct
  source 1..20: mol_type = other DNA
agaactgaacccggtggaga

SEQ ID NO: 178535 - DNA, 20 bp, synthetic construct
  source 1..20: mol_type = other DNA
aagaactgaacccggtggag

SEQ ID NO: 178536 - DNA, 20 bp, synthetic construct
  source 1..20: mol_type = other DNA
gaagaactgaacccggtgga

SEQ ID NO: 178537 - DNA, 20 bp, synthetic construct
  source 1..20: mol_type = other DNA
ggaagaactgaacccggtgg

SEQ ID NO: 178538 - DNA, 20 bp, synthetic construct
  source 1..20: mol_type = other DNA
aggaagaactgaacccggtg

SEQ ID NO: 178539 - DNA, 20 bp, synthetic construct
  source 1..20: mol_type = other DNA
aaggaagaactgaacccggt

SEQ ID NO: 178540 - DNA, 20 bp, synthetic construct
  source 1..20: mol_type = other DNA
aaaggaagaactgaacccgg

SEQ ID NO: 178541 - DNA, 20 bp, synthetic construct
  source 1..20: mol_type = other DNA
taaaggaagaactgaacccg

SEQ ID NO: 178542 - DNA, 20 bp, synthetic construct
  source 1..20: mol_type = other DNA
ctaaaggaagaactgaaccc

SEQ ID NO: 178543 - DNA, 20 bp, synthetic construct
  source 1..20: mol_type = other DNA
actaaaggaagaactgaacc

SEQ ID NO: 178544 - DNA, 20 bp, synthetic construct
  source 1..20: mol_type = other DNA
cactaaaggaagaactgaac

SEQ ID NO: 178545 - DNA, 20 bp, synthetic construct
  source 1..20: mol_type = other DNA
ccactaaaggaagaactgaa

SEQ ID NO: 178546 - DNA, 20 bp, synthetic construct
  source 1..20: mol_type = other DNA
accactaaaggaagaactga

SEQ ID NO: 178547 - DNA, 20 bp, synthetic construct
  source 1..20: mol_type = other DNA
caccactaaaggaagaactg

SEQ ID NO: 178548 - DNA, 20 bp, synthetic construct
  source 1..20: mol_type = other DNA
tcaccactaaaggaagaact

SEQ ID NO: 178549 - DNA, 20 bp, synthetic construct
  source 1..20: mol_type = other DNA
ttcaccactaaaggaagaac

SEQ ID NO: 178550 - DNA, 20 bp, synthetic construct
  source 1..20: mol_type = other DNA
cttcaccactaaaggaagaa

SEQ ID NO: 178551 - DNA, 20 bp, synthetic construct
  source 1..20: mol_type = other DNA
acttcaccactaaaggaaga

SEQ ID NO: 178552 - DNA, 20 bp, synthetic construct
  source 1..20: mol_type = other DNA
aacttcaccactaaaggaag

SEQ ID NO: 178553 - DNA, 20 bp, synthetic construct
  source 1..20: mol_type = other DNA
gaacttcaccactaaaggaa

SEQ ID NO: 178554 - DNA, 20 bp, synthetic construct
  source 1..20: mol_type = other DNA
ggaacttcaccactaaagga

SEQ ID NO: 178555 - DNA, 20 bp, synthetic construct
  source 1..20: mol_type = other DNA
aggaacttcaccactaaagg

SEQ ID NO: 178556 - DNA, 20 bp, synthetic construct
  source 1..20: mol_type = other DNA
gaggaacttcaccactaaag

SEQ ID NO: 178557 - DNA, 20 bp, synthetic construct
  source 1..20: mol_type = other DNA
ggaggaacttcaccactaaa

SEQ ID NO: 178558 - DNA, 20 bp, synthetic construct
  source 1..20: mol_type = other DNA
gggaggaacttcaccactaa

SEQ ID NO: 178559 - DNA, 20 bp, synthetic construct
  source 1..20: mol_type = other DNA
agggaggaacttcaccacta

SEQ ID NO: 178560 - DNA, 20 bp, synthetic construct
  source 1..20: mol_type = other DNA
aagggaggaacttcaccact

SEQ ID NO: 178561 - DNA, 20 bp, synthetic construct
  source 1..20: mol_type = other DNA
gaagggaggaacttcaccac

SEQ ID NO: 178562 - DNA, 20 bp, synthetic construct
  source 1..20: mol_type = other DNA
agaagggaggaacttcacca

SEQ ID NO: 178563 - DNA, 20 bp, synthetic construct
  source 1..20: mol_type = other DNA
aagaagggaggaacttcacc

SEQ ID NO: 178564 - DNA, 20 bp, synthetic construct
  source 1..20: mol_type = other DNA
taagaagggaggaacttcac

SEQ ID NO: 178565 - DNA, 20 bp, synthetic construct
  source 1..20: mol_type = other DNA
ctaagaagggaggaacttca

SEQ ID NO: 178566 - DNA, 20 bp, synthetic construct
  source 1..20: mol_type = other DNA
gctaagaagggaggaacttc

SEQ ID NO: 178567 - DNA, 20 bp, synthetic construct
  source 1..20: mol_type = other DNA
tgctaagaagggaggaactt

SEQ ID NO: 178568 - DNA, 20 bp, synthetic construct
  source 1..20: mol_type = other DNA
atgctaagaagggaggaact

SEQ ID NO: 178569 - DNA, 20 bp, synthetic construct
  source 1..20: mol_type = other DNA
gatgctaagaagggaggaac

SEQ ID NO: 178570 - DNA, 20 bp, synthetic construct
  source 1..20: mol_type = other DNA
agatgctaagaagggaggaa

SEQ ID NO: 178571 - DNA, 20 bp, synthetic construct
  source 1..20: mol_type = other DNA
gagatgctaagaagggagga

SEQ ID NO: 178572 - DNA, 20 bp, synthetic construct
  source 1..20: mol_type = other DNA
tgagatgctaagaagggagg

SEQ ID NO: 178573 - DNA, 20 bp, synthetic construct
  source 1..20: mol_type = other DNA
ttgagatgctaagaagggag

SEQ ID NO: 178574 - DNA, 20 bp, synthetic construct
  source 1..20: mol_type = other DNA
gttgagatgctaagaaggga

SEQ ID NO: 178575 - DNA, 20 bp, synthetic construct
  source 1..20: mol_type = other DNA
agttgagatgctaagaaggg

SEQ ID NO: 178576 - DNA, 20 bp, synthetic construct
  source 1..20: mol_type = other DNA
cagttgagatgctaagaagg

SEQ ID NO: 178577 - DNA, 20 bp, synthetic construct
  source 1..20: mol_type = other DNA
acagttgagatgctaagaag

SEQ ID NO: 178578 - DNA, 20 bp, synthetic construct
  source 1..20: mol_type = other DNA
cacagttgagatgctaagaa

SEQ ID NO: 178579 - DNA, 20 bp, synthetic construct
  source 1..20: mol_type = other DNA
gcacagttgagatgctaaga

SEQ ID NO: 178580 - DNA, 20 bp, synthetic construct
  source 1..20: mol_type = other DNA
ggcacagttgagatgctaag

SEQ ID NO: 178581 - DNA, 20 bp, synthetic construct
  source 1..20: mol_type = other DNA
aggcacagttgagatgctaa

SEQ ID NO: 178582 - DNA, 20 bp, synthetic construct
  source 1..20: mol_type = other DNA
caggcacagttgagatgcta

SEQ ID NO: 178583 - DNA, 20 bp, synthetic construct
  source 1..20: mol_type = other DNA
tcaggcacagttgagatgct

SEQ ID NO: 178584 - DNA, 20 bp, synthetic construct
  source 1..20: mol_type = other DNA
ctcaggcacagttgagatgc

SEQ ID NO: 178585 - DNA, 20 bp, synthetic construct
  source 1..20: mol_type = other DNA
tctcaggcacagttgagatg

SEQ ID NO: 178586 - DNA, 20 bp, synthetic construct
  source 1..20: mol_type = other DNA
ttctcaggcacagttgagat

SEQ ID NO: 178587 - DNA, 20 bp, synthetic construct
  source 1..20: mol_type = other DNA
tttctcaggcacagttgaga

SEQ ID NO: 178588 - DNA, 20 bp, synthetic construct
  source 1..20: mol_type = other DNA
ttttctcaggcacagttgag

SEQ ID NO: 178589 - DNA, 20 bp, synthetic construct
  source 1..20: mol_type = other DNA
cttttctcaggcacagttga

SEQ ID NO: 178590 - DNA, 20 bp, synthetic construct
  source 1..20: mol_type = other DNA
ccttttctcaggcacagttg

SEQ ID NO: 178591 - DNA, 20 bp, synthetic construct
  source 1..20: mol_type = other DNA
gccttttctcaggcacagtt

SEQ ID NO: 178592 - DNA, 20 bp, synthetic construct
  source 1..20: mol_type = other DNA
ggccttttctcaggcacagt

SEQ ID NO: 178593 - DNA, 20 bp, synthetic construct
  source 1..20: mol_type = other DNA
tggccttttctcaggcacag

SEQ ID NO: 178594 - DNA, 20 bp, synthetic construct
  source 1..20: mol_type = other DNA
ctggccttttctcaggcaca

SEQ ID NO: 178595 - DNA, 20 bp, synthetic construct
  source 1..20: mol_type = other DNA
actggccttttctcaggcac

SEQ ID NO: 178596 - DNA, 20 bp, synthetic construct
  source 1..20: mol_type = other DNA
cactggccttttctcaggca

SEQ ID NO: 178597 - DNA, 20 bp, synthetic construct
  source 1..20: mol_type = other DNA
ccactggccttttctcaggc

SEQ ID NO: 178598 - DNA, 20 bp, synthetic construct
  source 1..20: mol_type = other DNA
gccactggccttttctcagg

SEQ ID NO: 178599 - DNA, 20 bp, synthetic construct
  source 1..20: mol_type = other DNA
cgccactggccttttctcag

SEQ ID NO: 178600 - DNA, 20 bp, synthetic construct
  source 1..20: mol_type = other DNA
ccgccactggccttttctca

SEQ ID NO: 178601 - DNA, 20 bp, synthetic construct
  source 1..20: mol_type = other DNA
gccgccactggccttttctc

SEQ ID NO: 178602 - DNA, 20 bp, synthetic construct
  source 1..20: mol_type = other DNA
agccgccactggccttttct

SEQ ID NO: 178603 - DNA, 20 bp, synthetic construct
  source 1..20: mol_type = other DNA
cagccgccactggccttttc

SEQ ID NO: 178604 - DNA, 20 bp, synthetic construct
  source 1..20: mol_type = other DNA
gcagccgccactggcctttt

SEQ ID NO: 178605 - DNA, 20 bp, synthetic construct
  source 1..20: mol_type = other DNA
tgcagccgccactggccttt

SEQ ID NO: 178606 - DNA, 20 bp, synthetic construct
  source 1..20: mol_type = other DNA
gtgcagccgccactggcctt

SEQ ID NO: 178607 - DNA, 20 bp, synthetic construct
  source 1..20: mol_type = other DNA
agtgcagccgccactggcct

SEQ ID NO: 178608 - DNA, 20 bp, synthetic construct
  source 1..20: mol_type = other DNA
gagtgcagccgccactggcc

SEQ ID NO: 178609 - DNA, 20 bp, synthetic construct
  source 1..20: mol_type = other DNA
agagtgcagccgccactggc

SEQ ID NO: 178610 - DNA, 20 bp, synthetic construct
  source 1..20: mol_type = other DNA
cagagtgcagccgccactgg

SEQ ID NO: 178611 - DNA, 20 bp, synthetic construct
  source 1..20: mol_type = other DNA
acagagtgcagccgccactg

SEQ ID NO: 178612 - DNA, 20 bp, synthetic construct
  source 1..20: mol_type = other DNA
aacagagtgcagccgccact

SEQ ID NO: 178613 - DNA, 20 bp, synthetic construct
  source 1..20: mol_type = other DNA
gaacagagtgcagccgccac

SEQ ID NO: 178614 - DNA, 20 bp, synthetic construct
  source 1..20: mol_type = other DNA
ggaacagagtgcagccgcca

SEQ ID NO: 178615 - DNA, 20 bp, synthetic construct
  source 1..20: mol_type = other DNA
gggaacagagtgcagccgcc

SEQ ID NO: 178616 - DNA, 20 bp, synthetic construct
  source 1..20: mol_type = other DNA
agggaacagagtgcagccgc

SEQ ID NO: 178617 - DNA, 20 bp, synthetic construct
  source 1..20: mol_type = other DNA
cagggaacagagtgcagccg

SEQ ID NO: 178618 - DNA, 20 bp, synthetic construct
  source 1..20: mol_type = other DNA
acagggaacagagtgcagcc

SEQ ID NO: 178619 - DNA, 20 bp, synthetic construct
  source 1..20: mol_type = other DNA
cacagggaacagagtgcagc

SEQ ID NO: 178620 - DNA, 20 bp, synthetic construct
  source 1..20: mol_type = other DNA
ccacagggaacagagtgcag

SEQ ID NO: 178621 - DNA, 20 bp, synthetic construct
  source 1..20: mol_type = other DNA
tccacagggaacagagtgca

SEQ ID NO: 178622 - DNA, 20 bp, synthetic construct
  source 1..20: mol_type = other DNA
ctccacagggaacagagtgc

SEQ ID NO: 178623 - DNA, 20 bp, synthetic construct
  source 1..20: mol_type = other DNA
actccacagggaacagagtg

SEQ ID NO: 178624 - DNA, 20 bp, synthetic construct
  source 1..20: mol_type = other DNA
cactccacagggaacagagt

SEQ ID NO: 178625 - DNA, 20 bp, synthetic construct
  source 1..20: mol_type = other DNA
acactccacagggaacagag

SEQ ID NO: 178626 - DNA, 20 bp, synthetic construct
  source 1..20: mol_type = other DNA
aacactccacagggaacaga

SEQ ID NO: 178627 - DNA, 20 bp, synthetic construct
  source 1..20: mol_type = other DNA
taacactccacagggaacag

SEQ ID NO: 178628 - DNA, 20 bp, synthetic construct
  source 1..20: mol_type = other DNA
ttaacactccacagggaaca

SEQ ID NO: 178629 - DNA, 20 bp, synthetic construct
  source 1..20: mol_type = other DNA
attaacactccacagggaac

SEQ ID NO: 178630 - DNA, 20 bp, synthetic construct
  source 1..20: mol_type = other DNA
tattaacactccacagggaa

SEQ ID NO: 178631 - DNA, 20 bp, synthetic construct
  source 1..20: mol_type = other DNA
ttattaacactccacaggga

SEQ ID NO: 178632 - DNA, 20 bp, synthetic construct
  source 1..20: mol_type = other DNA
tttattaacactccacaggg

SEQ ID NO: 178633 - DNA, 20 bp, synthetic construct
  source 1..20: mol_type = other DNA
ctttattaacactccacagg

SEQ ID NO: 178634 - DNA, 20 bp, synthetic construct
  source 1..20: mol_type = other DNA
tctttattaacactccacag

SEQ ID NO: 178635 - DNA, 20 bp, synthetic construct
  source 1..20: mol_type = other DNA
gtctttattaacactccaca

SEQ ID NO: 178636 - DNA, 20 bp, synthetic construct
  source 1..20: mol_type = other DNA
agtctttattaacactccac

SEQ ID NO: 178637 - DNA, 20 bp, synthetic construct
  source 1..20: mol_type = other DNA
cagtctttattaacactcca

SEQ ID NO: 178638 - DNA, 20 bp, synthetic construct
  source 1..20: mol_type = other DNA
tcagtctttattaacactcc

SEQ ID NO: 178639 - DNA, 20 bp, synthetic construct
  source 1..20: mol_type = other DNA
ttcagtctttattaacactc

SEQ ID NO: 178640 - DNA, 20 bp, synthetic construct
  source 1..20: mol_type = other DNA
attcagtctttattaacact

SEQ ID NO: 178641 - DNA, 20 bp, synthetic construct
  source 1..20: mol_type = other DNA
tattcagtctttattaacac

SEQ ID NO: 178642 - DNA, 20 bp, synthetic construct
  source 1..20: mol_type = other DNA
ttattcagtctttattaaca

SEQ ID NO: 178643 - DNA, 20 bp, synthetic construct
  source 1..20: mol_type = other DNA
tttattcagtctttattaac

SEQ ID NO: 178644 - DNA, 20 bp, synthetic construct
  source 1..20: mol_type = other DNA
atttattcagtctttattaa

SEQ ID NO: 178645 - DNA, 20 bp, synthetic construct
  source 1..20: mol_type = other DNA
aatttattcagtctttatta

SEQ ID NO: 178646 - DNA, 20 bp, synthetic construct
  source 1..20: mol_type = other DNA
caatttattcagtctttatt

SEQ ID NO: 178647 - DNA, 20 bp, synthetic construct
  source 1..20: mol_type = other DNA
tcaatttattcagtctttat

SEQ ID NO: 178648 - DNA, 20 bp, synthetic construct
  source 1..20: mol_type = other DNA
ttcaatttattcagtcttta

SEQ ID NO: 178649 - DNA, 20 bp, synthetic construct
  source 1..20: mol_type = other DNA
tttcaatttattcagtcttt

SEQ ID NO: 178650 - DNA, 20 bp, synthetic construct
  source 1..20: mol_type = other DNA
atttcaatttattcagtctt

SEQ ID NO: 178651 - DNA, 20 bp, synthetic construct
  source 1..20: mol_type = other DNA
tatttcaatttattcagtct

SEQ ID NO: 178652 - DNA, 20 bp, synthetic construct
  source 1..20: mol_type = other DNA
ttatttcaatttattcagtc

SEQ ID NO: 178653 - DNA, 20 bp, synthetic construct
  source 1..20: mol_type = other DNA
tttatttcaatttattcagt

SEQ ID NO: 178654 - DNA, 20 bp, synthetic construct
  source 1..20: mol_type = other DNA
atttatttcaatttattcag

SEQ ID NO: 178655 - DNA, 20 bp, synthetic construct
  source 1..20: mol_type = other DNA
gatttatttcaatttattca

SEQ ID NO: 178656 - DNA, 20 bp, synthetic construct
  source 1..20: mol_type = other DNA
ggatttatttcaatttattc

SEQ ID NO: 178657 - DNA, 20 bp, synthetic construct
  source 1..20: mol_type = other DNA
gggatttatttcaatttatt

SEQ ID NO: 178658 - DNA, 20 bp, synthetic construct
  source 1..20: mol_type = other DNA
agggatttatttcaatttat

SEQ ID NO: 178659 - DNA, 20 bp, synthetic construct
  source 1..20: mol_type = other DNA
aagggatttatttcaattta

SEQ ID NO: 178660 - DNA, 20 bp, synthetic construct
  source 1..20: mol_type = other DNA
aaagggatttatttcaattt

SEQ ID NO: 178661 - DNA, 20 bp, synthetic construct
  source 1..20: mol_type = other DNA
gaaagggatttatttcaatt

SEQ ID NO: 178662 - DNA, 20 bp, synthetic construct
  source 1..20: mol_type = other DNA
tgaaagggatttatttcaat

SEQ ID NO: 178663 - DNA, 20 bp, synthetic construct
  source 1..20: mol_type = other DNA
ttgaaagggatttatttcaa

SEQ ID NO: 178664 - DNA, 20 bp, synthetic construct
  source 1..20: mol_type = other DNA
attgaaagggatttatttca

SEQ ID NO: 178665 - DNA, 20 bp, synthetic construct
  source 1..20: mol_type = other DNA
cattgaaagggatttatttc

SEQ ID NO: 178666 - DNA, 20 bp, synthetic construct
  source 1..20: mol_type = other DNA
acattgaaagggatttattt

SEQ ID NO: 178667 - DNA, 20 bp, synthetic construct
  source 1..20: mol_type = other DNA
gacattgaaagggatttatt

SEQ ID NO: 178668 - DNA, 20 bp, synthetic construct
  source 1..20: mol_type = other DNA
tgacattgaaagggatttat

SEQ ID NO: 178669 - DNA, 20 bp, synthetic construct
  source 1..20: mol_type = other DNA
atgacattgaaagggattta

SEQ ID NO: 178670 - DNA, 20 bp, synthetic construct
  source 1..20: mol_type = other DNA
aatgacattgaaagggattt

SEQ ID NO: 178671 - DNA, 20 bp, synthetic construct
  source 1..20: mol_type = other DNA
taatgacattgaaagggatt

SEQ ID NO: 178672 - DNA, 20 bp, synthetic construct
  source 1..20: mol_type = other DNA
ttaatgacattgaaagggat

SEQ ID NO: 178673 - DNA, 20 bp, synthetic construct
  source 1..20: mol_type = other DNA
cttaatgacattgaaaggga

SEQ ID NO: 178674 - DNA, 20 bp, synthetic construct
  source 1..20: mol_type = other DNA
acttaatgacattgaaaggg

SEQ ID NO: 178675 - DNA, 20 bp, synthetic construct
  source 1..20: mol_type = other DNA
cacttaatgacattgaaagg

SEQ ID NO: 178676 - DNA, 20 bp, synthetic construct
  source 1..20: mol_type = other DNA
gcacttaatgacattgaaag

SEQ ID NO: 178677 - DNA, 20 bp, synthetic construct
  source 1..20: mol_type = other DNA
agcacttaatgacattgaaa

SEQ ID NO: 178678 - DNA, 20 bp, synthetic construct
  source 1..20: mol_type = other DNA
tagcacttaatgacattgaa

SEQ ID NO: 178679 - DNA, 20 bp, synthetic construct
  source 1..20: mol_type = other DNA
atagcacttaatgacattga

SEQ ID NO: 178680 - DNA, 20 bp, synthetic construct
  source 1..20: mol_type = other DNA
tatagcacttaatgacattg

SEQ ID NO: 178681 - DNA, 20 bp, synthetic construct
  source 1..20: mol_type = other DNA
ttatagcacttaatgacatt

SEQ ID NO: 178682 - DNA, 20 bp, synthetic construct
  source 1..20: mol_type = other DNA
tttatagcacttaatgacat

SEQ ID NO: 178683 - DNA, 20 bp, synthetic construct
  source 1..20: mol_type = other DNA
atttatagcacttaatgaca

SEQ ID NO: 178684 - DNA, 20 bp, synthetic construct
  source 1..20: mol_type = other DNA
tatttatagcacttaatgac

SEQ ID NO: 178685 - DNA, 20 bp, synthetic construct
  source 1..20: mol_type = other DNA
ttatttatagcacttaatga

SEQ ID NO: 178686 - DNA, 20 bp, synthetic construct
  source 1..20: mol_type = other DNA
attatttatagcacttaatg

SEQ ID NO: 178687 - DNA, 20 bp, synthetic construct
  source 1..20: mol_type = other DNA
gattatttatagcacttaat

SEQ ID NO: 178688 - DNA, 20 bp, synthetic construct
  source 1..20: mol_type = other DNA
tgattatttatagcacttaa

SEQ ID NO: 178689 - DNA, 20 bp, synthetic construct
  source 1..20: mol_type = other DNA
atgattatttatagcactta

SEQ ID NO: 178690 - DNA, 20 bp, synthetic construct
  source 1..20: mol_type = other DNA
catgattatttatagcactt

SEQ ID NO: 178691 - DNA, 20 bp, synthetic construct
  source 1..20: mol_type = other DNA
tcatgattatttatagcact

SEQ ID NO: 178692 - DNA, 20 bp, synthetic construct
  source 1..20: mol_type = other DNA
ttcatgattatttatagcac

SEQ ID NO: 178693 - DNA, 20 bp, synthetic construct
  source 1..20: mol_type = other DNA
gttcatgattatttatagca

SEQ ID NO: 178694 - DNA, 20 bp, synthetic construct
  source 1..20: mol_type = other DNA
ggttcatgattatttatagc

SEQ ID NO: 178695 - DNA, 20 bp, synthetic construct
  source 1..20: mol_type = other DNA
tggttcatgattatttatag

SEQ ID NO: 178696 - DNA, 20 bp, synthetic construct
  source 1..20: mol_type = other DNA
ttggttcatgattatttata

SEQ ID NO: 178697 - DNA, 20 bp, synthetic construct
  source 1..20: mol_type = other DNA
attggttcatgattatttat

SEQ ID NO: 178698 - DNA, 20 bp, synthetic construct
  source 1..20: mol_type = other DNA
cattggttcatgattattta

SEQ ID NO: 178699 - DNA, 20 bp, synthetic construct
  source 1..20: mol_type = other DNA
acattggttcatgattattt

SEQ ID NO: 178700 - DNA, 20 bp, synthetic construct
  source 1..20: mol_type = other DNA
aacattggttcatgattatt

SEQ ID NO: 178701 - DNA, 20 bp, synthetic construct
  source 1..20: mol_type = other DNA
gaacattggttcatgattat

SEQ ID NO: 178702 - DNA, 20 bp, synthetic construct
  source 1..20: mol_type = other DNA
cgaacattggttcatgatta

SEQ ID NO: 178703 - DNA, 20 bp, synthetic construct
  source 1..20: mol_type = other DNA
tcgaacattggttcatgatt

SEQ ID NO: 178704 - DNA, 20 bp, synthetic construct
  source 1..20: mol_type = other DNA
atcgaacattggttcatgat

SEQ ID NO: 178705 - DNA, 20 bp, synthetic construct
  source 1..20: mol_type = other DNA
catcgaacattggttcatga

SEQ ID NO: 178706 - DNA, 20 bp, synthetic construct
  source 1..20: mol_type = other DNA
ccatcgaacattggttcatg

SEQ ID NO: 178707 - DNA, 20 bp, synthetic construct
  source 1..20: mol_type = other DNA
gccatcgaacattggttcat

SEQ ID NO: 178708 - DNA, 20 bp, synthetic construct
  source 1..20: mol_type = other DNA
agccatcgaacattggttca

SEQ ID NO: 178709 - DNA, 20 bp, synthetic construct
  source 1..20: mol_type = other DNA
cagccatcgaacattggttc

SEQ ID NO: 178710 - DNA, 20 bp, synthetic construct
  source 1..20: mol_type = other DNA
tcagccatcgaacattggtt

SEQ ID NO: 178711 - DNA, 20 bp, synthetic construct
  source 1..20: mol_type = other DNA
atcagccatcgaacattggt

SEQ ID NO: 178712 - DNA, 20 bp, synthetic construct
  source 1..20: mol_type = other DNA
catcagccatcgaacattgg

SEQ ID NO: 178713 - DNA, 20 bp, synthetic construct
  source 1..20: mol_type = other DNA
tcatcagccatcgaacattg

SEQ ID NO: 178714 - DNA, 20 bp, synthetic construct
  source 1..20: mol_type = other DNA
ctcatcagccatcgaacatt

SEQ ID NO: 178715 - DNA, 20 bp, synthetic construct
  source 1..20: mol_type = other DNA
tctcatcagccatcgaacat

SEQ ID NO: 178716 - DNA, 20 bp, synthetic construct
  source 1..20: mol_type = other DNA
ttctcatcagccatcgaaca

SEQ ID NO: 178717 - DNA, 20 bp, synthetic construct
  source 1..20: mol_type = other DNA
tttctcatcagccatcgaac

SEQ ID NO: 178718 - DNA, 20 bp, synthetic construct
  source 1..20: mol_type = other DNA
atttctcatcagccatcgaa

SEQ ID NO: 178719 - DNA, 20 bp, synthetic construct
  source 1..20: mol_type = other DNA
catttctcatcagccatcga

SEQ ID NO: 178720 - DNA, 20 bp, synthetic construct
  source 1..20: mol_type = other DNA
gcatttctcatcagccatcg

SEQ ID NO: 178721 - DNA, 20 bp, synthetic construct
  source 1..20: mol_type = other DNA
tgcatttctcatcagccatc

SEQ ID NO: 178722 - DNA, 20 bp, synthetic construct
  source 1..20: mol_type = other DNA
ttgcatttctcatcagccat

SEQ ID NO: 178723 - DNA, 20 bp, synthetic construct
  source 1..20: mol_type = other DNA
cttgcatttctcatcagcca

SEQ ID NO: 178724 - DNA, 20 bp, synthetic construct
  source 1..20: mol_type = other DNA
tcttgcatttctcatcagcc

SEQ ID NO: 178725 - DNA, 20 bp, synthetic construct
  source 1..20: mol_type = other DNA
ttcttgcatttctcatcagc

SEQ ID NO: 178726 - DNA, 20 bp, synthetic construct
  source 1..20: mol_type = other DNA
tttcttgcatttctcatcag

SEQ ID NO: 178727 - DNA, 20 bp, synthetic construct
  source 1..20: mol_type = other DNA
ttttcttgcatttctcatca

SEQ ID NO: 178728 - DNA, 20 bp, synthetic construct
  source 1..20: mol_type = other DNA
tttttcttgcatttctcatc

SEQ ID NO: 178729 - DNA, 20 bp, synthetic construct
  source 1..20: mol_type = other DNA
ttttttcttgcatttctcat

SEQ ID NO: 178730 - DNA, 20 bp, synthetic construct
  source 1..20: mol_type = other DNA
attttttcttgcatttctca

SEQ ID NO: 178731 - DNA, 20 bp, synthetic construct
  source 1..20: mol_type = other DNA
aattttttcttgcatttctc

SEQ ID NO: 178732 - DNA, 20 bp, synthetic construct
  source 1..20: mol_type = other DNA
aaattttttcttgcatttct

SEQ ID NO: 178733 - DNA, 20 bp, synthetic construct
  source 1..20: mol_type = other DNA
aaaattttttcttgcatttc

SEQ ID NO: 178734 - DNA, 20 bp, synthetic construct
  source 1..20: mol_type = other DNA
aaaaattttttcttgcattt

SEQ ID NO: 178735 - DNA, 20 bp, synthetic construct
  source 1..20: mol_type = other DNA
taaaaattttttcttgcatt

SEQ ID NO: 178736 - DNA, 20 bp, synthetic construct
  source 1..20: mol_type = other DNA
ttaaaaattttttcttgcat

SEQ ID NO: 178737 - DNA, 20 bp, synthetic construct
  source 1..20: mol_type = other DNA
attaaaaattttttcttgca

SEQ ID NO: 178738 - DNA, 20 bp, synthetic construct
  source 1..20: mol_type = other DNA
gattaaaaattttttcttgc

SEQ ID NO: 178739 - DNA, 20 bp, synthetic construct
  source 1..20: mol_type = other DNA
tgattaaaaattttttcttg

SEQ ID NO: 178740 - DNA, 20 bp, synthetic construct
  source 1..20: mol_type = other DNA
ctgattaaaaattttttctt

SEQ ID NO: 178741 - DNA, 20 bp, synthetic construct
  source 1..20: mol_type = other DNA
actgattaaaaattttttct

SEQ ID NO: 178742 - DNA, 20 bp, synthetic construct
  source 1..20: mol_type = other DNA
tactgattaaaaattttttc

SEQ ID NO: 178743 - DNA, 20 bp, synthetic construct
  source 1..20: mol_type = other DNA
ctactgattaaaaatttttt

SEQ ID NO: 178744 - DNA, 20 bp, synthetic construct
  source 1..20: mol_type = other DNA
cctactgattaaaaattttt

SEQ ID NO: 178745 - DNA, 20 bp, synthetic construct
  source 1..20: mol_type = other DNA
tcctactgattaaaaatttt

SEQ ID NO: 178746 - DNA, 20 bp, synthetic construct
  source 1..20: mol_type = other DNA
atcctactgattaaaaattt

SEQ ID NO: 178747 - DNA, 20 bp, synthetic construct
  source 1..20: mol_type = other DNA
aatcctactgattaaaaatt

SEQ ID NO: 178748 - DNA, 20 bp, synthetic construct
  source 1..20: mol_type = other DNA
gaatcctactgattaaaaat

SEQ ID NO: 178749 - DNA, 20 bp, synthetic construct
  source 1..20: mol_type = other DNA
tgaatcctactgattaaaaa

SEQ ID NO: 178750 - DNA, 20 bp, synthetic construct
  source 1..20: mol_type = other DNA
atgaatcctactgattaaaa

SEQ ID NO: 178751 - DNA, 20 bp, synthetic construct
  source 1..20: mol_type = other DNA
tatgaatcctactgattaaa

SEQ ID NO: 178752 - DNA, 20 bp, synthetic construct
  source 1..20: mol_type = other DNA
ttatgaatcctactgattaa

SEQ ID NO: 178753 - DNA, 20 bp, synthetic construct
  source 1..20: mol_type = other DNA
cttatgaatcctactgatta

SEQ ID NO: 178754 - DNA, 20 bp, synthetic construct
  source 1..20: mol_type = other DNA
acttatgaatcctactgatt

SEQ ID NO: 178755 - DNA, 20 bp, synthetic construct
  source 1..20: mol_type = other DNA
aacttatgaatcctactgat

SEQ ID NO: 178756 - DNA, 20 bp, synthetic construct
  source 1..20: mol_type = other DNA
caacttatgaatcctactga

SEQ ID NO: 178757 - DNA, 20 bp, synthetic construct
  source 1..20: mol_type = other DNA
tcaacttatgaatcctactg

SEQ ID NO: 178758 - DNA, 20 bp, synthetic construct
  source 1..20: mol_type = other DNA
gtcaacttatgaatcctact

SEQ ID NO: 178759 - DNA, 20 bp, synthetic construct
  source 1..20: mol_type = other DNA
tgtcaacttatgaatcctac

SEQ ID NO: 178760 - DNA, 20 bp, synthetic construct
  source 1..20: mol_type = other DNA
ttgtcaacttatgaatccta

SEQ ID NO: 178761 - DNA, 20 bp, synthetic construct
  source 1..20: mol_type = other DNA
attgtcaacttatgaatcct

SEQ ID NO: 178762 - DNA, 20 bp, synthetic construct
  source 1..20: mol_type = other DNA
gattgtcaacttatgaatcc

SEQ ID NO: 178763 - DNA, 20 bp, synthetic construct
  source 1..20: mol_type = other DNA
agattgtcaacttatgaatc

SEQ ID NO: 178764 - DNA, 20 bp, synthetic construct
  source 1..20: mol_type = other DNA
cagattgtcaacttatgaat

SEQ ID NO: 178765 - DNA, 20 bp, synthetic construct
  source 1..20: mol_type = other DNA
ccagattgtcaacttatgaa

SEQ ID NO: 178766 - DNA, 20 bp, synthetic construct
  source 1..20: mol_type = other DNA
cccagattgtcaacttatga

SEQ ID NO: 178767 - DNA, 20 bp, synthetic construct
  source 1..20: mol_type = other DNA
gcccagattgtcaacttatg

SEQ ID NO: 178768 - DNA, 20 bp, synthetic construct
  source 1..20: mol_type = other DNA
ggcccagattgtcaacttat

SEQ ID NO: 178769 - DNA, 20 bp, synthetic construct
  source 1..20: mol_type = other DNA
tggcccagattgtcaactta

SEQ ID NO: 178770 - DNA, 20 bp, synthetic construct
  source 1..20: mol_type = other DNA
ttggcccagattgtcaactt

SEQ ID NO: 178771 - DNA, 20 bp, synthetic construct
  source 1..20: mol_type = other DNA
cttggcccagattgtcaact

SEQ ID NO: 178772 - DNA, 20 bp, synthetic construct
  source 1..20: mol_type = other DNA
acttggcccagattgtcaac

SEQ ID NO: 178773 - DNA, 20 bp, synthetic construct
  source 1..20: mol_type = other DNA
aacttggcccagattgtcaa

SEQ ID NO: 178774 - DNA, 20 bp, synthetic construct
  source 1..20: mol_type = other DNA
taacttggcccagattgtca

SEQ ID NO: 178775 - DNA, 20 bp, synthetic construct
  source 1..20: mol_type = other DNA
ttaacttggcccagattgtc

SEQ ID NO: 178776 - DNA, 20 bp, synthetic construct
  source 1..20: mol_type = other DNA
tttaacttggcccagattgt

SEQ ID NO: 178777 - DNA, 20 bp, synthetic construct
  source 1..20: mol_type = other DNA
ttttaacttggcccagattg

SEQ ID NO: 178778 - DNA, 20 bp, synthetic construct
  source 1..20: mol_type = other DNA
tttttaacttggcccagatt

SEQ ID NO: 178779 - DNA, 20 bp, synthetic construct
  source 1..20: mol_type = other DNA
ttttttaacttggcccagat

SEQ ID NO: 178780 - DNA, 20 bp, synthetic construct
  source 1..20: mol_type = other DNA
tttttttaacttggcccaga

SEQ ID NO: 178781 - DNA, 20 bp, synthetic construct
  source 1..20: mol_type = other DNA
ttttttttaacttggcccag

SEQ ID NO: 178782 - DNA, 20 bp, synthetic construct
  source 1..20: mol_type = other DNA
attttttttaacttggccca

SEQ ID NO: 178783 - DNA, 20 bp, synthetic construct
  source 1..20: mol_type = other DNA
tattttttttaacttggccc

SEQ ID NO: 178784 - DNA, 20 bp, synthetic construct
  source 1..20: mol_type = other DNA
ttattttttttaacttggcc

SEQ ID NO: 178785 - DNA, 20 bp, synthetic construct
  source 1..20: mol_type = other DNA
tttattttttttaacttggc

SEQ ID NO: 178786 - DNA, 20 bp, synthetic construct
  source 1..20: mol_type = other DNA
ttttattttttttaacttgg

SEQ ID NO: 178787 - DNA, 20 bp, synthetic construct
  source 1..20: mol_type = other DNA
tttttattttttttaacttg

SEQ ID NO: 178788 - DNA, 20 bp, synthetic construct
  source 1..20: mol_type = other DNA
atttttattttttttaactt

SEQ ID NO: 178789 - DNA, 20 bp, synthetic construct
  source 1..20: mol_type = other DNA
tatttttattttttttaact

SEQ ID NO: 178790 - DNA, 20 bp, synthetic construct
  source 1..20: mol_type = other DNA
ttatttttattttttttaac

SEQ ID NO: 178791 - DNA, 20 bp, synthetic construct
  source 1..20: mol_type = other DNA
tttatttttattttttttaa

SEQ ID NO: 178792 - DNA, 20 bp, synthetic construct
  source 1..20: mol_type = other DNA
ttttatttttatttttttta

SEQ ID NO: 178793 - DNA, 20 bp, synthetic construct
  source 1..20: mol_type = other DNA
tttttatttttatttttttt

SEQ ID NO: 178794 - DNA, 20 bp, synthetic construct
  source 1..20: mol_type = other DNA
ctttttatttttattttttt

SEQ ID NO: 178795 - DNA, 20 bp, synthetic construct
  source 1..20: mol_type = other DNA
tctttttatttttatttttt

SEQ ID NO: 178796 - DNA, 20 bp, synthetic construct
  source 1..20: mol_type = other DNA
gtctttttatttttattttt

SEQ ID NO: 178797 - DNA, 20 bp, synthetic construct
  source 1..20: mol_type = other DNA
agtctttttatttttatttt

SEQ ID NO: 178798 - DNA, 20 bp, synthetic construct
  source 1..20: mol_type = other DNA
aagtctttttatttttattt

SEQ ID NO: 178799 - DNA, 20 bp, synthetic construct
  source 1..20: mol_type = other DNA
aaagtctttttatttttatt

SEQ ID NO: 178800 - DNA, 20 bp, synthetic construct
  source 1..20: mol_type = other DNA
aaaagtctttttatttttat

SEQ ID NO: 178801 - DNA, 20 bp, synthetic construct
  source 1..20: mol_type = other DNA
taaaagtctttttattttta

SEQ ID NO: 178802 - DNA, 20 bp, synthetic construct
  source 1..20: mol_type = other DNA
ttaaaagtctttttattttt

SEQ ID NO: 178803 - DNA, 20 bp, synthetic construct
  source 1..20: mol_type = other DNA
tttaaaagtctttttatttt

SEQ ID NO: 178804 - DNA, 20 bp, synthetic construct
  source 1..20: mol_type = other DNA
ttttaaaagtctttttattt

SEQ ID NO: 178805 - DNA, 20 bp, synthetic construct
  source 1..20: mol_type = other DNA
tttttaaaagtctttttatt

SEQ ID NO: 178806 - DNA, 20 bp, synthetic construct
  source 1..20: mol_type = other DNA
ctttttaaaagtctttttat

SEQ ID NO: 178807 - DNA, 20 bp, synthetic construct
  source 1..20: mol_type = other DNA
tctttttaaaagtcttttta

SEQ ID NO: 178808 - DNA, 20 bp, synthetic construct
  source 1..20: mol_type = other DNA
atctttttaaaagtcttttt

SEQ ID NO: 178809 - DNA, 20 bp, synthetic construct
  source 1..20: mol_type = other DNA
gatctttttaaaagtctttt

SEQ ID NO: 178810 - DNA, 20 bp, synthetic construct
  source 1..20: mol_type = other DNA
agatctttttaaaagtcttt

SEQ ID NO: 178811 - DNA, 20 bp, synthetic construct
  source 1..20: mol_type = other DNA
aagatctttttaaaagtctt

SEQ ID NO: 178812 - DNA, 20 bp, synthetic construct
  source 1..20: mol_type = other DNA
taagatctttttaaaagtct

SEQ ID NO: 178813 - DNA, 20 bp, synthetic construct
  source 1..20: mol_type = other DNA
ataagatctttttaaaagtc

SEQ ID NO: 178814 - DNA, 20 bp, synthetic construct
  source 1..20: mol_type = other DNA
gataagatctttttaaaagt

SEQ ID NO: 178815 - DNA, 20 bp, synthetic construct
  source 1..20: mol_type = other DNA
cgataagatctttttaaaag

SEQ ID NO: 178816 - DNA, 20 bp, synthetic construct
  source 1..20: mol_type = other DNA
acgataagatctttttaaaa

SEQ ID NO: 178817 - DNA, 20 bp, synthetic construct
  source 1..20: mol_type = other DNA
aacgataagatctttttaaa

SEQ ID NO: 178818 - DNA, 20 bp, synthetic construct
  source 1..20: mol_type = other DNA
aaacgataagatctttttaa

SEQ ID NO: 178819 - DNA, 20 bp, synthetic construct
  source 1..20: mol_type = other DNA
caaacgataagatcttttta

SEQ ID NO: 178820 - DNA, 20 bp, synthetic construct
  source 1..20: mol_type = other DNA
acaaacgataagatcttttt

SEQ ID NO: 178821 - DNA, 20 bp, synthetic construct
  source 1..20: mol_type = other DNA
aacaaacgataagatctttt

SEQ ID NO: 178822 - DNA, 20 bp, synthetic construct
  source 1..20: mol_type = other DNA
taacaaacgataagatcttt

SEQ ID NO: 178823 - DNA, 20 bp, synthetic construct
  source 1..20: mol_type = other DNA
gtaacaaacgataagatctt

SEQ ID NO: 178824 - DNA, 20 bp, synthetic construct
  source 1..20: mol_type = other DNA
ggtaacaaacgataagatct

SEQ ID NO: 178825 - DNA, 20 bp, synthetic construct
  source 1..20: mol_type = other DNA
tggtaacaaacgataagatc

SEQ ID NO: 178826 - DNA, 20 bp, synthetic construct
  source 1..20: mol_type = other DNA
ctggtaacaaacgataagat

SEQ ID NO: 178827 - DNA, 20 bp, synthetic construct
  source 1..20: mol_type = other DNA
actggtaacaaacgataaga

SEQ ID NO: 178828 - DNA, 20 bp, synthetic construct
  source 1..20: mol_type = other DNA
tactggtaacaaacgataag

SEQ ID NO: 178829 - DNA, 20 bp, synthetic construct
  source 1..20: mol_type = other DNA
ttactggtaacaaacgataa

SEQ ID NO: 178830 - DNA, 20 bp, synthetic construct
  source 1..20: mol_type = other DNA
cttactggtaacaaacgata

SEQ ID NO: 178831 - DNA, 20 bp, synthetic construct
  source 1..20: mol_type = other DNA
tcttactggtaacaaacgat

SEQ ID NO: 178832 - DNA, 20 bp, synthetic construct
  source 1..20: mol_type = other DNA
gtcttactggtaacaaacga

SEQ ID NO: 178833 - DNA, 20 bp, synthetic construct
  source 1..20: mol_type = other DNA
agtcttactggtaacaaacg

SEQ ID NO: 178834 - DNA, 20 bp, synthetic construct
  source 1..20: mol_type = other DNA
cagtcttactggtaacaaac

SEQ ID NO: 178835 - DNA, 20 bp, synthetic construct
  source 1..20: mol_type = other DNA
tcagtcttactggtaacaaa

SEQ ID NO: 178836 - DNA, 20 bp, synthetic construct
  source 1..20: mol_type = other DNA
ttcagtcttactggtaacaa

SEQ ID NO: 178837 - DNA, 20 bp, synthetic construct
  source 1..20: mol_type = other DNA
attcagtcttactggtaaca

SEQ ID NO: 178838 - DNA, 20 bp, synthetic construct
  source 1..20: mol_type = other DNA
aattcagtcttactggtaac

SEQ ID NO: 178839 - DNA, 20 bp, synthetic construct
  source 1..20: mol_type = other DNA
gaattcagtcttactggtaa

SEQ ID NO: 178840 - DNA, 20 bp, synthetic construct
  source 1..20: mol_type = other DNA
ggaattcagtcttactggta

SEQ ID NO: 178841 - DNA, 20 bp, synthetic construct
  source 1..20: mol_type = other DNA
tggaattcagtcttactggt

SEQ ID NO: 178842 - DNA, 20 bp, synthetic construct
  source 1..20: mol_type = other DNA
ctggaattcagtcttactgg

SEQ ID NO: 178843 - DNA, 20 bp, synthetic construct
  source 1..20: mol_type = other DNA
tctggaattcagtcttactg

SEQ ID NO: 178844 - DNA, 20 bp, synthetic construct
  source 1..20: mol_type = other DNA
ttctggaattcagtcttact

SEQ ID NO: 178845 - DNA, 20 bp, synthetic construct
  source 1..20: mol_type = other DNA
cttctggaattcagtcttac

SEQ ID NO: 178846 - DNA, 20 bp, synthetic construct
  source 1..20: mol_type = other DNA
gcttctggaattcagtctta

SEQ ID NO: 178847 - DNA, 20 bp, synthetic construct
  source 1..20: mol_type = other DNA
tgcttctggaattcagtctt

SEQ ID NO: 178848 - DNA, 20 bp, synthetic construct
  source 1..20: mol_type = other DNA
ttgcttctggaattcagtct

SEQ ID NO: 178849 - DNA, 20 bp, synthetic construct
  source 1..20: mol_type = other DNA
cttgcttctggaattcagtc

SEQ ID NO: 178850 - DNA, 20 bp, synthetic construct
  source 1..20: mol_type = other DNA
gcttgcttctggaattcagt

SEQ ID NO: 178851 - DNA, 20 bp, synthetic construct
  source 1..20: mol_type = other DNA
agcttgcttctggaattcag

SEQ ID NO: 178852 - DNA, 20 bp, synthetic construct
  source 1..20: mol_type = other DNA
tagcttgcttctggaattca

SEQ ID NO: 178853 - DNA, 20 bp, synthetic construct
  source 1..20: mol_type = other DNA
gtagcttgcttctggaattc

SEQ ID NO: 178854 - DNA, 20 bp, synthetic construct
  source 1..20: mol_type = other DNA
agtagcttgcttctggaatt

SEQ ID NO: 178855 - DNA, 20 bp, synthetic construct
  source 1..20: mol_type = other DNA
gagtagcttgcttctggaat

SEQ ID NO: 178856 - DNA, 20 bp, synthetic construct
  source 1..20: mol_type = other DNA
ggagtagcttgcttctggaa

SEQ ID NO: 178857 - DNA, 20 bp, synthetic construct
  source 1..20: mol_type = other DNA
gggagtagcttgcttctgga

SEQ ID NO: 178858 - DNA, 20 bp, synthetic construct
  source 1..20: mol_type = other DNA
agggagtagcttgcttctgg

SEQ ID NO: 178859 - DNA, 20 bp, synthetic construct
  source 1..20: mol_type = other DNA
gagggagtagcttgcttctg

SEQ ID NO: 178860 - DNA, 20 bp, synthetic construct
  source 1..20: mol_type = other DNA
tgagggagtagcttgcttct

SEQ ID NO: 178861 - DNA, 20 bp, synthetic construct
  source 1..20: mol_type = other DNA
atgagggagtagcttgcttc

SEQ ID NO: 178862 - DNA, 20 bp, synthetic construct
  source 1..20: mol_type = other DNA
aatgagggagtagcttgctt

SEQ ID NO: 178863 - DNA, 20 bp, synthetic construct
  source 1..20: mol_type = other DNA
aaatgagggagtagcttgct

SEQ ID NO: 178864 - DNA, 20 bp, synthetic construct
  source 1..20: mol_type = other DNA
caaatgagggagtagcttgc

SEQ ID NO: 178865 - DNA, 20 bp, synthetic construct
  source 1..20: mol_type = other DNA
acaaatgagggagtagcttg

SEQ ID NO: 178866 - DNA, 20 bp, synthetic construct
  source 1..20: mol_type = other DNA
cacaaatgagggagtagctt

SEQ ID NO: 178867 - DNA, 20 bp, synthetic construct
  source 1..20: mol_type = other DNA
ccacaaatgagggagtagct

SEQ ID NO: 178868 - DNA, 20 bp, synthetic construct
  source 1..20: mol_type = other DNA
cccacaaatgagggagtagc

SEQ ID NO: 178869 - DNA, 20 bp, synthetic construct
  source 1..20: mol_type = other DNA
gcccacaaatgagggagtag

SEQ ID NO: 178870 - DNA, 20 bp, synthetic construct
  source 1..20: mol_type = other DNA
ggcccacaaatgagggagta

SEQ ID NO: 178871 - DNA, 20 bp, synthetic construct
  source 1..20: mol_type = other DNA
gggcccacaaatgagggagt

SEQ ID NO: 178872 - DNA, 20 bp, synthetic construct
  source 1..20: mol_type = other DNA
ggggcccacaaatgagggag

SEQ ID NO: 178873 - DNA, 20 bp, synthetic construct
  source 1..20: mol_type = other DNA
aggggcccacaaatgaggga

SEQ ID NO: 178874 - DNA, 20 bp, synthetic construct
  source 1..20: mol_type = other DNA
caggggcccacaaatgaggg

SEQ ID NO: 178875 - DNA, 20 bp, synthetic construct
  source 1..20: mol_type = other DNA
acaggggcccacaaatgagg

SEQ ID NO: 178876 - DNA, 20 bp, synthetic construct
  source 1..20: mol_type = other DNA
aacaggggcccacaaatgag

SEQ ID NO: 178877 - DNA, 20 bp, synthetic construct
  source 1..20: mol_type = other DNA
taacaggggcccacaaatga

SEQ ID NO: 178878 - DNA, 20 bp, synthetic construct
  source 1..20: mol_type = other DNA
ataacaggggcccacaaatg

SEQ ID NO: 178879 - DNA, 20 bp, synthetic construct
  source 1..20: mol_type = other DNA
gataacaggggcccacaaat

SEQ ID NO: 178880 - DNA, 20 bp, synthetic construct
  source 1..20: mol_type = other DNA
tgataacaggggcccacaaa

SEQ ID NO: 178881 - DNA, 20 bp, synthetic construct
  source 1..20: mol_type = other DNA
gtgataacaggggcccacaa

SEQ ID NO: 178882 - DNA, 20 bp, synthetic construct
  source 1..20: mol_type = other DNA
agtgataacaggggcccaca

SEQ ID NO: 178883 - DNA, 20 bp, synthetic construct
  source 1..20: mol_type = other DNA
cagtgataacaggggcccac

SEQ ID NO: 178884 - DNA, 20 bp, synthetic construct
  source 1..20: mol_type = other DNA
ccagtgataacaggggccca

SEQ ID NO: 178885 - DNA, 20 bp, synthetic construct
  source 1..20: mol_type = other DNA
gccagtgataacaggggccc

SEQ ID NO: 178886 - DNA, 20 bp, synthetic construct
  source 1..20: mol_type = other DNA
agccagtgataacaggggcc

SEQ ID NO: 178887 - DNA, 20 bp, synthetic construct
  source 1..20: mol_type = other DNA
cagccagtgataacaggggc

SEQ ID NO: 178888 - DNA, 20 bp, synthetic construct
  source 1..20: mol_type = other DNA
gcagccagtgataacagggg

SEQ ID NO: 178889 - DNA, 20 bp, synthetic construct
  source 1..20: mol_type = other DNA
agcagccagtgataacaggg

SEQ ID NO: 178890 - DNA, 20 bp, synthetic construct
  source 1..20: mol_type = other DNA
aagcagccagtgataacagg

SEQ ID NO: 178891 - DNA, 20 bp, synthetic construct
  source 1..20: mol_type = other DNA
taagcagccagtgataacag

SEQ ID NO: 178892 - DNA, 20 bp, synthetic construct
  source 1..20: mol_type = other DNA
ctaagcagccagtgataaca

SEQ ID NO: 178893 - DNA, 20 bp, synthetic construct
  source 1..20: mol_type = other DNA
cctaagcagccagtgataac

SEQ ID NO: 178894 - DNA, 20 bp, synthetic construct
  source 1..20: mol_type = other DNA
ccctaagcagccagtgataa

SEQ ID NO: 178895 - DNA, 20 bp, synthetic construct
  source 1..20: mol_type = other DNA
accctaagcagccagtgata

SEQ ID NO: 178896 - DNA, 20 bp, synthetic construct
  source 1..20: mol_type = other DNA
aaccctaagcagccagtgat

SEQ ID NO: 178897 - DNA, 20 bp, synthetic construct
  source 1..20: mol_type = other DNA
caaccctaagcagccagtga

SEQ ID NO: 178898 - DNA, 20 bp, synthetic construct
  source 1..20: mol_type = other DNA
gcaaccctaagcagccagtg

SEQ ID NO: 178899 - DNA, 20 bp, synthetic construct
  source 1..20: mol_type = other DNA
ggcaaccctaagcagccagt

SEQ ID NO: 178900 - DNA, 20 bp, synthetic construct
  source 1..20: mol_type = other DNA
tggcaaccctaagcagccag

SEQ ID NO: 178901 - DNA, 20 bp, synthetic construct
  source 1..20: mol_type = other DNA
ttggcaaccctaagcagcca

SEQ ID NO: 178902 - DNA, 20 bp, synthetic construct
  source 1..20: mol_type = other DNA
cttggcaaccctaagcagcc

SEQ ID NO: 178903 - DNA, 20 bp, synthetic construct
  source 1..20: mol_type = other DNA
gcttggcaaccctaagcagc

SEQ ID NO: 178904 - DNA, 20 bp, synthetic construct
  source 1..20: mol_type = other DNA
ggcttggcaaccctaagcag

SEQ ID NO: 178905 - DNA, 20 bp, synthetic construct
  source 1..20: mol_type = other DNA
gggcttggcaaccctaagca

SEQ ID NO: 178906 - DNA, 20 bp, synthetic construct
  source 1..20: mol_type = other DNA
agggcttggcaaccctaagc

SEQ ID NO: 178907 - DNA, 20 bp, synthetic construct
  source 1..20: mol_type = other DNA
cagggcttggcaaccctaag

SEQ ID NO: 178908 - DNA, 20 bp, synthetic construct
  source 1..20: mol_type = other DNA
tcagggcttggcaaccctaa

SEQ ID NO: 178909 - DNA, 20 bp, synthetic construct
  source 1..20: mol_type = other DNA
ttcagggcttggcaacccta

SEQ ID NO: 178910 - DNA, 20 bp, synthetic construct
  source 1..20: mol_type = other DNA
attcagggcttggcaaccct

SEQ ID NO: 178911 - DNA, 20 bp, synthetic construct
  source 1..20: mol_type = other DNA
aattcagggcttggcaaccc

SEQ ID NO: 178912 - DNA, 20 bp, synthetic construct
  source 1..20: mol_type = other DNA
gaattcagggcttggcaacc

SEQ ID NO: 178913 - DNA, 20 bp, synthetic construct
  source 1..20: mol_type = other DNA
tgaattcagggcttggcaac

SEQ ID NO: 178914 - DNA, 20 bp, synthetic construct
  source 1..20: mol_type = other DNA
atgaattcagggcttggcaa

SEQ ID NO: 178915 - DNA, 20 bp, synthetic construct
  source 1..20: mol_type = other DNA
aatgaattcagggcttggca

SEQ ID NO: 178916 - DNA, 20 bp, synthetic construct
  source 1..20: mol_type = other DNA
aaatgaattcagggcttggc

SEQ ID NO: 178917 - DNA, 20 bp, synthetic construct
  source 1..20: mol_type = other DNA
caaatgaattcagggcttgg

SEQ ID NO: 178918 - DNA, 20 bp, synthetic construct
  source 1..20: mol_type = other DNA
acaaatgaattcagggcttg

SEQ ID NO: 178919 - DNA, 20 bp, synthetic construct
  source 1..20: mol_type = other DNA
gacaaatgaattcagggctt

SEQ ID NO: 178920 - DNA, 20 bp, synthetic construct
  source 1..20: mol_type = other DNA
tgacaaatgaattcagggct

SEQ ID NO: 178921 - DNA, 20 bp, synthetic construct
  source 1..20: mol_type = other DNA
ttgacaaatgaattcagggc

SEQ ID NO: 178922 - DNA, 20 bp, synthetic construct
  source 1..20: mol_type = other DNA
gttgacaaatgaattcaggg

SEQ ID NO: 178923 - DNA, 20 bp, synthetic construct
  source 1..20: mol_type = other DNA
agttgacaaatgaattcagg

SEQ ID NO: 178924 - DNA, 20 bp, synthetic construct
  source 1..20: mol_type = other DNA
tagttgacaaatgaattcag

SEQ ID NO: 178925 - DNA, 20 bp, synthetic construct
  source 1..20: mol_type = other DNA
ttagttgacaaatgaattca

SEQ ID NO: 178926 - DNA, 20 bp, synthetic construct
  source 1..20: mol_type = other DNA
cttagttgacaaatgaattc

SEQ ID NO: 178927 - DNA, 20 bp, synthetic construct
  source 1..20: mol_type = other DNA
tcttagttgacaaatgaatt

SEQ ID NO: 178928 - DNA, 20 bp, synthetic construct
  source 1..20: mol_type = other DNA
ctcttagttgacaaatgaat

SEQ ID NO: 178929 - DNA, 20 bp, synthetic construct
  source 1..20: mol_type = other DNA
tctcttagttgacaaatgaa

SEQ ID NO: 178930 - DNA, 20 bp, synthetic construct
  source 1..20: mol_type = other DNA
atctcttagttgacaaatga

SEQ ID NO: 178931 - DNA, 20 bp, synthetic construct
  source 1..20: mol_type = other DNA
aatctcttagttgacaaatg

SEQ ID NO: 178932 - DNA, 20 bp, synthetic construct
  source 1..20: mol_type = other DNA
aaatctcttagttgacaaat

SEQ ID NO: 178933 - DNA, 20 bp, synthetic construct
  source 1..20: mol_type = other DNA
aaaatctcttagttgacaaa

SEQ ID NO: 178934 - DNA, 20 bp, synthetic construct
  source 1..20: mol_type = other DNA
aaaaatctcttagttgacaa

SEQ ID NO: 178935 - DNA, 20 bp, synthetic construct
  source 1..20: mol_type = other DNA
caaaaatctcttagttgaca

SEQ ID NO: 178936 - DNA, 20 bp, synthetic construct
  source 1..20: mol_type = other DNA
ccaaaaatctcttagttgac

SEQ ID NO: 178937 - DNA, 20 bp, synthetic construct
  source 1..20: mol_type = other DNA
gccaaaaatctcttagttga

SEQ ID NO: 178938 - DNA, 20 bp, synthetic construct
  source 1..20: mol_type = other DNA
ggccaaaaatctcttagttg

SEQ ID NO: 178939 - DNA, 20 bp, synthetic construct
  source 1..20: mol_type = other DNA
tggccaaaaatctcttagtt

SEQ ID NO: 178940 - DNA, 20 bp, synthetic construct
  source 1..20: mol_type = other DNA
ttggccaaaaatctcttagt

SEQ ID NO: 178941 - DNA, 20 bp, synthetic construct
  source 1..20: mol_type = other DNA
cttggccaaaaatctcttag

SEQ ID NO: 178942 - DNA, 20 bp, synthetic construct
  source 1..20: mol_type = other DNA
tcttggccaaaaatctctta

SEQ ID NO: 178943 - DNA, 20 bp, synthetic construct
  source 1..20: mol_type = other DNA
atcttggccaaaaatctctt

SEQ ID NO: 178944 - DNA, 20 bp, synthetic construct
  source 1..20: mol_type = other DNA
aatcttggccaaaaatctct

SEQ ID NO: 178945 - DNA, 20 bp, synthetic construct
  source 1..20: mol_type = other DNA
taatcttggccaaaaatctc

SEQ ID NO: 178946 - DNA, 20 bp, synthetic construct
  source 1..20: mol_type = other DNA
ttaatcttggccaaaaatct

SEQ ID NO: 178947 - DNA, 20 bp, synthetic construct
  source 1..20: mol_type = other DNA
cttaatcttggccaaaaatc

SEQ ID NO: 178948 - DNA, 20 bp, synthetic construct
  source 1..20: mol_type = other DNA
tcttaatcttggccaaaaat

SEQ ID NO: 178949 - DNA, 20 bp, synthetic construct
  source 1..20: mol_type = other DNA
atcttaatcttggccaaaaa

SEQ ID NO: 178950 - DNA, 20 bp, synthetic construct
  source 1..20: mol_type = other DNA
aatcttaatcttggccaaaa

SEQ ID NO: 178951 - DNA, 20 bp, synthetic construct
  source 1..20: mol_type = other DNA
aaatcttaatcttggccaaa

SEQ ID NO: 178952 - DNA, 20 bp, synthetic construct
  source 1..20: mol_type = other DNA
gaaatcttaatcttggccaa

SEQ ID NO: 178953 - DNA, 20 bp, synthetic construct
  source 1..20: mol_type = other DNA
ggaaatcttaatcttggcca

SEQ ID NO: 178954 - DNA, 20 bp, synthetic construct
  source 1..20: mol_type = other DNA
gggaaatcttaatcttggcc

SEQ ID NO: 178955 - DNA, 20 bp, synthetic construct
  source 1..20: mol_type = other DNA
tgggaaatcttaatcttggc

SEQ ID NO: 178956 - DNA, 20 bp, synthetic construct
  source 1..20: mol_type = other DNA
atgggaaatcttaatcttgg

SEQ ID NO: 178957 - DNA, 20 bp, synthetic construct
  source 1..20: mol_type = other DNA
catgggaaatcttaatcttg

SEQ ID NO: 178958 - DNA, 20 bp, synthetic construct
  source 1..20: mol_type = other DNA
gcatgggaaatcttaatctt

SEQ ID NO: 178959 - DNA, 20 bp, synthetic construct
  source 1..20: mol_type = other DNA
ggcatgggaaatcttaatct

SEQ ID NO: 178960 - DNA, 20 bp, synthetic construct
  source 1..20: mol_type = other DNA
aggcatgggaaatcttaatc

SEQ ID NO: 178961 - DNA, 20 bp, synthetic construct
  source 1..20: mol_type = other DNA
gaggcatgggaaatcttaat

SEQ ID NO: 178962 - DNA, 20 bp, synthetic construct
  source 1..20: mol_type = other DNA
ggaggcatgggaaatcttaa

SEQ ID NO: 178963 - DNA, 20 bp, synthetic construct
  source 1..20: mol_type = other DNA
tggaggcatgggaaatctta

SEQ ID NO: 178964 - DNA, 20 bp, synthetic construct
  source 1..20: mol_type = other DNA
atggaggcatgggaaatctt

SEQ ID NO: 178965 - DNA, 20 bp, synthetic construct
  source 1..20: mol_type = other DNA
tatggaggcatgggaaatct

SEQ ID NO: 178966 - DNA, 20 bp, synthetic construct
  source 1..20: mol_type = other DNA
atatggaggcatgggaaatc

SEQ ID NO: 178967 - DNA, 20 bp, synthetic construct
  source 1..20: mol_type = other DNA
aatatggaggcatgggaaat

SEQ ID NO: 178968 - DNA, 20 bp, synthetic construct
  source 1..20: mol_type = other DNA
aaatatggaggcatgggaaa

SEQ ID NO: 178969 - DNA, 20 bp, synthetic construct
  source 1..20: mol_type = other DNA
gaaatatggaggcatgggaa

SEQ ID NO: 178970 - DNA, 20 bp, synthetic construct
  source 1..20: mol_type = other DNA
ggaaatatggaggcatggga

SEQ ID NO: 178971 - DNA, 20 bp, synthetic construct
  source 1..20: mol_type = other DNA
tggaaatatggaggcatggg

SEQ ID NO: 178972 - DNA, 20 bp, synthetic construct
  source 1..20: mol_type = other DNA
atggaaatatggaggcatgg

SEQ ID NO: 178973 - DNA, 20 bp, synthetic construct
  source 1..20: mol_type = other DNA
gatggaaatatggaggcatg

SEQ ID NO: 178974 - DNA, 20 bp, synthetic construct
  source 1..20: mol_type = other DNA
agatggaaatatggaggcat

SEQ ID NO: 178975 - DNA, 20 bp, synthetic construct
  source 1..20: mol_type = other DNA
cagatggaaatatggaggca

SEQ ID NO: 178976 - DNA, 20 bp, synthetic construct
  source 1..20: mol_type = other DNA
tcagatggaaatatggaggc

SEQ ID NO: 178977 - DNA, 20 bp, synthetic construct
  source 1..20: mol_type = other DNA
ctcagatggaaatatggagg

SEQ ID NO: 178978 - DNA, 20 bp, synthetic construct
  source 1..20: mol_type = other DNA
tctcagatggaaatatggag

SEQ ID NO: 178979 - DNA, 20 bp, synthetic construct
  source 1..20: mol_type = other DNA
ttctcagatggaaatatgga

SEQ ID NO: 178980 - DNA, 20 bp, synthetic construct
  source 1..20: mol_type = other DNA
tttctcagatggaaatatgg

SEQ ID NO: 178981 - DNA, 20 bp, synthetic construct
  source 1..20: mol_type = other DNA
atttctcagatggaaatatg

SEQ ID NO: 178982 - DNA, 20 bp, synthetic construct
  source 1..20: mol_type = other DNA
catttctcagatggaaatat

SEQ ID NO: 178983 - DNA, 20 bp, synthetic construct
  source 1..20: mol_type = other DNA
ccatttctcagatggaaata

SEQ ID NO: 178984 - DNA, 20 bp, synthetic construct
  source 1..20: mol_type = other DNA
tccatttctcagatggaaat

SEQ ID NO: 178985 - DNA, 20 bp, synthetic construct
  source 1..20: mol_type = other DNA
ctccatttctcagatggaaa

SEQ ID NO: 178986 - DNA, 20 bp, synthetic construct
  source 1..20: mol_type = other DNA
tctccatttctcagatggaa

SEQ ID NO: 178987 - DNA, 20 bp, synthetic construct
  source 1..20: mol_type = other DNA
atctccatttctcagatgga

SEQ ID NO: 178988 - DNA, 20 bp, synthetic construct
  source 1..20: mol_type = other DNA
aatctccatttctcagatgg

SEQ ID NO: 178989 - DNA, 20 bp, synthetic construct
  source 1..20: mol_type = other DNA
taatctccatttctcagatg

SEQ ID NO: 178990 - DNA, 20 bp, synthetic construct
  source 1..20: mol_type = other DNA
ataatctccatttctcagat

SEQ ID NO: 178991 - DNA, 20 bp, synthetic construct
  source 1..20: mol_type = other DNA
tataatctccatttctcaga

SEQ ID NO: 178992 - DNA, 20 bp, synthetic construct
  source 1..20: mol_type = other DNA
gtataatctccatttctcag

SEQ ID NO: 178993 - DNA, 20 bp, synthetic construct
  source 1..20: mol_type = other DNA
agtataatctccatttctca

SEQ ID NO: 178994 - DNA, 20 bp, synthetic construct
  source 1..20: mol_type = other DNA
cagtataatctccatttctc

SEQ ID NO: 178995 - DNA, 20 bp, synthetic construct
  source 1..20: mol_type = other DNA
acagtataatctccatttct

SEQ ID NO: 178996 - DNA, 20 bp, synthetic construct
  source 1..20: mol_type = other DNA
gacagtataatctccatttc

SEQ ID NO: 178997 - DNA, 20 bp, synthetic construct
  source 1..20: mol_type = other DNA
agacagtataatctccattt

SEQ ID NO: 178998 - DNA, 20 bp, synthetic construct
  source 1..20: mol_type = other DNA
aagacagtataatctccatt

SEQ ID NO: 178999 - DNA, 20 bp, synthetic construct
  source 1..20: mol_type = other DNA
gaagacagtataatctccat

SEQ ID NO: 179000 - DNA, 20 bp, synthetic construct
  source 1..20: mol_type = other DNA
ggaagacagtataatctcca

SEQ ID NO: 179001 - DNA, 20 bp, synthetic construct
  source 1..20: mol_type = other DNA
gggaagacagtataatctcc

SEQ ID NO: 179002 - DNA, 20 bp, synthetic construct
  source 1..20: mol_type = other DNA
ggggaagacagtataatctc

SEQ ID NO: 179003 - DNA, 20 bp, synthetic construct
  source 1..20: mol_type = other DNA
gggggaagacagtataatct

SEQ ID NO: 179004 - DNA, 20 bp, synthetic construct
  source 1..20: mol_type = other DNA
agggggaagacagtataatc

SEQ ID NO: 179005 - DNA, 20 bp, synthetic construct
  source 1..20: mol_type = other DNA
gagggggaagacagtataat

SEQ ID NO: 179006 - DNA, 20 bp, synthetic construct
  source 1..20: mol_type = other DNA
tgagggggaagacagtataa

SEQ ID NO: 179007 - DNA, 20 bp, synthetic construct
  source 1..20: mol_type = other DNA
ctgagggggaagacagtata

SEQ ID NO: 179008 - DNA, 20 bp, synthetic construct
  source 1..20: mol_type = other DNA
tctgagggggaagacagtat

SEQ ID NO: 179009 - DNA, 20 bp, synthetic construct
  source 1..20: mol_type = other DNA
ttctgagggggaagacagta

SEQ ID NO: 179010 - DNA, 20 bp, synthetic construct
  source 1..20: mol_type = other DNA
attctgagggggaagacagt

SEQ ID NO: 179011 - DNA, 20 bp, synthetic construct
  source 1..20: mol_type = other DNA
cattctgagggggaagacag

SEQ ID NO: 179012 - DNA, 20 bp, synthetic construct
  source 1..20: mol_type = other DNA
ccattctgagggggaagaca

SEQ ID NO: 179013 - DNA, 20 bp, synthetic construct
  source 1..20: mol_type = other DNA
tccattctgagggggaagac

SEQ ID NO: 179014 - DNA, 20 bp, synthetic construct
  source 1..20: mol_type = other DNA
atccattctgagggggaaga

SEQ ID NO: 179015 - DNA, 20 bp, synthetic construct
  source 1..20: mol_type = other DNA
catccattctgagggggaag

SEQ ID NO: 179016 - DNA, 20 bp, synthetic construct
  source 1..20: mol_type = other DNA
tcatccattctgagggggaa

SEQ ID NO: 179017 - DNA, 20 bp, synthetic construct
  source 1..20: mol_type = other DNA
atcatccattctgaggggga

SEQ ID NO: 179018 - DNA, 20 bp, synthetic construct
  source 1..20: mol_type = other DNA
tatcatccattctgaggggg

SEQ ID NO: 179019 - DNA, 20 bp, synthetic construct
  source 1..20: mol_type = other DNA
ttatcatccattctgagggg

SEQ ID NO: 179020 - DNA, 20 bp, synthetic construct
  source 1..20: mol_type = other DNA
attatcatccattctgaggg

SEQ ID NO: 179021 - DNA, 20 bp, synthetic construct
  source 1..20: mol_type = other DNA
cattatcatccattctgagg

SEQ ID NO: 179022 - DNA, 20 bp, synthetic construct
  source 1..20: mol_type = other DNA
acattatcatccattctgag

SEQ ID NO: 179023 - DNA, 20 bp, synthetic construct
  source 1..20: mol_type = other DNA
cacattatcatccattctga

SEQ ID NO: 179024 - DNA, 20 bp, synthetic construct
  source 1..20: mol_type = other DNA
ccacattatcatccattctg

SEQ ID NO: 179025 - DNA, 20 bp, synthetic construct
  source 1..20: mol_type = other DNA
accacattatcatccattct

SEQ ID NO: 179026 - DNA, 20 bp, synthetic construct
  source 1..20: mol_type = other DNA
gaccacattatcatccattc

SEQ ID NO: 179027 - DNA, 20 bp, synthetic construct
  source 1..20: mol_type = other DNA
agaccacattatcatccatt

SEQ ID NO: 179028 - DNA, 20 bp, synthetic construct
  source 1..20: mol_type = other DNA
gagaccacattatcatccat

SEQ ID NO: 179029 - DNA, 20 bp, synthetic construct
  source 1..20: mol_type = other DNA
agagaccacattatcatcca

SEQ ID NO: 179030 - DNA, 20 bp, synthetic construct
  source 1..20: mol_type = other DNA
gagagaccacattatcatcc

SEQ ID NO: 179031 - DNA, 20 bp, synthetic construct
  source 1..20: mol_type = other DNA
agagagaccacattatcatc

SEQ ID NO: 179032 - DNA, 20 bp, synthetic construct
  source 1..20: mol_type = other DNA
aagagagaccacattatcat

SEQ ID NO: 179033 - DNA, 20 bp, synthetic construct
  source 1..20: mol_type = other DNA
gaagagagaccacattatca

SEQ ID NO: 179034 - DNA, 20 bp, synthetic construct
  source 1..20: mol_type = other DNA
agaagagagaccacattatc

SEQ ID NO: 179035 - DNA, 20 bp, synthetic construct
  source 1..20: mol_type = other DNA
cagaagagagaccacattat

SEQ ID NO: 179036 - DNA, 20 bp, synthetic construct
  source 1..20: mol_type = other DNA
acagaagagagaccacatta

SEQ ID NO: 179037 - DNA, 20 bp, synthetic construct
  source 1..20: mol_type = other DNA
aacagaagagagaccacatt

SEQ ID NO: 179038 - DNA, 20 bp, synthetic construct
  source 1..20: mol_type = other DNA
gaacagaagagagaccacat

SEQ ID NO: 179039 - DNA, 20 bp, synthetic construct
  source 1..20: mol_type = other DNA
cgaacagaagagagaccaca

SEQ ID NO: 179040 - DNA, 20 bp, synthetic construct
  source 1..20: mol_type = other DNA
gcgaacagaagagagaccac

SEQ ID NO: 179041 - DNA, 20 bp, synthetic construct
  source 1..20: mol_type = other DNA
tgcgaacagaagagagacca

SEQ ID NO: 179042 - DNA, 20 bp, synthetic construct
  source 1..20: mol_type = other DNA
atgcgaacagaagagagacc

SEQ ID NO: 179043 - DNA, 20 bp, synthetic construct
  source 1..20: mol_type = other DNA
tatgcgaacagaagagagac

SEQ ID NO: 179044 - DNA, 20 bp, synthetic construct
  source 1..20: mol_type = other DNA
ctatgcgaacagaagagaga

SEQ ID NO: 179045 - DNA, 20 bp, synthetic construct
  source 1..20: mol_type = other DNA
actatgcgaacagaagagag

SEQ ID NO: 179046 - DNA, 20 bp, synthetic construct
  source 1..20: mol_type = other DNA
gactatgcgaacagaagaga

SEQ ID NO: 179047 - DNA, 20 bp, synthetic construct
  source 1..20: mol_type = other DNA
tgactatgcgaacagaagag

SEQ ID NO: 179048 - DNA, 20 bp, synthetic construct
  source 1..20: mol_type = other DNA
atgactatgcgaacagaaga

SEQ ID NO: 179049 - DNA, 20 bp, synthetic construct
  source 1..20: mol_type = other DNA
tatgactatgcgaacagaag

SEQ ID NO: 179050 - DNA, 20 bp, synthetic construct
  source 1..20: mol_type = other DNA
ctatgactatgcgaacagaa

SEQ ID NO: 179051 - DNA, 20 bp, synthetic construct
  source 1..20: mol_type = other DNA
tctatgactatgcgaacaga

SEQ ID NO: 179052 - DNA, 20 bp, synthetic construct
  source 1..20: mol_type = other DNA
ttctatgactatgcgaacag

SEQ ID NO: 179053 - DNA, 20 bp, synthetic construct
  source 1..20: mol_type = other DNA
gttctatgactatgcgaaca

SEQ ID NO: 179054 - DNA, 20 bp, synthetic construct
  source 1..20: mol_type = other DNA
agttctatgactatgcgaac

SEQ ID NO: 179055 - DNA, 20 bp, synthetic construct
  source 1..20: mol_type = other DNA
cagttctatgactatgcgaa

SEQ ID NO: 179056 - DNA, 20 bp, synthetic construct
  source 1..20: mol_type = other DNA
tcagttctatgactatgcga

SEQ ID NO: 179057 - DNA, 20 bp, synthetic construct
  source 1..20: mol_type = other DNA
ttcagttctatgactatgcg

SEQ ID NO: 179058 - DNA, 20 bp, synthetic construct
  source 1..20: mol_type = other DNA
tttcagttctatgactatgc

SEQ ID NO: 179059 - DNA, 20 bp, synthetic construct
  source 1..20: mol_type = other DNA
atttcagttctatgactatg

SEQ ID NO: 179060 - DNA, 20 bp, synthetic construct
  source 1..20: mol_type = other DNA
tatttcagttctatgactat

SEQ ID NO: 179061 - DNA, 20 bp, synthetic construct
  source 1..20: mol_type = other DNA
ttatttcagttctatgacta

SEQ ID NO: 179062 - DNA, 20 bp, synthetic construct
  source 1..20: mol_type = other DNA
tttatttcagttctatgact

SEQ ID NO: 179063 - DNA, 20 bp, synthetic construct
  source 1..20: mol_type = other DNA
ttttatttcagttctatgac

SEQ ID NO: 179064 - DNA, 20 bp, synthetic construct
  source 1..20: mol_type = other DNA
gttttatttcagttctatga

SEQ ID NO: 179065 - DNA, 20 bp, synthetic construct
  source 1..20: mol_type = other DNA
tgttttatttcagttctatg

SEQ ID NO: 179066 - DNA, 20 bp, synthetic construct
  source 1..20: mol_type = other DNA
ttgttttatttcagttctat

SEQ ID NO: 179067 - DNA, 20 bp, synthetic construct
  source 1..20: mol_type = other DNA
gttgttttatttcagttcta

SEQ ID NO: 179068 - DNA, 20 bp, synthetic construct
  source 1..20: mol_type = other DNA
agttgttttatttcagttct

SEQ ID NO: 179069 - DNA, 20 bp, synthetic construct
  source 1..20: mol_type = other DNA
aagttgttttatttcagttc

SEQ ID NO: 179070 - DNA, 20 bp, synthetic construct
  source 1..20: mol_type = other DNA
taagttgttttatttcagtt

SEQ ID NO: 179071 - DNA, 20 bp, synthetic construct
  source 1..20: mol_type = other DNA
ttaagttgttttatttcagt

SEQ ID NO: 179072 - DNA, 20 bp, synthetic construct
  source 1..20: mol_type = other DNA
cttaagttgttttatttcag

SEQ ID NO: 179073 - DNA, 20 bp, synthetic construct
  source 1..20: mol_type = other DNA
tcttaagttgttttatttca

SEQ ID NO: 179074 - DNA, 20 bp, synthetic construct
  source 1..20: mol_type = other DNA
ctcttaagttgttttatttc

SEQ ID NO: 179075 - DNA, 20 bp, synthetic construct
  source 1..20: mol_type = other DNA
tctcttaagttgttttattt

SEQ ID NO: 179076 - DNA, 20 bp, synthetic construct
  source 1..20: mol_type = other DNA
ttctcttaagttgttttatt

SEQ ID NO: 179077 - DNA, 20 bp, synthetic construct
  source 1..20: mol_type = other DNA
attctcttaagttgttttat

SEQ ID NO: 179078 - DNA, 20 bp, synthetic construct
  source 1..20: mol_type = other DNA
aattctcttaagttgtttta

SEQ ID NO: 179079 - DNA, 20 bp, synthetic construct
  source 1..20: mol_type = other DNA
gaattctcttaagttgtttt

SEQ ID NO: 179080 - DNA, 20 bp, synthetic construct
  source 1..20: mol_type = other DNA
ggaattctcttaagttgttt

SEQ ID NO: 179081 - DNA, 20 bp, synthetic construct
  source 1..20: mol_type = other DNA
aggaattctcttaagttgtt

SEQ ID NO: 179082 - DNA, 20 bp, synthetic construct
  source 1..20: mol_type = other DNA
aaggaattctcttaagttgt

SEQ ID NO: 179083 - DNA, 20 bp, synthetic construct
  source 1..20: mol_type = other DNA
aaaggaattctcttaagttg

SEQ ID NO: 179084 - DNA, 20 bp, synthetic construct
  source 1..20: mol_type = other DNA
caaaggaattctcttaagtt

SEQ ID NO: 179085 - DNA, 20 bp, synthetic construct
  source 1..20: mol_type = other DNA
tcaaaggaattctcttaagt

SEQ ID NO: 179086 - DNA, 20 bp, synthetic construct
  source 1..20: mol_type = other DNA
ctcaaaggaattctcttaag

SEQ ID NO: 179087 - DNA, 20 bp, synthetic construct
  source 1..20: mol_type = other DNA
gctcaaaggaattctcttaa

SEQ ID NO: 179088 - DNA, 20 bp, synthetic construct
  source 1..20: mol_type = other DNA
agctcaaaggaattctctta

SEQ ID NO: 179089 - DNA, 20 bp, synthetic construct
  source 1..20: mol_type = other DNA
aagctcaaaggaattctctt

SEQ ID NO: 179090 - DNA, 20 bp, synthetic construct
  source 1..20: mol_type = other DNA
gaagctcaaaggaattctct

SEQ ID NO: 179091 - DNA, 20 bp, synthetic construct
  source 1..20: mol_type = other DNA
agaagctcaaaggaattctc

SEQ ID NO: 179092 - DNA, 20 bp, synthetic construct
  source 1..20: mol_type = other DNA
gagaagctcaaaggaattct

SEQ ID NO: 179093 - DNA, 20 bp, synthetic construct
  source 1..20: mol_type = other DNA
tgagaagctcaaaggaattc

SEQ ID NO: 179094 - DNA, 20 bp, synthetic construct
  source 1..20: mol_type = other DNA
ctgagaagctcaaaggaatt

SEQ ID NO: 179095 - DNA, 20 bp, synthetic construct
  source 1..20: mol_type = other DNA
tctgagaagctcaaaggaat

SEQ ID NO: 179096 - DNA, 20 bp, synthetic construct
  source 1..20: mol_type = other DNA
ttctgagaagctcaaaggaa

SEQ ID NO: 179097 - DNA, 20 bp, synthetic construct
  source 1..20: mol_type = other DNA
cttctgagaagctcaaagga

SEQ ID NO: 179098 - DNA, 20 bp, synthetic construct
  source 1..20: mol_type = other DNA
acttctgagaagctcaaagg

SEQ ID NO: 179099 - DNA, 20 bp, synthetic construct
  source 1..20: mol_type = other DNA
cacttctgagaagctcaaag

SEQ ID NO: 179100 - DNA, 20 bp, synthetic construct
  source 1..20: mol_type = other DNA
gcacttctgagaagctcaaa

SEQ ID NO: 179101 - DNA, 20 bp, synthetic construct
  source 1..20: mol_type = other DNA
agcacttctgagaagctcaa

SEQ ID NO: 179102 - DNA, 20 bp, synthetic construct
  source 1..20: mol_type = other DNA
cagcacttctgagaagctca

SEQ ID NO: 179103 - DNA, 20 bp, synthetic construct
  source 1..20: mol_type = other DNA
gcagcacttctgagaagctc

SEQ ID NO: 179104 - DNA, 20 bp, synthetic construct
  source 1..20: mol_type = other DNA
tgcagcacttctgagaagct

SEQ ID NO: 179105 - DNA, 20 bp, synthetic construct
  source 1..20: mol_type = other DNA
ctgcagcacttctgagaagc

SEQ ID NO: 179106 - DNA, 20 bp, synthetic construct
  source 1..20: mol_type = other DNA
cctgcagcacttctgagaag

SEQ ID NO: 179107 - DNA, 20 bp, synthetic construct
  source 1..20: mol_type = other DNA
ccctgcagcacttctgagaa

SEQ ID NO: 179108 - DNA, 20 bp, synthetic construct
  source 1..20: mol_type = other DNA
gccctgcagcacttctgaga

SEQ ID NO: 179109 - DNA, 20 bp, synthetic construct
  source 1..20: mol_type = other DNA
agccctgcagcacttctgag

SEQ ID NO: 179110 - DNA, 20 bp, synthetic construct
  source 1..20: mol_type = other DNA
cagccctgcagcacttctga

SEQ ID NO: 179111 - DNA, 20 bp, synthetic construct
  source 1..20: mol_type = other DNA
ccagccctgcagcacttctg

SEQ ID NO: 179112 - DNA, 20 bp, synthetic construct
  source 1..20: mol_type = other DNA
cccagccctgcagcacttct

SEQ ID NO: 179113 - DNA, 20 bp, synthetic construct
  source 1..20: mol_type = other DNA
ccccagccctgcagcacttc

SEQ ID NO: 179114 - DNA, 20 bp, synthetic construct
  source 1..20: mol_type = other DNA
cccccagccctgcagcactt

SEQ ID NO: 179115 - DNA, 20 bp, synthetic construct
  source 1..20: mol_type = other DNA
tcccccagccctgcagcact

SEQ ID NO: 179116 - DNA, 20 bp, synthetic construct
  source 1..20: mol_type = other DNA
atcccccagccctgcagcac

SEQ ID NO: 179117 - DNA, 20 bp, synthetic construct
  source 1..20: mol_type = other DNA
catcccccagccctgcagca

SEQ ID NO: 179118 - DNA, 20 bp, synthetic construct
  source 1..20: mol_type = other DNA
gcatcccccagccctgcagc

SEQ ID NO: 179119 - DNA, 20 bp, synthetic construct
  source 1..20: mol_type = other DNA
ggcatcccccagccctgcag

SEQ ID NO: 179120 - DNA, 20 bp, synthetic construct
  source 1..20: mol_type = other DNA
aggcatcccccagccctgca

SEQ ID NO: 179121 - DNA, 20 bp, synthetic construct
  source 1..20: mol_type = other DNA
gaggcatcccccagccctgc

SEQ ID NO: 179122 - DNA, 20 bp, synthetic construct
  source 1..20: mol_type = other DNA
ggaggcatcccccagccctg

SEQ ID NO: 179123 - DNA, 20 bp, synthetic construct
  source 1..20: mol_type = other DNA
gggaggcatcccccagccct

SEQ ID NO: 179124 - DNA, 20 bp, synthetic construct
  source 1..20: mol_type = other DNA
tgggaggcatcccccagccc

SEQ ID NO: 179125 - DNA, 20 bp, synthetic construct
  source 1..20: mol_type = other DNA
ctgggaggcatcccccagcc

SEQ ID NO: 179126 - DNA, 20 bp, synthetic construct
  source 1..20: mol_type = other DNA
cctgggaggcatcccccagc

SEQ ID NO: 179127 - DNA, 20 bp, synthetic construct
  source 1..20: mol_type = other DNA
tcctgggaggcatcccccag

SEQ ID NO: 179128 - DNA, 20 bp, synthetic construct
  source 1..20: mol_type = other DNA
ctcctgggaggcatccccca

SEQ ID NO: 179129 - DNA, 20 bp, synthetic construct
  source 1..20: mol_type = other DNA
gctcctgggaggcatccccc

SEQ ID NO: 179130 - DNA, 20 bp, synthetic construct
  source 1..20: mol_type = other DNA
ggctcctgggaggcatcccc

SEQ ID NO: 179131 - DNA, 20 bp, synthetic construct
  source 1..20: mol_type = other DNA
cggctcctgggaggcatccc

SEQ ID NO: 179132 - DNA, 20 bp, synthetic construct
  source 1..20: mol_type = other DNA
gcggctcctgggaggcatcc

SEQ ID NO: 179133 - DNA, 20 bp, synthetic construct
  source 1..20: mol_type = other DNA
tgcggctcctgggaggcatc

SEQ ID NO: 179134 - DNA, 20 bp, synthetic construct
  source 1..20: mol_type = other DNA
ctgcggctcctgggaggcat

SEQ ID NO: 179135 - DNA, 20 bp, synthetic construct
  source 1..20: mol_type = other DNA
actgcggctcctgggaggca

SEQ ID NO: 179136 - DNA, 20 bp, synthetic construct
  source 1..20: mol_type = other DNA
gactgcggctcctgggaggc

SEQ ID NO: 179137 - DNA, 20 bp, synthetic construct
  source 1..20: mol_type = other DNA
tgactgcggctcctgggagg

SEQ ID NO: 179138 - DNA, 20 bp, synthetic construct
  source 1..20: mol_type = other DNA
ctgactgcggctcctgggag

SEQ ID NO: 179139 - DNA, 20 bp, synthetic construct
  source 1..20: mol_type = other DNA
cctgactgcggctcctggga

SEQ ID NO: 179140 - DNA, 20 bp, synthetic construct
  source 1..20: mol_type = other DNA
acctgactgcggctcctggg

SEQ ID NO: 179141 - DNA, 20 bp, synthetic construct
  source 1..20: mol_type = other DNA
cacctgactgcggctcctgg

SEQ ID NO: 179142 - DNA, 20 bp, synthetic construct
  source 1..20: mol_type = other DNA
gcacctgactgcggctcctg

SEQ ID NO: 179143 - DNA, 20 bp, synthetic construct
  source 1..20: mol_type = other DNA
agcacctgactgcggctcct

SEQ ID NO: 179144 - DNA, 20 bp, synthetic construct
  source 1..20: mol_type = other DNA
cagcacctgactgcggctcc

SEQ ID NO: 179145 - DNA, 20 bp, synthetic construct
  source 1..20: mol_type = other DNA
tcagcacctgactgcggctc

SEQ ID NO: 179146 - DNA, 20 bp, synthetic construct
  source 1..20: mol_type = other DNA
atcagcacctgactgcggct

SEQ ID NO: 179147 - DNA, 20 bp, synthetic construct
  source 1..20: mol_type = other DNA
gatcagcacctgactgcggc

SEQ ID NO: 179148 - DNA, 20 bp, synthetic construct
  source 1..20: mol_type = other DNA
agatcagcacctgactgcgg

SEQ ID NO: 179149 - DNA, 20 bp, synthetic construct
  source 1..20: mol_type = other DNA
cagatcagcacctgactgcg

SEQ ID NO: 179150 - DNA, 20 bp, synthetic construct
  source 1..20: mol_type = other DNA
tcagatcagcacctgactgc

SEQ ID NO: 179151 - DNA, 20 bp, synthetic construct
  source 1..20: mol_type = other DNA
ttcagatcagcacctgactg

SEQ ID NO: 179152 - DNA, 20 bp, synthetic construct
  source 1..20: mol_type = other DNA
cttcagatcagcacctgact

SEQ ID NO: 179153 - DNA, 20 bp, synthetic construct
  source 1..20: mol_type = other DNA
acttcagatcagcacctgac

SEQ ID NO: 179154 - DNA, 20 bp, synthetic construct
  source 1..20: mol_type = other DNA
gacttcagatcagcacctga

SEQ ID NO: 179155 - DNA, 20 bp, synthetic construct
  source 1..20: mol_type = other DNA
agacttcagatcagcacctg

SEQ ID NO: 179156 - DNA, 20 bp, synthetic construct
  source 1..20: mol_type = other DNA
aagacttcagatcagcacct

SEQ ID NO: 179157 - DNA, 20 bp, synthetic construct
  source 1..20: mol_type = other DNA
aaagacttcagatcagcacc

SEQ ID NO: 179158 - DNA, 20 bp, synthetic construct
  source 1..20: mol_type = other DNA
caaagacttcagatcagcac

SEQ ID NO: 179159 - DNA, 20 bp, synthetic construct
  source 1..20: mol_type = other DNA
ccaaagacttcagatcagca

SEQ ID NO: 179160 - DNA, 20 bp, synthetic construct
  source 1..20: mol_type = other DNA
accaaagacttcagatcagc

SEQ ID NO: 179161 - DNA, 20 bp, synthetic construct
  source 1..20: mol_type = other DNA
caccaaagacttcagatcag

SEQ ID NO: 179162 - DNA, 20 bp, synthetic construct
  source 1..20: mol_type = other DNA
ccaccaaagacttcagatca

SEQ ID NO: 179163 - DNA, 20 bp, synthetic construct
  source 1..20: mol_type = other DNA
cccaccaaagacttcagatc

SEQ ID NO: 179164 - DNA, 20 bp, synthetic construct
  source 1..20: mol_type = other DNA
gcccaccaaagacttcagat

SEQ ID NO: 179165 - DNA, 20 bp, synthetic construct
  source 1..20: mol_type = other DNA
agcccaccaaagacttcaga

SEQ ID NO: 179166 - DNA, 20 bp, synthetic construct
  source 1..20: mol_type = other DNA
cagcccaccaaagacttcag

SEQ ID NO: 179167 - DNA, 20 bp, synthetic construct
  source 1..20: mol_type = other DNA
tcagcccaccaaagacttca

SEQ ID NO: 179168 - DNA, 20 bp, synthetic construct
  source 1..20: mol_type = other DNA
gtcagcccaccaaagacttc

SEQ ID NO: 179169 - DNA, 20 bp, synthetic construct
  source 1..20: mol_type = other DNA
agtcagcccaccaaagactt

SEQ ID NO: 179170 - DNA, 20 bp, synthetic construct
  source 1..20: mol_type = other DNA
aagtcagcccaccaaagact

SEQ ID NO: 179171 - DNA, 20 bp, synthetic construct
  source 1..20: mol_type = other DNA
aaagtcagcccaccaaagac

SEQ ID NO: 179172 - DNA, 20 bp, synthetic construct
  source 1..20: mol_type = other DNA
taaagtcagcccaccaaaga

SEQ ID NO: 179173 - DNA, 20 bp, synthetic construct
  source 1..20: mol_type = other DNA
ctaaagtcagcccaccaaag

SEQ ID NO: 179174 - DNA, 20 bp, synthetic construct
  source 1..20: mol_type = other DNA
gctaaagtcagcccaccaaa

SEQ ID NO: 179175 - DNA, 20 bp, synthetic construct
  source 1..20: mol_type = other DNA
ggctaaagtcagcccaccaa

SEQ ID NO: 179176 - DNA, 20 bp, synthetic construct
  source 1..20: mol_type = other DNA
aggctaaagtcagcccacca

SEQ ID NO: 179177 - DNA, 20 bp, synthetic construct
  source 1..20: mol_type = other DNA
caggctaaagtcagcccacc

SEQ ID NO: 179178 - DNA, 20 bp, synthetic construct
  source 1..20: mol_type = other DNA
tcaggctaaagtcagcccac

SEQ ID NO: 179179 - DNA, 20 bp, synthetic construct
  source 1..20: mol_type = other DNA
gtcaggctaaagtcagccca

SEQ ID NO: 179180 - DNA, 20 bp, synthetic construct
  source 1..20: mol_type = other DNA
ggtcaggctaaagtcagccc

SEQ ID NO: 179181 - DNA, 20 bp, synthetic construct
  source 1..20: mol_type = other DNA
aggtcaggctaaagtcagcc

SEQ ID NO: 179182 - DNA, 20 bp, synthetic construct
  source 1..20: mol_type = other DNA
caggtcaggctaaagtcagc

SEQ ID NO: 179183 - DNA, 20 bp, synthetic construct
  source 1..20: mol_type = other DNA
tcaggtcaggctaaagtcag

SEQ ID NO: 179184 - DNA, 20 bp, synthetic construct
  source 1..20: mol_type = other DNA
ttcaggtcaggctaaagtca

SEQ ID NO: 179185 - DNA, 20 bp, synthetic construct
  source 1..20: mol_type = other DNA
tttcaggtcaggctaaagtc

SEQ ID NO: 179186 - DNA, 20 bp, synthetic construct
  source 1..20: mol_type = other DNA
atttcaggtcaggctaaagt

SEQ ID NO: 179187 - DNA, 20 bp, synthetic construct
  source 1..20: mol_type = other DNA
tatttcaggtcaggctaaag

SEQ ID NO: 179188 - DNA, 20 bp, synthetic construct
  source 1..20: mol_type = other DNA
ctatttcaggtcaggctaaa

SEQ ID NO: 179189 - DNA, 20 bp, synthetic construct
  source 1..20: mol_type = other DNA
actatttcaggtcaggctaa

SEQ ID NO: 179190 - DNA, 20 bp, synthetic construct
  source 1..20: mol_type = other DNA
tactatttcaggtcaggcta

SEQ ID NO: 179191 - DNA, 20 bp, synthetic construct
  source 1..20: mol_type = other DNA
atactatttcaggtcaggct

SEQ ID NO: 179192 - DNA, 20 bp, synthetic construct
  source 1..20: mol_type = other DNA
tatactatttcaggtcaggc

SEQ ID NO: 179193 - DNA, 20 bp, synthetic construct
  source 1..20: mol_type = other DNA
ctatactatttcaggtcagg

SEQ ID NO: 179194 - DNA, 20 bp, synthetic construct
  source 1..20: mol_type = other DNA
gctatactatttcaggtcag

SEQ ID NO: 179195 - DNA, 20 bp, synthetic construct
  source 1..20: mol_type = other DNA
agctatactatttcaggtca

SEQ ID NO: 179196 - DNA, 20 bp, synthetic construct
  source 1..20: mol_type = other DNA
cagctatactatttcaggtc

SEQ ID NO: 179197 - DNA, 20 bp, synthetic construct
  source 1..20: mol_type = other DNA
gcagctatactatttcaggt

SEQ ID NO: 179198 - DNA, 20 bp, synthetic construct
  source 1..20: mol_type = other DNA
agcagctatactatttcagg

SEQ ID NO: 179199 - DNA, 20 bp, synthetic construct
  source 1..20: mol_type = other DNA
cagcagctatactatttcag

SEQ ID NO: 179200 - DNA, 20 bp, synthetic construct
  source 1..20: mol_type = other DNA
gcagcagctatactatttca

SEQ ID NO: 179201 - DNA, 20 bp, synthetic construct
  source 1..20: mol_type = other DNA
ggcagcagctatactatttc

SEQ ID NO: 179202 - DNA, 20 bp, synthetic construct
  source 1..20: mol_type = other DNA
tggcagcagctatactattt

SEQ ID NO: 179203 - DNA, 20 bp, synthetic construct
  source 1..20: mol_type = other DNA
gtggcagcagctatactatt

SEQ ID NO: 179204 - DNA, 20 bp, synthetic construct
  source 1..20: mol_type = other DNA
ggtggcagcagctatactat

SEQ ID NO: 179205 - DNA, 20 bp, synthetic construct
  source 1..20: mol_type = other DNA
aggtggcagcagctatacta

SEQ ID NO: 179206 - DNA, 20 bp, synthetic construct
  source 1..20: mol_type = other DNA
caggtggcagcagctatact

SEQ ID NO: 179207 - DNA, 20 bp, synthetic construct
  source 1..20: mol_type = other DNA
ccaggtggcagcagctatac

SEQ ID NO: 179208 - DNA, 20 bp, synthetic construct
  source 1..20: mol_type = other DNA
gccaggtggcagcagctata

SEQ ID NO: 179209 - DNA, 20 bp, synthetic construct
  source 1..20: mol_type = other DNA
agccaggtggcagcagctat

SEQ ID NO: 179210 - DNA, 20 bp, synthetic construct
  source 1..20: mol_type = other DNA
gagccaggtggcagcagcta

SEQ ID NO: 179211 - DNA, 20 bp, synthetic construct
  source 1..20: mol_type = other DNA
ggagccaggtggcagcagct

SEQ ID NO: 179212 - DNA, 20 bp, synthetic construct
  source 1..20: mol_type = other DNA
gggagccaggtggcagcagc

SEQ ID NO: 179213 - DNA, 20 bp, synthetic construct
  source 1..20: mol_type = other DNA
agggagccaggtggcagcag

SEQ ID NO: 179214 - DNA, 20 bp, synthetic construct
  source 1..20: mol_type = other DNA
aagggagccaggtggcagca

SEQ ID NO: 179215 - DNA, 20 bp, synthetic construct
  source 1..20: mol_type = other DNA
taagggagccaggtggcagc

SEQ ID NO: 179216 - DNA, 20 bp, synthetic construct
  source 1..20: mol_type = other DNA
ctaagggagccaggtggcag

SEQ ID NO: 179217 - DNA, 20 bp, synthetic construct
  source 1..20: mol_type = other DNA
gctaagggagccaggtggca

SEQ ID NO: 179218 - DNA, 20 bp, synthetic construct
  source 1..20: mol_type = other DNA
cgctaagggagccaggtggc

SEQ ID NO: 179219 - DNA, 20 bp, synthetic construct
  source 1..20: mol_type = other DNA
acgctaagggagccaggtgg

SEQ ID NO: 179220 - DNA, 20 bp, synthetic construct
  source 1..20: mol_type = other DNA
gacgctaagggagccaggtg

SEQ ID NO: 179221 - DNA, 20 bp, synthetic construct
  source 1..20: mol_type = other DNA
tgacgctaagggagccaggt

SEQ ID NO: 179222 - DNA, 20 bp, synthetic construct
  source 1..20: mol_type = other DNA
ctgacgctaagggagccagg

SEQ ID NO: 179223 - DNA, 20 bp, synthetic construct
  source 1..20: mol_type = other DNA
actgacgctaagggagccag

SEQ ID NO: 179224 - DNA, 20 bp, synthetic construct
  source 1..20: mol_type = other DNA
gactgacgctaagggagcca

SEQ ID NO: 179225 - DNA, 20 bp, synthetic construct
  source 1..20: mol_type = other DNA
tgactgacgctaagggagcc

SEQ ID NO: 179226 - DNA, 20 bp, synthetic construct
  source 1..20: mol_type = other DNA
ctgactgacgctaagggagc

SEQ ID NO: 179227 - DNA, 20 bp, synthetic construct
  source 1..20: mol_type = other DNA
tctgactgacgctaagggag

SEQ ID NO: 179228 - DNA, 20 bp, synthetic construct
  source 1..20: mol_type = other DNA
gtctgactgacgctaaggga

SEQ ID NO: 179229 - DNA, 20 bp, synthetic construct
  source 1..20: mol_type = other DNA
cgtctgactgacgctaaggg

SEQ ID NO: 179230 - DNA, 20 bp, synthetic construct
  source 1..20: mol_type = other DNA
ccgtctgactgacgctaagg

SEQ ID NO: 179231 - DNA, 20 bp, synthetic construct
  source 1..20: mol_type = other DNA
accgtctgactgacgctaag

SEQ ID NO: 179232 - DNA, 20 bp, synthetic construct
  source 1..20: mol_type = other DNA
caccgtctgactgacgctaa

SEQ ID NO: 179233 - DNA, 20 bp, synthetic construct
  source 1..20: mol_type = other DNA
gcaccgtctgactgacgcta

SEQ ID NO: 179234 - DNA, 20 bp, synthetic construct
  source 1..20: mol_type = other DNA
tgcaccgtctgactgacgct

SEQ ID NO: 179235 - DNA, 20 bp, synthetic construct
  source 1..20: mol_type = other DNA
ctgcaccgtctgactgacgc

SEQ ID NO: 179236 - DNA, 20 bp, synthetic construct
  source 1..20: mol_type = other DNA
gctgcaccgtctgactgacg

SEQ ID NO: 179237 - DNA, 20 bp, synthetic construct
  source 1..20: mol_type = other DNA
agctgcaccgtctgactgac

SEQ ID NO: 179238 - DNA, 20 bp, synthetic construct
  source 1..20: mol_type = other DNA
cagctgcaccgtctgactga

SEQ ID NO: 179239 - DNA, 20 bp, synthetic construct
  source 1..20: mol_type = other DNA
ccagctgcaccgtctgactg

SEQ ID NO: 179240 - DNA, 20 bp, synthetic construct
  source 1..20: mol_type = other DNA
accagctgcaccgtctgact

SEQ ID NO: 179241 - DNA, 20 bp, synthetic construct
  source 1..20: mol_type = other DNA
aaccagctgcaccgtctgac

SEQ ID NO: 179242 - DNA, 20 bp, synthetic construct
  source 1..20: mol_type = other DNA
gaaccagctgcaccgtctga

SEQ ID NO: 179243 - DNA, 20 bp, synthetic construct
  source 1..20: mol_type = other DNA
ggaaccagctgcaccgtctg

SEQ ID NO: 179244 - DNA, 20 bp, synthetic construct
  source 1..20: mol_type = other DNA
aggaaccagctgcaccgtct

SEQ ID NO: 179245 - DNA, 20 bp, synthetic construct
  source 1..20: mol_type = other DNA
taggaaccagctgcaccgtc

SEQ ID NO: 179246 - DNA, 20 bp, synthetic construct
  source 1..20: mol_type = other DNA
ctaggaaccagctgcaccgt

SEQ ID NO: 179247 - DNA, 20 bp, synthetic construct
  source 1..20: mol_type = other DNA
cctaggaaccagctgcaccg

SEQ ID NO: 179248 - DNA, 20 bp, synthetic construct
  source 1..20: mol_type = other DNA
ccctaggaaccagctgcacc

SEQ ID NO: 179249 - DNA, 20 bp, synthetic construct
  source 1..20: mol_type = other DNA
cccctaggaaccagctgcac

SEQ ID NO: 179250 - DNA, 20 bp, synthetic construct
  source 1..20: mol_type = other DNA
acccctaggaaccagctgca

SEQ ID NO: 179251 - DNA, 20 bp, synthetic construct
  source 1..20: mol_type = other DNA
cacccctaggaaccagctgc

SEQ ID NO: 179252 - DNA, 20 bp, synthetic construct
  source 1..20: mol_type = other DNA
tcacccctaggaaccagctg

SEQ ID NO: 179253 - DNA, 20 bp, synthetic construct
  source 1..20: mol_type = other DNA
ctcacccctaggaaccagct

SEQ ID NO: 179254 - DNA, 20 bp, synthetic construct
  source 1..20: mol_type = other DNA
cctcacccctaggaaccagc

SEQ ID NO: 179255 - DNA, 20 bp, synthetic construct
  source 1..20: mol_type = other DNA
ccctcacccctaggaaccag

SEQ ID NO: 179256 - DNA, 20 bp, synthetic construct
  source 1..20: mol_type = other DNA
gccctcacccctaggaacca

SEQ ID NO: 179257 - DNA, 20 bp, synthetic construct
  source 1..20: mol_type = other DNA
agccctcacccctaggaacc

SEQ ID NO: 179258 - DNA, 20 bp, synthetic construct
  source 1..20: mol_type = other DNA
cagccctcacccctaggaac

SEQ ID NO: 179259 - DNA, 20 bp, synthetic construct
  source 1..20: mol_type = other DNA
tcagccctcacccctaggaa

SEQ ID NO: 179260 - DNA, 20 bp, synthetic construct
  source 1..20: mol_type = other DNA
ctcagccctcacccctagga

SEQ ID NO: 179261 - DNA, 20 bp, synthetic construct
  source 1..20: mol_type = other DNA
gctcagccctcacccctagg

SEQ ID NO: 179262 - DNA, 20 bp, synthetic construct
  source 1..20: mol_type = other DNA
ggctcagccctcacccctag

SEQ ID NO: 179263 - DNA, 20 bp, synthetic construct
  source 1..20: mol_type = other DNA
tggctcagccctcaccccta

SEQ ID NO: 179264 - DNA, 20 bp, synthetic construct
  source 1..20: mol_type = other DNA
ctggctcagccctcacccct

SEQ ID NO: 179265 - DNA, 20 bp, synthetic construct
  source 1..20: mol_type = other DNA
gctggctcagccctcacccc

SEQ ID NO: 179266 - DNA, 20 bp, synthetic construct
  source 1..20: mol_type = other DNA
tgctggctcagccctcaccc

SEQ ID NO: 179267 - DNA, 20 bp, synthetic construct
  source 1..20: mol_type = other DNA
ctgctggctcagccctcacc

SEQ ID NO: 179268 - DNA, 20 bp, synthetic construct
  source 1..20: mol_type = other DNA
cctgctggctcagccctcac

SEQ ID NO: 179269 - DNA, 20 bp, synthetic construct
  source 1..20: mol_type = other DNA
ccctgctggctcagccctca

SEQ ID NO: 179270 - DNA, 20 bp, synthetic construct
  source 1..20: mol_type = other DNA
accctgctggctcagccctc

SEQ ID NO: 179271 - DNA, 20 bp, synthetic construct
  source 1..20: mol_type = other DNA
gaccctgctggctcagccct

SEQ ID NO: 179272 - DNA, 20 bp, synthetic construct
  source 1..20: mol_type = other DNA
ggaccctgctggctcagccc

SEQ ID NO: 179273 - DNA, 20 bp, synthetic construct
  source 1..20: mol_type = other DNA
cggaccctgctggctcagcc

SEQ ID NO: 179274 - DNA, 20 bp, synthetic construct
  source 1..20: mol_type = other DNA
acggaccctgctggctcagc

SEQ ID NO: 179275 - DNA, 20 bp, synthetic construct
  source 1..20: mol_type = other DNA
cacggaccctgctggctcag

SEQ ID NO: 179276 - DNA, 20 bp, synthetic construct
  source 1..20: mol_type = other DNA
gcacggaccctgctggctca

SEQ ID NO: 179277 - DNA, 20 bp, synthetic construct
  source 1..20: mol_type = other DNA
ggcacggaccctgctggctc

SEQ ID NO: 179278 - DNA, 20 bp, synthetic construct
  source 1..20: mol_type = other DNA
gggcacggaccctgctggct

SEQ ID NO: 179279 - DNA, 20 bp, synthetic construct
  source 1..20: mol_type = other DNA
tgggcacggaccctgctggc

SEQ ID NO: 179280 - DNA, 20 bp, synthetic construct
  source 1..20: mol_type = other DNA
ctgggcacggaccctgctgg

SEQ ID NO: 179281 - DNA, 20 bp, synthetic construct
  source 1..20: mol_type = other DNA
cctgggcacggaccctgctg

SEQ ID NO: 179282 - DNA, 20 bp, synthetic construct
  source 1..20: mol_type = other DNA
tcctgggcacggaccctgct

SEQ ID NO: 179283 - DNA, 20 bp, synthetic construct
  source 1..20: mol_type = other DNA
ctcctgggcacggaccctgc

SEQ ID NO: 179284 - DNA, 20 bp, synthetic construct
  source 1..20: mol_type = other DNA
cctcctgggcacggaccctg

SEQ ID NO: 179285 - DNA, 20 bp, synthetic construct
  source 1..20: mol_type = other DNA
ccctcctgggcacggaccct

SEQ ID NO: 179286 - DNA, 20 bp, synthetic construct
  source 1..20: mol_type = other DNA
tccctcctgggcacggaccc

SEQ ID NO: 179287 - DNA, 20 bp, synthetic construct
  source 1..20: mol_type = other DNA
atccctcctgggcacggacc

SEQ ID NO: 179288 - DNA, 20 bp, synthetic construct
  source 1..20: mol_type = other DNA
catccctcctgggcacggac

SEQ ID NO: 179289 - DNA, 20 bp, synthetic construct
  source 1..20: mol_type = other DNA
gcatccctcctgggcacgga

SEQ ID NO: 179290 - DNA, 20 bp, synthetic construct
  source 1..20: mol_type = other DNA
tgcatccctcctgggcacgg

SEQ ID NO: 179291 - DNA, 20 bp, synthetic construct
  source 1..20: mol_type = other DNA
atgcatccctcctgggcacg

SEQ ID NO: 179292 - DNA, 20 bp, synthetic construct
  source 1..20: mol_type = other DNA
catgcatccctcctgggcac

SEQ ID NO: 179293 - DNA, 20 bp, synthetic construct
  source 1..20: mol_type = other DNA
ccatgcatccctcctgggca

SEQ ID NO: 179294 - DNA, 20 bp, synthetic construct
  source 1..20: mol_type = other DNA
cccatgcatccctcctgggc

SEQ ID NO: 179295 - DNA, 20 bp, synthetic construct
  source 1..20: mol_type = other DNA
acccatgcatccctcctggg

SEQ ID NO: 179296 - DNA, 20 bp, synthetic construct
  source 1..20: mol_type = other DNA
cacccatgcatccctcctgg

SEQ ID NO: 179297 - DNA, 20 bp, synthetic construct
  source 1..20: mol_type = other DNA
ccacccatgcatccctcctg

SEQ ID NO: 179298 - DNA, 20 bp, synthetic construct
  source 1..20: mol_type = other DNA
gccacccatgcatccctcct

SEQ ID NO: 179299 - DNA, 20 bp, synthetic construct
  source 1..20: mol_type = other DNA
ggccacccatgcatccctcc

SEQ ID NO: 179300 - DNA, 20 bp, synthetic construct
  source 1..20: mol_type = other DNA
tggccacccatgcatccctc

SEQ ID NO: 179301 - DNA, 20 bp, synthetic construct
  source 1..20: mol_type = other DNA
gtggccacccatgcatccct

SEQ ID NO: 179302 - DNA, 20 bp, synthetic construct
  source 1..20: mol_type = other DNA
tgtggccacccatgcatccc

SEQ ID NO: 179303 - DNA, 20 bp, synthetic construct
  source 1..20: mol_type = other DNA
ctgtggccacccatgcatcc

SEQ ID NO: 179304 - DNA, 20 bp, synthetic construct
  source 1..20: mol_type = other DNA
gctgtggccacccatgcatc

SEQ ID NO: 179305 - DNA, 20 bp, synthetic construct
  source 1..20: mol_type = other DNA
ggctgtggccacccatgcat

SEQ ID NO: 179306 - DNA, 20 bp, synthetic construct
  source 1..20: mol_type = other DNA
gggctgtggccacccatgca

SEQ ID NO: 179307 - DNA, 20 bp, synthetic construct
  source 1..20: mol_type = other DNA
tgggctgtggccacccatgc

SEQ ID NO: 179308 - DNA, 20 bp, synthetic construct
  source 1..20: mol_type = other DNA
ctgggctgtggccacccatg

SEQ ID NO: 179309 - DNA, 20 bp, synthetic construct
  source 1..20: mol_type = other DNA
gctgggctgtggccacccat

SEQ ID NO: 179310 - DNA, 20 bp, synthetic construct
  source 1..20: mol_type = other DNA
ggctgggctgtggccaccca

SEQ ID NO: 179311 - DNA, 20 bp, synthetic construct
  source 1..20: mol_type = other DNA
aggctgggctgtggccaccc

SEQ ID NO: 179312 - DNA, 20 bp, synthetic construct
  source 1..20: mol_type = other DNA
caggctgggctgtggccacc

SEQ ID NO: 179313 - DNA, 20 bp, synthetic construct
  source 1..20: mol_type = other DNA
gcaggctgggctgtggccac

SEQ ID NO: 179314 - DNA, 20 bp, synthetic construct
  source 1..20: mol_type = other DNA
tgcaggctgggctgtggcca

SEQ ID NO: 179315 - DNA, 20 bp, synthetic construct
  source 1..20: mol_type = other DNA
gtgcaggctgggctgtggcc

SEQ ID NO: 179316 - DNA, 20 bp, synthetic construct
  source 1..20: mol_type = other DNA
agtgcaggctgggctgtggc

SEQ ID NO: 179317 - DNA, 20 bp, synthetic construct
  source 1..20: mol_type = other DNA
cagtgcaggctgggctgtgg

SEQ ID NO: 179318 - DNA, 20 bp, synthetic construct
  source 1..20: mol_type = other DNA
tcagtgcaggctgggctgtg

SEQ ID NO: 179319 - DNA, 20 bp, synthetic construct
  source 1..20: mol_type = other DNA
atcagtgcaggctgggctgt

SEQ ID NO: 179320 - DNA, 20 bp, synthetic construct
  source 1..20: mol_type = other DNA
gatcagtgcaggctgggctg

SEQ ID NO: 179321 - DNA, 20 bp, synthetic construct
  source 1..20: mol_type = other DNA
agatcagtgcaggctgggct

SEQ ID NO: 179322 - DNA, 20 bp, synthetic construct
  source 1..20: mol_type = other DNA
aagatcagtgcaggctgggc

SEQ ID NO: 179323 - DNA, 20 bp, synthetic construct
  source 1..20: mol_type = other DNA
caagatcagtgcaggctggg

SEQ ID NO: 179324 - DNA, 20 bp, synthetic construct
  source 1..20: mol_type = other DNA
acaagatcagtgcaggctgg

SEQ ID NO: 179325 - DNA, 20 bp, synthetic construct
  source 1..20: mol_type = other DNA
gacaagatcagtgcaggctg

SEQ ID NO: 179326 - DNA, 20 bp, synthetic construct
  source 1..20: mol_type = other DNA
agacaagatcagtgcaggct

SEQ ID NO: 179327 - DNA, 20 bp, synthetic construct
  source 1..20: mol_type = other DNA
cagacaagatcagtgcaggc

SEQ ID NO: 179328 - DNA, 20 bp, synthetic construct
  source 1..20: mol_type = other DNA
acagacaagatcagtgcagg

SEQ ID NO: 179329 - DNA, 20 bp, synthetic construct
  source 1..20: mol_type = other DNA
gacagacaagatcagtgcag

SEQ ID NO: 179330 - DNA, 20 bp, synthetic construct
  source 1..20: mol_type = other DNA
ggacagacaagatcagtgca

SEQ ID NO: 179331 - DNA, 20 bp, synthetic construct
  source 1..20: mol_type = other DNA
gggacagacaagatcagtgc

SEQ ID NO: 179332 - DNA, 20 bp, synthetic construct
  source 1..20: mol_type = other DNA
ggggacagacaagatcagtg

SEQ ID NO: 179333 - DNA, 20 bp, synthetic construct
  source 1..20: mol_type = other DNA
aggggacagacaagatcagt

SEQ ID NO: 179334 - DNA, 20 bp, synthetic construct
  source 1..20: mol_type = other DNA
aaggggacagacaagatcag

SEQ ID NO: 179335 - DNA, 20 bp, synthetic construct
  source 1..20: mol_type = other DNA
gaaggggacagacaagatca

SEQ ID NO: 179336 - DNA, 20 bp, synthetic construct
  source 1..20: mol_type = other DNA
agaaggggacagacaagatc

SEQ ID NO: 179337 - DNA, 20 bp, synthetic construct
  source 1..20: mol_type = other DNA
aagaaggggacagacaagat

SEQ ID NO: 179338 - DNA, 20 bp, synthetic construct
  source 1..20: mol_type = other DNA
aaagaaggggacagacaaga

SEQ ID NO: 179339 - DNA, 20 bp, synthetic construct
  source 1..20: mol_type = other DNA
caaagaaggggacagacaag

SEQ ID NO: 179340 - DNA, 20 bp, synthetic construct
  source 1..20: mol_type = other DNA
ccaaagaaggggacagacaa

SEQ ID NO: 179341 - DNA, 20 bp, synthetic construct
  source 1..20: mol_type = other DNA
tccaaagaaggggacagaca

SEQ ID NO: 179342 - DNA, 20 bp, synthetic construct
  source 1..20: mol_type = other DNA
ttccaaagaaggggacagac

SEQ ID NO: 179343 - DNA, 20 bp, synthetic construct
  source 1..20: mol_type = other DNA
cttccaaagaaggggacaga

SEQ ID NO: 179344 - DNA, 20 bp, synthetic construct
  source 1..20: mol_type = other DNA
ccttccaaagaaggggacag

SEQ ID NO: 179345 - DNA, 20 bp, synthetic construct
  source 1..20: mol_type = other DNA
tccttccaaagaaggggaca

SEQ ID NO: 179346 - DNA, 20 bp, synthetic construct
  source 1..20: mol_type = other DNA
ttccttccaaagaaggggac

SEQ ID NO: 179347 - DNA, 20 bp, synthetic construct
  source 1..20: mol_type = other DNA
cttccttccaaagaagggga

SEQ ID NO: 179348 - DNA, 20 bp, synthetic construct
  source 1..20: mol_type = other DNA
ccttccttccaaagaagggg

SEQ ID NO: 179349 - DNA, 20 bp, synthetic construct
  source 1..20: mol_type = other DNA
tccttccttccaaagaaggg

SEQ ID NO: 179350 - DNA, 20 bp, synthetic construct
  source 1..20: mol_type = other DNA
ctccttccttccaaagaagg

SEQ ID NO: 179351 - DNA, 20 bp, synthetic construct
  source 1..20: mol_type = other DNA
gctccttccttccaaagaag

SEQ ID NO: 179352 - DNA, 20 bp, synthetic construct
  source 1..20: mol_type = other DNA
ggctccttccttccaaagaa

SEQ ID NO: 179353 - DNA, 20 bp, synthetic construct
  source 1..20: mol_type = other DNA
gggctccttccttccaaaga

SEQ ID NO: 179354 - DNA, 20 bp, synthetic construct
  source 1..20: mol_type = other DNA
ggggctccttccttccaaag

SEQ ID NO: 179355 - DNA, 20 bp, synthetic construct
  source 1..20: mol_type = other DNA
tggggctccttccttccaaa

SEQ ID NO: 179356 - DNA, 20 bp, synthetic construct
  source 1..20: mol_type = other DNA
ttggggctccttccttccaa

SEQ ID NO: 179357 - DNA, 20 bp, synthetic construct
  source 1..20: mol_type = other DNA
tttggggctccttccttcca

SEQ ID NO: 179358 - DNA, 20 bp, synthetic construct
  source 1..20: mol_type = other DNA
gtttggggctccttccttcc

SEQ ID NO: 179359 - DNA, 20 bp, synthetic construct
  source 1..20: mol_type = other DNA
ggtttggggctccttccttc

SEQ ID NO: 179360 - DNA, 20 bp, synthetic construct
  source 1..20: mol_type = other DNA
tggtttggggctccttcctt

SEQ ID NO: 179361 - DNA, 20 bp, synthetic construct
  source 1..20: mol_type = other DNA
ctggtttggggctccttcct

SEQ ID NO: 179362 - DNA, 20 bp, synthetic construct
  source 1..20: mol_type = other DNA
cctggtttggggctccttcc

SEQ ID NO: 179363 - DNA, 20 bp, synthetic construct
  source 1..20: mol_type = other DNA
ccctggtttggggctccttc

SEQ ID NO: 179364 - DNA, 20 bp, synthetic construct
  source 1..20: mol_type = other DNA
accctggtttggggctcctt

SEQ ID NO: 179365 - DNA, 20 bp, synthetic construct
  source 1..20: mol_type = other DNA
caccctggtttggggctcct

SEQ ID NO: 179366 - DNA, 20 bp, synthetic construct
  source 1..20: mol_type = other DNA
gcaccctggtttggggctcc

SEQ ID NO: 179367 - DNA, 20 bp, synthetic construct
  source 1..20: mol_type = other DNA
tgcaccctggtttggggctc

SEQ ID NO: 179368 - DNA, 20 bp, synthetic construct
  source 1..20: mol_type = other DNA
ttgcaccctggtttggggct

SEQ ID NO: 179369 - DNA, 20 bp, synthetic construct
  source 1..20: mol_type = other DNA
cttgcaccctggtttggggc

SEQ ID NO: 179370 - DNA, 20 bp, synthetic construct
  source 1..20: mol_type = other DNA
tcttgcaccctggtttgggg

SEQ ID NO: 179371 - DNA, 20 bp, synthetic construct
  source 1..20: mol_type = other DNA
gtcttgcaccctggtttggg

SEQ ID NO: 179372 - DNA, 20 bp, synthetic construct
  source 1..20: mol_type = other DNA
tgtcttgcaccctggtttgg

SEQ ID NO: 179373 - DNA, 20 bp, synthetic construct
  source 1..20: mol_type = other DNA
ctgtcttgcaccctggtttg

SEQ ID NO: 179374 - DNA, 20 bp, synthetic construct
  source 1..20: mol_type = other DNA
actgtcttgcaccctggttt

SEQ ID NO: 179375 - DNA, 20 bp, synthetic construct
  source 1..20: mol_type = other DNA
cactgtcttgcaccctggtt

SEQ ID NO: 179376 - DNA, 20 bp, synthetic construct
  source 1..20: mol_type = other DNA
ccactgtcttgcaccctggt

SEQ ID NO: 179377 - DNA, 20 bp, synthetic construct
  source 1..20: mol_type = other DNA
cccactgtcttgcaccctgg

SEQ ID NO: 179378 - DNA, 20 bp, synthetic construct
  source 1..20: mol_type = other DNA
acccactgtcttgcaccctg

SEQ ID NO: 179379 - DNA, 20 bp, synthetic construct
  source 1..20: mol_type = other DNA
cacccactgtcttgcaccct

SEQ ID NO: 179380 - DNA, 20 bp, synthetic construct
  source 1..20: mol_type = other DNA
ccacccactgtcttgcaccc

SEQ ID NO: 179381 - DNA, 20 bp, synthetic construct
  source 1..20: mol_type = other DNA
cccacccactgtcttgcacc

SEQ ID NO: 179382 - DNA, 20 bp, synthetic construct
  source 1..20: mol_type = other DNA
ccccacccactgtcttgcac

SEQ ID NO: 179383 - DNA, 20 bp, synthetic construct
  source 1..20: mol_type = other DNA
cccccacccactgtcttgca

SEQ ID NO: 179384 - DNA, 20 bp, synthetic construct
  source 1..20: mol_type = other DNA
acccccacccactgtcttgc

SEQ ID NO: 179385 - DNA, 20 bp, synthetic construct
  source 1..20: mol_type = other DNA
cacccccacccactgtcttg

SEQ ID NO: 179386 - DNA, 20 bp, synthetic construct
  source 1..20: mol_type = other DNA
gcacccccacccactgtctt

SEQ ID NO: 179387 - DNA, 20 bp, synthetic construct
  source 1..20: mol_type = other DNA
ggcacccccacccactgtct

SEQ ID NO: 179388 - DNA, 20 bp, synthetic construct
  source 1..20: mol_type = other DNA
aggcacccccacccactgtc

SEQ ID NO: 179389 - DNA, 20 bp, synthetic construct
  source 1..20: mol_type = other DNA
aaggcacccccacccactgt

SEQ ID NO: 179390 - DNA, 20 bp, synthetic construct
  source 1..20: mol_type = other DNA
caaggcacccccacccactg

SEQ ID NO: 179391 - DNA, 20 bp, synthetic construct
  source 1..20: mol_type = other DNA
tcaaggcacccccacccact

SEQ ID NO: 179392 - DNA, 20 bp, synthetic construct
  source 1..20: mol_type = other DNA
ctcaaggcacccccacccac

SEQ ID NO: 179393 - DNA, 20 bp, synthetic construct
  source 1..20: mol_type = other DNA
gctcaaggcacccccaccca

SEQ ID NO: 179394 - DNA, 20 bp, synthetic construct
  source 1..20: mol_type = other DNA
tgctcaaggcacccccaccc

SEQ ID NO: 179395 - DNA, 20 bp, synthetic construct
  source 1..20: mol_type = other DNA
atgctcaaggcacccccacc

SEQ ID NO: 179396 - DNA, 20 bp, synthetic construct
  source 1..20: mol_type = other DNA
catgctcaaggcacccccac

SEQ ID NO: 179397 - DNA, 20 bp, synthetic construct
  source 1..20: mol_type = other DNA
tcatgctcaaggcaccccca

SEQ ID NO: 179398 - DNA, 20 bp, synthetic construct
  source 1..20: mol_type = other DNA
gtcatgctcaaggcaccccc

SEQ ID NO: 179399 - DNA, 20 bp, synthetic construct
  source 1..20: mol_type = other DNA
ggtcatgctcaaggcacccc

SEQ ID NO: 179400 - DNA, 20 bp, synthetic construct
  source 1..20: mol_type = other DNA
aggtcatgctcaaggcaccc

SEQ ID NO: 179401 - DNA, 20 bp, synthetic construct
  source 1..20: mol_type = other DNA
gaggtcatgctcaaggcacc

SEQ ID NO: 179402 - DNA, 20 bp, synthetic construct
  source 1..20: mol_type = other DNA
tgaggtcatgctcaaggcac

SEQ ID NO: 179403 - DNA, 20 bp, synthetic construct
  source 1..20: mol_type = other DNA
ttgaggtcatgctcaaggca

SEQ ID NO: 179404 - DNA, 20 bp, synthetic construct
  source 1..20: mol_type = other DNA
cttgaggtcatgctcaaggc

SEQ ID NO: 179405 - DNA, 20 bp, synthetic construct
  source 1..20: mol_type = other DNA
acttgaggtcatgctcaagg

SEQ ID NO: 179406 - DNA, 20 bp, synthetic construct
  source 1..20: mol_type = other DNA
cacttgaggtcatgctcaag

SEQ ID NO: 179407 - DNA, 20 bp, synthetic construct
  source 1..20: mol_type = other DNA
tcacttgaggtcatgctcaa

SEQ ID NO: 179408 - DNA, 20 bp, synthetic construct
  source 1..20: mol_type = other DNA
atcacttgaggtcatgctca

SEQ ID NO: 179409 - DNA, 20 bp, synthetic construct
  source 1..20: mol_type = other DNA
aatcacttgaggtcatgctc

SEQ ID NO: 179410 - DNA, 20 bp, synthetic construct
  source 1..20: mol_type = other DNA
aaatcacttgaggtcatgct

SEQ ID NO: 179411 - DNA, 20 bp, synthetic construct
  source 1..20: mol_type = other DNA
gaaatcacttgaggtcatgc

SEQ ID NO: 179412 - DNA, 20 bp, synthetic construct
  source 1..20: mol_type = other DNA
ggaaatcacttgaggtcatg

SEQ ID NO: 179413 - DNA, 20 bp, synthetic construct
  source 1..20: mol_type = other DNA
tggaaatcacttgaggtcat

SEQ ID NO: 179414 - DNA, 20 bp, synthetic construct
  source 1..20: mol_type = other DNA
ctggaaatcacttgaggtca

SEQ ID NO: 179415 - DNA, 20 bp, synthetic construct
  source 1..20: mol_type = other DNA
gctggaaatcacttgaggtc

SEQ ID NO: 179416 - DNA, 20 bp, synthetic construct
  source 1..20: mol_type = other DNA
ggctggaaatcacttgaggt

SEQ ID NO: 179417 - DNA, 20 bp, synthetic construct
  source 1..20: mol_type = other DNA
gggctggaaatcacttgagg

SEQ ID NO: 179418 - DNA, 20 bp, synthetic construct
  source 1..20: mol_type = other DNA
ggggctggaaatcacttgag

SEQ ID NO: 179419 - DNA, 20 bp, synthetic construct
  source 1..20: mol_type = other DNA
aggggctggaaatcacttga

SEQ ID NO: 179420 - DNA, 20 bp, synthetic construct
  source 1..20: mol_type = other DNA
caggggctggaaatcacttg

SEQ ID NO: 179421 - DNA, 20 bp, synthetic construct
  source 1..20: mol_type = other DNA
gcaggggctggaaatcactt

SEQ ID NO: 179422 - DNA, 20 bp, synthetic construct
  source 1..20: mol_type = other DNA
ggcaggggctggaaatcact

SEQ ID NO: 179423 - DNA, 20 bp, synthetic construct
  source 1..20: mol_type = other DNA
tggcaggggctggaaatcac

SEQ ID NO: 179424 - DNA, 20 bp, synthetic construct
  source 1..20: mol_type = other DNA
ctggcaggggctggaaatca

SEQ ID NO: 179425 - DNA, 20 bp, synthetic construct
  source 1..20: mol_type = other DNA
actggcaggggctggaaatc

SEQ ID NO: 179426 - DNA, 20 bp, synthetic construct
  source 1..20: mol_type = other DNA
cactggcaggggctggaaat

SEQ ID NO: 179427 - DNA, 20 bp, synthetic construct
  source 1..20: mol_type = other DNA
gcactggcaggggctggaaa

SEQ ID NO: 179428 - DNA, 20 bp, synthetic construct
  source 1..20: mol_type = other DNA
agcactggcaggggctggaa

SEQ ID NO: 179429 - DNA, 20 bp, synthetic construct
  source 1..20: mol_type = other DNA
cagcactggcaggggctgga

SEQ ID NO: 179430 - DNA, 20 bp, synthetic construct
  source 1..20: mol_type = other DNA
tcagcactggcaggggctgg

SEQ ID NO: 179431 - DNA, 20 bp, synthetic construct
  source 1..20: mol_type = other DNA
gtcagcactggcaggggctg

SEQ ID NO: 179432 - DNA, 20 bp, synthetic construct
  source 1..20: mol_type = other DNA
agtcagcactggcaggggct

SEQ ID NO: 179433 - DNA, 20 bp, synthetic construct
  source 1..20: mol_type = other DNA
aagtcagcactggcaggggc

SEQ ID NO: 179434 - DNA, 20 bp, synthetic construct
  source 1..20: mol_type = other DNA
gaagtcagcactggcagggg

SEQ ID NO: 179435 - DNA, 20 bp, synthetic construct
  source 1..20: mol_type = other DNA
agaagtcagcactggcaggg

SEQ ID NO: 179436 - DNA, 20 bp, synthetic construct
  source 1..20: mol_type = other DNA
gagaagtcagcactggcagg

SEQ ID NO: 179437 - DNA, 20 bp, synthetic construct
  source 1..20: mol_type = other DNA
agagaagtcagcactggcag

SEQ ID NO: 179438 - DNA, 20 bp, synthetic construct
  source 1..20: mol_type = other DNA
cagagaagtcagcactggca

SEQ ID NO: 179439 - DNA, 20 bp, synthetic construct
  source 1..20: mol_type = other DNA
ccagagaagtcagcactggc

SEQ ID NO: 179440 - DNA, 20 bp, synthetic construct
  source 1..20: mol_type = other DNA
cccagagaagtcagcactgg

SEQ ID NO: 179441 - DNA, 20 bp, synthetic construct
  source 1..20: mol_type = other DNA
ccccagagaagtcagcactg

SEQ ID NO: 179442 - DNA, 20 bp, synthetic construct
  source 1..20: mol_type = other DNA
tccccagagaagtcagcact

SEQ ID NO: 179443 - DNA, 20 bp, synthetic construct
  source 1..20: mol_type = other DNA
ttccccagagaagtcagcac

SEQ ID NO: 179444 - DNA, 20 bp, synthetic construct
  source 1..20: mol_type = other DNA
cttccccagagaagtcagca

SEQ ID NO: 179445 - DNA, 20 bp, synthetic construct
  source 1..20: mol_type = other DNA
ccttccccagagaagtcagc

SEQ ID NO: 179446 - DNA, 20 bp, synthetic construct
  source 1..20: mol_type = other DNA
cccttccccagagaagtcag

SEQ ID NO: 179447 - DNA, 20 bp, synthetic construct
  source 1..20: mol_type = other DNA
gcccttccccagagaagtca

SEQ ID NO: 179448 - DNA, 20 bp, synthetic construct
  source 1..20: mol_type = other DNA
agcccttccccagagaagtc

SEQ ID NO: 179449 - DNA, 20 bp, synthetic construct
  source 1..20: mol_type = other DNA
cagcccttccccagagaagt

SEQ ID NO: 179450 - DNA, 20 bp, synthetic construct
  source 1..20: mol_type = other DNA
ccagcccttccccagagaag

SEQ ID NO: 179451 - DNA, 20 bp, synthetic construct
  source 1..20: mol_type = other DNA
cccagcccttccccagagaa

SEQ ID NO: 179452 - DNA, 20 bp, synthetic construct
  source 1..20: mol_type = other DNA
tcccagcccttccccagaga

SEQ ID NO: 179453 - DNA, 20 bp, synthetic construct
  source 1..20: mol_type = other DNA
gtcccagcccttccccagag

SEQ ID NO: 179454 - DNA, 20 bp, synthetic construct
  source 1..20: mol_type = other DNA
agtcccagcccttccccaga

SEQ ID NO: 179455 - DNA, 20 bp, synthetic construct
  source 1..20: mol_type = other DNA
aagtcccagcccttccccag

SEQ ID NO: 179456 - DNA, 20 bp, synthetic construct
  source 1..20: mol_type = other DNA
gaagtcccagcccttcccca

SEQ ID NO: 179457 - DNA, 20 bp, synthetic construct
  source 1..20: mol_type = other DNA
ggaagtcccagcccttcccc

SEQ ID NO: 179458 - DNA, 20 bp, synthetic construct
  source 1..20: mol_type = other DNA
aggaagtcccagcccttccc

SEQ ID NO: 179459 - DNA, 20 bp, synthetic construct
  source 1..20: mol_type = other DNA
aaggaagtcccagcccttcc

SEQ ID NO: 179460 - DNA, 20 bp, synthetic construct
  source 1..20: mol_type = other DNA
gaaggaagtcccagcccttc

SEQ ID NO: 179461 - DNA, 20 bp, synthetic construct
  source 1..20: mol_type = other DNA
agaaggaagtcccagccctt

SEQ ID NO: 179462 - DNA, 20 bp, synthetic construct
  source 1..20: mol_type = other DNA
cagaaggaagtcccagccct

SEQ ID NO: 179463 - DNA, 20 bp, synthetic construct
  source 1..20: mol_type = other DNA
ccagaaggaagtcccagccc

SEQ ID NO: 179464 - DNA, 20 bp, synthetic construct
  source 1..20: mol_type = other DNA
cccagaaggaagtcccagcc

SEQ ID NO: 179465 - DNA, 20 bp, synthetic construct
  source 1..20: mol_type = other DNA
gcccagaaggaagtcccagc

SEQ ID NO: 179466 - DNA, 20 bp, synthetic construct
  source 1..20: mol_type = other DNA
agcccagaaggaagtcccag

SEQ ID NO: 179467 - DNA, 20 bp, synthetic construct
  source 1..20: mol_type = other DNA
gagcccagaaggaagtccca

SEQ ID NO: 179468 - DNA, 20 bp, synthetic construct
  source 1..20: mol_type = other DNA
tgagcccagaaggaagtccc

SEQ ID NO: 179469 - DNA, 20 bp, synthetic construct
  source 1..20: mol_type = other DNA
ttgagcccagaaggaagtcc

SEQ ID NO: 179470 - DNA, 20 bp, synthetic construct
  source 1..20: mol_type = other DNA
cttgagcccagaaggaagtc

SEQ ID NO: 179471 - DNA, 20 bp, synthetic construct
  source 1..20: mol_type = other DNA
acttgagcccagaaggaagt

SEQ ID NO: 179472 - DNA, 20 bp, synthetic construct
  source 1..20: mol_type = other DNA
gacttgagcccagaaggaag

SEQ ID NO: 179473 - DNA, 20 bp, synthetic construct
  source 1..20: mol_type = other DNA
tgacttgagcccagaaggaa

SEQ ID NO: 179474 - DNA, 20 bp, synthetic construct
  source 1..20: mol_type = other DNA
gtgacttgagcccagaagga

SEQ ID NO: 179475 - DNA, 20 bp, synthetic construct
  source 1..20: mol_type = other DNA
cgtgacttgagcccagaagg

SEQ ID NO: 179476 - DNA, 20 bp, synthetic construct
  source 1..20: mol_type = other DNA
tcgtgacttgagcccagaag

SEQ ID NO: 179477 - DNA, 20 bp, synthetic construct
  source 1..20: mol_type = other DNA
gtcgtgacttgagcccagaa

SEQ ID NO: 179478 - DNA, 20 bp, synthetic construct
  source 1..20: mol_type = other DNA
ggtcgtgacttgagcccaga

SEQ ID NO: 179479 - DNA, 20 bp, synthetic construct
  source 1..20: mol_type = other DNA
gggtcgtgacttgagcccag

SEQ ID NO: 179480 - DNA, 20 bp, synthetic construct
  source 1..20: mol_type = other DNA
agggtcgtgacttgagccca

SEQ ID NO: 179481 - DNA, 20 bp, synthetic construct
  source 1..20: mol_type = other DNA
aagggtcgtgacttgagccc

SEQ ID NO: 179482 - DNA, 20 bp, synthetic construct
  source 1..20: mol_type = other DNA
caagggtcgtgacttgagcc

SEQ ID NO: 179483 - DNA, 20 bp, synthetic construct
  source 1..20: mol_type = other DNA
ccaagggtcgtgacttgagc

SEQ ID NO: 179484 - DNA, 20 bp, synthetic construct
  source 1..20: mol_type = other DNA
tccaagggtcgtgacttgag

SEQ ID NO: 179485 - DNA, 20 bp, synthetic construct
  source 1..20: mol_type = other DNA
atccaagggtcgtgacttga

SEQ ID NO: 179486 - DNA, 20 bp, synthetic construct
  source 1..20: mol_type = other DNA
catccaagggtcgtgacttg

SEQ ID NO: 179487 - DNA, 20 bp, synthetic construct
  source 1..20: mol_type = other DNA
ccatccaagggtcgtgactt

SEQ ID NO: 179488 - DNA, 20 bp, synthetic construct
  source 1..20: mol_type = other DNA
tccatccaagggtcgtgact

SEQ ID NO: 179489 - DNA, 20 bp, synthetic construct
  source 1..20: mol_type = other DNA
ttccatccaagggtcgtgac

SEQ ID NO: 179490 - DNA, 20 bp, synthetic construct
  source 1..20: mol_type = other DNA
attccatccaagggtcgtga

SEQ ID NO: 179491 - DNA, 20 bp, synthetic construct
  source 1..20: mol_type = other DNA
aattccatccaagggtcgtg

SEQ ID NO: 179492 - DNA, 20 bp, synthetic construct
  source 1..20: mol_type = other DNA
aaattccatccaagggtcgt

SEQ ID NO: 179493 - DNA, 20 bp, synthetic construct
  source 1..20: mol_type = other DNA
gaaattccatccaagggtcg

SEQ ID NO: 179494 - DNA, 20 bp, synthetic construct
  source 1..20: mol_type = other DNA
ggaaattccatccaagggtc

SEQ ID NO: 179495 - DNA, 20 bp, synthetic construct
  source 1..20: mol_type = other DNA
aggaaattccatccaagggt

SEQ ID NO: 179496 - DNA, 20 bp, synthetic construct
  source 1..20: mol_type = other DNA
caggaaattccatccaaggg

SEQ ID NO: 179497 - DNA, 20 bp, synthetic construct
  source 1..20: mol_type = other DNA
ccaggaaattccatccaagg

SEQ ID NO: 179498 - DNA, 20 bp, synthetic construct
  source 1..20: mol_type = other DNA
cccaggaaattccatccaag

SEQ ID NO: 179499 - DNA, 20 bp, synthetic construct
  source 1..20: mol_type = other DNA
tcccaggaaattccatccaa

SEQ ID NO: 179500 - DNA, 20 bp, synthetic construct
  source 1..20: mol_type = other DNA
ctcccaggaaattccatcca

SEQ ID NO: 179501 - DNA, 20 bp, synthetic construct
  source 1..20: mol_type = other DNA
gctcccaggaaattccatcc

SEQ ID NO: 179502 - DNA, 20 bp, synthetic construct
  source 1..20: mol_type = other DNA
agctcccaggaaattccatc

SEQ ID NO: 179503 - DNA, 20 bp, synthetic construct
  source 1..20: mol_type = other DNA
aagctcccaggaaattccat

SEQ ID NO: 179504 - DNA, 20 bp, synthetic construct
  source 1..20: mol_type = other DNA
aaagctcccaggaaattcca

SEQ ID NO: 179505 - DNA, 20 bp, synthetic construct
  source 1..20: mol_type = other DNA
aaaagctcccaggaaattcc

SEQ ID NO: 179506 - DNA, 20 bp, synthetic construct
  source 1..20: mol_type = other DNA
gaaaagctcccaggaaattc

SEQ ID NO: 179507 - DNA, 20 bp, synthetic construct
  source 1..20: mol_type = other DNA
agaaaagctcccaggaaatt

SEQ ID NO: 179508 - DNA, 20 bp, synthetic construct
  source 1..20: mol_type = other DNA
cagaaaagctcccaggaaat

SEQ ID NO: 179509 - DNA, 20 bp, synthetic construct
  source 1..20: mol_type = other DNA
acagaaaagctcccaggaaa

SEQ ID NO: 179510 - DNA, 20 bp, synthetic construct
  source 1..20: mol_type = other DNA
aacagaaaagctcccaggaa

SEQ ID NO: 179511 - DNA, 20 bp, synthetic construct
  source 1..20: mol_type = other DNA
aaacagaaaagctcccagga

SEQ ID NO: 179512 - DNA, 20 bp, synthetic construct
  source 1..20: mol_type = other DNA
aaaacagaaaagctcccagg

SEQ ID NO: 179513 - DNA, 20 bp, synthetic construct
  source 1..20: mol_type = other DNA
aaaaacagaaaagctcccag

SEQ ID NO: 179514 - DNA, 20 bp, synthetic construct
  source 1..20: mol_type = other DNA
aaaaaacagaaaagctccca

SEQ ID NO: 179515 - DNA, 20 bp, synthetic construct
  source 1..20: mol_type = other DNA
gaaaaaacagaaaagctccc

SEQ ID NO: 179516 - DNA, 20 bp, synthetic construct
  source 1..20: mol_type = other DNA
agaaaaaacagaaaagctcc

SEQ ID NO: 179517 - DNA, 20 bp, synthetic construct
  source 1..20: mol_type = other DNA
cagaaaaaacagaaaagctc

SEQ ID NO: 179518 - DNA, 20 bp, synthetic construct
  source 1..20: mol_type = other DNA
ccagaaaaaacagaaaagct

SEQ ID NO: 179519 - DNA, 20 bp, synthetic construct
  source 1..20: mol_type = other DNA
tccagaaaaaacagaaaagc

SEQ ID NO: 179520 - DNA, 20 bp, synthetic construct
  source 1..20: mol_type = other DNA
ctccagaaaaaacagaaaag

SEQ ID NO: 179521 - DNA, 20 bp, synthetic construct
  source 1..20: mol_type = other DNA
actccagaaaaaacagaaaa

SEQ ID NO: 179522 - DNA, 20 bp, synthetic construct
  source 1..20: mol_type = other DNA
aactccagaaaaaacagaaa

SEQ ID NO: 179523 - DNA, 20 bp, synthetic construct
  source 1..20: mol_type = other DNA
aaactccagaaaaaacagaa

SEQ ID NO: 179524 - DNA, 20 bp, synthetic construct
  source 1..20: mol_type = other DNA
aaaactccagaaaaaacaga

SEQ ID NO: 179525 - DNA, 20 bp, synthetic construct
  source 1..20: mol_type = other DNA
gaaaactccagaaaaaacag

SEQ ID NO: 179526 - DNA, 20 bp, synthetic construct
  source 1..20: mol_type = other DNA
tgaaaactccagaaaaaaca

SEQ ID NO: 179527 - DNA, 20 bp, synthetic construct
  source 1..20: mol_type = other DNA
ctgaaaactccagaaaaaac

SEQ ID NO: 179528 - DNA, 20 bp, synthetic construct
  source 1..20: mol_type = other DNA
actgaaaactccagaaaaaa

SEQ ID NO: 179529 - DNA, 20 bp, synthetic construct
  source 1..20: mol_type = other DNA
aactgaaaactccagaaaaa

SEQ ID NO: 179530 - DNA, 20 bp, synthetic construct
  source 1..20: mol_type = other DNA
aaactgaaaactccagaaaa

SEQ ID NO: 179531 - DNA, 20 bp, synthetic construct
  source 1..20: mol_type = other DNA
aaaactgaaaactccagaaa

SEQ ID NO: 179532 - DNA, 20 bp, synthetic construct
  source 1..20: mol_type = other DNA
aaaaactgaaaactccagaa

SEQ ID NO: 179533 - DNA, 20 bp, synthetic construct
  source 1..20: mol_type = other DNA
aaaaaactgaaaactccaga

SEQ ID NO: 179534 - DNA, 20 bp, synthetic construct
  source 1..20: mol_type = other DNA
gaaaaaactgaaaactccag

SEQ ID NO: 179535 - DNA, 20 bp, synthetic construct
  source 1..20: mol_type = other DNA
ggaaaaaactgaaaactcca

SEQ ID NO: 179536 - DNA, 20 bp, synthetic construct
  source 1..20: mol_type = other DNA
aggaaaaaactgaaaactcc

SEQ ID NO: 179537 - DNA, 20 bp, synthetic construct
  source 1..20: mol_type = other DNA
taggaaaaaactgaaaactc

SEQ ID NO: 179538 - DNA, 20 bp, synthetic construct
  source 1..20: mol_type = other DNA
ttaggaaaaaactgaaaact

SEQ ID NO: 179539 - DNA, 20 bp, synthetic construct
  source 1..20: mol_type = other DNA
gttaggaaaaaactgaaaac

SEQ ID NO: 179540 - DNA, 20 bp, synthetic construct
  source 1..20: mol_type = other DNA
ggttaggaaaaaactgaaaa

SEQ ID NO: 179541 - DNA, 20 bp, synthetic construct
  source 1..20: mol_type = other DNA
tggttaggaaaaaactgaaa

SEQ ID NO: 179542 - DNA, 20 bp, synthetic construct
  source 1..20: mol_type = other DNA
ctggttaggaaaaaactgaa

SEQ ID NO: 179543 - DNA, 20 bp, synthetic construct
  source 1..20: mol_type = other DNA
tctggttaggaaaaaactga

SEQ ID NO: 179544 - DNA, 20 bp, synthetic construct
  source 1..20: mol_type = other DNA
gtctggttaggaaaaaactg

SEQ ID NO: 179545 - DNA, 20 bp, synthetic construct
  source 1..20: mol_type = other DNA
tgtctggttaggaaaaaact

SEQ ID NO: 179546 - DNA, 20 bp, synthetic construct
  source 1..20: mol_type = other DNA
ctgtctggttaggaaaaaac

SEQ ID NO: 179547 - DNA, 20 bp, synthetic construct
  source 1..20: mol_type = other DNA
cctgtctggttaggaaaaaa

SEQ ID NO: 179548 - DNA, 20 bp, synthetic construct
  source 1..20: mol_type = other DNA
ccctgtctggttaggaaaaa

SEQ ID NO: 179549 - DNA, 20 bp, synthetic construct
  source 1..20: mol_type = other DNA
tccctgtctggttaggaaaa

SEQ ID NO: 179550 - DNA, 20 bp, synthetic construct
  source 1..20: mol_type = other DNA
gtccctgtctggttaggaaa

SEQ ID NO: 179551 - DNA, 20 bp, synthetic construct
  source 1..20: mol_type = other DNA
agtccctgtctggttaggaa

SEQ ID NO: 179552 - DNA, 20 bp, synthetic construct
  source 1..20: mol_type = other DNA
aagtccctgtctggttagga

SEQ ID NO: 179553 - DNA, 20 bp, synthetic construct
  source 1..20: mol_type = other DNA
caagtccctgtctggttagg

SEQ ID NO: 179554 - DNA, 20 bp, synthetic construct
  source 1..20: mol_type = other DNA
ccaagtccctgtctggttag

SEQ ID NO: 179555 - DNA, 20 bp, synthetic construct
  source 1..20: mol_type = other DNA
accaagtccctgtctggtta

SEQ ID NO: 179556 - DNA, 20 bp, synthetic construct
  source 1..20: mol_type = other DNA
taccaagtccctgtctggtt

SEQ ID NO: 179557 - DNA, 20 bp, synthetic construct
  source 1..20: mol_type = other DNA
gtaccaagtccctgtctggt

SEQ ID NO: 179558 - DNA, 20 bp, synthetic construct
  source 1..20: mol_type = other DNA
tgtaccaagtccctgtctgg

SEQ ID NO: 179559 - DNA, 20 bp, synthetic construct
  source 1..20: mol_type = other DNA
ctgtaccaagtccctgtctg

SEQ ID NO: 179560 - DNA, 20 bp, synthetic construct
  source 1..20: mol_type = other DNA
tctgtaccaagtccctgtct

SEQ ID NO: 179561 - DNA, 20 bp, synthetic construct
  source 1..20: mol_type = other DNA
ttctgtaccaagtccctgtc

SEQ ID NO: 179562 - DNA, 20 bp, synthetic construct
  source 1..20: mol_type = other DNA
attctgtaccaagtccctgt

SEQ ID NO: 179563 - DNA, 20 bp, synthetic construct
  source 1..20: mol_type = other DNA
gattctgtaccaagtccctg

SEQ ID NO: 179564 - DNA, 20 bp, synthetic construct
  source 1..20: mol_type = other DNA
agattctgtaccaagtccct

SEQ ID NO: 179565 - DNA, 20 bp, synthetic construct
  source 1..20: mol_type = other DNA
gagattctgtaccaagtccc

SEQ ID NO: 179566 - DNA, 20 bp, synthetic construct
  source 1..20: mol_type = other DNA
tgagattctgtaccaagtcc

SEQ ID NO: 179567 - DNA, 20 bp, synthetic construct
  source 1..20: mol_type = other DNA
atgagattctgtaccaagtc

SEQ ID NO: 179568 - DNA, 20 bp, synthetic construct
  source 1..20: mol_type = other DNA
tatgagattctgtaccaagt

SEQ ID NO: 179569 - DNA, 20 bp, synthetic construct
  source 1..20: mol_type = other DNA
atatgagattctgtaccaag

SEQ ID NO: 179570 - DNA, 20 bp, synthetic construct
  source 1..20: mol_type = other DNA
aatatgagattctgtaccaa

SEQ ID NO: 179571 - DNA, 20 bp, synthetic construct
  source 1..20: mol_type = other DNA
gaatatgagattctgtacca

SEQ ID NO: 179572 - DNA, 20 bp, synthetic construct
  source 1..20: mol_type = other DNA
agaatatgagattctgtacc

SEQ ID NO: 179573 - DNA, 20 bp, synthetic construct
  source 1..20: mol_type = other DNA
tagaatatgagattctgtac

SEQ ID NO: 179574 - DNA, 20 bp, synthetic construct
  source 1..20: mol_type = other DNA
ttagaatatgagattctgta

SEQ ID NO: 179575 - DNA, 20 bp, synthetic construct
  source 1..20: mol_type = other DNA
attagaatatgagattctgt

SEQ ID NO: 179576 - DNA, 20 bp, synthetic construct
  source 1..20: mol_type = other DNA
aattagaatatgagattctg

SEQ ID NO: 179577 - DNA, 20 bp, synthetic construct
  source 1..20: mol_type = other DNA
taattagaatatgagattct

SEQ ID NO: 179578 - DNA, 20 bp, synthetic construct
  source 1..20: mol_type = other DNA
ataattagaatatgagattc

SEQ ID NO: 179579 - DNA, 20 bp, synthetic construct
  source 1..20: mol_type = other DNA
cataattagaatatgagatt

SEQ ID NO: 179580 - DNA, 20 bp, synthetic construct
  source 1..20: mol_type = other DNA
gcataattagaatatgagat

SEQ ID NO: 179581 - DNA, 20 bp, synthetic construct
  source 1..20: mol_type = other DNA
ggcataattagaatatgaga

SEQ ID NO: 179582 - DNA, 20 bp, synthetic construct
  source 1..20: mol_type = other DNA
aggcataattagaatatgag

SEQ ID NO: 179583 - DNA, 20 bp, synthetic construct
  source 1..20: mol_type = other DNA
taggcataattagaatatga

SEQ ID NO: 179584 - DNA, 20 bp, synthetic construct
  source 1..20: mol_type = other DNA
ctaggcataattagaatatg

SEQ ID NO: 179585 - DNA, 20 bp, synthetic construct
  source 1..20: mol_type = other DNA
cctaggcataattagaatat

SEQ ID NO: 179586 - DNA, 20 bp, synthetic construct
  source 1..20: mol_type = other DNA
tcctaggcataattagaata

SEQ ID NO: 179587 - DNA, 20 bp, synthetic construct
  source 1..20: mol_type = other DNA
ctcctaggcataattagaat

SEQ ID NO: 179588 - DNA, 20 bp, synthetic construct
  source 1..20: mol_type = other DNA
gctcctaggcataattagaa

SEQ ID NO: 179589 - DNA, 20 bp, synthetic construct
  source 1..20: mol_type = other DNA
tgctcctaggcataattaga

SEQ ID NO: 179590 - DNA, 20 bp, synthetic construct
  source 1..20: mol_type = other DNA
ctgctcctaggcataattag

SEQ ID NO: 179591 - DNA, 20 bp, synthetic construct
  source 1..20: mol_type = other DNA
gctgctcctaggcataatta

SEQ ID NO: 179592 - DNA, 20 bp, synthetic construct
  source 1..20: mol_type = other DNA
ggctgctcctaggcataatt

SEQ ID NO: 179593 - DNA, 20 bp, synthetic construct
  source 1..20: mol_type = other DNA
aggctgctcctaggcataat

SEQ ID NO: 179594 - DNA, 20 bp, synthetic construct
  source 1..20: mol_type = other DNA
gaggctgctcctaggcataa

SEQ ID NO: 179595 - DNA, 20 bp, synthetic construct
  source 1..20: mol_type = other DNA
agaggctgctcctaggcata

SEQ ID NO: 179596 - DNA, 20 bp, synthetic construct
  source 1..20: mol_type = other DNA
gagaggctgctcctaggcat

SEQ ID NO: 179597 - DNA, 20 bp, synthetic construct
  source 1..20: mol_type = other DNA
ggagaggctgctcctaggca

SEQ ID NO: 179598 - DNA, 20 bp, synthetic construct
  source 1..20: mol_type = other DNA
gggagaggctgctcctaggc

SEQ ID NO: 179599 - DNA, 20 bp, synthetic construct
  source 1..20: mol_type = other DNA
ggggagaggctgctcctagg

SEQ ID NO: 179600 - DNA, 20 bp, synthetic construct
  source 1..20: mol_type = other DNA
tggggagaggctgctcctag

SEQ ID NO: 179601 - DNA, 20 bp, synthetic construct
  source 1..20: mol_type = other DNA
gtggggagaggctgctccta

SEQ ID NO: 179602 - DNA, 20 bp, synthetic construct
  source 1..20: mol_type = other DNA
ggtggggagaggctgctcct

SEQ ID NO: 179603 - DNA, 20 bp, synthetic construct
  source 1..20: mol_type = other DNA
tggtggggagaggctgctcc

SEQ ID NO: 179604 - DNA, 20 bp, synthetic construct
  source 1..20: mol_type = other DNA
gtggtggggagaggctgctc

SEQ ID NO: 179605 - DNA, 20 bp, synthetic construct
  source 1..20: mol_type = other DNA
agtggtggggagaggctgct

SEQ ID NO: 179606 - DNA, 20 bp, synthetic construct
  source 1..20: mol_type = other DNA
gagtggtggggagaggctgc

SEQ ID NO: 179607 - DNA, 20 bp, synthetic construct
  source 1..20: mol_type = other DNA
tgagtggtggggagaggctg

SEQ ID NO: 179608 - DNA, 20 bp, synthetic construct
  source 1..20: mol_type = other DNA
gtgagtggtggggagaggct

SEQ ID NO: 179609 - DNA, 20 bp, synthetic construct
  source 1..20: mol_type = other DNA
tgtgagtggtggggagaggc

SEQ ID NO: 179610 - DNA, 20 bp, synthetic construct
  source 1..20: mol_type = other DNA
ctgtgagtggtggggagagg

SEQ ID NO: 179611 - DNA, 20 bp, synthetic construct
  source 1..20: mol_type = other DNA
actgtgagtggtggggagag

SEQ ID NO: 179612 - DNA, 20 bp, synthetic construct
  source 1..20: mol_type = other DNA
cactgtgagtggtggggaga

SEQ ID NO: 179613 - DNA, 20 bp, synthetic construct
  source 1..20: mol_type = other DNA
acactgtgagtggtggggag

SEQ ID NO: 179614 - DNA, 20 bp, synthetic construct
  source 1..20: mol_type = other DNA
aacactgtgagtggtgggga

SEQ ID NO: 179615 - DNA, 20 bp, synthetic construct
  source 1..20: mol_type = other DNA
aaacactgtgagtggtgggg

SEQ ID NO: 179616 - DNA, 20 bp, synthetic construct
  source 1..20: mol_type = other DNA
taaacactgtgagtggtggg

SEQ ID NO: 179617 - DNA, 20 bp, synthetic construct
  source 1..20: mol_type = other DNA
ctaaacactgtgagtggtgg

SEQ ID NO: 179618 - DNA, 20 bp, synthetic construct
  source 1..20: mol_type = other DNA
gctaaacactgtgagtggtg

SEQ ID NO: 179619 - DNA, 20 bp, synthetic construct
  source 1..20: mol_type = other DNA
tgctaaacactgtgagtggt

SEQ ID NO: 179620 - DNA, 20 bp, synthetic construct
  source 1..20: mol_type = other DNA
atgctaaacactgtgagtgg

SEQ ID NO: 179621 - DNA, 20 bp, synthetic construct
  source 1..20: mol_type = other DNA
catgctaaacactgtgagtg

SEQ ID NO: 179622 - DNA, 20 bp, synthetic construct
  source 1..20: mol_type = other DNA
acatgctaaacactgtgagt

SEQ ID NO: 179623 - DNA, 20 bp, synthetic construct
  source 1..20: mol_type = other DNA
cacatgctaaacactgtgag

SEQ ID NO: 179624 - DNA, 20 bp, synthetic construct
  source 1..20: mol_type = other DNA
tcacatgctaaacactgtga

SEQ ID NO: 179625 - DNA, 20 bp, synthetic construct
  source 1..20: mol_type = other DNA
gtcacatgctaaacactgtg

SEQ ID NO: 179626 - DNA, 20 bp, synthetic construct
  source 1..20: mol_type = other DNA
tgtcacatgctaaacactgt

SEQ ID NO: 179627 - DNA, 20 bp, synthetic construct
  source 1..20: mol_type = other DNA
ctgtcacatgctaaacactg

SEQ ID NO: 179628 - DNA, 20 bp, synthetic construct
  source 1..20: mol_type = other DNA
cctgtcacatgctaaacact

SEQ ID NO: 179629 - DNA, 20 bp, synthetic construct
  source 1..20: mol_type = other DNA
tcctgtcacatgctaaacac

SEQ ID NO: 179630 - DNA, 20 bp, synthetic construct
  source 1..20: mol_type = other DNA
ttcctgtcacatgctaaaca

SEQ ID NO: 179631 - DNA, 20 bp, synthetic construct
  source 1..20: mol_type = other DNA
attcctgtcacatgctaaac

SEQ ID NO: 179632 - DNA, 20 bp, synthetic construct
  source 1..20: mol_type = other DNA
gattcctgtcacatgctaaa

SEQ ID NO: 179633 - DNA, 20 bp, synthetic construct
  source 1..20: mol_type = other DNA
cgattcctgtcacatgctaa

SEQ ID NO: 179634 - DNA, 20 bp, synthetic construct
  source 1..20: mol_type = other DNA
tcgattcctgtcacatgcta

SEQ ID NO: 179635 - DNA, 20 bp, synthetic construct
  source 1..20: mol_type = other DNA
atcgattcctgtcacatgct

SEQ ID NO: 179636 - DNA, 20 bp, synthetic construct
  source 1..20: mol_type = other DNA
aatcgattcctgtcacatgc

SEQ ID NO: 179637 - DNA, 20 bp, synthetic construct
  source 1..20: mol_type = other DNA
taatcgattcctgtcacatg

SEQ ID NO: 179638 - DNA, 20 bp, synthetic construct
  source 1..20: mol_type = other DNA
ttaatcgattcctgtcacat

SEQ ID NO: 179639 - DNA, 20 bp, synthetic construct
  source 1..20: mol_type = other DNA
cttaatcgattcctgtcaca

SEQ ID NO: 179640 - DNA, 20 bp, synthetic construct
  source 1..20: mol_type = other DNA
ccttaatcgattcctgtcac

SEQ ID NO: 179641 - DNA, 20 bp, synthetic construct
  source 1..20: mol_type = other DNA
gccttaatcgattcctgtca

SEQ ID NO: 179642 - DNA, 20 bp, synthetic construct
  source 1..20: mol_type = other DNA
tgccttaatcgattcctgtc

SEQ ID NO: 179643 - DNA, 20 bp, synthetic construct
  source 1..20: mol_type = other DNA
atgccttaatcgattcctgt

SEQ ID NO: 179644 - DNA, 20 bp, synthetic construct
  source 1..20: mol_type = other DNA
catgccttaatcgattcctg

SEQ ID NO: 179645 - DNA, 20 bp, synthetic construct
  source 1..20: mol_type = other DNA
tcatgccttaatcgattcct

SEQ ID NO: 179646 - DNA, 20 bp, synthetic construct
  source 1..20: mol_type = other DNA
ctcatgccttaatcgattcc

SEQ ID NO: 179647 - DNA, 20 bp, synthetic construct
  source 1..20: mol_type = other DNA
actcatgccttaatcgattc

SEQ ID NO: 179648 - DNA, 20 bp, synthetic construct
  source 1..20: mol_type = other DNA
cactcatgccttaatcgatt

SEQ ID NO: 179649 - DNA, 20 bp, synthetic construct
  source 1..20: mol_type = other DNA
tcactcatgccttaatcgat

SEQ ID NO: 179650 - DNA, 20 bp, synthetic construct
  source 1..20: mol_type = other DNA
atcactcatgccttaatcga

SEQ ID NO: 179651 - DNA, 20 bp, synthetic construct
  source 1..20: mol_type = other DNA
aatcactcatgccttaatcg

SEQ ID NO: 179652 - DNA, 20 bp, synthetic construct
  source 1..20: mol_type = other DNA
taatcactcatgccttaatc

SEQ ID NO: 179653 - DNA, 20 bp, synthetic construct
  source 1..20: mol_type = other DNA
ttaatcactcatgccttaat

SEQ ID NO: 179654 - DNA, 20 bp, synthetic construct
  source 1..20: mol_type = other DNA
tttaatcactcatgccttaa

SEQ ID NO: 179655 - DNA, 20 bp, synthetic construct
  source 1..20: mol_type = other DNA
atttaatcactcatgcctta

SEQ ID NO: 179656 - DNA, 20 bp, synthetic construct
  source 1..20: mol_type = other DNA
aatttaatcactcatgcctt

SEQ ID NO: 179657 - DNA, 20 bp, synthetic construct
  source 1..20: mol_type = other DNA
taatttaatcactcatgcct

SEQ ID NO: 179658 - DNA, 20 bp, synthetic construct
  source 1..20: mol_type = other DNA
ttaatttaatcactcatgcc

SEQ ID NO: 179659 - DNA, 20 bp, synthetic construct
  source 1..20: mol_type = other DNA
tttaatttaatcactcatgc

SEQ ID NO: 179660 - DNA, 20 bp, synthetic construct
  source 1..20: mol_type = other DNA
ctttaatttaatcactcatg

SEQ ID NO: 179661 - DNA, 20 bp, synthetic construct
  source 1..20: mol_type = other DNA
gctttaatttaatcactcat

SEQ ID NO: 179662 - DNA, 20 bp, synthetic construct
  source 1..20: mol_type = other DNA
ggctttaatttaatcactca

SEQ ID NO: 179663 - DNA, 20 bp, synthetic construct
  source 1..20: mol_type = other DNA
tggctttaatttaatcactc

SEQ ID NO: 179664 - DNA, 20 bp, synthetic construct
  source 1..20: mol_type = other DNA
ctggctttaatttaatcact

SEQ ID NO: 179665 - DNA, 20 bp, synthetic construct
  source 1..20: mol_type = other DNA
cctggctttaatttaatcac

SEQ ID NO: 179666 - DNA, 20 bp, synthetic construct
  source 1..20: mol_type = other DNA
gcctggctttaatttaatca

SEQ ID NO: 179667 - DNA, 20 bp, synthetic construct
  source 1..20: mol_type = other DNA
tgcctggctttaatttaatc

SEQ ID NO: 179668 - DNA, 20 bp, synthetic construct
  source 1..20: mol_type = other DNA
atgcctggctttaatttaat

SEQ ID NO: 179669 - DNA, 20 bp, synthetic construct
  source 1..20: mol_type = other DNA
aatgcctggctttaatttaa

SEQ ID NO: 179670 - DNA, 20 bp, synthetic construct
  source 1..20: mol_type = other DNA
caatgcctggctttaattta

SEQ ID NO: 179671 - DNA, 20 bp, synthetic construct
  source 1..20: mol_type = other DNA
tcaatgcctggctttaattt

SEQ ID NO: 179672 - DNA, 20 bp, synthetic construct
  source 1..20: mol_type = other DNA
gtcaatgcctggctttaatt

SEQ ID NO: 179673 - DNA, 20 bp, synthetic construct
  source 1..20: mol_type = other DNA
agtcaatgcctggctttaat

SEQ ID NO: 179674 - DNA, 20 bp, synthetic construct
  source 1..20: mol_type = other DNA
aagtcaatgcctggctttaa

SEQ ID NO: 179675 - DNA, 20 bp, synthetic construct
  source 1..20: mol_type = other DNA
caagtcaatgcctggcttta

SEQ ID NO: 179676 - DNA, 20 bp, synthetic construct
  source 1..20: mol_type = other DNA
ccaagtcaatgcctggcttt

SEQ ID NO: 179677 - DNA, 20 bp, synthetic construct
  source 1..20: mol_type = other DNA
tccaagtcaatgcctggctt

SEQ ID NO: 179678 - DNA, 20 bp, synthetic construct
  source 1..20: mol_type = other DNA
atccaagtcaatgcctggct

SEQ ID NO: 179679 - DNA, 20 bp, synthetic construct
  source 1..20: mol_type = other DNA
catccaagtcaatgcctggc

SEQ ID NO: 179680 - DNA, 20 bp, synthetic construct
  source 1..20: mol_type = other DNA
ccatccaagtcaatgcctgg

SEQ ID NO: 179681 - DNA, 20 bp, synthetic construct
  source 1..20: mol_type = other DNA
accatccaagtcaatgcctg

SEQ ID NO: 179682 - DNA, 20 bp, synthetic construct
  source 1..20: mol_type = other DNA
caccatccaagtcaatgcct

SEQ ID NO: 179683 - DNA, 20 bp, synthetic construct
  source 1..20: mol_type = other DNA
acaccatccaagtcaatgcc

SEQ ID NO: 179684 - DNA, 20 bp, synthetic construct
  source 1..20: mol_type = other DNA
tacaccatccaagtcaatgc

SEQ ID NO: 179685 - DNA, 20 bp, synthetic construct
  source 1..20: mol_type = other DNA
ttacaccatccaagtcaatg

SEQ ID NO: 179686 - DNA, 20 bp, synthetic construct
  source 1..20: mol_type = other DNA
attacaccatccaagtcaat

SEQ ID NO: 179687 - DNA, 20 bp, synthetic construct
  source 1..20: mol_type = other DNA
tattacaccatccaagtcaa

SEQ ID NO: 179688 - DNA, 20 bp, synthetic construct
  source 1..20: mol_type = other DNA
atattacaccatccaagtca

SEQ ID NO: 179689 - DNA, 20 bp, synthetic construct
  source 1..20: mol_type = other DNA
aatattacaccatccaagtc

SEQ ID NO: 179690 - DNA, 20 bp, synthetic construct
  source 1..20: mol_type = other DNA
gaatattacaccatccaagt

SEQ ID NO: 179691 - DNA, 20 bp, synthetic construct
  source 1..20: mol_type = other DNA
agaatattacaccatccaag

SEQ ID NO: 179692 - DNA, 20 bp, synthetic construct
  source 1..20: mol_type = other DNA
cagaatattacaccatccaa

SEQ ID NO: 179693 - DNA, 20 bp, synthetic construct
  source 1..20: mol_type = other DNA
tcagaatattacaccatcca

SEQ ID NO: 179694 - DNA, 20 bp, synthetic construct
  source 1..20: mol_type = other DNA
gtcagaatattacaccatcc

SEQ ID NO: 179695 - DNA, 20 bp, synthetic construct
  source 1..20: mol_type = other DNA
tgtcagaatattacaccatc

SEQ ID NO: 179696 - DNA, 20 bp, synthetic construct
  source 1..20: mol_type = other DNA
atgtcagaatattacaccat

SEQ ID NO: 179697 - DNA, 20 bp, synthetic construct
  source 1..20: mol_type = other DNA
gatgtcagaatattacacca

SEQ ID NO: 179698 - DNA, 20 bp, synthetic construct
  source 1..20: mol_type = other DNA
agatgtcagaatattacacc

SEQ ID NO: 179699 - DNA, 20 bp, synthetic construct
  source 1..20: mol_type = other DNA
cagatgtcagaatattacac

SEQ ID NO: 179700 - DNA, 20 bp, synthetic construct
  source 1..20: mol_type = other DNA
acagatgtcagaatattaca

SEQ ID NO: 179701 - DNA, 20 bp, synthetic construct
  source 1..20: mol_type = other DNA
aacagatgtcagaatattac

SEQ ID NO: 179702 - DNA, 20 bp, synthetic construct
  source 1..20: mol_type = other DNA
aaacagatgtcagaatatta

SEQ ID NO: 179703 - DNA, 20 bp, synthetic construct
  source 1..20: mol_type = other DNA
caaacagatgtcagaatatt

SEQ ID NO: 179704 - DNA, 20 bp, synthetic construct
  source 1..20: mol_type = other DNA
ccaaacagatgtcagaatat

SEQ ID NO: 179705 - DNA, 20 bp, synthetic construct
  source 1..20: mol_type = other DNA
accaaacagatgtcagaata

SEQ ID NO: 179706 - DNA, 20 bp, synthetic construct
  source 1..20: mol_type = other DNA
caccaaacagatgtcagaat

SEQ ID NO: 179707 - DNA, 20 bp, synthetic construct
  source 1..20: mol_type = other DNA
acaccaaacagatgtcagaa

SEQ ID NO: 179708 - DNA, 20 bp, synthetic construct
  source 1..20: mol_type = other DNA
gacaccaaacagatgtcaga

SEQ ID NO: 179709 - DNA, 20 bp, synthetic construct
  source 1..20: mol_type = other DNA
tgacaccaaacagatgtcag

SEQ ID NO: 179710 - DNA, 20 bp, synthetic construct
  source 1..20: mol_type = other DNA
ttgacaccaaacagatgtca

SEQ ID NO: 179711 - DNA, 20 bp, synthetic construct
  source 1..20: mol_type = other DNA
tttgacaccaaacagatgtc

SEQ ID NO: 179712 - DNA, 20 bp, synthetic construct
  source 1..20: mol_type = other DNA
ctttgacaccaaacagatgt

SEQ ID NO: 179713 - DNA, 20 bp, synthetic construct
  source 1..20: mol_type = other DNA
cctttgacaccaaacagatg

SEQ ID NO: 179714 - DNA, 20 bp, synthetic construct
  source 1..20: mol_type = other DNA
gcctttgacaccaaacagat

SEQ ID NO: 179715 - DNA, 20 bp, synthetic construct
  source 1..20: mol_type = other DNA
tgcctttgacaccaaacaga

SEQ ID NO: 179716 - DNA, 20 bp, synthetic construct
  source 1..20: mol_type = other DNA
gtgcctttgacaccaaacag

SEQ ID NO: 179717 - DNA, 20 bp, synthetic construct
  source 1..20: mol_type = other DNA
cgtgcctttgacaccaaaca

SEQ ID NO: 179718 - DNA, 20 bp, synthetic construct
  source 1..20: mol_type = other DNA
ccgtgcctttgacaccaaac

SEQ ID NO: 179719 - DNA, 20 bp, synthetic construct
  source 1..20: mol_type = other DNA
cccgtgcctttgacaccaaa

SEQ ID NO: 179720 - DNA, 20 bp, synthetic construct
  source 1..20: mol_type = other DNA
ccccgtgcctttgacaccaa

SEQ ID NO: 179721 - DNA, 20 bp, synthetic construct
  source 1..20: mol_type = other DNA
gccccgtgcctttgacacca

SEQ ID NO: 179722 - DNA, 20 bp, synthetic construct
  source 1..20: mol_type = other DNA
tgccccgtgcctttgacacc

SEQ ID NO: 179723 - DNA, 20 bp, synthetic construct
  source 1..20: mol_type = other DNA
ctgccccgtgcctttgacac

SEQ ID NO: 179724 - DNA, 20 bp, synthetic construct
  source 1..20: mol_type = other DNA
cctgccccgtgcctttgaca

SEQ ID NO: 179725 - DNA, 20 bp, synthetic construct
  source 1..20: mol_type = other DNA
gcctgccccgtgcctttgac

SEQ ID NO: 179726 - DNA, 20 bp, synthetic construct
  source 1..20: mol_type = other DNA
cgcctgccccgtgcctttga

SEQ ID NO: 179727 - DNA, 20 bp, synthetic construct
  source 1..20: mol_type = other DNA
gcgcctgccccgtgcctttg

SEQ ID NO: 179728 - DNA, 20 bp, synthetic construct
  source 1..20: mol_type = other DNA
cgcgcctgccccgtgccttt

SEQ ID NO: 179729 - DNA, 20 bp, synthetic construct
  source 1..20: mol_type = other DNA
acgcgcctgccccgtgcctt

SEQ ID NO: 179730 - DNA, 20 bp, synthetic construct
  source 1..20: mol_type = other DNA
aacgcgcctgccccgtgcct

SEQ ID NO: 179731 - DNA, 20 bp, synthetic construct
  source 1..20: mol_type = other DNA
taacgcgcctgccccgtgcc

SEQ ID NO: 179732 - DNA, 20 bp, synthetic construct
  source 1..20: mol_type = other DNA
ttaacgcgcctgccccgtgc

SEQ ID NO: 179733 - DNA, 20 bp, synthetic construct
  source 1..20: mol_type = other DNA
attaacgcgcctgccccgtg

SEQ ID NO: 179734 - DNA, 20 bp, synthetic construct
  source 1..20: mol_type = other DNA
aattaacgcgcctgccccgt

SEQ ID NO: 179735 - DNA, 20 bp, synthetic construct
  source 1..20: mol_type = other DNA
caattaacgcgcctgccccg

SEQ ID NO: 179736 - DNA, 20 bp, synthetic construct
  source 1..20: mol_type = other DNA
tcaattaacgcgcctgcccc

SEQ ID NO: 179737 - DNA, 20 bp, synthetic construct
  source 1..20: mol_type = other DNA
ttcaattaacgcgcctgccc

SEQ ID NO: 179738 - DNA, 20 bp, synthetic construct
  source 1..20: mol_type = other DNA
gttcaattaacgcgcctgcc

SEQ ID NO: 179739 - DNA, 20 bp, synthetic construct
  source 1..20: mol_type = other DNA
agttcaattaacgcgcctgc

SEQ ID NO: 179740 - DNA, 20 bp, synthetic construct
  source 1..20: mol_type = other DNA
cagttcaattaacgcgcctg

SEQ ID NO: 179741 - DNA, 20 bp, synthetic construct
  source 1..20: mol_type = other DNA
gcagttcaattaacgcgcct

SEQ ID NO: 179742 - DNA, 20 bp, synthetic construct
  source 1..20: mol_type = other DNA
agcagttcaattaacgcgcc

SEQ ID NO: 179743 - DNA, 20 bp, synthetic construct
  source 1..20: mol_type = other DNA
aagcagttcaattaacgcgc

SEQ ID NO: 179744 - DNA, 20 bp, synthetic construct
  source 1..20: mol_type = other DNA
caagcagttcaattaacgcg

SEQ ID NO: 179745 - DNA, 20 bp, synthetic construct
  source 1..20: mol_type = other DNA
gcaagcagttcaattaacgc

SEQ ID NO: 179746 - DNA, 20 bp, synthetic construct
  source 1..20: mol_type = other DNA
tgcaagcagttcaattaacg

SEQ ID NO: 179747 - DNA, 20 bp, synthetic construct
  source 1..20: mol_type = other DNA
gtgcaagcagttcaattaac

SEQ ID NO: 179748 - DNA, 20 bp, synthetic construct
  source 1..20: mol_type = other DNA
ggtgcaagcagttcaattaa

SEQ ID NO: 179749 - DNA, 20 bp, synthetic construct
  source 1..20: mol_type = other DNA
aggtgcaagcagttcaatta

SEQ ID NO: 179750 - DNA, 20 bp, synthetic construct
  source 1..20: mol_type = other DNA
caggtgcaagcagttcaatt

SEQ ID NO: 179751 - DNA, 20 bp, synthetic construct
  source 1..20: mol_type = other DNA
ccaggtgcaagcagttcaat

SEQ ID NO: 179752 - DNA, 20 bp, synthetic construct
  source 1..20: mol_type = other DNA
gccaggtgcaagcagttcaa

SEQ ID NO: 179753 - DNA, 20 bp, synthetic construct
  source 1..20: mol_type = other DNA
tgccaggtgcaagcagttca

SEQ ID NO: 179754 - DNA, 20 bp, synthetic construct
  source 1..20: mol_type = other DNA
atgccaggtgcaagcagttc

SEQ ID NO: 179755 - DNA, 20 bp, synthetic construct
  source 1..20: mol_type = other DNA
aatgccaggtgcaagcagtt

SEQ ID NO: 179756 - DNA, 20 bp, synthetic construct
  source 1..20: mol_type = other DNA
aaatgccaggtgcaagcagt

SEQ ID NO: 179757 - DNA, 20 bp, synthetic construct
  source 1..20: mol_type = other DNA
caaatgccaggtgcaagcag

SEQ ID NO: 179758 - DNA, 20 bp, synthetic construct
  source 1..20: mol_type = other DNA
tcaaatgccaggtgcaagca

SEQ ID NO: 179759 - DNA, 20 bp, synthetic construct
  source 1..20: mol_type = other DNA
ttcaaatgccaggtgcaagc

SEQ ID NO: 179760 - DNA, 20 bp, synthetic construct
  source 1..20: mol_type = other DNA
attcaaatgccaggtgcaag

SEQ ID NO: 179761 - DNA, 20 bp, synthetic construct
  source 1..20: mol_type = other DNA
aattcaaatgccaggtgcaa

SEQ ID NO: 179762 - DNA, 20 bp, synthetic construct
  source 1..20: mol_type = other DNA
caattcaaatgccaggtgca

SEQ ID NO: 179763 - DNA, 20 bp, synthetic construct
  source 1..20: mol_type = other DNA
tcaattcaaatgccaggtgc

SEQ ID NO: 179764 - DNA, 20 bp, synthetic construct
  source 1..20: mol_type = other DNA
ctcaattcaaatgccaggtg

SEQ ID NO: 179765 - DNA, 20 bp, synthetic construct
  source 1..20: mol_type = other DNA
gctcaattcaaatgccaggt

SEQ ID NO: 179766 - DNA, 20 bp, synthetic construct
  source 1..20: mol_type = other DNA
ggctcaattcaaatgccagg

SEQ ID NO: 179767 - DNA, 20 bp, synthetic construct
  source 1..20: mol_type = other DNA
tggctcaattcaaatgccag

SEQ ID NO: 179768 - DNA, 20 bp, synthetic construct
  source 1..20: mol_type = other DNA
ctggctcaattcaaatgcca

SEQ ID NO: 179769 - DNA, 20 bp, synthetic construct
  source 1..20: mol_type = other DNA
tctggctcaattcaaatgcc

SEQ ID NO: 179770 - DNA, 20 bp, synthetic construct
  source 1..20: mol_type = other DNA
ctctggctcaattcaaatgc

SEQ ID NO: 179771 - DNA, 20 bp, synthetic construct
  source 1..20: mol_type = other DNA
gctctggctcaattcaaatg

SEQ ID NO: 179772 - DNA, 20 bp, synthetic construct
  source 1..20: mol_type = other DNA
cgctctggctcaattcaaat

SEQ ID NO: 179773 - DNA, 20 bp, synthetic construct
  source 1..20: mol_type = other DNA
ccgctctggctcaattcaaa

SEQ ID NO: 179774 - DNA, 20 bp, synthetic construct
  source 1..20: mol_type = other DNA
cccgctctggctcaattcaa

SEQ ID NO: 179775 - DNA, 20 bp, synthetic construct
  source 1..20: mol_type = other DNA
ccccgctctggctcaattca

SEQ ID NO: 179776 - DNA, 20 bp, synthetic construct
  source 1..20: mol_type = other DNA
gccccgctctggctcaattc

SEQ ID NO: 179777 - DNA, 20 bp, synthetic construct
  source 1..20: mol_type = other DNA
agccccgctctggctcaatt

SEQ ID NO: 179778 - DNA, 20 bp, synthetic construct
  source 1..20: mol_type = other DNA
tagccccgctctggctcaat

SEQ ID NO: 179779 - DNA, 20 bp, synthetic construct
  source 1..20: mol_type = other DNA
ttagccccgctctggctcaa

SEQ ID NO: 179780 - DNA, 20 bp, synthetic construct
  source 1..20: mol_type = other DNA
tttagccccgctctggctca

SEQ ID NO: 179781 - DNA, 20 bp, synthetic construct
  source 1..20: mol_type = other DNA
ctttagccccgctctggctc

SEQ ID NO: 179782 - DNA, 20 bp, synthetic construct
  source 1..20: mol_type = other DNA
actttagccccgctctggct

SEQ ID NO: 179783 - DNA, 20 bp, synthetic construct
  source 1..20: mol_type = other DNA
gactttagccccgctctggc

SEQ ID NO: 179784 - DNA, 20 bp, synthetic construct
  source 1..20: mol_type = other DNA
tgactttagccccgctctgg

SEQ ID NO: 179785 - DNA, 20 bp, synthetic construct
  source 1..20: mol_type = other DNA
ctgactttagccccgctctg

SEQ ID NO: 179786 - DNA, 20 bp, synthetic construct
  source 1..20: mol_type = other DNA
actgactttagccccgctct

SEQ ID NO: 179787 - DNA, 20 bp, synthetic construct
  source 1..20: mol_type = other DNA
aactgactttagccccgctc

SEQ ID NO: 179788 - DNA, 20 bp, synthetic construct
  source 1..20: mol_type = other DNA
aaactgactttagccccgct

SEQ ID NO: 179789 - DNA, 20 bp, synthetic construct
  source 1..20: mol_type = other DNA
caaactgactttagccccgc

SEQ ID NO: 179790 - DNA, 20 bp, synthetic construct
  source 1..20: mol_type = other DNA
gcaaactgactttagccccg

SEQ ID NO: 179791 - DNA, 20 bp, synthetic construct
  source 1..20: mol_type = other DNA
ggcaaactgactttagcccc

SEQ ID NO: 179792 - DNA, 20 bp, synthetic construct
  source 1..20: mol_type = other DNA
aggcaaactgactttagccc

SEQ ID NO: 179793 - DNA, 20 bp, synthetic construct
  source 1..20: mol_type = other DNA
aaggcaaactgactttagcc

SEQ ID NO: 179794 - DNA, 20 bp, synthetic construct
  source 1..20: mol_type = other DNA
gaaggcaaactgactttagc

SEQ ID NO: 179795 - DNA, 20 bp, synthetic construct
  source 1..20: mol_type = other DNA
tgaaggcaaactgactttag

SEQ ID NO: 179796 - DNA, 20 bp, synthetic construct
  source 1..20: mol_type = other DNA
gtgaaggcaaactgacttta

SEQ ID NO: 179797 - DNA, 20 bp, synthetic construct
  source 1..20: mol_type = other DNA
ggtgaaggcaaactgacttt

SEQ ID NO: 179798 - DNA, 20 bp, synthetic construct
  source 1..20: mol_type = other DNA
gggtgaaggcaaactgactt

SEQ ID NO: 179799 - DNA, 20 bp, synthetic construct
  source 1..20: mol_type = other DNA
agggtgaaggcaaactgact

SEQ ID NO: 179800 - DNA, 20 bp, synthetic construct
  source 1..20: mol_type = other DNA
cagggtgaaggcaaactgac

SEQ ID NO: 179801 - DNA, 20 bp, synthetic construct
  source 1..20: mol_type = other DNA
acagggtgaaggcaaactga

SEQ ID NO: 179802 - DNA, 20 bp, synthetic construct
  source 1..20: mol_type = other DNA
tacagggtgaaggcaaactg

SEQ ID NO: 179803 - DNA, 20 bp, synthetic construct
  source 1..20: mol_type = other DNA
ttacagggtgaaggcaaact

SEQ ID NO: 179804 - DNA, 20 bp, synthetic construct
  source 1..20: mol_type = other DNA
tttacagggtgaaggcaaac

SEQ ID NO: 179805 - DNA, 20 bp, synthetic construct
  source 1..20: mol_type = other DNA
atttacagggtgaaggcaaa

SEQ ID NO: 179806 - DNA, 20 bp, synthetic construct
  source 1..20: mol_type = other DNA
catttacagggtgaaggcaa

SEQ ID NO: 179807 - DNA, 20 bp, synthetic construct
  source 1..20: mol_type = other DNA
ccatttacagggtgaaggca

SEQ ID NO: 179808 - DNA, 20 bp, synthetic construct
  source 1..20: mol_type = other DNA
tccatttacagggtgaaggc

SEQ ID NO: 179809 - DNA, 20 bp, synthetic construct
  source 1..20: mol_type = other DNA
ctccatttacagggtgaagg

SEQ ID NO: 179810 - DNA, 20 bp, synthetic construct
  source 1..20: mol_type = other DNA
cctccatttacagggtgaag

SEQ ID NO: 179811 - DNA, 20 bp, synthetic construct
  source 1..20: mol_type = other DNA
ccctccatttacagggtgaa

SEQ ID NO: 179812 - DNA, 20 bp, synthetic construct
  source 1..20: mol_type = other DNA
accctccatttacagggtga

SEQ ID NO: 179813 - DNA, 20 bp, synthetic construct
  source 1..20: mol_type = other DNA
aaccctccatttacagggtg

SEQ ID NO: 179814 - DNA, 20 bp, synthetic construct
  source 1..20: mol_type = other DNA
aaaccctccatttacagggt

SEQ ID NO: 179815 - DNA, 20 bp, synthetic construct
  source 1..20: mol_type = other DNA
gaaaccctccatttacaggg

SEQ ID NO: 179816 - DNA, 20 bp, synthetic construct
  source 1..20: mol_type = other DNA
agaaaccctccatttacagg

SEQ ID NO: 179817 - DNA, 20 bp, synthetic construct
  source 1..20: mol_type = other DNA
gagaaaccctccatttacag

SEQ ID NO: 179818 - DNA, 20 bp, synthetic construct
  source 1..20: mol_type = other DNA
ggagaaaccctccatttaca

SEQ ID NO: 179819 - DNA, 20 bp, synthetic construct
  source 1..20: mol_type = other DNA
cggagaaaccctccatttac

SEQ ID NO: 179820 - DNA, 20 bp, synthetic construct
  source 1..20: mol_type = other DNA
ccggagaaaccctccattta

SEQ ID NO: 179821 - DNA, 20 bp, synthetic construct
  source 1..20: mol_type = other DNA
tccggagaaaccctccattt

SEQ ID NO: 179822 - DNA, 20 bp, synthetic construct
  source 1..20: mol_type = other DNA
ctccggagaaaccctccatt

SEQ ID NO: 179823 - DNA, 20 bp, synthetic construct
  source 1..20: mol_type = other DNA
gctccggagaaaccctccat

SEQ ID NO: 179824 - DNA, 20 bp, synthetic construct
  source 1..20: mol_type = other DNA
cgctccggagaaaccctcca

SEQ ID NO: 179825 - DNA, 20 bp, synthetic construct
  source 1..20: mol_type = other DNA
acgctccggagaaaccctcc

SEQ ID NO: 179826 - DNA, 20 bp, synthetic construct
  source 1..20: mol_type = other DNA
cacgctccggagaaaccctc

SEQ ID NO: 179827 - DNA, 20 bp, synthetic construct
  source 1..20: mol_type = other DNA
ccacgctccggagaaaccct

SEQ ID NO: 179828 - DNA, 20 bp, synthetic construct
  source 1..20: mol_type = other DNA
tccacgctccggagaaaccc

SEQ ID NO: 179829 - DNA, 20 bp, synthetic construct
  source 1..20: mol_type = other DNA
atccacgctccggagaaacc

SEQ ID NO: 179830 - DNA, 20 bp, synthetic construct
  source 1..20: mol_type = other DNA
catccacgctccggagaaac

SEQ ID NO: 179831 - DNA, 20 bp, synthetic construct
  source 1..20: mol_type = other DNA
ccatccacgctccggagaaa

SEQ ID NO: 179832 - DNA, 20 bp, synthetic construct
  source 1..20: mol_type = other DNA
accatccacgctccggagaa

SEQ ID NO: 179833 - DNA, 20 bp, synthetic construct
  source 1..20: mol_type = other DNA
caccatccacgctccggaga

SEQ ID NO: 179834 - DNA, 20 bp, synthetic construct
  source 1..20: mol_type = other DNA
ccaccatccacgctccggag

SEQ ID NO: 179835 - DNA, 20 bp, synthetic construct
  source 1..20: mol_type = other DNA
cccaccatccacgctccgga

SEQ ID NO: 179836 - DNA, 20 bp, synthetic construct
  source 1..20: mol_type = other DNA
tcccaccatccacgctccgg

SEQ ID NO: 179837 - DNA, 20 bp, synthetic construct
  source 1..20: mol_type = other DNA
ctcccaccatccacgctccg

SEQ ID NO: 179838 - DNA, 20 bp, synthetic construct
  source 1..20: mol_type = other DNA
cctcccaccatccacgctcc

SEQ ID NO: 179839 - DNA, 20 bp, synthetic construct
  source 1..20: mol_type = other DNA
acctcccaccatccacgctc

SEQ ID NO: 179840 - DNA, 20 bp, synthetic construct
  source 1..20: mol_type = other DNA
tacctcccaccatccacgct

SEQ ID NO: 179841 - DNA, 20 bp, synthetic construct
  source 1..20: mol_type = other DNA
atacctcccaccatccacgc

SEQ ID NO: 179842 - DNA, 20 bp, synthetic construct
  source 1..20: mol_type = other DNA
aatacctcccaccatccacg

SEQ ID NO: 179843 - DNA, 20 bp, synthetic construct
  source 1..20: mol_type = other DNA
aaatacctcccaccatccac

SEQ ID NO: 179844 - DNA, 20 bp, synthetic construct
  source 1..20: mol_type = other DNA
gaaatacctcccaccatcca

SEQ ID NO: 179845 - DNA, 20 bp, synthetic construct
  source 1..20: mol_type = other DNA
tgaaatacctcccaccatcc

SEQ ID NO: 179846 - DNA, 20 bp, synthetic construct
  source 1..20: mol_type = other DNA
ctgaaatacctcccaccatc

SEQ ID NO: 179847 - DNA, 20 bp, synthetic construct
  source 1..20: mol_type = other DNA
cctgaaatacctcccaccat

SEQ ID NO: 179848 - DNA, 20 bp, synthetic construct
  source 1..20: mol_type = other DNA
ccctgaaatacctcccacca

SEQ ID NO: 179849 - DNA, 20 bp, synthetic construct
  source 1..20: mol_type = other DNA
accctgaaatacctcccacc

SEQ ID NO: 179850 - DNA, 20 bp, synthetic construct
  source 1..20: mol_type = other DNA
caccctgaaatacctcccac

SEQ ID NO: 179851 - DNA, 20 bp, synthetic construct
  source 1..20: mol_type = other DNA
acaccctgaaatacctccca

SEQ ID NO: 179852 - DNA, 20 bp, synthetic construct
  source 1..20: mol_type = other DNA
tacaccctgaaatacctccc

SEQ ID NO: 179853 - DNA, 20 bp, synthetic construct
  source 1..20: mol_type = other DNA
atacaccctgaaatacctcc

SEQ ID NO: 179854 - DNA, 20 bp, synthetic construct
  source 1..20: mol_type = other DNA
catacaccctgaaatacctc

SEQ ID NO: 179855 - DNA, 20 bp, synthetic construct
  source 1..20: mol_type = other DNA
gcatacaccctgaaatacct

SEQ ID NO: 179856 - DNA, 20 bp, synthetic construct
  source 1..20: mol_type = other DNA
tgcatacaccctgaaatacc

SEQ ID NO: 179857 - DNA, 20 bp, synthetic construct
  source 1..20: mol_type = other DNA
atgcatacaccctgaaatac

SEQ ID NO: 179858 - DNA, 20 bp, synthetic construct
  source 1..20: mol_type = other DNA
tatgcatacaccctgaaata

SEQ ID NO: 179859 - DNA, 20 bp, synthetic construct
  source 1..20: mol_type = other DNA
ttatgcatacaccctgaaat

SEQ ID NO: 179860 - DNA, 20 bp, synthetic construct
  source 1..20: mol_type = other DNA
gttatgcatacaccctgaaa

SEQ ID NO: 179861 - DNA, 20 bp, synthetic construct
  source 1..20: mol_type = other DNA
ggttatgcatacaccctgaa

SEQ ID NO: 179862 - DNA, 20 bp, synthetic construct
  source 1..20: mol_type = other DNA
gggttatgcatacaccctga

SEQ ID NO: 179863 - DNA, 20 bp, synthetic construct
  source 1..20: mol_type = other DNA
ggggttatgcatacaccctg

SEQ ID NO: 179864 - DNA, 20 bp, synthetic construct
  source 1..20: mol_type = other DNA
gggggttatgcatacaccct

SEQ ID NO: 179865 - DNA, 20 bp, synthetic construct
  source 1..20: mol_type = other DNA
tgggggttatgcatacaccc

SEQ ID NO: 179866 - DNA, 20 bp, synthetic construct
  source 1..20: mol_type = other DNA
gtgggggttatgcatacacc

SEQ ID NO: 179867 - DNA, 20 bp, synthetic construct
  source 1..20: mol_type = other DNA
ggtgggggttatgcatacac

SEQ ID NO: 179868 - DNA, 20 bp, synthetic construct
  source 1..20: mol_type = other DNA
gggtgggggttatgcataca

SEQ ID NO: 179869 - DNA, 20 bp, synthetic construct
  source 1..20: mol_type = other DNA
agggtgggggttatgcatac

SEQ ID NO: 179870 - DNA, 20 bp, synthetic construct
  source 1..20: mol_type = other DNA
cagggtgggggttatgcata

SEQ ID NO: 179871 - DNA, 20 bp, synthetic construct
  source 1..20: mol_type = other DNA
tcagggtgggggttatgcat

SEQ ID NO: 179872 - DNA, 20 bp, synthetic construct
  source 1..20: mol_type = other DNA
gtcagggtgggggttatgca

SEQ ID NO: 179873 - DNA, 20 bp, synthetic construct
  source 1..20: mol_type = other DNA
tgtcagggtgggggttatgc

SEQ ID NO: 179874 - DNA, 20 bp, synthetic construct
  source 1..20: mol_type = other DNA
ttgtcagggtgggggttatg

SEQ ID NO: 179875 - DNA, 20 bp, synthetic construct
  source 1..20: mol_type = other DNA
attgtcagggtgggggttat

SEQ ID NO: 179876 - DNA, 20 bp, synthetic construct
  source 1..20: mol_type = other DNA
cattgtcagggtgggggtta

SEQ ID NO: 179877 - DNA, 20 bp, synthetic construct
  source 1..20: mol_type = other DNA
ccattgtcagggtgggggtt

SEQ ID NO: 179878 - DNA, 20 bp, synthetic construct
  source 1..20: mol_type = other DNA
gccattgtcagggtgggggt

SEQ ID NO: 179879 - DNA, 20 bp, synthetic construct
  source 1..20: mol_type = other DNA
ggccattgtcagggtggggg

SEQ ID NO: 179880 - DNA, 20 bp, synthetic construct
  source 1..20: mol_type = other DNA
gggccattgtcagggtgggg

SEQ ID NO: 179881 - DNA, 20 bp, synthetic construct
  source 1..20: mol_type = other DNA
tgggccattgtcagggtggg

SEQ ID NO: 179882 - DNA, 20 bp, synthetic construct
  source 1..20: mol_type = other DNA
atgggccattgtcagggtgg

SEQ ID NO: 179883 - DNA, 20 bp, synthetic construct
  source 1..20: mol_type = other DNA
gatgggccattgtcagggtg

SEQ ID NO: 179884 - DNA, 20 bp, synthetic construct
  source 1..20: mol_type = other DNA
agatgggccattgtcagggt

SEQ ID NO: 179885 - DNA, 20 bp, synthetic construct
  source 1..20: mol_type = other DNA
gagatgggccattgtcaggg

SEQ ID NO: 179886 - DNA, 20 bp, synthetic construct
  source 1..20: mol_type = other DNA
agagatgggccattgtcagg

SEQ ID NO: 179887 - DNA, 20 bp, synthetic construct
  source 1..20: mol_type = other DNA
aagagatgggccattgtcag

SEQ ID NO: 179888 - DNA, 20 bp, synthetic construct
  source 1..20: mol_type = other DNA
gaagagatgggccattgtca

SEQ ID NO: 179889 - DNA, 20 bp, synthetic construct
  source 1..20: mol_type = other DNA
agaagagatgggccattgtc

SEQ ID NO: 179890 - DNA, 20 bp, synthetic construct
  source 1..20: mol_type = other DNA
gagaagagatgggccattgt

SEQ ID NO: 179891 - DNA, 20 bp, synthetic construct
  source 1..20: mol_type = other DNA
ggagaagagatgggccattg

SEQ ID NO: 179892 - DNA, 20 bp, synthetic construct
  source 1..20: mol_type = other DNA
tggagaagagatgggccatt

SEQ ID NO: 179893 - DNA, 20 bp, synthetic construct
  source 1..20: mol_type = other DNA
ctggagaagagatgggccat

SEQ ID NO: 179894 - DNA, 20 bp, synthetic construct
  source 1..20: mol_type = other DNA
gctggagaagagatgggcca

SEQ ID NO: 179895 - DNA, 20 bp, synthetic construct
  source 1..20: mol_type = other DNA
cgctggagaagagatgggcc

SEQ ID NO: 179896 - DNA, 20 bp, synthetic construct
  source 1..20: mol_type = other DNA
acgctggagaagagatgggc

SEQ ID NO: 179897 - DNA, 20 bp, synthetic construct
  source 1..20: mol_type = other DNA
cacgctggagaagagatggg

SEQ ID NO: 179898 - DNA, 20 bp, synthetic construct
  source 1..20: mol_type = other DNA
ccacgctggagaagagatgg

SEQ ID NO: 179899 - DNA, 20 bp, synthetic construct
  source 1..20: mol_type = other DNA
gccacgctggagaagagatg

SEQ ID NO: 179900 - DNA, 20 bp, synthetic construct
  source 1..20: mol_type = other DNA
ggccacgctggagaagagat

SEQ ID NO: 179901 - DNA, 20 bp, synthetic construct
  source 1..20: mol_type = other DNA
tggccacgctggagaagaga

SEQ ID NO: 179902 - DNA, 20 bp, synthetic construct
  source 1..20: mol_type = other DNA
ctggccacgctggagaagag

SEQ ID NO: 179903 - DNA, 20 bp, synthetic construct
  source 1..20: mol_type = other DNA
cctggccacgctggagaaga

SEQ ID NO: 179904 - DNA, 20 bp, synthetic construct
  source 1..20: mol_type = other DNA
acctggccacgctggagaag

SEQ ID NO: 179905 - DNA, 20 bp, synthetic construct
  source 1..20: mol_type = other DNA
aacctggccacgctggagaa

SEQ ID NO: 179906 - DNA, 20 bp, synthetic construct
  source 1..20: mol_type = other DNA
aaacctggccacgctggaga

SEQ ID NO: 179907 - DNA, 20 bp, synthetic construct
  source 1..20: mol_type = other DNA
caaacctggccacgctggag

SEQ ID NO: 179908 - DNA, 20 bp, synthetic construct
  source 1..20: mol_type = other DNA
tcaaacctggccacgctgga

SEQ ID NO: 179909 - DNA, 20 bp, synthetic construct
  source 1..20: mol_type = other DNA
ctcaaacctggccacgctgg

SEQ ID NO: 179910 - DNA, 20 bp, synthetic construct
  source 1..20: mol_type = other DNA
actcaaacctggccacgctg

SEQ ID NO: 179911 - DNA, 20 bp, synthetic construct
  source 1..20: mol_type = other DNA
cactcaaacctggccacgct

SEQ ID NO: 179912 - DNA, 20 bp, synthetic construct
  source 1..20: mol_type = other DNA
gcactcaaacctggccacgc

SEQ ID NO: 179913 - DNA, 20 bp, synthetic construct
  source 1..20: mol_type = other DNA
ggcactcaaacctggccacg

SEQ ID NO: 179914 - DNA, 20 bp, synthetic construct
  source 1..20: mol_type = other DNA
tggcactcaaacctggccac

SEQ ID NO: 179915 - DNA, 20 bp, synthetic construct
  source 1..20: mol_type = other DNA
ctggcactcaaacctggcca

SEQ ID NO: 179916 - DNA, 20 bp, synthetic construct
  source 1..20: mol_type = other DNA
actggcactcaaacctggcc

SEQ ID NO: 179917 - DNA, 20 bp, synthetic construct
  source 1..20: mol_type = other DNA
gactggcactcaaacctggc

SEQ ID NO: 179918 - DNA, 20 bp, synthetic construct
  source 1..20: mol_type = other DNA
ggactggcactcaaacctgg

SEQ ID NO: 179919 - DNA, 20 bp, synthetic construct
  source 1..20: mol_type = other DNA
aggactggcactcaaacctg

SEQ ID NO: 179920 - DNA, 20 bp, synthetic construct
  source 1..20: mol_type = other DNA
caggactggcactcaaacct

SEQ ID NO: 179921 - DNA, 20 bp, synthetic construct
  source 1..20: mol_type = other DNA
ccaggactggcactcaaacc

SEQ ID NO: 179922 - DNA, 20 bp, synthetic construct
  source 1..20: mol_type = other DNA
cccaggactggcactcaaac

SEQ ID NO: 179923 - DNA, 20 bp, synthetic construct
  source 1..20: mol_type = other DNA
acccaggactggcactcaaa

SEQ ID NO: 179924 - DNA, 20 bp, synthetic construct
  source 1..20: mol_type = other DNA
cacccaggactggcactcaa

SEQ ID NO: 179925 - DNA, 20 bp, synthetic construct
  source 1..20: mol_type = other DNA
acacccaggactggcactca

SEQ ID NO: 179926 - DNA, 20 bp, synthetic construct
  source 1..20: mol_type = other DNA
gacacccaggactggcactc

SEQ ID NO: 179927 - DNA, 20 bp, synthetic construct
  source 1..20: mol_type = other DNA
ggacacccaggactggcact

SEQ ID NO: 179928 - DNA, 20 bp, synthetic construct
  source 1..20: mol_type = other DNA
tggacacccaggactggcac

SEQ ID NO: 179929 - DNA, 20 bp, synthetic construct
  source 1..20: mol_type = other DNA
ctggacacccaggactggca

SEQ ID NO: 179930 - DNA, 20 bp, synthetic construct
  source 1..20: mol_type = other DNA
actggacacccaggactggc

SEQ ID NO: 179931 - DNA, 20 bp, synthetic construct
  source 1..20: mol_type = other DNA
cactggacacccaggactgg

SEQ ID NO: 179932 - DNA, 20 bp, synthetic construct
  source 1..20: mol_type = other DNA
ccactggacacccaggactg

SEQ ID NO: 179933 - DNA, 20 bp, synthetic construct
  source 1..20: mol_type = other DNA
gccactggacacccaggact

SEQ ID NO: 179934 - DNA, 20 bp, synthetic construct
  source 1..20: mol_type = other DNA
ggccactggacacccaggac

SEQ ID NO: 179935 - DNA, 20 bp, synthetic construct
  source 1..20: mol_type = other DNA
gggccactggacacccagga

SEQ ID NO: 179936 - DNA, 20 bp, synthetic construct
  source 1..20: mol_type = other DNA
ggggccactggacacccagg

SEQ ID NO: 179937 - DNA, 20 bp, synthetic construct
  source 1..20: mol_type = other DNA
tggggccactggacacccag

SEQ ID NO: 179938 - DNA, 20 bp, synthetic construct
  source 1..20: mol_type = other DNA
atggggccactggacaccca

SEQ ID NO: 179939 - DNA, 20 bp, synthetic construct
  source 1..20: mol_type = other DNA
tatggggccactggacaccc

SEQ ID NO: 179940 - DNA, 20 bp, synthetic construct
  source 1..20: mol_type = other DNA
ctatggggccactggacacc

SEQ ID NO: 179941 - DNA, 20 bp, synthetic construct
  source 1..20: mol_type = other DNA
gctatggggccactggacac

SEQ ID NO: 179942 - DNA, 20 bp, synthetic construct
  source 1..20: mol_type = other DNA
ggctatggggccactggaca

SEQ ID NO: 179943 - DNA, 20 bp, synthetic construct
  source 1..20: mol_type = other DNA
aggctatggggccactggac

SEQ ID NO: 179944 - DNA, 20 bp, synthetic construct
  source 1..20: mol_type = other DNA
aaggctatggggccactgga

SEQ ID NO: 179945 - DNA, 20 bp, synthetic construct
  source 1..20: mol_type = other DNA
caaggctatggggccactgg

SEQ ID NO: 179946 - DNA, 20 bp, synthetic construct
  source 1..20: mol_type = other DNA
gcaaggctatggggccactg

SEQ ID NO: 179947 - DNA, 20 bp, synthetic construct
  source 1..20: mol_type = other DNA
cgcaaggctatggggccact

SEQ ID NO: 179948 - DNA, 20 bp, synthetic construct
  source 1..20: mol_type = other DNA
acgcaaggctatggggccac

SEQ ID NO: 179949 - DNA, 20 bp, synthetic construct
  source 1..20: mol_type = other DNA
aacgcaaggctatggggcca

SEQ ID NO: 179950 - DNA, 20 bp, synthetic construct
  source 1..20: mol_type = other DNA
aaacgcaaggctatggggcc

SEQ ID NO: 179951 - DNA, 20 bp, synthetic construct
  source 1..20: mol_type = other DNA
aaaacgcaaggctatggggc

SEQ ID NO: 179952 - DNA, 20 bp, synthetic construct
  source 1..20: mol_type = other DNA
taaaacgcaaggctatgggg

SEQ ID NO: 179953 - DNA, 20 bp, synthetic construct
  source 1..20: mol_type = other DNA
ctaaaacgcaaggctatggg

SEQ ID NO: 179954 - DNA, 20 bp, synthetic construct
  source 1..20: mol_type = other DNA
actaaaacgcaaggctatgg

SEQ ID NO: 179955 - DNA, 20 bp, synthetic construct
  source 1..20: mol_type = other DNA
tactaaaacgcaaggctatg

SEQ ID NO: 179956 - DNA, 20 bp, synthetic construct
  source 1..20: mol_type = other DNA
ttactaaaacgcaaggctat

SEQ ID NO: 179957 - DNA, 20 bp, synthetic construct
  source 1..20: mol_type = other DNA
tttactaaaacgcaaggcta

SEQ ID NO: 179958 - DNA, 20 bp, synthetic construct
  source 1..20: mol_type = other DNA
ttttactaaaacgcaaggct

SEQ ID NO: 179959 - DNA, 20 bp, synthetic construct
  source 1..20: mol_type = other DNA
attttactaaaacgcaaggc

SEQ ID NO: 179960 - DNA, 20 bp, synthetic construct
  source 1..20: mol_type = other DNA
cattttactaaaacgcaagg

SEQ ID NO: 179961 - DNA, 20 bp, synthetic construct
  source 1..20: mol_type = other DNA
gcattttactaaaacgcaag

SEQ ID NO: 179962 - DNA, 20 bp, synthetic construct
  source 1..20: mol_type = other DNA
agcattttactaaaacgcaa

SEQ ID NO: 179963 - DNA, 20 bp, synthetic construct
  source 1..20: mol_type = other DNA
cagcattttactaaaacgca

SEQ ID NO: 179964 - DNA, 20 bp, synthetic construct
  source 1..20: mol_type = other DNA
gcagcattttactaaaacgc

SEQ ID NO: 179965 - DNA, 20 bp, synthetic construct
  source 1..20: mol_type = other DNA
ggcagcattttactaaaacg

SEQ ID NO: 179966 - DNA, 20 bp, synthetic construct
  source 1..20: mol_type = other DNA
gggcagcattttactaaaac

SEQ ID NO: 179967 - DNA, 20 bp, synthetic construct
  source 1..20: mol_type = other DNA
ggggcagcattttactaaaa

SEQ ID NO: 179968 - DNA, 20 bp, synthetic construct
  source 1..20: mol_type = other DNA
gggggcagcattttactaaa

SEQ ID NO: 179969 - DNA, 20 bp, synthetic construct
  source 1..20: mol_type = other DNA
tgggggcagcattttactaa

SEQ ID NO: 179970 - DNA, 20 bp, synthetic construct
  source 1..20: mol_type = other DNA
atgggggcagcattttacta

SEQ ID NO: 179971 - DNA, 20 bp, synthetic construct
  source 1..20: mol_type = other DNA
aatgggggcagcattttact

SEQ ID NO: 179972 - DNA, 20 bp, synthetic construct
  source 1..20: mol_type = other DNA
taatgggggcagcattttac

SEQ ID NO: 179973 - DNA, 20 bp, synthetic construct
  source 1..20: mol_type = other DNA
gtaatgggggcagcatttta

SEQ ID NO: 179974 - DNA, 20 bp, synthetic construct
  source 1..20: mol_type = other DNA
ggtaatgggggcagcatttt

SEQ ID NO: 179975 - DNA, 20 bp, synthetic construct
  source 1..20: mol_type = other DNA
tggtaatgggggcagcattt

SEQ ID NO: 179976 - DNA, 20 bp, synthetic construct
  source 1..20: mol_type = other DNA
gtggtaatgggggcagcatt

SEQ ID NO: 179977 - DNA, 20 bp, synthetic construct
  source 1..20: mol_type = other DNA
ggtggtaatgggggcagcat

SEQ ID NO: 179978 - DNA, 20 bp, synthetic construct
  source 1..20: mol_type = other DNA
aggtggtaatgggggcagca

SEQ ID NO: 179979 - DNA, 20 bp, synthetic construct
  source 1..20: mol_type = other DNA
caggtggtaatgggggcagc

SEQ ID NO: 179980 - DNA, 20 bp, synthetic construct
  source 1..20: mol_type = other DNA
ccaggtggtaatgggggcag

SEQ ID NO: 179981 - DNA, 20 bp, synthetic construct
  source 1..20: mol_type = other DNA
accaggtggtaatgggggca

SEQ ID NO: 179982 - DNA, 20 bp, synthetic construct
  source 1..20: mol_type = other DNA
gaccaggtggtaatgggggc

SEQ ID NO: 179983 - DNA, 20 bp, synthetic construct
  source 1..20: mol_type = other DNA
agaccaggtggtaatggggg

SEQ ID NO: 179984 - DNA, 20 bp, synthetic construct
  source 1..20: mol_type = other DNA
cagaccaggtggtaatgggg

SEQ ID NO: 179985 - DNA, 20 bp, synthetic construct
  source 1..20: mol_type = other DNA
acagaccaggtggtaatggg

SEQ ID NO: 179986 - DNA, 20 bp, synthetic construct
  source 1..20: mol_type = other DNA
cacagaccaggtggtaatgg

SEQ ID NO: 179987 - DNA, 20 bp, synthetic construct
  source 1..20: mol_type = other DNA
gcacagaccaggtggtaatg

SEQ ID NO: 179988 - DNA, 20 bp, synthetic construct
  source 1..20: mol_type = other DNA
tgcacagaccaggtggtaat

SEQ ID NO: 179989 - DNA, 20 bp, synthetic construct
  source 1..20: mol_type = other DNA
gtgcacagaccaggtggtaa

SEQ ID NO: 179990 - DNA, 20 bp, synthetic construct
  source 1..20: mol_type = other DNA
agtgcacagaccaggtggta

SEQ ID NO: 179991 - DNA, 20 bp, synthetic construct
  source 1..20: mol_type = other DNA
aagtgcacagaccaggtggt

SEQ ID NO: 179992 - DNA, 20 bp, synthetic construct
  source 1..20: mol_type = other DNA
gaagtgcacagaccaggtgg

SEQ ID NO: 179993 - DNA, 20 bp, synthetic construct
  source 1..20: mol_type = other DNA
cgaagtgcacagaccaggtg

SEQ ID NO: 179994 - DNA, 20 bp, synthetic construct
  source 1..20: mol_type = other DNA
ccgaagtgcacagaccaggt

SEQ ID NO: 179995 - DNA, 20 bp, synthetic construct
  source 1..20: mol_type = other DNA
accgaagtgcacagaccagg

SEQ ID NO: 179996 - DNA, 20 bp, synthetic construct
  source 1..20: mol_type = other DNA
gaccgaagtgcacagaccag

SEQ ID NO: 179997 - DNA, 20 bp, synthetic construct
  source 1..20: mol_type = other DNA
tgaccgaagtgcacagacca

SEQ ID NO: 179998 - DNA, 20 bp, synthetic construct
  source 1..20: mol_type = other DNA
gtgaccgaagtgcacagacc

SEQ ID NO: 179999 - DNA, 20 bp, synthetic construct
  source 1..20: mol_type = other DNA
agtgaccgaagtgcacagac

SEQ ID NO: 180000 - DNA, 20 bp, synthetic construct
  source 1..20: mol_type = other DNA
cagtgaccgaagtgcacaga

SEQ ID NO: 180001 - DNA, 20 bp, synthetic construct
  source 1..20: mol_type = other DNA
ccagtgaccgaagtgcacag

SEQ ID NO: 180002 - DNA, 20 bp, synthetic construct
  source 1..20: mol_type = other DNA
tccagtgaccgaagtgcaca

SEQ ID NO: 180003 - DNA, 20 bp, synthetic construct
  source 1..20: mol_type = other DNA
ttccagtgaccgaagtgcac

SEQ ID NO: 180004 - DNA, 20 bp, synthetic construct
  source 1..20: mol_type = other DNA
attccagtgaccgaagtgca

SEQ ID NO: 180005 - DNA, 20 bp, synthetic construct
  source 1..20: mol_type = other DNA
aattccagtgaccgaagtgc

SEQ ID NO: 180006 - DNA, 20 bp, synthetic construct
  source 1..20: mol_type = other DNA
aaattccagtgaccgaagtg

SEQ ID NO: 180007 - DNA, 20 bp, synthetic construct
  source 1..20: mol_type = other DNA
caaattccagtgaccgaagt

SEQ ID NO: 180008 - DNA, 20 bp, synthetic construct
  source 1..20: mol_type = other DNA
gcaaattccagtgaccgaag

SEQ ID NO: 180009 - DNA, 20 bp, synthetic construct
  source 1..20: mol_type = other DNA
ggcaaattccagtgaccgaa

SEQ ID NO: 180010 - DNA, 20 bp, synthetic construct
  source 1..20: mol_type = other DNA
tggcaaattccagtgaccga

SEQ ID NO: 180011 - DNA, 20 bp, synthetic construct
  source 1..20: mol_type = other DNA
atggcaaattccagtgaccg

SEQ ID NO: 180012 - DNA, 20 bp, synthetic construct
  source 1..20: mol_type = other DNA
gatggcaaattccagtgacc

SEQ ID NO: 180013 - DNA, 20 bp, synthetic construct
  source 1..20: mol_type = other DNA
agatggcaaattccagtgac

SEQ ID NO: 180014 - DNA, 20 bp, synthetic construct
  source 1..20: mol_type = other DNA
aagatggcaaattccagtga

SEQ ID NO: 180015 - DNA, 20 bp, synthetic construct
  source 1..20: mol_type = other DNA
gaagatggcaaattccagtg

SEQ ID NO: 180016 - DNA, 20 bp, synthetic construct
  source 1..20: mol_type = other DNA
ggaagatggcaaattccagt

SEQ ID NO: 180017 - DNA, 20 bp, synthetic construct
  source 1..20: mol_type = other DNA
tggaagatggcaaattccag

SEQ ID NO: 180018 - DNA, 20 bp, synthetic construct
  source 1..20: mol_type = other DNA
ctggaagatggcaaattcca

SEQ ID NO: 180019 - DNA, 20 bp, synthetic construct
  source 1..20: mol_type = other DNA
actggaagatggcaaattcc

SEQ ID NO: 180020 - DNA, 20 bp, synthetic construct
  source 1..20: mol_type = other DNA
gactggaagatggcaaattc

SEQ ID NO: 180021 - DNA, 20 bp, synthetic construct
  source 1..20: mol_type = other DNA
ggactggaagatggcaaatt

SEQ ID NO: 180022 - DNA, 20 bp, synthetic construct
  source 1..20: mol_type = other DNA
gggactggaagatggcaaat

SEQ ID NO: 180023 - DNA, 20 bp, synthetic construct
  source 1..20: mol_type = other DNA
cgggactggaagatggcaaa

SEQ ID NO: 180024 - DNA, 20 bp, synthetic construct
  source 1..20: mol_type = other DNA
tcgggactggaagatggcaa

SEQ ID NO: 180025 - DNA, 20 bp, synthetic construct
  source 1..20: mol_type = other DNA
ttcgggactggaagatggca

SEQ ID NO: 180026 - DNA, 20 bp, synthetic construct
  source 1..20: mol_type = other DNA
attcgggactggaagatggc

SEQ ID NO: 180027 - DNA, 20 bp, synthetic construct
  source 1..20: mol_type = other DNA
cattcgggactggaagatgg

SEQ ID NO: 180028 - DNA, 20 bp, synthetic construct
  source 1..20: mol_type = other DNA
acattcgggactggaagatg

SEQ ID NO: 180029 - DNA, 20 bp, synthetic construct
  source 1..20: mol_type = other DNA
cacattcgggactggaagat

SEQ ID NO: 180030 - DNA, 20 bp, synthetic construct
  source 1..20: mol_type = other DNA
ccacattcgggactggaaga

SEQ ID NO: 180031 - DNA, 20 bp, synthetic construct
  source 1..20: mol_type = other DNA
gccacattcgggactggaag

SEQ ID NO: 180032 - DNA, 20 bp, synthetic construct
  source 1..20: mol_type = other DNA
tgccacattcgggactggaa

SEQ ID NO: 180033 - DNA, 20 bp, synthetic construct
  source 1..20: mol_type = other DNA
ttgccacattcgggactgga

SEQ ID NO: 180034 - DNA, 20 bp, synthetic construct
  source 1..20: mol_type = other DNA
cttgccacattcgggactgg

SEQ ID NO: 180035 - DNA, 20 bp, synthetic construct
  source 1..20: mol_type = other DNA
gcttgccacattcgggactg

SEQ ID NO: 180036 - DNA, 20 bp, synthetic construct
  source 1..20: mol_type = other DNA
ggcttgccacattcgggact

SEQ ID NO: 180037 - DNA, 20 bp, synthetic construct
  source 1..20: mol_type = other DNA
tggcttgccacattcgggac

SEQ ID NO: 180038 - DNA, 20 bp, synthetic construct
  source 1..20: mol_type = other DNA
atggcttgccacattcggga

SEQ ID NO: 180039 - DNA, 20 bp, synthetic construct
  source 1..20: mol_type = other DNA
catggcttgccacattcggg

SEQ ID NO: 180040 - DNA, 20 bp, synthetic construct
  source 1..20: mol_type = other DNA
ccatggcttgccacattcgg

SEQ ID NO: 180041 - DNA, 20 bp, synthetic construct
  source 1..20: mol_type = other DNA
tccatggcttgccacattcg

SEQ ID NO: 180042 - DNA, 20 bp, synthetic construct
  source 1..20: mol_type = other DNA
ctccatggcttgccacattc

SEQ ID NO: 180043 - DNA, 20 bp, synthetic construct
  source 1..20: mol_type = other DNA
gctccatggcttgccacatt

SEQ ID NO: 180044 - DNA, 20 bp, synthetic construct
  source 1..20: mol_type = other DNA
ggctccatggcttgccacat

SEQ ID NO: 180045 - DNA, 20 bp, synthetic construct
  source 1..20: mol_type = other DNA
aggctccatggcttgccaca

SEQ ID NO: 180046 - DNA, 20 bp, synthetic construct
  source 1..20: mol_type = other DNA
aaggctccatggcttgccac

SEQ ID NO: 180047 - DNA, 20 bp, synthetic construct
  source 1..20: mol_type = other DNA
taaggctccatggcttgcca

SEQ ID NO: 180048 - DNA, 20 bp, synthetic construct
  source 1..20: mol_type = other DNA
ttaaggctccatggcttgcc

SEQ ID NO: 180049 - DNA, 20 bp, synthetic construct
  source 1..20: mol_type = other DNA
cttaaggctccatggcttgc

SEQ ID NO: 180050 - DNA, 20 bp, synthetic construct
  source 1..20: mol_type = other DNA
gcttaaggctccatggcttg

SEQ ID NO: 180051 - DNA, 20 bp, synthetic construct
  source 1..20: mol_type = other DNA
agcttaaggctccatggctt

SEQ ID NO: 180052 - DNA, 20 bp, synthetic construct
  source 1..20: mol_type = other DNA
gagcttaaggctccatggct

SEQ ID NO: 180053 - DNA, 20 bp, synthetic construct
  source 1..20: mol_type = other DNA
agagcttaaggctccatggc

SEQ ID NO: 180054 - DNA, 20 bp, synthetic construct
  source 1..20: mol_type = other DNA
aagagcttaaggctccatgg

SEQ ID NO: 180055 - DNA, 20 bp, synthetic construct
  source 1..20: mol_type = other DNA
gaagagcttaaggctccatg

SEQ ID NO: 180056 - DNA, 20 bp, synthetic construct
  source 1..20: mol_type = other DNA
agaagagcttaaggctccat

SEQ ID NO: 180057 - DNA, 20 bp, synthetic construct
  source 1..20: mol_type = other DNA
gagaagagcttaaggctcca

SEQ ID NO: 180058 - DNA, 20 bp, synthetic construct
  source 1..20: mol_type = other DNA
ggagaagagcttaaggctcc

SEQ ID NO: 180059 - DNA, 20 bp, synthetic construct
  source 1..20: mol_type = other DNA
gggagaagagcttaaggctc

SEQ ID NO: 180060 - DNA, 20 bp, synthetic construct
  source 1..20: mol_type = other DNA
agggagaagagcttaaggct

SEQ ID NO: 180061 - DNA, 20 bp, synthetic construct
  source 1..20: mol_type = other DNA
gagggagaagagcttaaggc

SEQ ID NO: 180062 - DNA, 20 bp, synthetic construct
  source 1..20: mol_type = other DNA
ggagggagaagagcttaagg

SEQ ID NO: 180063 - DNA, 20 bp, synthetic construct
  source 1..20: mol_type = other DNA
tggagggagaagagcttaag

SEQ ID NO: 180064 - DNA, 20 bp, synthetic construct
  source 1..20: mol_type = other DNA
gtggagggagaagagcttaa

SEQ ID NO: 180065 - DNA, 20 bp, synthetic construct
  source 1..20: mol_type = other DNA
tgtggagggagaagagctta

SEQ ID NO: 180066 - DNA, 20 bp, synthetic construct
  source 1..20: mol_type = other DNA
atgtggagggagaagagctt

SEQ ID NO: 180067 - DNA, 20 bp, synthetic construct
  source 1..20: mol_type = other DNA
gatgtggagggagaagagct

SEQ ID NO: 180068 - DNA, 20 bp, synthetic construct
  source 1..20: mol_type = other DNA
ggatgtggagggagaagagc

SEQ ID NO: 180069 - DNA, 20 bp, synthetic construct
  source 1..20: mol_type = other DNA
aggatgtggagggagaagag

SEQ ID NO: 180070 - DNA, 20 bp, synthetic construct
  source 1..20: mol_type = other DNA
caggatgtggagggagaaga

SEQ ID NO: 180071 - DNA, 20 bp, synthetic construct
  source 1..20: mol_type = other DNA
ccaggatgtggagggagaag

SEQ ID NO: 180072 - DNA, 20 bp, synthetic construct
  source 1..20: mol_type = other DNA
tccaggatgtggagggagaa

SEQ ID NO: 180073 - DNA, 20 bp, synthetic construct
  source 1..20: mol_type = other DNA
ttccaggatgtggagggaga

SEQ ID NO: 180074 - DNA, 20 bp, synthetic construct
  source 1..20: mol_type = other DNA
gttccaggatgtggagggag

SEQ ID NO: 180075 - DNA, 20 bp, synthetic construct
  source 1..20: mol_type = other DNA
tgttccaggatgtggaggga

SEQ ID NO: 180076 - DNA, 20 bp, synthetic construct
  source 1..20: mol_type = other DNA
ctgttccaggatgtggaggg

SEQ ID NO: 180077 - DNA, 20 bp, synthetic construct
  source 1..20: mol_type = other DNA
tctgttccaggatgtggagg

SEQ ID NO: 180078 - DNA, 20 bp, synthetic construct
  source 1..20: mol_type = other DNA
gtctgttccaggatgtggag

SEQ ID NO: 180079 - DNA, 20 bp, synthetic construct
  source 1..20: mol_type = other DNA
ggtctgttccaggatgtgga

SEQ ID NO: 180080 - DNA, 20 bp, synthetic construct
  source 1..20: mol_type = other DNA
gggtctgttccaggatgtgg

SEQ ID NO: 180081 - DNA, 20 bp, synthetic construct
  source 1..20: mol_type = other DNA
cgggtctgttccaggatgtg

SEQ ID NO: 180082 - DNA, 20 bp, synthetic construct
  source 1..20: mol_type = other DNA
gcgggtctgttccaggatgt

SEQ ID NO: 180083 - DNA, 20 bp, synthetic construct
  source 1..20: mol_type = other DNA
ggcgggtctgttccaggatg

SEQ ID NO: 180084 - DNA, 20 bp, synthetic construct
  source 1..20: mol_type = other DNA
tggcgggtctgttccaggat

SEQ ID NO: 180085 - DNA, 20 bp, synthetic construct
  source 1..20: mol_type = other DNA
ctggcgggtctgttccagga

SEQ ID NO: 180086 - DNA, 20 bp, synthetic construct
  source 1..20: mol_type = other DNA
actggcgggtctgttccagg

SEQ ID NO: 180087 - DNA, 20 bp, synthetic construct
  source 1..20: mol_type = other DNA
aactggcgggtctgttccag

SEQ ID NO: 180088 - DNA, 20 bp, synthetic construct
  source 1..20: mol_type = other DNA
aaactggcgggtctgttcca

SEQ ID NO: 180089 - DNA, 20 bp, synthetic construct
  source 1..20: mol_type = other DNA
gaaactggcgggtctgttcc

SEQ ID NO: 180090 - DNA, 20 bp, synthetic construct
  source 1..20: mol_type = other DNA
agaaactggcgggtctgttc

SEQ ID NO: 180091 - DNA, 20 bp, synthetic construct
  source 1..20: mol_type = other DNA
aagaaactggcgggtctgtt

SEQ ID NO: 180092 - DNA, 20 bp, synthetic construct
  source 1..20: mol_type = other DNA
gaagaaactggcgggtctgt

SEQ ID NO: 180093 - DNA, 20 bp, synthetic construct
  source 1..20: mol_type = other DNA
ggaagaaactggcgggtctg

SEQ ID NO: 180094 - DNA, 20 bp, synthetic construct
  source 1..20: mol_type = other DNA
tggaagaaactggcgggtct

SEQ ID NO: 180095 - DNA, 20 bp, synthetic construct
  source 1..20: mol_type = other DNA
ctggaagaaactggcgggtc

SEQ ID NO: 180096 - DNA, 20 bp, synthetic construct
  source 1..20: mol_type = other DNA
cctggaagaaactggcgggt

SEQ ID NO: 180097 - DNA, 20 bp, synthetic construct
  source 1..20: mol_type = other DNA
gcctggaagaaactggcggg

SEQ ID NO: 180098 - DNA, 20 bp, synthetic construct
  source 1..20: mol_type = other DNA
tgcctggaagaaactggcgg

SEQ ID NO: 180099 - DNA, 20 bp, synthetic construct
  source 1..20: mol_type = other DNA
atgcctggaagaaactggcg

SEQ ID NO: 180100 - DNA, 20 bp, synthetic construct
  source 1..20: mol_type = other DNA
aatgcctggaagaaactggc

SEQ ID NO: 180101 - DNA, 20 bp, synthetic construct
  source 1..20: mol_type = other DNA
caatgcctggaagaaactgg

SEQ ID NO: 180102 - DNA, 20 bp, synthetic construct
  source 1..20: mol_type = other DNA
gcaatgcctggaagaaactg

SEQ ID NO: 180103 - DNA, 20 bp, synthetic construct
  source 1..20: mol_type = other DNA
ggcaatgcctggaagaaact

SEQ ID NO: 180104 - DNA, 20 bp, synthetic construct
  source 1..20: mol_type = other DNA
aggcaatgcctggaagaaac

SEQ ID NO: 180105 - DNA, 20 bp, synthetic construct
  source 1..20: mol_type = other DNA
gaggcaatgcctggaagaaa

SEQ ID NO: 180106 - DNA, 20 bp, synthetic construct
  source 1..20: mol_type = other DNA
tgaggcaatgcctggaagaa

SEQ ID NO: 180107 - DNA, 20 bp, synthetic construct
  source 1..20: mol_type = other DNA
ctgaggcaatgcctggaaga

SEQ ID NO: 180108 - DNA, 20 bp, synthetic construct
  source 1..20: mol_type = other DNA
actgaggcaatgcctggaag

SEQ ID NO: 180109 - DNA, 20 bp, synthetic construct
  source 1..20: mol_type = other DNA
aactgaggcaatgcctggaa

SEQ ID NO: 180110 - DNA, 20 bp, synthetic construct
  source 1..20: mol_type = other DNA
aaactgaggcaatgcctgga

SEQ ID NO: 180111 - DNA, 20 bp, synthetic construct
  source 1..20: mol_type = other DNA
caaactgaggcaatgcctgg

SEQ ID NO: 180112 - DNA, 20 bp, synthetic construct
  source 1..20: mol_type = other DNA
gcaaactgaggcaatgcctg

SEQ ID NO: 180113 - DNA, 20 bp, synthetic construct
  source 1..20: mol_type = other DNA
ggcaaactgaggcaatgcct

SEQ ID NO: 180114 - DNA, 20 bp, synthetic construct
  source 1..20: mol_type = other DNA
gggcaaactgaggcaatgcc

SEQ ID NO: 180115 - DNA, 20 bp, synthetic construct
  source 1..20: mol_type = other DNA
ggggcaaactgaggcaatgc

SEQ ID NO: 180116 - DNA, 20 bp, synthetic construct
  source 1..20: mol_type = other DNA
aggggcaaactgaggcaatg

SEQ ID NO: 180117 - DNA, 20 bp, synthetic construct
  source 1..20: mol_type = other DNA
gaggggcaaactgaggcaat

SEQ ID NO: 180118 - DNA, 20 bp, synthetic construct
  source 1..20: mol_type = other DNA
agaggggcaaactgaggcaa

SEQ ID NO: 180119 - DNA, 20 bp, synthetic construct
  source 1..20: mol_type = other DNA
cagaggggcaaactgaggca

SEQ ID NO: 180120 - DNA, 20 bp, synthetic construct
  source 1..20: mol_type = other DNA
acagaggggcaaactgaggc

SEQ ID NO: 180121 - DNA, 20 bp, synthetic construct
  source 1..20: mol_type = other DNA
aacagaggggcaaactgagg

SEQ ID NO: 180122 - DNA, 20 bp, synthetic construct
  source 1..20: mol_type = other DNA
aaacagaggggcaaactgag

SEQ ID NO: 180123 - DNA, 20 bp, synthetic construct
  source 1..20: mol_type = other DNA
gaaacagaggggcaaactga

SEQ ID NO: 180124 - DNA, 20 bp, synthetic construct
  source 1..20: mol_type = other DNA
ggaaacagaggggcaaactg

SEQ ID NO: 180125 - DNA, 20 bp, synthetic construct
  source 1..20: mol_type = other DNA
tggaaacagaggggcaaact

SEQ ID NO: 180126 - DNA, 20 bp, synthetic construct
  source 1..20: mol_type = other DNA
ctggaaacagaggggcaaac

SEQ ID NO: 180127 - DNA, 20 bp, synthetic construct
  source 1..20: mol_type = other DNA
actggaaacagaggggcaaa

SEQ ID NO: 180128 - DNA, 20 bp, synthetic construct
  source 1..20: mol_type = other DNA
gactggaaacagaggggcaa

SEQ ID NO: 180129 - DNA, 20 bp, synthetic construct
  source 1..20: mol_type = other DNA
tgactggaaacagaggggca

SEQ ID NO: 180130 - DNA, 20 bp, synthetic construct
  source 1..20: mol_type = other DNA
gtgactggaaacagaggggc

SEQ ID NO: 180131 - DNA, 20 bp, synthetic construct
  source 1..20: mol_type = other DNA
tgtgactggaaacagagggg

SEQ ID NO: 180132 - DNA, 20 bp, synthetic construct
  source 1..20: mol_type = other DNA
gtgtgactggaaacagaggg

SEQ ID NO: 180133 - DNA, 20 bp, synthetic construct
  source 1..20: mol_type = other DNA
agtgtgactggaaacagagg

SEQ ID NO: 180134 - DNA, 20 bp, synthetic construct
  source 1..20: mol_type = other DNA
gagtgtgactggaaacagag

SEQ ID NO: 180135 - DNA, 20 bp, synthetic construct
  source 1..20: mol_type = other DNA
agagtgtgactggaaacaga

SEQ ID NO: 180136 - DNA, 20 bp, synthetic construct
  source 1..20: mol_type = other DNA
gagagtgtgactggaaacag

SEQ ID NO: 180137 - DNA, 20 bp, synthetic construct
  source 1..20: mol_type = other DNA
tgagagtgtgactggaaaca

SEQ ID NO: 180138 - DNA, 20 bp, synthetic construct
  source 1..20: mol_type = other DNA
gtgagagtgtgactggaaac

SEQ ID NO: 180139 - DNA, 20 bp, synthetic construct
  source 1..20: mol_type = other DNA
ggtgagagtgtgactggaaa

SEQ ID NO: 180140 - DNA, 20 bp, synthetic construct
  source 1..20: mol_type = other DNA
tggtgagagtgtgactggaa

SEQ ID NO: 180141 - DNA, 20 bp, synthetic construct
  source 1..20: mol_type = other DNA
ctggtgagagtgtgactgga

SEQ ID NO: 180142 - DNA, 20 bp, synthetic construct
  source 1..20: mol_type = other DNA
gctggtgagagtgtgactgg

SEQ ID NO: 180143 - DNA, 20 bp, synthetic construct
  source 1..20: mol_type = other DNA
cgctggtgagagtgtgactg

SEQ ID NO: 180144 - DNA, 20 bp, synthetic construct
  source 1..20: mol_type = other DNA
tcgctggtgagagtgtgact

SEQ ID NO: 180145 - DNA, 20 bp, synthetic construct
  source 1..20: mol_type = other DNA
atcgctggtgagagtgtgac

SEQ ID NO: 180146 - DNA, 20 bp, synthetic construct
  source 1..20: mol_type = other DNA
tatcgctggtgagagtgtga

SEQ ID NO: 180147 - DNA, 20 bp, synthetic construct
  source 1..20: mol_type = other DNA
ttatcgctggtgagagtgtg

SEQ ID NO: 180148 - DNA, 20 bp, synthetic construct
  source 1..20: mol_type = other DNA
tttatcgctggtgagagtgt

SEQ ID NO: 180149 - DNA, 20 bp, synthetic construct
  source 1..20: mol_type = other DNA
ttttatcgctggtgagagtg

SEQ ID NO: 180150 - DNA, 20 bp, synthetic construct
  source 1..20: mol_type = other DNA
attttatcgctggtgagagt

SEQ ID NO: 180151 - DNA, 20 bp, synthetic construct
  source 1..20: mol_type = other DNA
cattttatcgctggtgagag

SEQ ID NO: 180152 - DNA, 20 bp, synthetic construct
  source 1..20: mol_type = other DNA
tcattttatcgctggtgaga

SEQ ID NO: 180153 - DNA, 20 bp, synthetic construct
  source 1..20: mol_type = other DNA
atcattttatcgctggtgag

SEQ ID NO: 180154 - DNA, 20 bp, synthetic construct
  source 1..20: mol_type = other DNA
aatcattttatcgctggtga

SEQ ID NO: 180155 - DNA, 20 bp, synthetic construct
  source 1..20: mol_type = other DNA
aaatcattttatcgctggtg

SEQ ID NO: 180156 - DNA, 20 bp, synthetic construct
  source 1..20: mol_type = other DNA
aaaatcattttatcgctggt

SEQ ID NO: 180157 - DNA, 20 bp, synthetic construct
  source 1..20: mol_type = other DNA
taaaatcattttatcgctgg

SEQ ID NO: 180158 - DNA, 20 bp, synthetic construct
  source 1..20: mol_type = other DNA
ctaaaatcattttatcgctg

SEQ ID NO: 180159 - DNA, 20 bp, synthetic construct
  source 1..20: mol_type = other DNA
tctaaaatcattttatcgct

SEQ ID NO: 180160 - DNA, 20 bp, synthetic construct
  source 1..20: mol_type = other DNA
gtctaaaatcattttatcgc

SEQ ID NO: 180161 - DNA, 20 bp, synthetic construct
  source 1..20: mol_type = other DNA
ggtctaaaatcattttatcg

SEQ ID NO: 180162 - DNA, 20 bp, synthetic construct
  source 1..20: mol_type = other DNA
aggtctaaaatcattttatc

SEQ ID NO: 180163 - DNA, 20 bp, synthetic construct
  source 1..20: mol_type = other DNA
aaggtctaaaatcattttat

SEQ ID NO: 180164 - DNA, 20 bp, synthetic construct
  source 1..20: mol_type = other DNA
taaggtctaaaatcatttta

SEQ ID NO: 180165 - DNA, 20 bp, synthetic construct
  source 1..20: mol_type = other DNA
ataaggtctaaaatcatttt

SEQ ID NO: 180166 - DNA, 20 bp, synthetic construct
  source 1..20: mol_type = other DNA
gataaggtctaaaatcattt

SEQ ID NO: 180167 - DNA, 20 bp, synthetic construct
  source 1..20: mol_type = other DNA
tgataaggtctaaaatcatt

SEQ ID NO: 180168 - DNA, 20 bp, synthetic construct
  source 1..20: mol_type = other DNA
atgataaggtctaaaatcat

SEQ ID NO: 180169 - DNA, 20 bp, synthetic construct
  source 1..20: mol_type = other DNA
gatgataaggtctaaaatca

SEQ ID NO: 180170 - DNA, 20 bp, synthetic construct
  source 1..20: mol_type = other DNA
agatgataaggtctaaaatc

SEQ ID NO: 180171 - DNA, 20 bp, synthetic construct
  source 1..20: mol_type = other DNA
gagatgataaggtctaaaat

SEQ ID NO: 180172 - DNA, 20 bp, synthetic construct
  source 1..20: mol_type = other DNA
tgagatgataaggtctaaaa

SEQ ID NO: 180173 - DNA, 20 bp, synthetic construct
  source 1..20: mol_type = other DNA
gtgagatgataaggtctaaa

SEQ ID NO: 180174 - DNA, 20 bp, synthetic construct
  source 1..20: mol_type = other DNA
ggtgagatgataaggtctaa

SEQ ID NO: 180175 - DNA, 20 bp, synthetic construct
  source 1..20: mol_type = other DNA
gggtgagatgataaggtcta

SEQ ID NO: 180176 - DNA, 20 bp, synthetic construct
  source 1..20: mol_type = other DNA
agggtgagatgataaggtct

SEQ ID NO: 180177 - DNA, 20 bp, synthetic construct
  source 1..20: mol_type = other DNA
gagggtgagatgataaggtc

SEQ ID NO: 180178 - DNA, 20 bp, synthetic construct
  source 1..20: mol_type = other DNA
cgagggtgagatgataaggt

SEQ ID NO: 180179 - DNA, 20 bp, synthetic construct
  source 1..20: mol_type = other DNA
ccgagggtgagatgataagg

SEQ ID NO: 180180 - DNA, 20 bp, synthetic construct
  source 1..20: mol_type = other DNA
tccgagggtgagatgataag

SEQ ID NO: 180181 - DNA, 20 bp, synthetic construct
  source 1..20: mol_type = other DNA
atccgagggtgagatgataa

SEQ ID NO: 180182 - DNA, 20 bp, synthetic construct
  source 1..20: mol_type = other DNA
gatccgagggtgagatgata

SEQ ID NO: 180183 - DNA, 20 bp, synthetic construct
  source 1..20: mol_type = other DNA
ggatccgagggtgagatgat

SEQ ID NO: 180184 - DNA, 20 bp, synthetic construct
  source 1..20: mol_type = other DNA
aggatccgagggtgagatga

SEQ ID NO: 180185 - DNA, 20 bp, synthetic construct
  source 1..20: mol_type = other DNA
aaggatccgagggtgagatg

SEQ ID NO: 180186 - DNA, 20 bp, synthetic construct
  source 1..20: mol_type = other DNA
taaggatccgagggtgagat

SEQ ID NO: 180187 - DNA, 20 bp, synthetic construct
  source 1..20: mol_type = other DNA
ataaggatccgagggtgaga

SEQ ID NO: 180188 - DNA, 20 bp, synthetic construct
  source 1..20: mol_type = other DNA
cataaggatccgagggtgag

SEQ ID NO: 180189 - DNA, 20 bp, synthetic construct
  source 1..20: mol_type = other DNA
ccataaggatccgagggtga

SEQ ID NO: 180190 - DNA, 20 bp, synthetic construct
  source 1..20: mol_type = other DNA
tccataaggatccgagggtg

SEQ ID NO: 180191 - DNA, 20 bp, synthetic construct
  source 1..20: mol_type = other DNA
ttccataaggatccgagggt

SEQ ID NO: 180192 - DNA, 20 bp, synthetic construct
  source 1..20: mol_type = other DNA
tttccataaggatccgaggg

SEQ ID NO: 180193 - DNA, 20 bp, synthetic construct
  source 1..20: mol_type = other DNA
gtttccataaggatccgagg

SEQ ID NO: 180194 - DNA, 20 bp, synthetic construct
  source 1..20: mol_type = other DNA
tgtttccataaggatccgag

SEQ ID NO: 180195 - DNA, 20 bp, synthetic construct
  source 1..20: mol_type = other DNA
ttgtttccataaggatccga

SEQ ID NO: 180196 - DNA, 20 bp, synthetic construct
  source 1..20: mol_type = other DNA
attgtttccataaggatccg

SEQ ID NO: 180197 - DNA, 20 bp, synthetic construct
  source 1..20: mol_type = other DNA
tattgtttccataaggatcc

SEQ ID NO: 180198 - DNA, 20 bp, synthetic construct
  source 1..20: mol_type = other DNA
ttattgtttccataaggatc

SEQ ID NO: 180199 - DNA, 20 bp, synthetic construct
  source 1..20: mol_type = other DNA
attattgtttccataaggat

SEQ ID NO: 180200 - DNA, 20 bp, synthetic construct
  source 1..20: mol_type = other DNA
cattattgtttccataagga

SEQ ID NO: 180201 - DNA, 20 bp, synthetic construct
  source 1..20: mol_type = other DNA
tcattattgtttccataagg

SEQ ID NO: 180202 - DNA, 20 bp, synthetic construct
  source 1..20: mol_type = other DNA
ctcattattgtttccataag

SEQ ID NO: 180203 - DNA, 20 bp, synthetic construct
  source 1..20: mol_type = other DNA
actcattattgtttccataa

SEQ ID NO: 180204 - DNA, 20 bp, synthetic construct
  source 1..20: mol_type = other DNA
aactcattattgtttccata

SEQ ID NO: 180205 - DNA, 20 bp, synthetic construct
  source 1..20: mol_type = other DNA
caactcattattgtttccat

SEQ ID NO: 180206 - DNA, 20 bp, synthetic construct
  source 1..20: mol_type = other DNA
acaactcattattgtttcca

SEQ ID NO: 180207 - DNA, 20 bp, synthetic construct
  source 1..20: mol_type = other DNA
aacaactcattattgtttcc

SEQ ID NO: 180208 - DNA, 20 bp, synthetic construct
  source 1..20: mol_type = other DNA
gaacaactcattattgtttc

SEQ ID NO: 180209 - DNA, 20 bp, synthetic construct
  source 1..20: mol_type = other DNA
ggaacaactcattattgttt

SEQ ID NO: 180210 - DNA, 20 bp, synthetic construct
  source 1..20: mol_type = other DNA
gggaacaactcattattgtt

SEQ ID NO: 180211 - DNA, 20 bp, synthetic construct
  source 1..20: mol_type = other DNA
agggaacaactcattattgt

SEQ ID NO: 180212 - DNA, 20 bp, synthetic construct
  source 1..20: mol_type = other DNA
cagggaacaactcattattg

SEQ ID NO: 180213 - DNA, 20 bp, synthetic construct
  source 1..20: mol_type = other DNA
acagggaacaactcattatt

SEQ ID NO: 180214 - DNA, 20 bp, synthetic construct
  source 1..20: mol_type = other DNA
aacagggaacaactcattat

SEQ ID NO: 180215 - DNA, 20 bp, synthetic construct
  source 1..20: mol_type = other DNA
aaacagggaacaactcatta

SEQ ID NO: 180216 - DNA, 20 bp, synthetic construct
  source 1..20: mol_type = other DNA
gaaacagggaacaactcatt

SEQ ID NO: 180217 - DNA, 20 bp, synthetic construct
  source 1..20: mol_type = other DNA
tgaaacagggaacaactcat

SEQ ID NO: 180218 - DNA, 20 bp, synthetic construct
  source 1..20: mol_type = other DNA
ttgaaacagggaacaactca

SEQ ID NO: 180219 - DNA, 20 bp, synthetic construct
  source 1..20: mol_type = other DNA
attgaaacagggaacaactc

SEQ ID NO: 180220 - DNA, 20 bp, synthetic construct
  source 1..20: mol_type = other DNA
aattgaaacagggaacaact

SEQ ID NO: 180221 - DNA, 20 bp, synthetic construct
  source 1..20: mol_type = other DNA
gaattgaaacagggaacaac

SEQ ID NO: 180222 - DNA, 20 bp, synthetic construct
  source 1..20: mol_type = other DNA
ggaattgaaacagggaacaa

SEQ ID NO: 180223 - DNA, 20 bp, synthetic construct
  source 1..20: mol_type = other DNA
tggaattgaaacagggaaca

SEQ ID NO: 180224 - DNA, 20 bp, synthetic construct
  source 1..20: mol_type = other DNA
ttggaattgaaacagggaac

SEQ ID NO: 180225 - DNA, 20 bp, synthetic construct
  source 1..20: mol_type = other DNA
tttggaattgaaacagggaa

SEQ ID NO: 180226 - DNA, 20 bp, synthetic construct
  source 1..20: mol_type = other DNA
ttttggaattgaaacaggga

SEQ ID NO: 180227 - DNA, 20 bp, synthetic construct
  source 1..20: mol_type = other DNA
attttggaattgaaacaggg

SEQ ID NO: 180228 - DNA, 20 bp, synthetic construct
  source 1..20: mol_type = other DNA
aattttggaattgaaacagg

SEQ ID NO: 180229 - DNA, 20 bp, synthetic construct
  source 1..20: mol_type = other DNA
gaattttggaattgaaacag

SEQ ID NO: 180230 - DNA, 20 bp, synthetic construct
  source 1..20: mol_type = other DNA
tgaattttggaattgaaaca

SEQ ID NO: 180231 - DNA, 20 bp, synthetic construct
  source 1..20: mol_type = other DNA
atgaattttggaattgaaac

SEQ ID NO: 180232 - DNA, 20 bp, synthetic construct
  source 1..20: mol_type = other DNA
tatgaattttggaattgaaa

SEQ ID NO: 180233 - DNA, 20 bp, synthetic construct
  source 1..20: mol_type = other DNA
atatgaattttggaattgaa

SEQ ID NO: 180234 - DNA, 20 bp, synthetic construct
  source 1..20: mol_type = other DNA
gatatgaattttggaattga

SEQ ID NO: 180235 - DNA, 20 bp, synthetic construct
  source 1..20: mol_type = other DNA
ggatatgaattttggaattg

SEQ ID NO: 180236 - DNA, 20 bp, synthetic construct
  source 1..20: mol_type = other DNA
tggatatgaattttggaatt

SEQ ID NO: 180237 - DNA, 20 bp, synthetic construct
  source 1..20: mol_type = other DNA
ttggatatgaattttggaat

SEQ ID NO: 180238 - DNA, 20 bp, synthetic construct
  source 1..20: mol_type = other DNA
attggatatgaattttggaa

SEQ ID NO: 180239 - DNA, 20 bp, synthetic construct
  source 1..20: mol_type = other DNA
gattggatatgaattttgga

SEQ ID NO: 180240 - DNA, 20 bp, synthetic construct
  source 1..20: mol_type = other DNA
ggattggatatgaattttgg

SEQ ID NO: 180241 - DNA, 20 bp, synthetic construct
  source 1..20: mol_type = other DNA
cggattggatatgaattttg

SEQ ID NO: 180242 - DNA, 20 bp, synthetic construct
  source 1..20: mol_type = other DNA
acggattggatatgaatttt

SEQ ID NO: 180243 - DNA, 20 bp, synthetic construct
  source 1..20: mol_type = other DNA
aacggattggatatgaattt

SEQ ID NO: 180244 - DNA, 20 bp, synthetic construct
  source 1..20: mol_type = other DNA
aaacggattggatatgaatt

SEQ ID NO: 180245 - DNA, 20 bp, synthetic construct
  source 1..20: mol_type = other DNA
aaaacggattggatatgaat

SEQ ID NO: 180246 - DNA, 20 bp, synthetic construct
  source 1..20: mol_type = other DNA
caaaacggattggatatgaa

SEQ ID NO: 180247 - DNA, 20 bp, synthetic construct
  source 1..20: mol_type = other DNA
gcaaaacggattggatatga

SEQ ID NO: 180248 - DNA, 20 bp, synthetic construct
  source 1..20: mol_type = other DNA
tgcaaaacggattggatatg

SEQ ID NO: 180249 - DNA, 20 bp, synthetic construct
  source 1..20: mol_type = other DNA
atgcaaaacggattggatat

SEQ ID NO: 180250 - DNA, 20 bp, synthetic construct
  source 1..20: mol_type = other DNA
catgcaaaacggattggata

SEQ ID NO: 180251 - DNA, 20 bp, synthetic construct
  source 1..20: mol_type = other DNA
gcatgcaaaacggattggat

SEQ ID NO: 180252 - DNA, 20 bp, synthetic construct
  source 1..20: mol_type = other DNA
ggcatgcaaaacggattgga

SEQ ID NO: 180253 - DNA, 20 bp, synthetic construct
  source 1..20: mol_type = other DNA
tggcatgcaaaacggattgg

SEQ ID NO: 180254 - DNA, 20 bp, synthetic construct
  source 1..20: mol_type = other DNA
atggcatgcaaaacggattg

SEQ ID NO: 180255 - DNA, 20 bp, synthetic construct
  source 1..20: mol_type = other DNA
aatggcatgcaaaacggatt

SEQ ID NO: 180256 - DNA, 20 bp, synthetic construct
  source 1..20: mol_type = other DNA
caatggcatgcaaaacggat

SEQ ID NO: 180257 - DNA, 20 bp, synthetic construct
  source 1..20: mol_type = other DNA
gcaatggcatgcaaaacgga

SEQ ID NO: 180258 - DNA, 20 bp, synthetic construct
  source 1..20: mol_type = other DNA
ggcaatggcatgcaaaacgg

SEQ ID NO: 180259 - DNA, 20 bp, synthetic construct
  source 1..20: mol_type = other DNA
tggcaatggcatgcaaaacg

SEQ ID NO: 180260 - DNA, 20 bp, synthetic construct
  source 1..20: mol_type = other DNA
ttggcaatggcatgcaaaac

SEQ ID NO: 180261 - DNA, 20 bp, synthetic construct
  source 1..20: mol_type = other DNA
tttggcaatggcatgcaaaa

SEQ ID NO: 180262 - DNA, 20 bp, synthetic construct
  source 1..20: mol_type = other DNA
atttggcaatggcatgcaaa

SEQ ID NO: 180263 - DNA, 20 bp, synthetic construct
  source 1..20: mol_type = other DNA
aatttggcaatggcatgcaa

SEQ ID NO: 180264 - DNA, 20 bp, synthetic construct
  source 1..20: mol_type = other DNA
gaatttggcaatggcatgca

SEQ ID NO: 180265 - DNA, 20 bp, synthetic construct
  source 1..20: mol_type = other DNA
ggaatttggcaatggcatgc

SEQ ID NO: 180266 - DNA, 20 bp, synthetic construct
  source 1..20: mol_type = other DNA
aggaatttggcaatggcatg

SEQ ID NO: 180267 - DNA, 20 bp, synthetic construct
  source 1..20: mol_type = other DNA
gaggaatttggcaatggcat

SEQ ID NO: 180268 - DNA, 20 bp, synthetic construct
  source 1..20: mol_type = other DNA
ggaggaatttggcaatggca

SEQ ID NO: 180269 - DNA, 20 bp, synthetic construct
  source 1..20: mol_type = other DNA
gggaggaatttggcaatggc

SEQ ID NO: 180270 - DNA, 20 bp, synthetic construct
  source 1..20: mol_type = other DNA
tgggaggaatttggcaatgg

SEQ ID NO: 180271 - DNA, 20 bp, synthetic construct
  source 1..20: mol_type = other DNA
ctgggaggaatttggcaatg

SEQ ID NO: 180272 - DNA, 20 bp, synthetic construct
  source 1..20: mol_type = other DNA
tctgggaggaatttggcaat

SEQ ID NO: 180273 - DNA, 20 bp, synthetic construct
  source 1..20: mol_type = other DNA
ctctgggaggaatttggcaa

SEQ ID NO: 180274 - DNA, 20 bp, synthetic construct
  source 1..20: mol_type = other DNA
gctctgggaggaatttggca

SEQ ID NO: 180275 - DNA, 20 bp, synthetic construct
  source 1..20: mol_type = other DNA
tgctctgggaggaatttggc

SEQ ID NO: 180276 - DNA, 20 bp, synthetic construct
  source 1..20: mol_type = other DNA
ttgctctgggaggaatttgg

SEQ ID NO: 180277 - DNA, 20 bp, synthetic construct
  source 1..20: mol_type = other DNA
gttgctctgggaggaatttg

SEQ ID NO: 180278 - DNA, 20 bp, synthetic construct
  source 1..20: mol_type = other DNA
ggttgctctgggaggaattt

SEQ ID NO: 180279 - DNA, 20 bp, synthetic construct
  source 1..20: mol_type = other DNA
gggttgctctgggaggaatt

SEQ ID NO: 180280 - DNA, 20 bp, synthetic construct
  source 1..20: mol_type = other DNA
ggggttgctctgggaggaat

SEQ ID NO: 180281 - DNA, 20 bp, synthetic construct
  source 1..20: mol_type = other DNA
cggggttgctctgggaggaa

SEQ ID NO: 180282 - DNA, 20 bp, synthetic construct
  source 1..20: mol_type = other DNA
acggggttgctctgggagga

SEQ ID NO: 180283 - DNA, 20 bp, synthetic construct
  source 1..20: mol_type = other DNA
gacggggttgctctgggagg

SEQ ID NO: 180284 - DNA, 20 bp, synthetic construct
  source 1..20: mol_type = other DNA
tgacggggttgctctgggag

SEQ ID NO: 180285 - DNA, 20 bp, synthetic construct
  source 1..20: mol_type = other DNA
gtgacggggttgctctggga

SEQ ID NO: 180286 - DNA, 20 bp, synthetic construct
  source 1..20: mol_type = other DNA
ggtgacggggttgctctggg

SEQ ID NO: 180287 - DNA, 20 bp, synthetic construct
  source 1..20: mol_type = other DNA
aggtgacggggttgctctgg

SEQ ID NO: 180288 - DNA, 20 bp, synthetic construct
  source 1..20: mol_type = other DNA
caggtgacggggttgctctg

SEQ ID NO: 180289 - DNA, 20 bp, synthetic construct
  source 1..20: mol_type = other DNA
gcaggtgacggggttgctct

SEQ ID NO: 180290 - DNA, 20 bp, synthetic construct
  source 1..20: mol_type = other DNA
ggcaggtgacggggttgctc

SEQ ID NO: 180291 - DNA, 20 bp, synthetic construct
  source 1..20: mol_type = other DNA
gggcaggtgacggggttgct

SEQ ID NO: 180292 - DNA, 20 bp, synthetic construct
  source 1..20: mol_type = other DNA
agggcaggtgacggggttgc

SEQ ID NO: 180293 - DNA, 20 bp, synthetic construct
  source 1..20: mol_type = other DNA
cagggcaggtgacggggttg

SEQ ID NO: 180294 - DNA, 20 bp, synthetic construct
  source 1..20: mol_type = other DNA
ccagggcaggtgacggggtt

SEQ ID NO: 180295 - DNA, 20 bp, synthetic construct
  source 1..20: mol_type = other DNA
gccagggcaggtgacggggt

SEQ ID NO: 180296 - DNA, 20 bp, synthetic construct
  source 1..20: mol_type = other DNA
ggccagggcaggtgacgggg

SEQ ID NO: 180297 - DNA, 20 bp, synthetic construct
  source 1..20: mol_type = other DNA
gggccagggcaggtgacggg

SEQ ID NO: 180298 - DNA, 20 bp, synthetic construct
  source 1..20: mol_type = other DNA
agggccagggcaggtgacgg

SEQ ID NO: 180299 - DNA, 20 bp, synthetic construct
  source 1..20: mol_type = other DNA
gagggccagggcaggtgacg

SEQ ID NO: 180300 - DNA, 20 bp, synthetic construct
  source 1..20: mol_type = other DNA
agagggccagggcaggtgac

SEQ ID NO: 180301 - DNA, 20 bp, synthetic construct
  source 1..20: mol_type = other DNA
gagagggccagggcaggtga

SEQ ID NO: 180302 - DNA, 20 bp, synthetic construct
  source 1..20: mol_type = other DNA
ggagagggccagggcaggtg

SEQ ID NO: 180303 - DNA, 20 bp, synthetic construct
  source 1..20: mol_type = other DNA
tggagagggccagggcaggt

SEQ ID NO: 180304 - DNA, 20 bp, synthetic construct
  source 1..20: mol_type = other DNA
ttggagagggccagggcagg

SEQ ID NO: 180305 - DNA, 20 bp, synthetic construct
  source 1..20: mol_type = other DNA
cttggagagggccagggcag

SEQ ID NO: 180306 - DNA, 20 bp, synthetic construct
  source 1..20: mol_type = other DNA
acttggagagggccagggca

SEQ ID NO: 180307 - DNA, 20 bp, synthetic construct
  source 1..20: mol_type = other DNA
cacttggagagggccagggc

SEQ ID NO: 180308 - DNA, 20 bp, synthetic construct
  source 1..20: mol_type = other DNA
acacttggagagggccaggg

SEQ ID NO: 180309 - DNA, 20 bp, synthetic construct
  source 1..20: mol_type = other DNA
cacacttggagagggccagg

SEQ ID NO: 180310 - DNA, 20 bp, synthetic construct
  source 1..20: mol_type = other DNA
ccacacttggagagggccag

SEQ ID NO: 180311 - DNA, 20 bp, synthetic construct
  source 1..20: mol_type = other DNA
accacacttggagagggcca

SEQ ID NO: 180312 - DNA, 20 bp, synthetic construct
  source 1..20: mol_type = other DNA
gaccacacttggagagggcc

SEQ ID NO: 180313 - DNA, 20 bp, synthetic construct
  source 1..20: mol_type = other DNA
ggaccacacttggagagggc

SEQ ID NO: 180314 - DNA, 20 bp, synthetic construct
  source 1..20: mol_type = other DNA
aggaccacacttggagaggg

SEQ ID NO: 180315 - DNA, 20 bp, synthetic construct
  source 1..20: mol_type = other DNA
caggaccacacttggagagg

SEQ ID NO: 180316 - DNA, 20 bp, synthetic construct
  source 1..20: mol_type = other DNA
gcaggaccacacttggagag

SEQ ID NO: 180317 - DNA, 20 bp, synthetic construct
  source 1..20: mol_type = other DNA
ggcaggaccacacttggaga

SEQ ID NO: 180318 - DNA, 20 bp, synthetic construct
  source 1..20: mol_type = other DNA
tggcaggaccacacttggag

SEQ ID NO: 180319 - DNA, 20 bp, synthetic construct
  source 1..20: mol_type = other DNA
atggcaggaccacacttgga

SEQ ID NO: 180320 - DNA, 20 bp, synthetic construct
  source 1..20: mol_type = other DNA
catggcaggaccacacttgg

SEQ ID NO: 180321 - DNA, 20 bp, synthetic construct
  source 1..20: mol_type = other DNA
ccatggcaggaccacacttg

SEQ ID NO: 180322 - DNA, 20 bp, synthetic construct
  source 1..20: mol_type = other DNA
cccatggcaggaccacactt

SEQ ID NO: 180323 - DNA, 20 bp, synthetic construct
  source 1..20: mol_type = other DNA
gcccatggcaggaccacact

SEQ ID NO: 180324 - DNA, 20 bp, synthetic construct
  source 1..20: mol_type = other DNA
tgcccatggcaggaccacac

SEQ ID NO: 180325 - DNA, 20 bp, synthetic construct
  source 1..20: mol_type = other DNA
atgcccatggcaggaccaca

SEQ ID NO: 180326 - DNA, 20 bp, synthetic construct
  source 1..20: mol_type = other DNA
gatgcccatggcaggaccac

SEQ ID NO: 180327 - DNA, 20 bp, synthetic construct
  source 1..20: mol_type = other DNA
cgatgcccatggcaggacca

SEQ ID NO: 180328 - DNA, 20 bp, synthetic construct
  source 1..20: mol_type = other DNA
gcgatgcccatggcaggacc

SEQ ID NO: 180329 - DNA, 20 bp, synthetic construct
  source 1..20: mol_type = other DNA
ggcgatgcccatggcaggac

SEQ ID NO: 180330 - DNA, 20 bp, synthetic construct
  source 1..20: mol_type = other DNA
aggcgatgcccatggcagga

SEQ ID NO: 180331 - DNA, 20 bp, synthetic construct
  source 1..20: mol_type = other DNA
caggcgatgcccatggcagg

SEQ ID NO: 180332 - DNA, 20 bp, synthetic construct
  source 1..20: mol_type = other DNA
gcaggcgatgcccatggcag

SEQ ID NO: 180333 - DNA, 20 bp, synthetic construct
  source 1..20: mol_type = other DNA
agcaggcgatgcccatggca

SEQ ID NO: 180334 - DNA, 20 bp, synthetic construct
  source 1..20: mol_type = other DNA
tagcaggcgatgcccatggc

SEQ ID NO: 180335 - DNA, 20 bp, synthetic construct
  source 1..20: mol_type = other DNA
ttagcaggcgatgcccatgg

SEQ ID NO: 180336 - DNA, 20 bp, synthetic construct
  source 1..20: mol_type = other DNA
cttagcaggcgatgcccatg

SEQ ID NO: 180337 - DNA, 20 bp, synthetic construct
  source 1..20: mol_type = other DNA
gcttagcaggcgatgcccat

SEQ ID NO: 180338 - DNA, 20 bp, synthetic construct
  source 1..20: mol_type = other DNA
ggcttagcaggcgatgccca

SEQ ID NO: 180339 - DNA, 20 bp, synthetic construct
  source 1..20: mol_type = other DNA
tggcttagcaggcgatgccc

SEQ ID NO: 180340 - DNA, 20 bp, synthetic construct
  source 1..20: mol_type = other DNA
ttggcttagcaggcgatgcc

SEQ ID NO: 180341 - DNA, 20 bp, synthetic construct
  source 1..20: mol_type = other DNA
cttggcttagcaggcgatgc

SEQ ID NO: 180342 - DNA, 20 bp, synthetic construct
  source 1..20: mol_type = other DNA
gcttggcttagcaggcgatg

SEQ ID NO: 180343 - DNA, 20 bp, synthetic construct
  source 1..20: mol_type = other DNA
agcttggcttagcaggcgat

SEQ ID NO: 180344 - DNA, 20 bp, synthetic construct
  source 1..20: mol_type = other DNA
cagcttggcttagcaggcga

SEQ ID NO: 180345 - DNA, 20 bp, synthetic construct
  source 1..20: mol_type = other DNA
ccagcttggcttagcaggcg

SEQ ID NO: 180346 - DNA, 20 bp, synthetic construct
  source 1..20: mol_type = other DNA
gccagcttggcttagcaggc

SEQ ID NO: 180347 - DNA, 20 bp, synthetic construct
  source 1..20: mol_type = other DNA
ggccagcttggcttagcagg

SEQ ID NO: 180348 - DNA, 20 bp, synthetic construct
  source 1..20: mol_type = other DNA
aggccagcttggcttagcag

SEQ ID NO: 180349 - DNA, 20 bp, synthetic construct
  source 1..20: mol_type = other DNA
gaggccagcttggcttagca

SEQ ID NO: 180350 - DNA, 20 bp, synthetic construct
  source 1..20: mol_type = other DNA
cgaggccagcttggcttagc

SEQ ID NO: 180351 - DNA, 20 bp, synthetic construct
  source 1..20: mol_type = other DNA
tcgaggccagcttggcttag

SEQ ID NO: 180352 - DNA, 20 bp, synthetic construct
  source 1..20: mol_type = other DNA
ctcgaggccagcttggctta

SEQ ID NO: 180353 - DNA, 20 bp, synthetic construct
  source 1..20: mol_type = other DNA
gctcgaggccagcttggctt

SEQ ID NO: 180354 - DNA, 20 bp, synthetic construct
  source 1..20: mol_type = other DNA
agctcgaggccagcttggct

SEQ ID NO: 180355 - DNA, 20 bp, synthetic construct
  source 1..20: mol_type = other DNA
cagctcgaggccagcttggc

SEQ ID NO: 180356 - DNA, 20 bp, synthetic construct
  source 1..20: mol_type = other DNA
gcagctcgaggccagcttgg

SEQ ID NO: 180357 - DNA, 20 bp, synthetic construct
  source 1..20: mol_type = other DNA
ggcagctcgaggccagcttg

SEQ ID NO: 180358 - DNA, 20 bp, synthetic construct
  source 1..20: mol_type = other DNA
aggcagctcgaggccagctt

SEQ ID NO: 180359 - DNA, 20 bp, synthetic construct
  source 1..20: mol_type = other DNA
caggcagctcgaggccagct

SEQ ID NO: 180360 - DNA, 20 bp, synthetic construct
  source 1..20: mol_type = other DNA
gcaggcagctcgaggccagc

SEQ ID NO: 180361 - DNA, 20 bp, synthetic construct
  source 1..20: mol_type = other DNA
ggcaggcagctcgaggccag

SEQ ID NO: 180362 - DNA, 20 bp, synthetic construct
  source 1..20: mol_type = other DNA
gggcaggcagctcgaggcca

SEQ ID NO: 180363 - DNA, 20 bp, synthetic construct
  source 1..20: mol_type = other DNA
cgggcaggcagctcgaggcc

SEQ ID NO: 180364 - DNA, 20 bp, synthetic construct
  source 1..20: mol_type = other DNA
ccgggcaggcagctcgaggc

SEQ ID NO: 180365 - DNA, 20 bp, synthetic construct
  source 1..20: mol_type = other DNA
cccgggcaggcagctcgagg

SEQ ID NO: 180366 - DNA, 20 bp, synthetic construct
  source 1..20: mol_type = other DNA
acccgggcaggcagctcgag

SEQ ID NO: 180367 - DNA, 20 bp, synthetic construct
  source 1..20: mol_type = other DNA
gacccgggcaggcagctcga

SEQ ID NO: 180368 - DNA, 20 bp, synthetic construct
  source 1..20: mol_type = other DNA
ggacccgggcaggcagctcg

SEQ ID NO: 180369 - DNA, 20 bp, synthetic construct
  source 1..20: mol_type = other DNA
gggacccgggcaggcagctc

SEQ ID NO: 180370 - DNA, 20 bp, synthetic construct
  source 1..20: mol_type = other DNA
ggggacccgggcaggcagct

SEQ ID NO: 180371 - DNA, 20 bp, synthetic construct
  source 1..20: mol_type = other DNA
tggggacccgggcaggcagc

SEQ ID NO: 180372 - DNA, 20 bp, synthetic construct
  source 1..20: mol_type = other DNA
gtggggacccgggcaggcag

SEQ ID NO: 180373 - DNA, 20 bp, synthetic construct
  source 1..20: mol_type = other DNA
tgtggggacccgggcaggca

SEQ ID NO: 180374 - DNA, 20 bp, synthetic construct
  source 1..20: mol_type = other DNA
gtgtggggacccgggcaggc

SEQ ID NO: 180375 - DNA, 20 bp, synthetic construct
  source 1..20: mol_type = other DNA
ggtgtggggacccgggcagg

SEQ ID NO: 180376 - DNA, 20 bp, synthetic construct
  source 1..20: mol_type = other DNA
aggtgtggggacccgggcag

SEQ ID NO: 180377 - DNA, 20 bp, synthetic construct
  source 1..20: mol_type = other DNA
aaggtgtggggacccgggca

SEQ ID NO: 180378 - DNA, 20 bp, synthetic construct
  source 1..20: mol_type = other DNA
caaggtgtggggacccgggc

SEQ ID NO: 180379 - DNA, 20 bp, synthetic construct
  source 1..20: mol_type = other DNA
ccaaggtgtggggacccggg

SEQ ID NO: 180380 - DNA, 20 bp, synthetic construct
  source 1..20: mol_type = other DNA
gccaaggtgtggggacccgg

SEQ ID NO: 180381 - DNA, 20 bp, synthetic construct
  source 1..20: mol_type = other DNA
agccaaggtgtggggacccg

SEQ ID NO: 180382 - DNA, 20 bp, synthetic construct
  source 1..20: mol_type = other DNA
gagccaaggtgtggggaccc

SEQ ID NO: 180383 - DNA, 20 bp, synthetic construct
  source 1..20: mol_type = other DNA
tgagccaaggtgtggggacc

SEQ ID NO: 180384 - DNA, 20 bp, synthetic construct
  source 1..20: mol_type = other DNA
gtgagccaaggtgtggggac

SEQ ID NO: 180385 - DNA, 20 bp, synthetic construct
  source 1..20: mol_type = other DNA
ggtgagccaaggtgtgggga

SEQ ID NO: 180386 - DNA, 20 bp, synthetic construct
  source 1..20: mol_type = other DNA
aggtgagccaaggtgtgggg

SEQ ID NO: 180387 - DNA, 20 bp, synthetic construct
  source 1..20: mol_type = other DNA
gaggtgagccaaggtgtggg

SEQ ID NO: 180388 - DNA, 20 bp, synthetic construct
  source 1..20: mol_type = other DNA
ggaggtgagccaaggtgtgg

SEQ ID NO: 180389 - DNA, 20 bp, synthetic construct
  source 1..20: mol_type = other DNA
gggaggtgagccaaggtgtg

SEQ ID NO: 180390 - DNA, 20 bp, synthetic construct
  source 1..20: mol_type = other DNA
agggaggtgagccaaggtgt

SEQ ID NO: 180391 - DNA, 20 bp, synthetic construct
  source 1..20: mol_type = other DNA
cagggaggtgagccaaggtg

SEQ ID NO: 180392 - DNA, 20 bp, synthetic construct
  source 1..20: mol_type = other DNA
gcagggaggtgagccaaggt

SEQ ID NO: 180393 - DNA, 20 bp, synthetic construct
  source 1..20: mol_type = other DNA
ggcagggaggtgagccaagg

SEQ ID NO: 180394 - DNA, 20 bp, synthetic construct
  source 1..20: mol_type = other DNA
gggcagggaggtgagccaag

SEQ ID NO: 180395 - DNA, 20 bp, synthetic construct
  source 1..20: mol_type = other DNA
tgggcagggaggtgagccaa

SEQ ID NO: 180396 - DNA, 20 bp, synthetic construct
  source 1..20: mol_type = other DNA
ctgggcagggaggtgagcca

SEQ ID NO: 180397 - DNA, 20 bp, synthetic construct
  source 1..20: mol_type = other DNA
actgggcagggaggtgagcc

SEQ ID NO: 180398 - DNA, 20 bp, synthetic construct
  source 1..20: mol_type = other DNA
gactgggcagggaggtgagc

SEQ ID NO: 180399 - DNA, 20 bp, synthetic construct
  source 1..20: mol_type = other DNA
ggactgggcagggaggtgag

SEQ ID NO: 180400 - DNA, 20 bp, synthetic construct
  source 1..20: mol_type = other DNA
gggactgggcagggaggtga

SEQ ID NO: 180401 - DNA, 20 bp, synthetic construct
  source 1..20: mol_type = other DNA
cgggactgggcagggaggtg

SEQ ID NO: 180402 - DNA, 20 bp, synthetic construct
  source 1..20: mol_type = other DNA
gcgggactgggcagggaggt

SEQ ID NO: 180403 - DNA, 20 bp, synthetic construct
  source 1..20: mol_type = other DNA
ggcgggactgggcagggagg

SEQ ID NO: 180404 - DNA, 20 bp, synthetic construct
  source 1..20: mol_type = other DNA
aggcgggactgggcagggag

SEQ ID NO: 180405 - DNA, 20 bp, synthetic construct
  source 1..20: mol_type = other DNA
gaggcgggactgggcaggga

SEQ ID NO: 180406 - DNA, 20 bp, synthetic construct
  source 1..20: mol_type = other DNA
ggaggcgggactgggcaggg

SEQ ID NO: 180407 - DNA, 20 bp, synthetic construct
  source 1..20: mol_type = other DNA
aggaggcgggactgggcagg

SEQ ID NO: 180408 - DNA, 20 bp, synthetic construct
  source 1..20: mol_type = other DNA
caggaggcgggactgggcag

SEQ ID NO: 180409 - DNA, 20 bp, synthetic construct
  source 1..20: mol_type = other DNA
gcaggaggcgggactgggca

SEQ ID NO: 180410 - DNA, 20 bp, synthetic construct
  source 1..20: mol_type = other DNA
ggcaggaggcgggactgggc

SEQ ID NO: 180411 - DNA, 20 bp, synthetic construct
  source 1..20: mol_type = other DNA
tggcaggaggcgggactggg

SEQ ID NO: 180412 - DNA, 20 bp, synthetic construct
  source 1..20: mol_type = other DNA
ctggcaggaggcgggactgg

SEQ ID NO: 180413 - DNA, 20 bp, synthetic construct
  source 1..20: mol_type = other DNA
gctggcaggaggcgggactg

SEQ ID NO: 180414 - DNA, 20 bp, synthetic construct
  source 1..20: mol_type = other DNA
ggctggcaggaggcgggact

SEQ ID NO: 180415 - DNA, 20 bp, synthetic construct
  source 1..20: mol_type = other DNA
aggctggcaggaggcgggac

SEQ ID NO: 180416 - DNA, 20 bp, synthetic construct
  source 1..20: mol_type = other DNA
caggctggcaggaggcggga

SEQ ID NO: 180417 - DNA, 20 bp, synthetic construct
  source 1..20: mol_type = other DNA
gcaggctggcaggaggcggg

SEQ ID NO: 180418 - DNA, 20 bp, synthetic construct
  source 1..20: mol_type = other DNA
ggcaggctggcaggaggcgg

SEQ ID NO: 180419 - DNA, 20 bp, synthetic construct
  source 1..20: mol_type = other DNA
gggcaggctggcaggaggcg

SEQ ID NO: 180420 - DNA, 20 bp, synthetic construct
  source 1..20: mol_type = other DNA
agggcaggctggcaggaggc

SEQ ID NO: 180421 - DNA, 20 bp, synthetic construct
  source 1..20: mol_type = other DNA
cagggcaggctggcaggagg

SEQ ID NO: 180422 - DNA, 20 bp, synthetic construct
  source 1..20: mol_type = other DNA
acagggcaggctggcaggag

SEQ ID NO: 180423 - DNA, 20 bp, synthetic construct
  source 1..20: mol_type = other DNA
cacagggcaggctggcagga

SEQ ID NO: 180424 - DNA, 20 bp, synthetic construct
  source 1..20: mol_type = other DNA
ccacagggcaggctggcagg

SEQ ID NO: 180425 - DNA, 20 bp, synthetic construct
  source 1..20: mol_type = other DNA
gccacagggcaggctggcag

SEQ ID NO: 180426 - DNA, 20 bp, synthetic construct
  source 1..20: mol_type = other DNA
agccacagggcaggctggca

SEQ ID NO: 180427 - DNA, 20 bp, synthetic construct
  source 1..20: mol_type = other DNA
gagccacagggcaggctggc

SEQ ID NO: 180428 - DNA, 20 bp, synthetic construct
  source 1..20: mol_type = other DNA
ggagccacagggcaggctgg

SEQ ID NO: 180429 - DNA, 20 bp, synthetic construct
  source 1..20: mol_type = other DNA
aggagccacagggcaggctg

SEQ ID NO: 180430 - DNA, 20 bp, synthetic construct
  source 1..20: mol_type = other DNA
aaggagccacagggcaggct

SEQ ID NO: 180431 - DNA, 20 bp, synthetic construct
  source 1..20: mol_type = other DNA
gaaggagccacagggcaggc

SEQ ID NO: 180432 - DNA, 20 bp, synthetic construct
  source 1..20: mol_type = other DNA
tgaaggagccacagggcagg

SEQ ID NO: 180433 - DNA, 20 bp, synthetic construct
  source 1..20: mol_type = other DNA
atgaaggagccacagggcag

SEQ ID NO: 180434 - DNA, 20 bp, synthetic construct
  source 1..20: mol_type = other DNA
tatgaaggagccacagggca

SEQ ID NO: 180435 - DNA, 20 bp, synthetic construct
  source 1..20: mol_type = other DNA
ctatgaaggagccacagggc

SEQ ID NO: 180436 - DNA, 20 bp, synthetic construct
  source 1..20: mol_type = other DNA
tctatgaaggagccacaggg

SEQ ID NO: 180437 - DNA, 20 bp, synthetic construct
  source 1..20: mol_type = other DNA
atctatgaaggagccacagg

SEQ ID NO: 180438 - DNA, 20 bp, synthetic construct
  source 1..20: mol_type = other DNA
catctatgaaggagccacag

SEQ ID NO: 180439 - DNA, 20 bp, synthetic construct
  source 1..20: mol_type = other DNA
gcatctatgaaggagccaca

SEQ ID NO: 180440 - DNA, 20 bp, synthetic construct
  source 1..20: mol_type = other DNA
ggcatctatgaaggagccac

SEQ ID NO: 180441 - DNA, 20 bp, synthetic construct
  source 1..20: mol_type = other DNA
cggcatctatgaaggagcca

SEQ ID NO: 180442 - DNA, 20 bp, synthetic construct
  source 1..20: mol_type = other DNA
acggcatctatgaaggagcc

SEQ ID NO: 180443 - DNA, 20 bp, synthetic construct
  source 1..20: mol_type = other DNA
cacggcatctatgaaggagc

SEQ ID NO: 180444 - DNA, 20 bp, synthetic construct
  source 1..20: mol_type = other DNA
gcacggcatctatgaaggag

SEQ ID NO: 180445 - DNA, 20 bp, synthetic construct
  source 1..20: mol_type = other DNA
agcacggcatctatgaagga

SEQ ID NO: 180446 - DNA, 20 bp, synthetic construct
  source 1..20: mol_type = other DNA
gagcacggcatctatgaagg

SEQ ID NO: 180447 - DNA, 20 bp, synthetic construct
  source 1..20: mol_type = other DNA
agagcacggcatctatgaag

SEQ ID NO: 180448 - DNA, 20 bp, synthetic construct
  source 1..20: mol_type = other DNA
aagagcacggcatctatgaa

SEQ ID NO: 180449 - DNA, 20 bp, synthetic construct
  source 1..20: mol_type = other DNA
aaagagcacggcatctatga

SEQ ID NO: 180450 - DNA, 20 bp, synthetic construct
  source 1..20: mol_type = other DNA
gaaagagcacggcatctatg

SEQ ID NO: 180451 - DNA, 20 bp, synthetic construct
  source 1..20: mol_type = other DNA
agaaagagcacggcatctat

SEQ ID NO: 180452 - DNA, 20 bp, synthetic construct
  source 1..20: mol_type = other DNA
cagaaagagcacggcatcta

SEQ ID NO: 180453 - DNA, 20 bp, synthetic construct
  source 1..20: mol_type = other DNA
gcagaaagagcacggcatct

SEQ ID NO: 180454 - DNA, 20 bp, synthetic construct
  source 1..20: mol_type = other DNA
ggcagaaagagcacggcatc

SEQ ID NO: 180455 - DNA, 20 bp, synthetic construct
  source 1..20: mol_type = other DNA
gggcagaaagagcacggcat

SEQ ID NO: 180456 - DNA, 20 bp, synthetic construct
  source 1..20: mol_type = other DNA
ggggcagaaagagcacggca

SEQ ID NO: 180457 - DNA, 20 bp, synthetic construct
  source 1..20: mol_type = other DNA
aggggcagaaagagcacggc

SEQ ID NO: 180458 - DNA, 20 bp, synthetic construct
  source 1..20: mol_type = other DNA
aaggggcagaaagagcacgg

SEQ ID NO: 180459 - DNA, 20 bp, synthetic construct
  source 1..20: mol_type = other DNA
caaggggcagaaagagcacg

SEQ ID NO: 180460 - DNA, 20 bp, synthetic construct
  source 1..20: mol_type = other DNA
gcaaggggcagaaagagcac

SEQ ID NO: 180461 - DNA, 20 bp, synthetic construct
  source 1..20: mol_type = other DNA
agcaaggggcagaaagagca

SEQ ID NO: 180462 - DNA, 20 bp, synthetic construct
  source 1..20: mol_type = other DNA
gagcaaggggcagaaagagc

SEQ ID NO: 180463 - DNA, 20 bp, synthetic construct
  source 1..20: mol_type = other DNA
tgagcaaggggcagaaagag

SEQ ID NO: 180464 - DNA, 20 bp, synthetic construct
  source 1..20: mol_type = other DNA
gtgagcaaggggcagaaaga

SEQ ID NO: 180465 - DNA, 20 bp, synthetic construct
  source 1..20: mol_type = other DNA
ggtgagcaaggggcagaaag

SEQ ID NO: 180466 - DNA, 20 bp, synthetic construct
  source 1..20: mol_type = other DNA
gggtgagcaaggggcagaaa

SEQ ID NO: 180467 - DNA, 20 bp, synthetic construct
  source 1..20: mol_type = other DNA
tgggtgagcaaggggcagaa

SEQ ID NO: 180468 - DNA, 20 bp, synthetic construct
  source 1..20: mol_type = other DNA
atgggtgagcaaggggcaga

SEQ ID NO: 180469 - DNA, 20 bp, synthetic construct
  source 1..20: mol_type = other DNA
catgggtgagcaaggggcag

SEQ ID NO: 180470 - DNA, 20 bp, synthetic construct
  source 1..20: mol_type = other DNA
ccatgggtgagcaaggggca

SEQ ID NO: 180471 - DNA, 20 bp, synthetic construct
  source 1..20: mol_type = other DNA
gccatgggtgagcaaggggc

SEQ ID NO: 180472 - DNA, 20 bp, synthetic construct
  source 1..20: mol_type = other DNA
tgccatgggtgagcaagggg

SEQ ID NO: 180473 - DNA, 20 bp, synthetic construct
  source 1..20: mol_type = other DNA
ctgccatgggtgagcaaggg

SEQ ID NO: 180474 - DNA, 20 bp, synthetic construct
  source 1..20: mol_type = other DNA
gctgccatgggtgagcaagg

SEQ ID NO: 180475 - DNA, 20 bp, synthetic construct
  source 1..20: mol_type = other DNA
ggctgccatgggtgagcaag

SEQ ID NO: 180476 - DNA, 20 bp, synthetic construct
  source 1..20: mol_type = other DNA
aggctgccatgggtgagcaa

SEQ ID NO: 180477 - DNA, 20 bp, synthetic construct
  source 1..20: mol_type = other DNA
aaggctgccatgggtgagca

SEQ ID NO: 180478 - DNA, 20 bp, synthetic construct
  source 1..20: mol_type = other DNA
caaggctgccatgggtgagc

SEQ ID NO: 180479 - DNA, 20 bp, synthetic construct
  source 1..20: mol_type = other DNA
gcaaggctgccatgggtgag

SEQ ID NO: 180480 - DNA, 20 bp, synthetic construct
  source 1..20: mol_type = other DNA
ggcaaggctgccatgggtga

SEQ ID NO: 180481 - DNA, 20 bp, synthetic construct
  source 1..20: mol_type = other DNA
gggcaaggctgccatgggtg

SEQ ID NO: 180482 - DNA, 20 bp, synthetic construct
  source 1..20: mol_type = other DNA
ggggcaaggctgccatgggt

SEQ ID NO: 180483 - DNA, 20 bp, synthetic construct
  source 1..20: mol_type = other DNA
aggggcaaggctgccatggg

SEQ ID NO: 180484 - DNA, 20 bp, synthetic construct
  source 1..20: mol_type = other DNA
gaggggcaaggctgccatgg

SEQ ID NO: 180485 - DNA, 20 bp, synthetic construct
  source 1..20: mol_type = other DNA
agaggggcaaggctgccatg

SEQ ID NO: 180486 - DNA, 20 bp, synthetic construct
  source 1..20: mol_type = other DNA
gagaggggcaaggctgccat

SEQ ID NO: 180487 - DNA, 20 bp, synthetic construct
  source 1..20: mol_type = other DNA
agagaggggcaaggctgcca

SEQ ID NO: 180488 - DNA, 20 bp, synthetic construct
  source 1..20: mol_type = other DNA
gagagaggggcaaggctgcc

SEQ ID NO: 180489 - DNA, 20 bp, synthetic construct
  source 1..20: mol_type = other DNA
ggagagaggggcaaggctgc

SEQ ID NO: 180490 - DNA, 20 bp, synthetic construct
  source 1..20: mol_type = other DNA
gggagagaggggcaaggctg

SEQ ID NO: 180491 - DNA, 20 bp, synthetic construct
  source 1..20: mol_type = other DNA
agggagagaggggcaaggct

SEQ ID NO: 180492 - DNA, 20 bp, synthetic construct
  source 1..20: mol_type = other DNA
cagggagagaggggcaaggc

SEQ ID NO: 180493 - DNA, 20 bp, synthetic construct
  source 1..20: mol_type = other DNA
gcagggagagaggggcaagg

SEQ ID NO: 180494 - DNA, 20 bp, synthetic construct
  source 1..20: mol_type = other DNA
ggcagggagagaggggcaag

SEQ ID NO: 180495 - DNA, 20 bp, synthetic construct
  source 1..20: mol_type = other DNA
gggcagggagagaggggcaa

SEQ ID NO: 180496 - DNA, 20 bp, synthetic construct
  source 1..20: mol_type = other DNA
ggggcagggagagaggggca

SEQ ID NO: 180497 - DNA, 20 bp, synthetic construct
  source 1..20: mol_type = other DNA
tggggcagggagagaggggc

SEQ ID NO: 180498 - DNA, 20 bp, synthetic construct
  source 1..20: mol_type = other DNA
gtggggcagggagagagggg

SEQ ID NO: 180499 - DNA, 20 bp, synthetic construct
  source 1..20: mol_type = other DNA
ggtggggcagggagagaggg

SEQ ID NO: 180500 - DNA, 20 bp, synthetic construct
  source 1..20: mol_type = other DNA
gggtggggcagggagagagg

SEQ ID NO: 180501 - DNA, 20 bp, synthetic construct
  source 1..20: mol_type = other DNA
ggggtggggcagggagagag

SEQ ID NO: 180502 - DNA, 20 bp, synthetic construct
  source 1..20: mol_type = other DNA
gggggtggggcagggagaga

SEQ ID NO: 180503 - DNA, 20 bp, synthetic construct
  source 1..20: mol_type = other DNA
agggggtggggcagggagag

SEQ ID NO: 180504 - DNA, 20 bp, synthetic construct
  source 1..20: mol_type = other DNA
tagggggtggggcagggaga

SEQ ID NO: 180505 - DNA, 20 bp, synthetic construct
  source 1..20: mol_type = other DNA
atagggggtggggcagggag

SEQ ID NO: 180506 - DNA, 20 bp, synthetic construct
  source 1..20: mol_type = other DNA
aatagggggtggggcaggga

SEQ ID NO: 180507 - DNA, 20 bp, synthetic construct
  source 1..20: mol_type = other DNA
aaatagggggtggggcaggg

SEQ ID NO: 180508 - DNA, 20 bp, synthetic construct
  source 1..20: mol_type = other DNA
taaatagggggtggggcagg

SEQ ID NO: 180509 - DNA, 20 bp, synthetic construct
  source 1..20: mol_type = other DNA
ttaaatagggggtggggcag

SEQ ID NO: 180510 - DNA, 20 bp, synthetic construct
  source 1..20: mol_type = other DNA
tttaaatagggggtggggca

SEQ ID NO: 180511 - DNA, 20 bp, synthetic construct
  source 1..20: mol_type = other DNA
atttaaatagggggtggggc

SEQ ID NO: 180512 - DNA, 20 bp, synthetic construct
  source 1..20: mol_type = other DNA
aatttaaatagggggtgggg

SEQ ID NO: 180513 - DNA, 20 bp, synthetic construct
  source 1..20: mol_type = other DNA
caatttaaatagggggtggg

SEQ ID NO: 180514 - DNA, 20 bp, synthetic construct
  source 1..20: mol_type = other DNA
tcaatttaaatagggggtgg

SEQ ID NO: 180515 - DNA, 20 bp, synthetic construct
  source 1..20: mol_type = other DNA
gtcaatttaaatagggggtg

SEQ ID NO: 180516 - DNA, 20 bp, synthetic construct
  source 1..20: mol_type = other DNA
ggtcaatttaaatagggggt

SEQ ID NO: 180517 - DNA, 20 bp, synthetic construct
  source 1..20: mol_type = other DNA
aggtcaatttaaataggggg

SEQ ID NO: 180518 - DNA, 20 bp, synthetic construct
  source 1..20: mol_type = other DNA
caggtcaatttaaatagggg

SEQ ID NO: 180519 - DNA, 20 bp, synthetic construct
  source 1..20: mol_type = other DNA
tcaggtcaatttaaataggg

SEQ ID NO: 180520 - DNA, 20 bp, synthetic construct
  source 1..20: mol_type = other DNA
gtcaggtcaatttaaatagg

SEQ ID NO: 180521 - DNA, 20 bp, synthetic construct
  source 1..20: mol_type = other DNA
ggtcaggtcaatttaaatag

SEQ ID NO: 180522 - DNA, 20 bp, synthetic construct
  source 1..20: mol_type = other DNA
aggtcaggtcaatttaaata

SEQ ID NO: 180523 - DNA, 20 bp, synthetic construct
  source 1..20: mol_type = other DNA
aaggtcaggtcaatttaaat

SEQ ID NO: 180524 - DNA, 20 bp, synthetic construct
  source 1..20: mol_type = other DNA
gaaggtcaggtcaatttaaa

SEQ ID NO: 180525 - DNA, 20 bp, synthetic construct
  source 1..20: mol_type = other DNA
ggaaggtcaggtcaatttaa

SEQ ID NO: 180526 - DNA, 20 bp, synthetic construct
  source 1..20: mol_type = other DNA
aggaaggtcaggtcaattta

SEQ ID NO: 180527 - DNA, 20 bp, synthetic construct
  source 1..20: mol_type = other DNA
gaggaaggtcaggtcaattt

SEQ ID NO: 180528 - DNA, 20 bp, synthetic construct
  source 1..20: mol_type = other DNA
tgaggaaggtcaggtcaatt

SEQ ID NO: 180529 - DNA, 20 bp, synthetic construct
  source 1..20: mol_type = other DNA
ctgaggaaggtcaggtcaat

SEQ ID NO: 180530 - DNA, 20 bp, synthetic construct
  source 1..20: mol_type = other DNA
actgaggaaggtcaggtcaa

SEQ ID NO: 180531 - DNA, 20 bp, synthetic construct
  source 1..20: mol_type = other DNA
cactgaggaaggtcaggtca

SEQ ID NO: 180532 - DNA, 20 bp, synthetic construct
  source 1..20: mol_type = other DNA
acactgaggaaggtcaggtc

SEQ ID NO: 180533 - DNA, 20 bp, synthetic construct
  source 1..20: mol_type = other DNA
gacactgaggaaggtcaggt

SEQ ID NO: 180534 - DNA, 20 bp, synthetic construct
  source 1..20: mol_type = other DNA
ggacactgaggaaggtcagg

SEQ ID NO: 180535 - DNA, 20 bp, synthetic construct
  source 1..20: mol_type = other DNA
tggacactgaggaaggtcag

SEQ ID NO: 180536 - DNA, 20 bp, synthetic construct
  source 1..20: mol_type = other DNA
atggacactgaggaaggtca

SEQ ID NO: 180537 - DNA, 20 bp, synthetic construct
  source 1..20: mol_type = other DNA
gatggacactgaggaaggtc

SEQ ID NO: 180538 - DNA, 20 bp, synthetic construct
  source 1..20: mol_type = other DNA
agatggacactgaggaaggt

SEQ ID NO: 180539 - DNA, 20 bp, synthetic construct
  source 1..20: mol_type = other DNA
aagatggacactgaggaagg

SEQ ID NO: 180540 - DNA, 20 bp, synthetic construct
  source 1..20: mol_type = other DNA
gaagatggacactgaggaag

SEQ ID NO: 180541 - DNA, 20 bp, synthetic construct
  source 1..20: mol_type = other DNA
ggaagatggacactgaggaa

SEQ ID NO: 180542 - DNA, 20 bp, synthetic construct
  source 1..20: mol_type = other DNA
gggaagatggacactgagga

SEQ ID NO: 180543 - DNA, 20 bp, synthetic construct
  source 1..20: mol_type = other DNA
ggggaagatggacactgagg

SEQ ID NO: 180544 - DNA, 20 bp, synthetic construct
  source 1..20: mol_type = other DNA
cggggaagatggacactgag

SEQ ID NO: 180545 - DNA, 20 bp, synthetic construct
  source 1..20: mol_type = other DNA
tcggggaagatggacactga

SEQ ID NO: 180546 - DNA, 20 bp, synthetic construct
  source 1..20: mol_type = other DNA
ttcggggaagatggacactg

SEQ ID NO: 180547 - DNA, 20 bp, synthetic construct
  source 1..20: mol_type = other DNA
cttcggggaagatggacact

SEQ ID NO: 180548 - DNA, 20 bp, synthetic construct
  source 1..20: mol_type = other DNA
gcttcggggaagatggacac

SEQ ID NO: 180549 - DNA, 20 bp, synthetic construct
  source 1..20: mol_type = other DNA
agcttcggggaagatggaca

SEQ ID NO: 180550 - DNA, 20 bp, synthetic construct
  source 1..20: mol_type = other DNA
aagcttcggggaagatggac

SEQ ID NO: 180551 - DNA, 20 bp, synthetic construct
  source 1..20: mol_type = other DNA
aaagcttcggggaagatgga

SEQ ID NO: 180552 - DNA, 20 bp, synthetic construct
  source 1..20: mol_type = other DNA
gaaagcttcggggaagatgg

SEQ ID NO: 180553 - DNA, 20 bp, synthetic construct
  source 1..20: mol_type = other DNA
ggaaagcttcggggaagatg

SEQ ID NO: 180554 - DNA, 20 bp, synthetic construct
  source 1..20: mol_type = other DNA
gggaaagcttcggggaagat

SEQ ID NO: 180555 - DNA, 20 bp, synthetic construct
  source 1..20: mol_type = other DNA
ggggaaagcttcggggaaga

SEQ ID NO: 180556 - DNA, 20 bp, synthetic construct
  source 1..20: mol_type = other DNA
tggggaaagcttcggggaag

SEQ ID NO: 180557 - DNA, 20 bp, synthetic construct
  source 1..20: mol_type = other DNA
ctggggaaagcttcggggaa

SEQ ID NO: 180558 - DNA, 20 bp, synthetic construct
  source 1..20: mol_type = other DNA
gctggggaaagcttcgggga

SEQ ID NO: 180559 - DNA, 20 bp, synthetic construct
  source 1..20: mol_type = other DNA
ggctggggaaagcttcgggg

SEQ ID NO: 180560 - DNA, 20 bp, synthetic construct
  source 1..20: mol_type = other DNA
aggctggggaaagcttcggg

SEQ ID NO: 180561 - DNA, 20 bp, synthetic construct
  source 1..20: mol_type = other DNA
aaggctggggaaagcttcgg

SEQ ID NO: 180562 - DNA, 20 bp, synthetic construct
  source 1..20: mol_type = other DNA
caaggctggggaaagcttcg

SEQ ID NO: 180563 - DNA, 20 bp, synthetic construct
  source 1..20: mol_type = other DNA
ccaaggctggggaaagcttc

SEQ ID NO: 180564 - DNA, 20 bp, synthetic construct
  source 1..20: mol_type = other DNA
gccaaggctggggaaagctt

SEQ ID NO: 180565 - DNA, 20 bp, synthetic construct
  source 1..20: mol_type = other DNA
tgccaaggctggggaaagct

SEQ ID NO: 180566 - DNA, 20 bp, synthetic construct
  source 1..20: mol_type = other DNA
gtgccaaggctggggaaagc

SEQ ID NO: 180567 - DNA, 20 bp, synthetic construct
  source 1..20: mol_type = other DNA
agtgccaaggctggggaaag

SEQ ID NO: 180568 - DNA, 20 bp, synthetic construct
  source 1..20: mol_type = other DNA
gagtgccaaggctggggaaa

SEQ ID NO: 180569 - DNA, 20 bp, synthetic construct
  source 1..20: mol_type = other DNA
tgagtgccaaggctggggaa

SEQ ID NO: 180570 - DNA, 20 bp, synthetic construct
  source 1..20: mol_type = other DNA
ttgagtgccaaggctgggga

SEQ ID NO: 180571 - DNA, 20 bp, synthetic construct
  source 1..20: mol_type = other DNA
cttgagtgccaaggctgggg

SEQ ID NO: 180572 - DNA, 20 bp, synthetic construct
  source 1..20: mol_type = other DNA
ccttgagtgccaaggctggg

SEQ ID NO: 180573 - DNA, 20 bp, synthetic construct
  source 1..20: mol_type = other DNA
accttgagtgccaaggctgg

SEQ ID NO: 180574 - DNA, 20 bp, synthetic construct
  source 1..20: mol_type = other DNA
gaccttgagtgccaaggctg

SEQ ID NO: 180575 - DNA, 20 bp, synthetic construct
  source 1..20: mol_type = other DNA
ggaccttgagtgccaaggct

SEQ ID NO: 180576 - DNA, 20 bp, synthetic construct
  source 1..20: mol_type = other DNA
tggaccttgagtgccaaggc

SEQ ID NO: 180577 - DNA, 20 bp, synthetic construct
  source 1..20: mol_type = other DNA
ctggaccttgagtgccaagg

SEQ ID NO: 180578 - DNA, 20 bp, synthetic construct
  source 1..20: mol_type = other DNA
tctggaccttgagtgccaag

SEQ ID NO: 180579 - DNA, 20 bp, synthetic construct
  source 1..20: mol_type = other DNA
ctctggaccttgagtgccaa

SEQ ID NO: 180580 - DNA, 20 bp, synthetic construct
  source 1..20: mol_type = other DNA
cctctggaccttgagtgcca

SEQ ID NO: 180581 - DNA, 20 bp, synthetic construct
  source 1..20: mol_type = other DNA
gcctctggaccttgagtgcc

SEQ ID NO: 180582 - DNA, 20 bp, synthetic construct
  source 1..20: mol_type = other DNA
agcctctggaccttgagtgc

SEQ ID NO: 180583 - DNA, 20 bp, synthetic construct
  source 1..20: mol_type = other DNA
tagcctctggaccttgagtg

SEQ ID NO: 180584 - DNA, 20 bp, synthetic construct
  source 1..20: mol_type = other DNA
gtagcctctggaccttgagt

SEQ ID NO: 180585 - DNA, 20 bp, synthetic construct
  source 1..20: mol_type = other DNA
cgtagcctctggaccttgag

SEQ ID NO: 180586 - DNA, 20 bp, synthetic construct
  source 1..20: mol_type = other DNA
gcgtagcctctggaccttga

SEQ ID NO: 180587 - DNA, 20 bp, synthetic construct
  source 1..20: mol_type = other DNA
cgcgtagcctctggaccttg

SEQ ID NO: 180588 - DNA, 20 bp, synthetic construct
  source 1..20: mol_type = other DNA
acgcgtagcctctggacctt

SEQ ID NO: 180589 - DNA, 20 bp, synthetic construct
  source 1..20: mol_type = other DNA
aacgcgtagcctctggacct

SEQ ID NO: 180590 - DNA, 20 bp, synthetic construct
  source 1..20: mol_type = other DNA
aaacgcgtagcctctggacc

SEQ ID NO: 180591 - DNA, 20 bp, synthetic construct
  source 1..20: mol_type = other DNA
gaaacgcgtagcctctggac

SEQ ID NO: 180592 - DNA, 20 bp, synthetic construct
  source 1..20: mol_type = other DNA
ggaaacgcgtagcctctgga

SEQ ID NO: 180593 - DNA, 20 bp, synthetic construct
  source 1..20: mol_type = other DNA
aggaaacgcgtagcctctgg

SEQ ID NO: 180594 - DNA, 20 bp, synthetic construct
  source 1..20: mol_type = other DNA
gaggaaacgcgtagcctctg

SEQ ID NO: 180595 - DNA, 20 bp, synthetic construct
  source 1..20: mol_type = other DNA
agaggaaacgcgtagcctct

SEQ ID NO: 180596 - DNA, 20 bp, synthetic construct
  source 1..20: mol_type = other DNA
gagaggaaacgcgtagcctc

SEQ ID NO: 180597 - DNA, 20 bp, synthetic construct
  source 1..20: mol_type = other DNA
tgagaggaaacgcgtagcct

SEQ ID NO: 180598 - DNA, 20 bp, synthetic construct
  source 1..20: mol_type = other DNA
gtgagaggaaacgcgtagcc

SEQ ID NO: 180599 - DNA, 20 bp, synthetic construct
  source 1..20: mol_type = other DNA
ggtgagaggaaacgcgtagc

SEQ ID NO: 180600 - DNA, 20 bp, synthetic construct
  source 1..20: mol_type = other DNA
aggtgagaggaaacgcgtag

SEQ ID NO: 180601 - DNA, 20 bp, synthetic construct
  source 1..20: mol_type = other DNA
caggtgagaggaaacgcgta

SEQ ID NO: 180602 - DNA, 20 bp, synthetic construct
  source 1..20: mol_type = other DNA
acaggtgagaggaaacgcgt

SEQ ID NO: 180603 - DNA, 20 bp, synthetic construct
  source 1..20: mol_type = other DNA
cacaggtgagaggaaacgcg

SEQ ID NO: 180604 - DNA, 20 bp, synthetic construct
  source 1..20: mol_type = other DNA
ccacaggtgagaggaaacgc

SEQ ID NO: 180605 - DNA, 20 bp, synthetic construct
  source 1..20: mol_type = other DNA
gccacaggtgagaggaaacg

SEQ ID NO: 180606 - DNA, 20 bp, synthetic construct
  source 1..20: mol_type = other DNA
tgccacaggtgagaggaaac

SEQ ID NO: 180607 - DNA, 20 bp, synthetic construct
  source 1..20: mol_type = other DNA
ctgccacaggtgagaggaaa

SEQ ID NO: 180608 - DNA, 20 bp, synthetic construct
  source 1..20: mol_type = other DNA
gctgccacaggtgagaggaa

SEQ ID NO: 180609 - DNA, 20 bp, synthetic construct
  source 1..20: mol_type = other DNA
cgctgccacaggtgagagga

SEQ ID NO: 180610 - DNA, 20 bp, synthetic construct
  source 1..20: mol_type = other DNA
gcgctgccacaggtgagagg

SEQ ID NO: 180611 - DNA, 20 bp, synthetic construct
  source 1..20: mol_type = other DNA
ggcgctgccacaggtgagag

SEQ ID NO: 180612 - DNA, 20 bp, synthetic construct
  source 1..20: mol_type = other DNA
cggcgctgccacaggtgaga

SEQ ID NO: 180613 - DNA, 20 bp, synthetic construct
  source 1..20: mol_type = other DNA
acggcgctgccacaggtgag

SEQ ID NO: 180614 - DNA, 20 bp, synthetic construct
  source 1..20: mol_type = other DNA
cacggcgctgccacaggtga

SEQ ID NO: 180615 - DNA, 20 bp, synthetic construct
  source 1..20: mol_type = other DNA
gcacggcgctgccacaggtg

SEQ ID NO: 180616 - DNA, 20 bp, synthetic construct
  source 1..20: mol_type = other DNA
agcacggcgctgccacaggt

SEQ ID NO: 180617 - DNA, 20 bp, synthetic construct
  source 1..20: mol_type = other DNA
gagcacggcgctgccacagg

SEQ ID NO: 180618 - DNA, 20 bp, synthetic construct
  source 1..20: mol_type = other DNA
ggagcacggcgctgccacag

SEQ ID NO: 180619 - DNA, 20 bp, synthetic construct
  source 1..20: mol_type = other DNA
gggagcacggcgctgccaca

SEQ ID NO: 180620 - DNA, 20 bp, synthetic construct
  source 1..20: mol_type = other DNA
ggggagcacggcgctgccac

SEQ ID NO: 180621 - DNA, 20 bp, synthetic construct
  source 1..20: mol_type = other DNA
tggggagcacggcgctgcca

SEQ ID NO: 180622 - DNA, 20 bp, synthetic construct
  source 1..20: mol_type = other DNA
ctggggagcacggcgctgcc

SEQ ID NO: 180623 - DNA, 20 bp, synthetic construct
  source 1..20: mol_type = other DNA
actggggagcacggcgctgc

SEQ ID NO: 180624 - DNA, 20 bp, synthetic construct
  source 1..20: mol_type = other DNA
cactggggagcacggcgctg

SEQ ID NO: 180625 - DNA, 20 bp, synthetic construct
  source 1..20: mol_type = other DNA
gcactggggagcacggcgct

SEQ ID NO: 180626 - DNA, 20 bp, synthetic construct
  source 1..20: mol_type = other DNA
ggcactggggagcacggcgc

SEQ ID NO: 180627 - DNA, 20 bp, synthetic construct
  source 1..20: mol_type = other DNA
aggcactggggagcacggcg

SEQ ID NO: 180628 - DNA, 20 bp, synthetic construct
  source 1..20: mol_type = other DNA
gaggcactggggagcacggc

SEQ ID NO: 180629 - DNA, 20 bp, synthetic construct
  source 1..20: mol_type = other DNA
tgaggcactggggagcacgg

SEQ ID NO: 180630 - DNA, 20 bp, synthetic construct
  source 1..20: mol_type = other DNA
gtgaggcactggggagcacg

SEQ ID NO: 180631 - DNA, 20 bp, synthetic construct
  source 1..20: mol_type = other DNA
tgtgaggcactggggagcac

SEQ ID NO: 180632 - DNA, 20 bp, synthetic construct
  source 1..20: mol_type = other DNA
ctgtgaggcactggggagca

SEQ ID NO: 180633 - DNA, 20 bp, synthetic construct
  source 1..20: mol_type = other DNA
actgtgaggcactggggagc

SEQ ID NO: 180634 - DNA, 20 bp, synthetic construct
  source 1..20: mol_type = other DNA
aactgtgaggcactggggag

SEQ ID NO: 180635 - DNA, 20 bp, synthetic construct
  source 1..20: mol_type = other DNA
aaactgtgaggcactgggga

SEQ ID NO: 180636 - DNA, 20 bp, synthetic construct
  source 1..20: mol_type = other DNA
gaaactgtgaggcactgggg

SEQ ID NO: 180637 - DNA, 20 bp, synthetic construct
  source 1..20: mol_type = other DNA
ggaaactgtgaggcactggg

SEQ ID NO: 180638 - DNA, 20 bp, synthetic construct
  source 1..20: mol_type = other DNA
aggaaactgtgaggcactgg

SEQ ID NO: 180639 - DNA, 20 bp, synthetic construct
  source 1..20: mol_type = other DNA
aaggaaactgtgaggcactg

SEQ ID NO: 180640 - DNA, 20 bp, synthetic construct
  source 1..20: mol_type = other DNA
gaaggaaactgtgaggcact

SEQ ID NO: 180641 - DNA, 20 bp, synthetic construct
  source 1..20: mol_type = other DNA
agaaggaaactgtgaggcac

SEQ ID NO: 180642 - DNA, 20 bp, synthetic construct
  source 1..20: mol_type = other DNA
aagaaggaaactgtgaggca

SEQ ID NO: 180643 - DNA, 20 bp, synthetic construct
  source 1..20: mol_type = other DNA
caagaaggaaactgtgaggc

SEQ ID NO: 180644 - DNA, 20 bp, synthetic construct
  source 1..20: mol_type = other DNA
gcaagaaggaaactgtgagg

SEQ ID NO: 180645 - DNA, 20 bp, synthetic construct
  source 1..20: mol_type = other DNA
ggcaagaaggaaactgtgag

SEQ ID NO: 180646 - DNA, 20 bp, synthetic construct
  source 1..20: mol_type = other DNA
gggcaagaaggaaactgtga

SEQ ID NO: 180647 - DNA, 20 bp, synthetic construct
  source 1..20: mol_type = other DNA
ggggcaagaaggaaactgtg

SEQ ID NO: 180648 - DNA, 20 bp, synthetic construct
  source 1..20: mol_type = other DNA
gggggcaagaaggaaactgt

SEQ ID NO: 180649 - DNA, 20 bp, synthetic construct
  source 1..20: mol_type = other DNA
cgggggcaagaaggaaactg

SEQ ID NO: 180650 - DNA, 20 bp, synthetic construct
  source 1..20: mol_type = other DNA
gcgggggcaagaaggaaact

SEQ ID NO: 180651 - DNA, 20 bp, synthetic construct
  source 1..20: mol_type = other DNA
agcgggggcaagaaggaaac

SEQ ID NO: 180652 - DNA, 20 bp, synthetic construct
  source 1..20: mol_type = other DNA
aagcgggggcaagaaggaaa

SEQ ID NO: 180653 - DNA, 20 bp, synthetic construct
  source 1..20: mol_type = other DNA
gaagcgggggcaagaaggaa

SEQ ID NO: 180654 - DNA, 20 bp, synthetic construct
  source 1..20: mol_type = other DNA
ggaagcgggggcaagaagga

SEQ ID NO: 180655 - DNA, 20 bp, synthetic construct
  source 1..20: mol_type = other DNA
aggaagcgggggcaagaagg

SEQ ID NO: 180656 - DNA, 20 bp, synthetic construct
  source 1..20: mol_type = other DNA
caggaagcgggggcaagaag

SEQ ID NO: 180657 - DNA, 20 bp, synthetic construct
  source 1..20: mol_type = other DNA
acaggaagcgggggcaagaa

SEQ ID NO: 180658 - DNA, 20 bp, synthetic construct
  source 1..20: mol_type = other DNA
cacaggaagcgggggcaaga

SEQ ID NO: 180659 - DNA, 20 bp, synthetic construct
  source 1..20: mol_type = other DNA
acacaggaagcgggggcaag

SEQ ID NO: 180660 - DNA, 20 bp, synthetic construct
  source 1..20: mol_type = other DNA
tacacaggaagcgggggcaa

SEQ ID NO: 180661 - DNA, 20 bp, synthetic construct
  source 1..20: mol_type = other DNA
ctacacaggaagcgggggca

SEQ ID NO: 180662 - DNA, 20 bp, synthetic construct
  source 1..20: mol_type = other DNA
cctacacaggaagcgggggc

SEQ ID NO: 180663 - DNA, 20 bp, synthetic construct
  source 1..20: mol_type = other DNA
tcctacacaggaagcggggg

SEQ ID NO: 180664 - DNA, 20 bp, synthetic construct
  source 1..20: mol_type = other DNA
gtcctacacaggaagcgggg

SEQ ID NO: 180665 - DNA, 20 bp, synthetic construct
  source 1..20: mol_type = other DNA
agtcctacacaggaagcggg

SEQ ID NO: 180666 - DNA, 20 bp, synthetic construct
  source 1..20: mol_type = other DNA
gagtcctacacaggaagcgg

SEQ ID NO: 180667 - DNA, 20 bp, synthetic construct
  source 1..20: mol_type = other DNA
tgagtcctacacaggaagcg

SEQ ID NO: 180668 - DNA, 20 bp, synthetic construct
  source 1..20: mol_type = other DNA
atgagtcctacacaggaagc

SEQ ID NO: 180669 - DNA, 20 bp, synthetic construct
  source 1..20: mol_type = other DNA
gatgagtcctacacaggaag

SEQ ID NO: 180670 - DNA, 20 bp, synthetic construct
  source 1..20: mol_type = other DNA
agatgagtcctacacaggaa

SEQ ID NO: 180671 - DNA, 20 bp, synthetic construct
  source 1..20: mol_type = other DNA
cagatgagtcctacacagga

SEQ ID NO: 180672 - DNA, 20 bp, synthetic construct
  source 1..20: mol_type = other DNA
gcagatgagtcctacacagg

SEQ ID NO: 180673 - DNA, 20 bp, synthetic construct
  source 1..20: mol_type = other DNA
ggcagatgagtcctacacag

SEQ ID NO: 180674 - DNA, 20 bp, synthetic construct
  source 1..20: mol_type = other DNA
gggcagatgagtcctacaca

SEQ ID NO: 180675 - DNA, 20 bp, synthetic construct
  source 1..20: mol_type = other DNA
tgggcagatgagtcctacac

SEQ ID NO: 180676 - DNA, 20 bp, synthetic construct
  source 1..20: mol_type = other DNA
gtgggcagatgagtcctaca

SEQ ID NO: 180677 - DNA, 20 bp, synthetic construct
  source 1..20: mol_type = other DNA
tgtgggcagatgagtcctac

SEQ ID NO: 180678 - DNA, 20 bp, synthetic construct
  source 1..20: mol_type = other DNA
ctgtgggcagatgagtccta

SEQ ID NO: 180679 - DNA, 20 bp, synthetic construct
  source 1..20: mol_type = other DNA
cctgtgggcagatgagtcct

SEQ ID NO: 180680 - DNA, 20 bp, synthetic construct
  source 1..20: mol_type = other DNA
acctgtgggcagatgagtcc

SEQ ID NO: 180681 - DNA, 20 bp, synthetic construct
  source 1..20: mol_type = other DNA
aacctgtgggcagatgagtc

SEQ ID NO: 180682 - DNA, 20 bp, synthetic construct
  source 1..20: mol_type = other DNA
caacctgtgggcagatgagt

SEQ ID NO: 180683 - DNA, 20 bp, synthetic construct
  source 1..20: mol_type = other DNA
gcaacctgtgggcagatgag

SEQ ID NO: 180684 - DNA, 20 bp, synthetic construct
  source 1..20: mol_type = other DNA
tgcaacctgtgggcagatga

SEQ ID NO: 180685 - DNA, 20 bp, synthetic construct
  source 1..20: mol_type = other DNA
gtgcaacctgtgggcagatg

SEQ ID NO: 180686 - DNA, 20 bp, synthetic construct
  source 1..20: mol_type = other DNA
cgtgcaacctgtgggcagat

SEQ ID NO: 180687 - DNA, 20 bp, synthetic construct
  source 1..20: mol_type = other DNA
acgtgcaacctgtgggcaga

SEQ ID NO: 180688 - DNA, 20 bp, synthetic construct
  source 1..20: mol_type = other DNA
gacgtgcaacctgtgggcag

SEQ ID NO: 180689 - DNA, 20 bp, synthetic construct
  source 1..20: mol_type = other DNA
ggacgtgcaacctgtgggca

SEQ ID NO: 180690 - DNA, 20 bp, synthetic construct
  source 1..20: mol_type = other DNA
aggacgtgcaacctgtgggc

SEQ ID NO: 180691 - DNA, 20 bp, synthetic construct
  source 1..20: mol_type = other DNA
caggacgtgcaacctgtggg

SEQ ID NO: 180692 - DNA, 20 bp, synthetic construct
  source 1..20: mol_type = other DNA
acaggacgtgcaacctgtgg

SEQ ID NO: 180693 - DNA, 20 bp, synthetic construct
  source 1..20: mol_type = other DNA
cacaggacgtgcaacctgtg

SEQ ID NO: 180694 - DNA, 20 bp, synthetic construct
  source 1..20: mol_type = other DNA
tcacaggacgtgcaacctgt

SEQ ID NO: 180695 - DNA, 20 bp, synthetic construct
  source 1..20: mol_type = other DNA
ctcacaggacgtgcaacctg

SEQ ID NO: 180696 - DNA, 20 bp, synthetic construct
  source 1..20: mol_type = other DNA
cctcacaggacgtgcaacct

SEQ ID NO: 180697 - DNA, 20 bp, synthetic construct
  source 1..20: mol_type = other DNA
ccctcacaggacgtgcaacc

SEQ ID NO: 180698 - DNA, 20 bp, synthetic construct
  source 1..20: mol_type = other DNA
gccctcacaggacgtgcaac

SEQ ID NO: 180699 - DNA, 20 bp, synthetic construct
  source 1..20: mol_type = other DNA
tgccctcacaggacgtgcaa

SEQ ID NO: 180700 - DNA, 20 bp, synthetic construct
  source 1..20: mol_type = other DNA
ttgccctcacaggacgtgca

SEQ ID NO: 180701 - DNA, 20 bp, synthetic construct
  source 1..20: mol_type = other DNA
cttgccctcacaggacgtgc

SEQ ID NO: 180702 - DNA, 20 bp, synthetic construct
  source 1..20: mol_type = other DNA
ccttgccctcacaggacgtg

SEQ ID NO: 180703 - DNA, 20 bp, synthetic construct
  source 1..20: mol_type = other DNA
tccttgccctcacaggacgt

SEQ ID NO: 180704 - DNA, 20 bp, synthetic construct
  source 1..20: mol_type = other DNA
gtccttgccctcacaggacg

SEQ ID NO: 180705 - DNA, 20 bp, synthetic construct
  source 1..20: mol_type = other DNA
agtccttgccctcacaggac

SEQ ID NO: 180706 - DNA, 20 bp, synthetic construct
  source 1..20: mol_type = other DNA
cagtccttgccctcacagga

SEQ ID NO: 180707 - DNA, 20 bp, synthetic construct
  source 1..20: mol_type = other DNA
acagtccttgccctcacagg

SEQ ID NO: 180708 - DNA, 20 bp, synthetic construct
  source 1..20: mol_type = other DNA
cacagtccttgccctcacag

SEQ ID NO: 180709 - DNA, 20 bp, synthetic construct
  source 1..20: mol_type = other DNA
acacagtccttgccctcaca

SEQ ID NO: 180710 - DNA, 20 bp, synthetic construct
  source 1..20: mol_type = other DNA
gacacagtccttgccctcac

SEQ ID NO: 180711 - DNA, 20 bp, synthetic construct
  source 1..20: mol_type = other DNA
agacacagtccttgccctca

SEQ ID NO: 180712 - DNA, 20 bp, synthetic construct
  source 1..20: mol_type = other DNA
aagacacagtccttgccctc

SEQ ID NO: 180713 - DNA, 20 bp, synthetic construct
  source 1..20: mol_type = other DNA
taagacacagtccttgccct

SEQ ID NO: 180714 - DNA, 20 bp, synthetic construct
  source 1..20: mol_type = other DNA
ataagacacagtccttgccc

SEQ ID NO: 180715 - DNA, 20 bp, synthetic construct
  source 1..20: mol_type = other DNA
cataagacacagtccttgcc

SEQ ID NO: 180716 - DNA, 20 bp, synthetic construct
  source 1..20: mol_type = other DNA
acataagacacagtccttgc

SEQ ID NO: 180717 - DNA, 20 bp, synthetic construct
  source 1..20: mol_type = other DNA
cacataagacacagtccttg

SEQ ID NO: 180718 - DNA, 20 bp, synthetic construct
  source 1..20: mol_type = other DNA
tcacataagacacagtcctt

SEQ ID NO: 180719 - DNA, 20 bp, synthetic construct
  source 1..20: mol_type = other DNA
gtcacataagacacagtcct

SEQ ID NO: 180720 - DNA, 20 bp, synthetic construct
  source 1..20: mol_type = other DNA
agtcacataagacacagtcc

SEQ ID NO: 180721 - DNA, 20 bp, synthetic construct
  source 1..20: mol_type = other DNA
aagtcacataagacacagtc

SEQ ID NO: 180722 - DNA, 20 bp, synthetic construct
  source 1..20: mol_type = other DNA
aaagtcacataagacacagt

SEQ ID NO: 180723 - DNA, 20 bp, synthetic construct
  source 1..20: mol_type = other DNA
gaaagtcacataagacacag

SEQ ID NO: 180724 - DNA, 20 bp, synthetic construct
  source 1..20: mol_type = other DNA
ggaaagtcacataagacaca

SEQ ID NO: 180725 - DNA, 20 bp, synthetic construct
  source 1..20: mol_type = other DNA
aggaaagtcacataagacac

SEQ ID NO: 180726 - DNA, 20 bp, synthetic construct
  source 1..20: mol_type = other DNA
aaggaaagtcacataagaca

SEQ ID NO: 180727 - DNA, 20 bp, synthetic construct
  source 1..20: mol_type = other DNA
gaaggaaagtcacataagac

SEQ ID NO: 180728 - DNA, 20 bp, synthetic construct
  source 1..20: mol_type = other DNA
agaaggaaagtcacataaga

SEQ ID NO: 180729 - DNA, 20 bp, synthetic construct
  source 1..20: mol_type = other DNA
gagaaggaaagtcacataag

SEQ ID NO: 180730 - DNA, 20 bp, synthetic construct
  source 1..20: mol_type = other DNA
ggagaaggaaagtcacataa

SEQ ID NO: 180731 - DNA, 20 bp, synthetic construct
  source 1..20: mol_type = other DNA
tggagaaggaaagtcacata

SEQ ID NO: 180732 - DNA, 20 bp, synthetic construct
  source 1..20: mol_type = other DNA
ctggagaaggaaagtcacat

SEQ ID NO: 180733 - DNA, 20 bp, synthetic construct
  source 1..20: mol_type = other DNA
actggagaaggaaagtcaca

SEQ ID NO: 180734 - DNA, 20 bp, synthetic construct
  source 1..20: mol_type = other DNA
gactggagaaggaaagtcac

SEQ ID NO: 180735 - DNA, 20 bp, synthetic construct
  source 1..20: mol_type = other DNA
tgactggagaaggaaagtca

SEQ ID NO: 180736 - DNA, 20 bp, synthetic construct
  source 1..20: mol_type = other DNA
gtgactggagaaggaaagtc

SEQ ID NO: 180737 - DNA, 20 bp, synthetic construct
  source 1..20: mol_type = other DNA
tgtgactggagaaggaaagt

SEQ ID NO: 180738 - DNA, 20 bp, synthetic construct
  source 1..20: mol_type = other DNA
ctgtgactggagaaggaaag

SEQ ID NO: 180739 - DNA, 20 bp, synthetic construct
  source 1..20: mol_type = other DNA
tctgtgactggagaaggaaa

SEQ ID NO: 180740 - DNA, 20 bp, synthetic construct
  source 1..20: mol_type = other DNA
ctctgtgactggagaaggaa

SEQ ID NO: 180741 - DNA, 20 bp, synthetic construct
  source 1..20: mol_type = other DNA
gctctgtgactggagaagga

SEQ ID NO: 180742 - DNA, 20 bp, synthetic construct
  source 1..20: mol_type = other DNA
agctctgtgactggagaagg

SEQ ID NO: 180743 - DNA, 20 bp, synthetic construct
  source 1..20: mol_type = other DNA
cagctctgtgactggagaag

SEQ ID NO: 180744 - DNA, 20 bp, synthetic construct
  source 1..20: mol_type = other DNA
ccagctctgtgactggagaa

SEQ ID NO: 180745 - DNA, 20 bp, synthetic construct
  source 1..20: mol_type = other DNA
cccagctctgtgactggaga

SEQ ID NO: 180746 - DNA, 20 bp, synthetic construct
  source 1..20: mol_type = other DNA
gcccagctctgtgactggag

SEQ ID NO: 180747 - DNA, 20 bp, synthetic construct
  source 1..20: mol_type = other DNA
tgcccagctctgtgactgga

SEQ ID NO: 180748 - DNA, 20 bp, synthetic construct
  source 1..20: mol_type = other DNA
gtgcccagctctgtgactgg

SEQ ID NO: 180749 - DNA, 20 bp, synthetic construct
  source 1..20: mol_type = other DNA
tgtgcccagctctgtgactg

SEQ ID NO: 180750 - DNA, 20 bp, synthetic construct
  source 1..20: mol_type = other DNA
atgtgcccagctctgtgact

SEQ ID NO: 180751 - DNA, 20 bp, synthetic construct
  source 1..20: mol_type = other DNA
tatgtgcccagctctgtgac

SEQ ID NO: 180752 - DNA, 20 bp, synthetic construct
  source 1..20: mol_type = other DNA
ctatgtgcccagctctgtga

SEQ ID NO: 180753 - DNA, 20 bp, synthetic construct
  source 1..20: mol_type = other DNA
tctatgtgcccagctctgtg

SEQ ID NO: 180754 - DNA, 20 bp, synthetic construct
  source 1..20: mol_type = other DNA
atctatgtgcccagctctgt

SEQ ID NO: 180755 - DNA, 20 bp, synthetic construct
  source 1..20: mol_type = other DNA
tatctatgtgcccagctctg

SEQ ID NO: 180756 - DNA, 20 bp, synthetic construct
  source 1..20: mol_type = other DNA
ctatctatgtgcccagctct

SEQ ID NO: 180757 - DNA, 20 bp, synthetic construct
  source 1..20: mol_type = other DNA
gctatctatgtgcccagctc

SEQ ID NO: 180758 - DNA, 20 bp, synthetic construct
  source 1..20: mol_type = other DNA
agctatctatgtgcccagct

SEQ ID NO: 180759 - DNA, 20 bp, synthetic construct
  source 1..20: mol_type = other DNA
gagctatctatgtgcccagc

SEQ ID NO: 180760 - DNA, 20 bp, synthetic construct
  source 1..20: mol_type = other DNA
tgagctatctatgtgcccag

SEQ ID NO: 180761 - DNA, 20 bp, synthetic construct
  source 1..20: mol_type = other DNA
ttgagctatctatgtgccca

SEQ ID NO: 180762 - DNA, 20 bp, synthetic construct
  source 1..20: mol_type = other DNA
tttgagctatctatgtgccc

SEQ ID NO: 180763 - DNA, 20 bp, synthetic construct
  source 1..20: mol_type = other DNA
ttttgagctatctatgtgcc

SEQ ID NO: 180764 - DNA, 20 bp, synthetic construct
  source 1..20: mol_type = other DNA
gttttgagctatctatgtgc

SEQ ID NO: 180765 - DNA, 20 bp, synthetic construct
  source 1..20: mol_type = other DNA
ggttttgagctatctatgtg

SEQ ID NO: 180766 - DNA, 20 bp, synthetic construct
  source 1..20: mol_type = other DNA
gggttttgagctatctatgt

SEQ ID NO: 180767 - DNA, 20 bp, synthetic construct
  source 1..20: mol_type = other DNA
agggttttgagctatctatg

SEQ ID NO: 180768 - DNA, 20 bp, synthetic construct
  source 1..20: mol_type = other DNA
gagggttttgagctatctat

SEQ ID NO: 180769 - DNA, 20 bp, synthetic construct
  source 1..20: mol_type = other DNA
agagggttttgagctatcta

SEQ ID NO: 180770 - DNA, 20 bp, synthetic construct
  source 1..20: mol_type = other DNA
aagagggttttgagctatct

SEQ ID NO: 180771 - DNA, 20 bp, synthetic construct
  source 1..20: mol_type = other DNA
aaagagggttttgagctatc

SEQ ID NO: 180772 - DNA, 20 bp, synthetic construct
  source 1..20: mol_type = other DNA
taaagagggttttgagctat

SEQ ID NO: 180773 - DNA, 20 bp, synthetic construct
  source 1..20: mol_type = other DNA
ataaagagggttttgagcta

SEQ ID NO: 180774 - DNA, 20 bp, synthetic construct
  source 1..20: mol_type = other DNA
aataaagagggttttgagct

SEQ ID NO: 180775 - DNA, 20 bp, synthetic construct
  source 1..20: mol_type = other DNA
taataaagagggttttgagc

SEQ ID NO: 180776 - DNA, 20 bp, synthetic construct
  source 1..20: mol_type = other DNA
ttaataaagagggttttgag

SEQ ID NO: 180777 - DNA, 20 bp, synthetic construct
  source 1..20: mol_type = other DNA
gttaataaagagggttttga

SEQ ID NO: 180778 - DNA, 20 bp, synthetic construct
  source 1..20: mol_type = other DNA
tgttaataaagagggttttg

SEQ ID NO: 180779 - DNA, 20 bp, synthetic construct
  source 1..20: mol_type = other DNA
gtgttaataaagagggtttt

SEQ ID NO: 180780 - DNA, 20 bp, synthetic construct
  source 1..20: mol_type = other DNA
tgtgttaataaagagggttt

SEQ ID NO: 180781 - DNA, 20 bp, synthetic construct
  source 1..20: mol_type = other DNA
ctgtgttaataaagagggtt

SEQ ID NO: 180782 - DNA, 20 bp, synthetic construct
  source 1..20: mol_type = other DNA
actgtgttaataaagagggt

SEQ ID NO: 180783 - DNA, 20 bp, synthetic construct
  source 1..20: mol_type = other DNA
aactgtgttaataaagaggg

SEQ ID NO: 180784 - DNA, 20 bp, synthetic construct
  source 1..20: mol_type = other DNA
caactgtgttaataaagagg

SEQ ID NO: 180785 - DNA, 20 bp, synthetic construct
  source 1..20: mol_type = other DNA
ccaactgtgttaataaagag

SEQ ID NO: 180786 - DNA, 20 bp, synthetic construct
  source 1..20: mol_type = other DNA
tccaactgtgttaataaaga

SEQ ID NO: 180787 - DNA, 20 bp, synthetic construct
  source 1..20: mol_type = other DNA
atccaactgtgttaataaag

SEQ ID NO: 180788 - DNA, 20 bp, synthetic construct
  source 1..20: mol_type = other DNA
catccaactgtgttaataaa

SEQ ID NO: 180789 - DNA, 20 bp, synthetic construct
  source 1..20: mol_type = other DNA
acatccaactgtgttaataa

SEQ ID NO: 180790 - DNA, 20 bp, synthetic construct
  source 1..20: mol_type = other DNA
aacatccaactgtgttaata

SEQ ID NO: 180791 - DNA, 20 bp, synthetic construct
  source 1..20: mol_type = other DNA
caacatccaactgtgttaat

SEQ ID NO: 180792 - DNA, 20 bp, synthetic construct
  source 1..20: mol_type = other DNA
tcaacatccaactgtgttaa

SEQ ID NO: 180793 - DNA, 20 bp, synthetic construct
  source 1..20: mol_type = other DNA
ctcaacatccaactgtgtta

SEQ ID NO: 180794 - DNA, 20 bp, synthetic construct
  source 1..20: mol_type = other DNA
tctcaacatccaactgtgtt

SEQ ID NO: 180795 - DNA, 20 bp, synthetic construct
  source 1..20: mol_type = other DNA
ttctcaacatccaactgtgt

SEQ ID NO: 180796 - DNA, 20 bp, synthetic construct
  source 1..20: mol_type = other DNA
tttctcaacatccaactgtg

SEQ ID NO: 180797 - DNA, 20 bp, synthetic construct
  source 1..20: mol_type = other DNA
atttctcaacatccaactgt

SEQ ID NO: 180798 - DNA, 20 bp, synthetic construct
  source 1..20: mol_type = other DNA
gatttctcaacatccaactg

SEQ ID NO: 180799 - DNA, 20 bp, synthetic construct
  source 1..20: mol_type = other DNA
tgatttctcaacatccaact

SEQ ID NO: 180800 - DNA, 20 bp, synthetic construct
  source 1..20: mol_type = other DNA
ttgatttctcaacatccaac

SEQ ID NO: 180801 - DNA, 20 bp, synthetic construct
  source 1..20: mol_type = other DNA
tttgatttctcaacatccaa

SEQ ID NO: 180802 - DNA, 20 bp, synthetic construct
  source 1..20: mol_type = other DNA
gtttgatttctcaacatcca

SEQ ID NO: 180803 - DNA, 20 bp, synthetic construct
  source 1..20: mol_type = other DNA
tgtttgatttctcaacatcc

SEQ ID NO: 180804 - DNA, 20 bp, synthetic construct
  source 1..20: mol_type = other DNA
ctgtttgatttctcaacatc

SEQ ID NO: 180805 - DNA, 20 bp, synthetic construct
  source 1..20: mol_type = other DNA
cctgtttgatttctcaacat

SEQ ID NO: 180806 - DNA, 20 bp, synthetic construct
  source 1..20: mol_type = other DNA
gcctgtttgatttctcaaca

SEQ ID NO: 180807 - DNA, 20 bp, synthetic construct
  source 1..20: mol_type = other DNA
ggcctgtttgatttctcaac

SEQ ID NO: 180808 - DNA, 20 bp, synthetic construct
  source 1..20: mol_type = other DNA
tggcctgtttgatttctcaa

SEQ ID NO: 180809 - DNA, 20 bp, synthetic construct
  source 1..20: mol_type = other DNA
ttggcctgtttgatttctca

SEQ ID NO: 180810 - DNA, 20 bp, synthetic construct
  source 1..20: mol_type = other DNA
attggcctgtttgatttctc

SEQ ID NO: 180811 - DNA, 20 bp, synthetic construct
  source 1..20: mol_type = other DNA
cattggcctgtttgatttct

SEQ ID NO: 180812 - DNA, 20 bp, synthetic construct
  source 1..20: mol_type = other DNA
acattggcctgtttgatttc

SEQ ID NO: 180813 - DNA, 20 bp, synthetic construct
  source 1..20: mol_type = other DNA
gacattggcctgtttgattt

SEQ ID NO: 180814 - DNA, 20 bp, synthetic construct
  source 1..20: mol_type = other DNA
tgacattggcctgtttgatt

SEQ ID NO: 180815 - DNA, 20 bp, synthetic construct
  source 1..20: mol_type = other DNA
ttgacattggcctgtttgat

SEQ ID NO: 180816 - DNA, 20 bp, synthetic construct
  source 1..20: mol_type = other DNA
tttgacattggcctgtttga

SEQ ID NO: 180817 - DNA, 20 bp, synthetic construct
  source 1..20: mol_type = other DNA
atttgacattggcctgtttg

SEQ ID NO: 180818 - DNA, 20 bp, synthetic construct
  source 1..20: mol_type = other DNA
catttgacattggcctgttt

SEQ ID NO: 180819 - DNA, 20 bp, synthetic construct
  source 1..20: mol_type = other DNA
tcatttgacattggcctgtt

SEQ ID NO: 180820 - DNA, 20 bp, synthetic construct
  source 1..20: mol_type = other DNA
ctcatttgacattggcctgt

SEQ ID NO: 180821 - DNA, 20 bp, synthetic construct
  source 1..20: mol_type = other DNA
gctcatttgacattggcctg

SEQ ID NO: 180822 - DNA, 20 bp, synthetic construct
  source 1..20: mol_type = other DNA
agctcatttgacattggcct

SEQ ID NO: 180823 - DNA, 20 bp, synthetic construct
  source 1..20: mol_type = other DNA
gagctcatttgacattggcc

SEQ ID NO: 180824 - DNA, 20 bp, synthetic construct
  source 1..20: mol_type = other DNA
agagctcatttgacattggc

SEQ ID NO: 180825 - DNA, 20 bp, synthetic construct
  source 1..20: mol_type = other DNA
gagagctcatttgacattgg

SEQ ID NO: 180826 - DNA, 20 bp, synthetic construct
  source 1..20: mol_type = other DNA
ggagagctcatttgacattg

SEQ ID NO: 180827 - DNA, 20 bp, synthetic construct
  source 1..20: mol_type = other DNA
aggagagctcatttgacatt

SEQ ID NO: 180828 - DNA, 20 bp, synthetic construct
  source 1..20: mol_type = other DNA
aaggagagctcatttgacat

SEQ ID NO: 180829 - DNA, 20 bp, synthetic construct
  source 1..20: mol_type = other DNA
taaggagagctcatttgaca

SEQ ID NO: 180830 - DNA, 20 bp, synthetic construct
  source 1..20: mol_type = other DNA
ataaggagagctcatttgac

SEQ ID NO: 180831 - DNA, 20 bp, synthetic construct
  source 1..20: mol_type = other DNA
aataaggagagctcatttga

SEQ ID NO: 180832 - DNA, 20 bp, synthetic construct
  source 1..20: mol_type = other DNA
aaataaggagagctcatttg

SEQ ID NO: 180833 - DNA, 20 bp, synthetic construct
  source 1..20: mol_type = other DNA
taaataaggagagctcattt

SEQ ID NO: 180834 - DNA, 20 bp, synthetic construct
  source 1..20: mol_type = other DNA
ttaaataaggagagctcatt

SEQ ID NO: 180835 - DNA, 20 bp, synthetic construct
  source 1..20: mol_type = other DNA
tttaaataaggagagctcat

SEQ ID NO: 180836 - DNA, 20 bp, synthetic construct
  source 1..20: mol_type = other DNA
atttaaataaggagagctca

SEQ ID NO: 180837 - DNA, 20 bp, synthetic construct
  source 1..20: mol_type = other DNA
gatttaaataaggagagctc

SEQ ID NO: 180838 - DNA, 20 bp, synthetic construct
  source 1..20: mol_type = other DNA
tgatttaaataaggagagct

SEQ ID NO: 180839 - DNA, 20 bp, synthetic construct
  source 1..20: mol_type = other DNA
ttgatttaaataaggagagc

SEQ ID NO: 180840 - DNA, 20 bp, synthetic construct
  source 1..20: mol_type = other DNA
cttgatttaaataaggagag

SEQ ID NO: 180841 - DNA, 20 bp, synthetic construct
  source 1..20: mol_type = other DNA
acttgatttaaataaggaga

SEQ ID NO: 180842 - DNA, 20 bp, synthetic construct
  source 1..20: mol_type = other DNA
gacttgatttaaataaggag

SEQ ID NO: 180843 - DNA, 20 bp, synthetic construct
  source 1..20: mol_type = other DNA
tgacttgatttaaataagga

SEQ ID NO: 180844 - DNA, 20 bp, synthetic construct
  source 1..20: mol_type = other DNA
ctgacttgatttaaataagg

SEQ ID NO: 180845 - DNA, 20 bp, synthetic construct
  source 1..20: mol_type = other DNA
actgacttgatttaaataag

SEQ ID NO: 180846 - DNA, 20 bp, synthetic construct
  source 1..20: mol_type = other DNA
aactgacttgatttaaataa

SEQ ID NO: 180847 - DNA, 20 bp, synthetic construct
  source 1..20: mol_type = other DNA
gaactgacttgatttaaata

SEQ ID NO: 180848 - DNA, 20 bp, synthetic construct
  source 1..20: mol_type = other DNA
agaactgacttgatttaaat

SEQ ID NO: 180849 - DNA, 20 bp, synthetic construct
  source 1..20: mol_type = other DNA
gagaactgacttgatttaaa

SEQ ID NO: 180850 - DNA, 20 bp, synthetic construct
  source 1..20: mol_type = other DNA
ggagaactgacttgatttaa

SEQ ID NO: 180851 - DNA, 20 bp, synthetic construct
  source 1..20: mol_type = other DNA
tggagaactgacttgattta

SEQ ID NO: 180852 - DNA, 20 bp, synthetic construct
  source 1..20: mol_type = other DNA
gtggagaactgacttgattt

SEQ ID NO: 180853 - DNA, 20 bp, synthetic construct
  source 1..20: mol_type = other DNA
ggtggagaactgacttgatt

SEQ ID NO: 180854 - DNA, 20 bp, synthetic construct
  source 1..20: mol_type = other DNA
aggtggagaactgacttgat

SEQ ID NO: 180855 - DNA, 20 bp, synthetic construct
  source 1..20: mol_type = other DNA
gaggtggagaactgacttga

SEQ ID NO: 180856 - DNA, 20 bp, synthetic construct
  source 1..20: mol_type = other DNA
ggaggtggagaactgacttg

SEQ ID NO: 180857 - DNA, 20 bp, synthetic construct
  source 1..20: mol_type = other DNA
aggaggtggagaactgactt

SEQ ID NO: 180858 - DNA, 20 bp, synthetic construct
  source 1..20: mol_type = other DNA
taggaggtggagaactgact

SEQ ID NO: 180859 - DNA, 20 bp, synthetic construct
  source 1..20: mol_type = other DNA
ctaggaggtggagaactgac

SEQ ID NO: 180860 - DNA, 20 bp, synthetic construct
  source 1..20: mol_type = other DNA
gctaggaggtggagaactga

SEQ ID NO: 180861 - DNA, 20 bp, synthetic construct
  source 1..20: mol_type = other DNA
tgctaggaggtggagaactg

SEQ ID NO: 180862 - DNA, 20 bp, synthetic construct
  source 1..20: mol_type = other DNA
gtgctaggaggtggagaact

SEQ ID NO: 180863 - DNA, 20 bp, synthetic construct
  source 1..20: mol_type = other DNA
agtgctaggaggtggagaac

SEQ ID NO: 180864 - DNA, 20 bp, synthetic construct
  source 1..20: mol_type = other DNA
gagtgctaggaggtggagaa

SEQ ID NO: 180865 - DNA, 20 bp, synthetic construct
  source 1..20: mol_type = other DNA
tgagtgctaggaggtggaga

SEQ ID NO: 180866 - DNA, 20 bp, synthetic construct
  source 1..20: mol_type = other DNA
ctgagtgctaggaggtggag

SEQ ID NO: 180867 - DNA, 20 bp, synthetic construct
  source 1..20: mol_type = other DNA
actgagtgctaggaggtgga

SEQ ID NO: 180868 - DNA, 20 bp, synthetic construct
  source 1..20: mol_type = other DNA
aactgagtgctaggaggtgg

SEQ ID NO: 180869 - DNA, 20 bp, synthetic construct
  source 1..20: mol_type = other DNA
gaactgagtgctaggaggtg

SEQ ID NO: 180870 - DNA, 20 bp, synthetic construct
  source 1..20: mol_type = other DNA
ggaactgagtgctaggaggt

SEQ ID NO: 180871 - DNA, 20 bp, synthetic construct
  source 1..20: mol_type = other DNA
tggaactgagtgctaggagg

SEQ ID NO: 180872 - DNA, 20 bp, synthetic construct
  source 1..20: mol_type = other DNA
ctggaactgagtgctaggag

SEQ ID NO: 180873 - DNA, 20 bp, synthetic construct
  source 1..20: mol_type = other DNA
actggaactgagtgctagga

SEQ ID NO: 180874 - DNA, 20 bp, synthetic construct
  source 1..20: mol_type = other DNA
tactggaactgagtgctagg

SEQ ID NO: 180875 - DNA, 20 bp, synthetic construct
  source 1..20: mol_type = other DNA
gtactggaactgagtgctag

SEQ ID NO: 180876 - DNA, 20 bp, synthetic construct
  source 1..20: mol_type = other DNA
agtactggaactgagtgcta

SEQ ID NO: 180877 - DNA, 20 bp, synthetic construct
  source 1..20: mol_type = other DNA
gagtactggaactgagtgct

SEQ ID NO: 180878 - DNA, 20 bp, synthetic construct
  source 1..20: mol_type = other DNA
agagtactggaactgagtgc

SEQ ID NO: 180879 - DNA, 20 bp, synthetic construct
  source 1..20: mol_type = other DNA
tagagtactggaactgagtg

SEQ ID NO: 180880 - DNA, 20 bp, synthetic construct
  source 1..20: mol_type = other DNA
atagagtactggaactgagt

SEQ ID NO: 180881 - DNA, 20 bp, synthetic construct
  source 1..20: mol_type = other DNA
tatagagtactggaactgag

SEQ ID NO: 180882 - DNA, 20 bp, synthetic construct
  source 1..20: mol_type = other DNA
atatagagtactggaactga

SEQ ID NO: 180883 - DNA, 20 bp, synthetic construct
  source 1..20: mol_type = other DNA
tatatagagtactggaactg

SEQ ID NO: 180884 - DNA, 20 bp, synthetic construct
  source 1..20: mol_type = other DNA
gtatatagagtactggaact

SEQ ID NO: 180885 - DNA, 20 bp, synthetic construct
  source 1..20: mol_type = other DNA
tgtatatagagtactggaac

SEQ ID NO: 180886 - DNA, 20 bp, synthetic construct
  source 1..20: mol_type = other DNA
atgtatatagagtactggaa

SEQ ID NO: 180887 - DNA, 20 bp, synthetic construct
  source 1..20: mol_type = other DNA
catgtatatagagtactgga

SEQ ID NO: 180888 - DNA, 20 bp, synthetic construct
  source 1..20: mol_type = other DNA
ccatgtatatagagtactgg

SEQ ID NO: 180889 - DNA, 20 bp, synthetic construct
  source 1..20: mol_type = other DNA
tccatgtatatagagtactg

SEQ ID NO: 180890 - DNA, 20 bp, synthetic construct
  source 1..20: mol_type = other DNA
ttccatgtatatagagtact

SEQ ID NO: 180891 - DNA, 20 bp, synthetic construct
  source 1..20: mol_type = other DNA
tttccatgtatatagagtac

SEQ ID NO: 180892 - DNA, 20 bp, synthetic construct
  source 1..20: mol_type = other DNA
atttccatgtatatagagta

SEQ ID NO: 180893 - DNA, 20 bp, synthetic construct
  source 1..20: mol_type = other DNA
tatttccatgtatatagagt

SEQ ID NO: 180894 - DNA, 20 bp, synthetic construct
  source 1..20: mol_type = other DNA
ttatttccatgtatatagag

SEQ ID NO: 180895 - DNA, 20 bp, synthetic construct
  source 1..20: mol_type = other DNA
attatttccatgtatataga

SEQ ID NO: 180896 - DNA, 20 bp, synthetic construct
  source 1..20: mol_type = other DNA
tattatttccatgtatatag

SEQ ID NO: 180897 - DNA, 20 bp, synthetic construct
  source 1..20: mol_type = other DNA
ttattatttccatgtatata

SEQ ID NO: 180898 - DNA, 20 bp, synthetic construct
  source 1..20: mol_type = other DNA
tttattatttccatgtatat

SEQ ID NO: 180899 - DNA, 20 bp, synthetic construct
  source 1..20: mol_type = other DNA
ttttattatttccatgtata

SEQ ID NO: 180900 - DNA, 20 bp, synthetic construct
  source 1..20: mol_type = other DNA
tttttattatttccatgtat

SEQ ID NO: 180901 - DNA, 20 bp, synthetic construct
  source 1..20: mol_type = other DNA
ttttttattatttccatgta

SEQ ID NO: 180902 - DNA, 20 bp, synthetic construct
  source 1..20: mol_type = other DNA
gttttttattatttccatgt

SEQ ID NO: 180903 - DNA, 20 bp, synthetic construct
  source 1..20: mol_type = other DNA
tgttttttattatttccatg

SEQ ID NO: 180904 - DNA, 20 bp, synthetic construct
  source 1..20: mol_type = other DNA
gtgttttttattatttccat

SEQ ID NO: 180905 - DNA, 20 bp, synthetic construct
  source 1..20: mol_type = other DNA
tgtgttttttattatttcca

SEQ ID NO: 180906 - DNA, 20 bp, synthetic construct
  source 1..20: mol_type = other DNA
atgtgttttttattatttcc

SEQ ID NO: 180907 - DNA, 20 bp, synthetic construct
  source 1..20: mol_type = other DNA
aatgtgttttttattatttc

SEQ ID NO: 180908 - DNA, 20 bp, synthetic construct
  source 1..20: mol_type = other DNA
aaatgtgttttttattattt

SEQ ID NO: 180909 - DNA, 20 bp, synthetic construct
  source 1..20: mol_type = other DNA
gaaatgtgttttttattatt

SEQ ID NO: 180910 - DNA, 20 bp, synthetic construct
  source 1..20: mol_type = other DNA
ggaaatgtgttttttattat

SEQ ID NO: 180911 - DNA, 20 bp, synthetic construct
  source 1..20: mol_type = other DNA
aggaaatgtgttttttatta

SEQ ID NO: 180912 - DNA, 20 bp, synthetic construct
  source 1..20: mol_type = other DNA
aaggaaatgtgttttttatt

SEQ ID NO: 180913 - DNA, 20 bp, synthetic construct
  source 1..20: mol_type = other DNA
aaaggaaatgtgttttttat

SEQ ID NO: 180914 - DNA, 20 bp, synthetic construct
  source 1..20: mol_type = other DNA
caaaggaaatgtgtttttta

SEQ ID NO: 180915 - DNA, 20 bp, synthetic construct
  source 1..20: mol_type = other DNA
tcaaaggaaatgtgtttttt

SEQ ID NO: 180916 - DNA, 20 bp, synthetic construct
  source 1..20: mol_type = other DNA
ttcaaaggaaatgtgttttt

SEQ ID NO: 180917 - DNA, 20 bp, synthetic construct
  source 1..20: mol_type = other DNA
tttcaaaggaaatgtgtttt

SEQ ID NO: 180918 - DNA, 20 bp, synthetic construct
  source 1..20: mol_type = other DNA
gtttcaaaggaaatgtgttt

SEQ ID NO: 180919 - DNA, 20 bp, synthetic construct
  source 1..20: mol_type = other DNA
tgtttcaaaggaaatgtgtt

SEQ ID NO: 180920 - DNA, 20 bp, synthetic construct
  source 1..20: mol_type = other DNA
atgtttcaaaggaaatgtgt

SEQ ID NO: 180921 - DNA, 20 bp, synthetic construct
  source 1..20: mol_type = other DNA
aatgtttcaaaggaaatgtg

SEQ ID NO: 180922 - DNA, 20 bp, synthetic construct
  source 1..20: mol_type = other DNA
gaatgtttcaaaggaaatgt

SEQ ID NO: 180923 - DNA, 20 bp, synthetic construct
  source 1..20: mol_type = other DNA
agaatgtttcaaaggaaatg

SEQ ID NO: 180924 - DNA, 20 bp, synthetic construct
  source 1..20: mol_type = other DNA
tagaatgtttcaaaggaaat

SEQ ID NO: 180925 - DNA, 20 bp, synthetic construct
  source 1..20: mol_type = other DNA
atagaatgtttcaaaggaaa

SEQ ID NO: 180926 - DNA, 20 bp, synthetic construct
  source 1..20: mol_type = other DNA
tatagaatgtttcaaaggaa

SEQ ID NO: 180927 - DNA, 20 bp, synthetic construct
  source 1..20: mol_type = other DNA
ttatagaatgtttcaaagga

SEQ ID NO: 180928 - DNA, 20 bp, synthetic construct
  source 1..20: mol_type = other DNA
attatagaatgtttcaaagg

SEQ ID NO: 180929 - DNA, 20 bp, synthetic construct
  source 1..20: mol_type = other DNA
gattatagaatgtttcaaag

SEQ ID NO: 180930 - DNA, 20 bp, synthetic construct
  source 1..20: mol_type = other DNA
cgattatagaatgtttcaaa

SEQ ID NO: 180931 - DNA, 20 bp, synthetic construct
  source 1..20: mol_type = other DNA
acgattatagaatgtttcaa

SEQ ID NO: 180932 - DNA, 20 bp, synthetic construct
  source 1..20: mol_type = other DNA
aacgattatagaatgtttca

SEQ ID NO: 180933 - DNA, 20 bp, synthetic construct
  source 1..20: mol_type = other DNA
gaacgattatagaatgtttc

SEQ ID NO: 180934 - DNA, 20 bp, synthetic construct
  source 1..20: mol_type = other DNA
ggaacgattatagaatgttt

SEQ ID NO: 180935 - DNA, 20 bp, synthetic construct
  source 1..20: mol_type = other DNA
aggaacgattatagaatgtt

SEQ ID NO: 180936 - DNA, 20 bp, synthetic construct
  source 1..20: mol_type = other DNA
aaggaacgattatagaatgt

SEQ ID NO: 180937 - DNA, 20 bp, synthetic construct
  source 1..20: mol_type = other DNA
aaaggaacgattatagaatg

SEQ ID NO: 180938 - DNA, 20 bp, synthetic construct
  source 1..20: mol_type = other DNA
caaaggaacgattatagaat

SEQ ID NO: 180939 - DNA, 20 bp, synthetic construct
  source 1..20: mol_type = other DNA
gcaaaggaacgattatagaa

SEQ ID NO: 180940 - DNA, 20 bp, synthetic construct
  source 1..20: mol_type = other DNA
ggcaaaggaacgattataga

SEQ ID NO: 180941 - DNA, 20 bp, synthetic construct
  source 1..20: mol_type = other DNA
gggcaaaggaacgattatag

SEQ ID NO: 180942 - DNA, 20 bp, synthetic construct
  source 1..20: mol_type = other DNA
agggcaaaggaacgattata

SEQ ID NO: 180943 - DNA, 20 bp, synthetic construct
  source 1..20: mol_type = other DNA
tagggcaaaggaacgattat

SEQ ID NO: 180944 - DNA, 20 bp, synthetic construct
  source 1..20: mol_type = other DNA
gtagggcaaaggaacgatta

SEQ ID NO: 180945 - DNA, 20 bp, synthetic construct
  source 1..20: mol_type = other DNA
agtagggcaaaggaacgatt

SEQ ID NO: 180946 - DNA, 20 bp, synthetic construct
  source 1..20: mol_type = other DNA
aagtagggcaaaggaacgat

SEQ ID NO: 180947 - DNA, 20 bp, synthetic construct
  source 1..20: mol_type = other DNA
gaagtagggcaaaggaacga

SEQ ID NO: 180948 - DNA, 20 bp, synthetic construct
  source 1..20: mol_type = other DNA
tgaagtagggcaaaggaacg

SEQ ID NO: 180949 - DNA, 20 bp, synthetic construct
  source 1..20: mol_type = other DNA
ctgaagtagggcaaaggaac

SEQ ID NO: 180950 - DNA, 20 bp, synthetic construct
  source 1..20: mol_type = other DNA
tctgaagtagggcaaaggaa

SEQ ID NO: 180951 - DNA, 20 bp, synthetic construct
  source 1..20: mol_type = other DNA
gtctgaagtagggcaaagga

SEQ ID NO: 180952 - DNA, 20 bp, synthetic construct
  source 1..20: mol_type = other DNA
ggtctgaagtagggcaaagg

SEQ ID NO: 180953 - DNA, 20 bp, synthetic construct
  source 1..20: mol_type = other DNA
tggtctgaagtagggcaaag

SEQ ID NO: 180954 - DNA, 20 bp, synthetic construct
  source 1..20: mol_type = other DNA
ttggtctgaagtagggcaaa

SEQ ID NO: 180955 - DNA, 20 bp, synthetic construct
  source 1..20: mol_type = other DNA
gttggtctgaagtagggcaa

SEQ ID NO: 180956 - DNA, 20 bp, synthetic construct
  source 1..20: mol_type = other DNA
agttggtctgaagtagggca

SEQ ID NO: 180957 - DNA, 20 bp, synthetic construct
  source 1..20: mol_type = other DNA
aagttggtctgaagtagggc

SEQ ID NO: 180958 - DNA, 20 bp, synthetic construct
  source 1..20: mol_type = other DNA
taagttggtctgaagtaggg

SEQ ID NO: 180959 - DNA, 20 bp, synthetic construct
  source 1..20: mol_type = other DNA
ttaagttggtctgaagtagg

SEQ ID NO: 180960 - DNA, 20 bp, synthetic construct
  source 1..20: mol_type = other DNA
gttaagttggtctgaagtag

SEQ ID NO: 180961 - DNA, 20 bp, synthetic construct
  source 1..20: mol_type = other DNA
cgttaagttggtctgaagta

SEQ ID NO: 180962 - DNA, 20 bp, synthetic construct
  source 1..20: mol_type = other DNA
gcgttaagttggtctgaagt

SEQ ID NO: 180963 - DNA, 20 bp, synthetic construct
  source 1..20: mol_type = other DNA
tgcgttaagttggtctgaag

SEQ ID NO: 180964 - DNA, 20 bp, synthetic construct
  source 1..20: mol_type = other DNA
gtgcgttaagttggtctgaa

SEQ ID NO: 180965 - DNA, 20 bp, synthetic construct
  source 1..20: mol_type = other DNA
agtgcgttaagttggtctga

SEQ ID NO: 180966 - DNA, 20 bp, synthetic construct
  source 1..20: mol_type = other DNA
gagtgcgttaagttggtctg

SEQ ID NO: 180967 - DNA, 20 bp, synthetic construct
  source 1..20: mol_type = other DNA
ggagtgcgttaagttggtct

SEQ ID NO: 180968 - DNA, 20 bp, synthetic construct
  source 1..20: mol_type = other DNA
gggagtgcgttaagttggtc

SEQ ID NO: 180969 - DNA, 20 bp, synthetic construct
  source 1..20: mol_type = other DNA
ggggagtgcgttaagttggt

SEQ ID NO: 180970 - DNA, 20 bp, synthetic construct
  source 1..20: mol_type = other DNA
tggggagtgcgttaagttgg

SEQ ID NO: 180971 - DNA, 20 bp, synthetic construct
  source 1..20: mol_type = other DNA
atggggagtgcgttaagttg

SEQ ID NO: 180972 - DNA, 20 bp, synthetic construct
  source 1..20: mol_type = other DNA
aatggggagtgcgttaagtt

SEQ ID NO: 180973 - DNA, 20 bp, synthetic construct
  source 1..20: mol_type = other DNA
caatggggagtgcgttaagt

SEQ ID NO: 180974 - DNA, 20 bp, synthetic construct
  source 1..20: mol_type = other DNA
ccaatggggagtgcgttaag

SEQ ID NO: 180975 - DNA, 20 bp, synthetic construct
  source 1..20: mol_type = other DNA
accaatggggagtgcgttaa

SEQ ID NO: 180976 - DNA, 20 bp, synthetic construct
  source 1..20: mol_type = other DNA
gaccaatggggagtgcgtta

SEQ ID NO: 180977 - DNA, 20 bp, synthetic construct
  source 1..20: mol_type = other DNA
ggaccaatggggagtgcgtt

SEQ ID NO: 180978 - DNA, 20 bp, synthetic construct
  source 1..20: mol_type = other DNA
tggaccaatggggagtgcgt

SEQ ID NO: 180979 - DNA, 20 bp, synthetic construct
  source 1..20: mol_type = other DNA
ttggaccaatggggagtgcg

SEQ ID NO: 180980 - DNA, 20 bp, synthetic construct
  source 1..20: mol_type = other DNA
tttggaccaatggggagtgc

SEQ ID NO: 180981 - DNA, 20 bp, synthetic construct
  source 1..20: mol_type = other DNA
atttggaccaatggggagtg

SEQ ID NO: 180982 - DNA, 20 bp, synthetic construct
  source 1..20: mol_type = other DNA
catttggaccaatggggagt

SEQ ID NO: 180983 - DNA, 20 bp, synthetic construct
  source 1..20: mol_type = other DNA
tcatttggaccaatggggag

SEQ ID NO: 180984 - DNA, 20 bp, synthetic construct
  source 1..20: mol_type = other DNA
ctcatttggaccaatgggga

SEQ ID NO: 180985 - DNA, 20 bp, synthetic construct
  source 1..20: mol_type = other DNA
actcatttggaccaatgggg

SEQ ID NO: 180986 - DNA, 20 bp, synthetic construct
  source 1..20: mol_type = other DNA
aactcatttggaccaatggg

SEQ ID NO: 180987 - DNA, 20 bp, synthetic construct
  source 1..20: mol_type = other DNA
aaactcatttggaccaatgg

SEQ ID NO: 180988 - DNA, 20 bp, synthetic construct
  source 1..20: mol_type = other DNA
aaaactcatttggaccaatg

SEQ ID NO: 180989 - DNA, 20 bp, synthetic construct
  source 1..20: mol_type = other DNA
caaaactcatttggaccaat

SEQ ID NO: 180990 - DNA, 20 bp, synthetic construct
  source 1..20: mol_type = other DNA
gcaaaactcatttggaccaa

SEQ ID NO: 180991 - DNA, 20 bp, synthetic construct
  source 1..20: mol_type = other DNA
agcaaaactcatttggacca

SEQ ID NO: 180992 - DNA, 20 bp, synthetic construct
  source 1..20: mol_type = other DNA
tagcaaaactcatttggacc

SEQ ID NO: 180993 - DNA, 20 bp, synthetic construct
  source 1..20: mol_type = other DNA
atagcaaaactcatttggac

SEQ ID NO: 180994 - DNA, 20 bp, synthetic construct
  source 1..20: mol_type = other DNA
tatagcaaaactcatttgga

SEQ ID NO: 180995 - DNA, 20 bp, synthetic construct
  source 1..20: mol_type = other DNA
gtatagcaaaactcatttgg

SEQ ID NO: 180996 - DNA, 20 bp, synthetic construct
  source 1..20: mol_type = other DNA
cgtatagcaaaactcatttg

SEQ ID NO: 180997 - DNA, 20 bp, synthetic construct
  source 1..20: mol_type = other DNA
tcgtatagcaaaactcattt

SEQ ID NO: 180998 - DNA, 20 bp, synthetic construct
  source 1..20: mol_type = other DNA
ttcgtatagcaaaactcatt

SEQ ID NO: 180999 - DNA, 20 bp, synthetic construct
  source 1..20: mol_type = other DNA
cttcgtatagcaaaactcat

SEQ ID NO: 181000 - DNA, 20 bp, synthetic construct
  source 1..20: mol_type = other DNA
tcttcgtatagcaaaactca

SEQ ID NO: 181001 - DNA, 20 bp, synthetic construct
  source 1..20: mol_type = other DNA
atcttcgtatagcaaaactc

SEQ ID NO: 181002 - DNA, 20 bp, synthetic construct
  source 1..20: mol_type = other DNA
catcttcgtatagcaaaact

SEQ ID NO: 181003 - DNA, 20 bp, synthetic construct
  source 1..20: mol_type = other DNA
gcatcttcgtatagcaaaac

SEQ ID NO: 181004 - DNA, 20 bp, synthetic construct
  source 1..20: mol_type = other DNA
agcatcttcgtatagcaaaa

SEQ ID NO: 181005 - DNA, 20 bp, synthetic construct
  source 1..20: mol_type = other DNA
cagcatcttcgtatagcaaa

SEQ ID NO: 181006 - DNA, 20 bp, synthetic construct
  source 1..20: mol_type = other DNA
tcagcatcttcgtatagcaa

SEQ ID NO: 181007 - DNA, 20 bp, synthetic construct
  source 1..20: mol_type = other DNA
atcagcatcttcgtatagca

SEQ ID NO: 181008 - DNA, 20 bp, synthetic construct
  source 1..20: mol_type = other DNA
tatcagcatcttcgtatagc

SEQ ID NO: 181009 - DNA, 20 bp, synthetic construct
  source 1..20: mol_type = other DNA
ttatcagcatcttcgtatag

SEQ ID NO: 181010 - DNA, 20 bp, synthetic construct
  source 1..20: mol_type = other DNA
attatcagcatcttcgtata

SEQ ID NO: 181011 - DNA, 20 bp, synthetic construct
  source 1..20: mol_type = other DNA
tattatcagcatcttcgtat

SEQ ID NO: 181012 - DNA, 20 bp, synthetic construct
  source 1..20: mol_type = other DNA
ttattatcagcatcttcgta

SEQ ID NO: 181013 - DNA, 20 bp, synthetic construct
  source 1..20: mol_type = other DNA
attattatcagcatcttcgt

SEQ ID NO: 181014 - DNA, 20 bp, synthetic construct
  source 1..20: mol_type = other DNA
tattattatcagcatcttcg

SEQ ID NO: 181015 - DNA, 20 bp, synthetic construct
  source 1..20: mol_type = other DNA
ctattattatcagcatcttc

SEQ ID NO: 181016 - DNA, 20 bp, synthetic construct
  source 1..20: mol_type = other DNA
gctattattatcagcatctt

SEQ ID NO: 181017 - DNA, 20 bp, synthetic construct
  source 1..20: mol_type = other DNA
tgctattattatcagcatct

SEQ ID NO: 181018 - DNA, 20 bp, synthetic construct
  source 1..20: mol_type = other DNA
ctgctattattatcagcatc

SEQ ID NO: 181019 - DNA, 20 bp, synthetic construct
  source 1..20: mol_type = other DNA
gctgctattattatcagcat

SEQ ID NO: 181020 - DNA, 20 bp, synthetic construct
  source 1..20: mol_type = other DNA
tgctgctattattatcagca

SEQ ID NO: 181021 - DNA, 20 bp, synthetic construct
  source 1..20: mol_type = other DNA
ctgctgctattattatcagc

SEQ ID NO: 181022 - DNA, 20 bp, synthetic construct
  source 1..20: mol_type = other DNA
actgctgctattattatcag

SEQ ID NO: 181023 - DNA, 20 bp, synthetic construct
  source 1..20: mol_type = other DNA
cactgctgctattattatca

SEQ ID NO: 181024 - DNA, 20 bp, synthetic construct
  source 1..20: mol_type = other DNA
ccactgctgctattattatc

SEQ ID NO: 181025 - DNA, 20 bp, synthetic construct
  source 1..20: mol_type = other DNA
tccactgctgctattattat

SEQ ID NO: 181026 - DNA, 20 bp, synthetic construct
  source 1..20: mol_type = other DNA
atccactgctgctattatta

SEQ ID NO: 181027 - DNA, 20 bp, synthetic construct
  source 1..20: mol_type = other DNA
aatccactgctgctattatt

SEQ ID NO: 181028 - DNA, 20 bp, synthetic construct
  source 1..20: mol_type = other DNA
taatccactgctgctattat

SEQ ID NO: 181029 - DNA, 20 bp, synthetic construct
  source 1..20: mol_type = other DNA
ataatccactgctgctatta

SEQ ID NO: 181030 - DNA, 20 bp, synthetic construct
  source 1..20: mol_type = other DNA
aataatccactgctgctatt

SEQ ID NO: 181031 - DNA, 20 bp, synthetic construct
  source 1..20: mol_type = other DNA
gaataatccactgctgctat

SEQ ID NO: 181032 - DNA, 20 bp, synthetic construct
  source 1..20: mol_type = other DNA
agaataatccactgctgcta

SEQ ID NO: 181033 - DNA, 20 bp, synthetic construct
  source 1..20: mol_type = other DNA
cagaataatccactgctgct

SEQ ID NO: 181034 - DNA, 20 bp, synthetic construct
  source 1..20: mol_type = other DNA
gcagaataatccactgctgc

SEQ ID NO: 181035 - DNA, 20 bp, synthetic construct
  source 1..20: mol_type = other DNA
agcagaataatccactgctg

SEQ ID NO: 181036 - DNA, 20 bp, synthetic construct
  source 1..20: mol_type = other DNA
tagcagaataatccactgct

SEQ ID NO: 181037 - DNA, 20 bp, synthetic construct
  source 1..20: mol_type = other DNA
ttagcagaataatccactgc

SEQ ID NO: 181038 - DNA, 20 bp, synthetic construct
  source 1..20: mol_type = other DNA
tttagcagaataatccactg

SEQ ID NO: 181039 - DNA, 20 bp, synthetic construct
  source 1..20: mol_type = other DNA
ttttagcagaataatccact

SEQ ID NO: 181040 - DNA, 20 bp, synthetic construct
  source 1..20: mol_type = other DNA
gttttagcagaataatccac

SEQ ID NO: 181041 - DNA, 20 bp, synthetic construct
  source 1..20: mol_type = other DNA
ggttttagcagaataatcca

SEQ ID NO: 181042 - DNA, 20 bp, synthetic construct
  source 1..20: mol_type = other DNA
tggttttagcagaataatcc

SEQ ID NO: 181043 - DNA, 20 bp, synthetic construct
  source 1..20: mol_type = other DNA
atggttttagcagaataatc

SEQ ID NO: 181044 - DNA, 20 bp, synthetic construct
  source 1..20: mol_type = other DNA
aatggttttagcagaataat

SEQ ID NO: 181045 - DNA, 20 bp, synthetic construct
  source 1..20: mol_type = other DNA
caatggttttagcagaataa

SEQ ID NO: 181046 - DNA, 20 bp, synthetic construct
  source 1..20: mol_type = other DNA
gcaatggttttagcagaata

SEQ ID NO: 181047 - DNA, 20 bp, synthetic construct
  source 1..20: mol_type = other DNA
ggcaatggttttagcagaat

SEQ ID NO: 181048 - DNA, 20 bp, synthetic construct
  source 1..20: mol_type = other DNA
aggcaatggttttagcagaa

SEQ ID NO: 181049 - DNA, 20 bp, synthetic construct
  source 1..20: mol_type = other DNA
gaggcaatggttttagcaga

SEQ ID NO: 181050 - DNA, 20 bp, synthetic construct
  source 1..20: mol_type = other DNA
cgaggcaatggttttagcag

SEQ ID NO: 181051 - DNA, 20 bp, synthetic construct
  source 1..20: mol_type = other DNA
acgaggcaatggttttagca

SEQ ID NO: 181052 - DNA, 20 bp, synthetic construct
  source 1..20: mol_type = other DNA
aacgaggcaatggttttagc

SEQ ID NO: 181053 - DNA, 20 bp, synthetic construct
  source 1..20: mol_type = other DNA
taacgaggcaatggttttag

SEQ ID NO: 181054 - DNA, 20 bp, synthetic construct
  source 1..20: mol_type = other DNA
ttaacgaggcaatggtttta

SEQ ID NO: 181055 - DNA, 20 bp, synthetic construct
  source 1..20: mol_type = other DNA
attaacgaggcaatggtttt

SEQ ID NO: 181056 - DNA, 20 bp, synthetic construct
  source 1..20: mol_type = other DNA
gattaacgaggcaatggttt

SEQ ID NO: 181057 - DNA, 20 bp, synthetic construct
  source 1..20: mol_type = other DNA
ggattaacgaggcaatggtt

SEQ ID NO: 181058 - DNA, 20 bp, synthetic construct
  source 1..20: mol_type = other DNA
aggattaacgaggcaatggt

SEQ ID NO: 181059 - DNA, 20 bp, synthetic construct
  source 1..20: mol_type = other DNA
gaggattaacgaggcaatgg

SEQ ID NO: 181060 - DNA, 20 bp, synthetic construct
  source 1..20: mol_type = other DNA
tgaggattaacgaggcaatg

SEQ ID NO: 181061 - DNA, 20 bp, synthetic construct
  source 1..20: mol_type = other DNA
ctgaggattaacgaggcaat

SEQ ID NO: 181062 - DNA, 20 bp, synthetic construct
  source 1..20: mol_type = other DNA
actgaggattaacgaggcaa

SEQ ID NO: 181063 - DNA, 20 bp, synthetic construct
  source 1..20: mol_type = other DNA
gactgaggattaacgaggca

SEQ ID NO: 181064 - DNA, 20 bp, synthetic construct
  source 1..20: mol_type = other DNA
ggactgaggattaacgaggc

SEQ ID NO: 181065 - DNA, 20 bp, synthetic construct
  source 1..20: mol_type = other DNA
gggactgaggattaacgagg

SEQ ID NO: 181066 - DNA, 20 bp, synthetic construct
  source 1..20: mol_type = other DNA
cgggactgaggattaacgag

SEQ ID NO: 181067 - DNA, 20 bp, synthetic construct
  source 1..20: mol_type = other DNA
tcgggactgaggattaacga

SEQ ID NO: 181068 - DNA, 20 bp, synthetic construct
  source 1..20: mol_type = other DNA
ctcgggactgaggattaacg

SEQ ID NO: 181069 - DNA, 20 bp, synthetic construct
  source 1..20: mol_type = other DNA
cctcgggactgaggattaac

SEQ ID NO: 181070 - DNA, 20 bp, synthetic construct
  source 1..20: mol_type = other DNA
acctcgggactgaggattaa

SEQ ID NO: 181071 - DNA, 20 bp, synthetic construct
  source 1..20: mol_type = other DNA
cacctcgggactgaggatta

SEQ ID NO: 181072 - DNA, 20 bp, synthetic construct
  source 1..20: mol_type = other DNA
ccacctcgggactgaggatt

SEQ ID NO: 181073 - DNA, 20 bp, synthetic construct
  source 1..20: mol_type = other DNA
cccacctcgggactgaggat

SEQ ID NO: 181074 - DNA, 20 bp, synthetic construct
  source 1..20: mol_type = other DNA
ccccacctcgggactgagga

SEQ ID NO: 181075 - DNA, 20 bp, synthetic construct
  source 1..20: mol_type = other DNA
tccccacctcgggactgagg

SEQ ID NO: 181076 - DNA, 20 bp, synthetic construct
  source 1..20: mol_type = other DNA
atccccacctcgggactgag

SEQ ID NO: 181077 - DNA, 20 bp, synthetic construct
  source 1..20: mol_type = other DNA
aatccccacctcgggactga

SEQ ID NO: 181078 - DNA, 20 bp, synthetic construct
  source 1..20: mol_type = other DNA
taatccccacctcgggactg

SEQ ID NO: 181079 - DNA, 20 bp, synthetic construct
  source 1..20: mol_type = other DNA
ataatccccacctcgggact

SEQ ID NO: 181080 - DNA, 20 bp, synthetic construct
  source 1..20: mol_type = other DNA
aataatccccacctcgggac

SEQ ID NO: 181081 - DNA, 20 bp, synthetic construct
  source 1..20: mol_type = other DNA
taataatccccacctcggga

SEQ ID NO: 181082 - DNA, 20 bp, synthetic construct
  source 1..20: mol_type = other DNA
ataataatccccacctcggg

SEQ ID NO: 181083 - DNA, 20 bp, synthetic construct
  source 1..20: mol_type = other DNA
gataataatccccacctcgg

SEQ ID NO: 181084 - DNA, 20 bp, synthetic construct
  source 1..20: mol_type = other DNA
ggataataatccccacctcg

SEQ ID NO: 181085 - DNA, 20 bp, synthetic construct
  source 1..20: mol_type = other DNA
aggataataatccccacctc

SEQ ID NO: 181086 - DNA, 20 bp, synthetic construct
  source 1..20: mol_type = other DNA
gaggataataatccccacct

SEQ ID NO: 181087 - DNA, 20 bp, synthetic construct
  source 1..20: mol_type = other DNA
tgaggataataatccccacc

SEQ ID NO: 181088 - DNA, 20 bp, synthetic construct
  source 1..20: mol_type = other DNA
atgaggataataatccccac

SEQ ID NO: 181089 - DNA, 20 bp, synthetic construct
  source 1..20: mol_type = other DNA
aatgaggataataatcccca

SEQ ID NO: 181090 - DNA, 20 bp, synthetic construct
  source 1..20: mol_type = other DNA
aaatgaggataataatcccc

SEQ ID NO: 181091 - DNA, 20 bp, synthetic construct
  source 1..20: mol_type = other DNA
aaaatgaggataataatccc

SEQ ID NO: 181092 - DNA, 20 bp, synthetic construct
  source 1..20: mol_type = other DNA
caaaatgaggataataatcc

SEQ ID NO: 181093 - DNA, 20 bp, synthetic construct
  source 1..20: mol_type = other DNA
gcaaaatgaggataataatc

SEQ ID NO: 181094 - DNA, 20 bp, synthetic construct
  source 1..20: mol_type = other DNA
tgcaaaatgaggataataat

SEQ ID NO: 181095 - DNA, 20 bp, synthetic construct
  source 1..20: mol_type = other DNA
ctgcaaaatgaggataataa

SEQ ID NO: 181096 - DNA, 20 bp, synthetic construct
  source 1..20: mol_type = other DNA
tctgcaaaatgaggataata

SEQ ID NO: 181097 - DNA, 20 bp, synthetic construct
  source 1..20: mol_type = other DNA
ctctgcaaaatgaggataat

SEQ ID NO: 181098 - DNA, 20 bp, synthetic construct
  source 1..20: mol_type = other DNA
tctctgcaaaatgaggataa

SEQ ID NO: 181099 - DNA, 20 bp, synthetic construct
  source 1..20: mol_type = other DNA
ttctctgcaaaatgaggata

SEQ ID NO: 181100 - DNA, 20 bp, synthetic construct
  source 1..20: mol_type = other DNA
cttctctgcaaaatgaggat

SEQ ID NO: 181101 - DNA, 20 bp, synthetic construct
  source 1..20: mol_type = other DNA
gcttctctgcaaaatgagga

SEQ ID NO: 181102 - DNA, 20 bp, synthetic construct
  source 1..20: mol_type = other DNA
tgcttctctgcaaaatgagg

SEQ ID NO: 181103 - DNA, 20 bp, synthetic construct
  source 1..20: mol_type = other DNA
ttgcttctctgcaaaatgag

SEQ ID NO: 181104 - DNA, 20 bp, synthetic construct
  source 1..20: mol_type = other DNA
tttgcttctctgcaaaatga

SEQ ID NO: 181105 - DNA, 20 bp, synthetic construct
  source 1..20: mol_type = other DNA
gtttgcttctctgcaaaatg

SEQ ID NO: 181106 - DNA, 20 bp, synthetic construct
  source 1..20: mol_type = other DNA
agtttgcttctctgcaaaat

SEQ ID NO: 181107 - DNA, 20 bp, synthetic construct
  source 1..20: mol_type = other DNA
cagtttgcttctctgcaaaa

SEQ ID NO: 181108 - DNA, 20 bp, synthetic construct
  source 1..20: mol_type = other DNA
tcagtttgcttctctgcaaa

SEQ ID NO: 181109 - DNA, 20 bp, synthetic construct
  source 1..20: mol_type = other DNA
ctcagtttgcttctctgcaa

SEQ ID NO: 181110 - DNA, 20 bp, synthetic construct
  source 1..20: mol_type = other DNA
tctcagtttgcttctctgca

SEQ ID NO: 181111 - DNA, 20 bp, synthetic construct
  source 1..20: mol_type = other DNA
gtctcagtttgcttctctgc

SEQ ID NO: 181112 - DNA, 20 bp, synthetic construct
  source 1..20: mol_type = other DNA
agtctcagtttgcttctctg

SEQ ID NO: 181113 - DNA, 20 bp, synthetic construct
  source 1..20: mol_type = other DNA
gagtctcagtttgcttctct

SEQ ID NO: 181114 - DNA, 20 bp, synthetic construct
  source 1..20: mol_type = other DNA
tgagtctcagtttgcttctc

SEQ ID NO: 181115 - DNA, 20 bp, synthetic construct
  source 1..20: mol_type = other DNA
ctgagtctcagtttgcttct

SEQ ID NO: 181116 - DNA, 20 bp, synthetic construct
  source 1..20: mol_type = other DNA
tctgagtctcagtttgcttc

SEQ ID NO: 181117 - DNA, 20 bp, synthetic construct
  source 1..20: mol_type = other DNA
ctctgagtctcagtttgctt

SEQ ID NO: 181118 - DNA, 20 bp, synthetic construct
  source 1..20: mol_type = other DNA
tctctgagtctcagtttgct

SEQ ID NO: 181119 - DNA, 20 bp, synthetic construct
  source 1..20: mol_type = other DNA
atctctgagtctcagtttgc

SEQ ID NO: 181120 - DNA, 20 bp, synthetic construct
  source 1..20: mol_type = other DNA
aatctctgagtctcagtttg

SEQ ID NO: 181121 - DNA, 20 bp, synthetic construct
  source 1..20: mol_type = other DNA
aaatctctgagtctcagttt

SEQ ID NO: 181122 - DNA, 20 bp, synthetic construct
  source 1..20: mol_type = other DNA
gaaatctctgagtctcagtt

SEQ ID NO: 181123 - DNA, 20 bp, synthetic construct
  source 1..20: mol_type = other DNA
tgaaatctctgagtctcagt

SEQ ID NO: 181124 - DNA, 20 bp, synthetic construct
  source 1..20: mol_type = other DNA
gtgaaatctctgagtctcag

SEQ ID NO: 181125 - DNA, 20 bp, synthetic construct
  source 1..20: mol_type = other DNA
tgtgaaatctctgagtctca

SEQ ID NO: 181126 - DNA, 20 bp, synthetic construct
  source 1..20: mol_type = other DNA
ctgtgaaatctctgagtctc

SEQ ID NO: 181127 - DNA, 20 bp, synthetic construct
  source 1..20: mol_type = other DNA
gctgtgaaatctctgagtct

SEQ ID NO: 181128 - DNA, 20 bp, synthetic construct
  source 1..20: mol_type = other DNA
agctgtgaaatctctgagtc

SEQ ID NO: 181129 - DNA, 20 bp, synthetic construct
  source 1..20: mol_type = other DNA
cagctgtgaaatctctgagt

SEQ ID NO: 181130 - DNA, 20 bp, synthetic construct
  source 1..20: mol_type = other DNA
ccagctgtgaaatctctgag

SEQ ID NO: 181131 - DNA, 20 bp, synthetic construct
  source 1..20: mol_type = other DNA
cccagctgtgaaatctctga

SEQ ID NO: 181132 - DNA, 20 bp, synthetic construct
  source 1..20: mol_type = other DNA
ccccagctgtgaaatctctg

SEQ ID NO: 181133 - DNA, 20 bp, synthetic construct
  source 1..20: mol_type = other DNA
tccccagctgtgaaatctct

SEQ ID NO: 181134 - DNA, 20 bp, synthetic construct
  source 1..20: mol_type = other DNA
ctccccagctgtgaaatctc

SEQ ID NO: 181135 - DNA, 20 bp, synthetic construct
  source 1..20: mol_type = other DNA
cctccccagctgtgaaatct

SEQ ID NO: 181136 - DNA, 20 bp, synthetic construct
  source 1..20: mol_type = other DNA
ccctccccagctgtgaaatc

SEQ ID NO: 181137 - DNA, 20 bp, synthetic construct
  source 1..20: mol_type = other DNA
tccctccccagctgtgaaat

SEQ ID NO: 181138 - DNA, 20 bp, synthetic construct
  source 1..20: mol_type = other DNA
ctccctccccagctgtgaaa

SEQ ID NO: 181139 - DNA, 20 bp, synthetic construct
  source 1..20: mol_type = other DNA
gctccctccccagctgtgaa

SEQ ID NO: 181140 - DNA, 20 bp, synthetic construct
  source 1..20: mol_type = other DNA
ggctccctccccagctgtga

SEQ ID NO: 181141 - DNA, 20 bp, synthetic construct
  source 1..20: mol_type = other DNA
tggctccctccccagctgtg

SEQ ID NO: 181142 - DNA, 20 bp, synthetic construct
  source 1..20: mol_type = other DNA
ctggctccctccccagctgt

SEQ ID NO: 181143 - DNA, 20 bp, synthetic construct
  source 1..20: mol_type = other DNA
gctggctccctccccagctg

SEQ ID NO: 181144 - DNA, 20 bp, synthetic construct
  source 1..20: mol_type = other DNA
agctggctccctccccagct

SEQ ID NO: 181145 - DNA, 20 bp, synthetic construct
  source 1..20: mol_type = other DNA
gagctggctccctccccagc

SEQ ID NO: 181146 - DNA, 20 bp, synthetic construct
  source 1..20: mol_type = other DNA
tgagctggctccctccccag

SEQ ID NO: 181147 - DNA, 20 bp, synthetic construct
  source 1..20: mol_type = other DNA
atgagctggctccctcccca

SEQ ID NO: 181148 - DNA, 20 bp, synthetic construct
  source 1..20: mol_type = other DNA
gatgagctggctccctcccc

SEQ ID NO: 181149 - DNA, 20 bp, synthetic construct
  source 1..20: mol_type = other DNA
ggatgagctggctccctccc

SEQ ID NO: 181150 - DNA, 20 bp, synthetic construct
  source 1..20: mol_type = other DNA
gggatgagctggctccctcc

SEQ ID NO: 181151 - DNA, 20 bp, synthetic construct
  source 1..20: mol_type = other DNA
agggatgagctggctccctc

SEQ ID NO: 181152 - DNA, 20 bp, synthetic construct
  source 1..20: mol_type = other DNA
gagggatgagctggctccct

SEQ ID NO: 181153 - DNA, 20 bp, synthetic construct
  source 1..20: mol_type = other DNA
agagggatgagctggctccc

SEQ ID NO: 181154 - DNA, 20 bp, synthetic construct
  source 1..20: mol_type = other DNA
cagagggatgagctggctcc

SEQ ID NO: 181155 - DNA, 20 bp, synthetic construct
  source 1..20: mol_type = other DNA
acagagggatgagctggctc

SEQ ID NO: 181156 - DNA, 20 bp, synthetic construct
  source 1..20: mol_type = other DNA
gacagagggatgagctggct

SEQ ID NO: 181157 - DNA, 20 bp, synthetic construct
  source 1..20: mol_type = other DNA
ggacagagggatgagctggc

SEQ ID NO: 181158 - DNA, 20 bp, synthetic construct
  source 1..20: mol_type = other DNA
tggacagagggatgagctgg

SEQ ID NO: 181159 - DNA, 20 bp, synthetic construct
  source 1..20: mol_type = other DNA
ctggacagagggatgagctg

SEQ ID NO: 181160 - DNA, 20 bp, synthetic construct
  source 1..20: mol_type = other DNA
cctggacagagggatgagct

SEQ ID NO: 181161 - DNA, 20 bp, synthetic construct
  source 1..20: mol_type = other DNA
gcctggacagagggatgagc

SEQ ID NO: 181162 - DNA, 20 bp, synthetic construct
  source 1..20: mol_type = other DNA
ggcctggacagagggatgag

SEQ ID NO: 181163 - DNA, 20 bp, synthetic construct
  source 1..20: mol_type = other DNA
gggcctggacagagggatga

SEQ ID NO: 181164 - DNA, 20 bp, synthetic construct
  source 1..20: mol_type = other DNA
tgggcctggacagagggatg

SEQ ID NO: 181165 - DNA, 20 bp, synthetic construct
  source 1..20: mol_type = other DNA
ttgggcctggacagagggat

SEQ ID NO: 181166 - DNA, 20 bp, synthetic construct
  source 1..20: mol_type = other DNA
cttgggcctggacagaggga

SEQ ID NO: 181167 - DNA, 20 bp, synthetic construct
  source 1..20: mol_type = other DNA
gcttgggcctggacagaggg

SEQ ID NO: 181168 - DNA, 20 bp, synthetic construct
  source 1..20: mol_type = other DNA
agcttgggcctggacagagg

SEQ ID NO: 181169 - DNA, 20 bp, synthetic construct
  source 1..20: mol_type = other DNA
gagcttgggcctggacagag

SEQ ID NO: 181170 - DNA, 20 bp, synthetic construct
  source 1..20: mol_type = other DNA
agagcttgggcctggacaga

SEQ ID NO: 181171 - DNA, 20 bp, synthetic construct
  source 1..20: mol_type = other DNA
gagagcttgggcctggacag

SEQ ID NO: 181172 - DNA, 20 bp, synthetic construct
  source 1..20: mol_type = other DNA
agagagcttgggcctggaca

SEQ ID NO: 181173 - DNA, 20 bp, synthetic construct
  source 1..20: mol_type = other DNA
gagagagcttgggcctggac

SEQ ID NO: 181174 - DNA, 20 bp, synthetic construct
  source 1..20: mol_type = other DNA
ggagagagcttgggcctgga

SEQ ID NO: 181175 - DNA, 20 bp, synthetic construct
  source 1..20: mol_type = other DNA
gggagagagcttgggcctgg

SEQ ID NO: 181176 - DNA, 20 bp, synthetic construct
  source 1..20: mol_type = other DNA
cgggagagagcttgggcctg

SEQ ID NO: 181177 - DNA, 20 bp, synthetic construct
  source 1..20: mol_type = other DNA
gcgggagagagcttgggcct

SEQ ID NO: 181178 - DNA, 20 bp, synthetic construct
  source 1..20: mol_type = other DNA
agcgggagagagcttgggcc

SEQ ID NO: 181179 - DNA, 20 bp, synthetic construct
  source 1..20: mol_type = other DNA
aagcgggagagagcttgggc

SEQ ID NO: 181180 - DNA, 20 bp, synthetic construct
  source 1..20: mol_type = other DNA
caagcgggagagagcttggg

SEQ ID NO: 181181 - DNA, 20 bp, synthetic construct
  source 1..20: mol_type = other DNA
gcaagcgggagagagcttgg

SEQ ID NO: 181182 - DNA, 20 bp, synthetic construct
  source 1..20: mol_type = other DNA
ggcaagcgggagagagcttg

SEQ ID NO: 181183 - DNA, 20 bp, synthetic construct
  source 1..20: mol_type = other DNA
aggcaagcgggagagagctt

SEQ ID NO: 181184 - DNA, 20 bp, synthetic construct
  source 1..20: mol_type = other DNA
aaggcaagcgggagagagct

SEQ ID NO: 181185 - DNA, 20 bp, synthetic construct
  source 1..20: mol_type = other DNA
gaaggcaagcgggagagagc

SEQ ID NO: 181186 - DNA, 20 bp, synthetic construct
  source 1..20: mol_type = other DNA
ggaaggcaagcgggagagag

SEQ ID NO: 181187 - DNA, 20 bp, synthetic construct
  source 1..20: mol_type = other DNA
aggaaggcaagcgggagaga

SEQ ID NO: 181188 - DNA, 20 bp, synthetic construct
  source 1..20: mol_type = other DNA
caggaaggcaagcgggagag

SEQ ID NO: 181189 - DNA, 20 bp, synthetic construct
  source 1..20: mol_type = other DNA
gcaggaaggcaagcgggaga

SEQ ID NO: 181190 - DNA, 20 bp, synthetic construct
  source 1..20: mol_type = other DNA
ggcaggaaggcaagcgggag

SEQ ID NO: 181191 - DNA, 20 bp, synthetic construct
  source 1..20: mol_type = other DNA
aggcaggaaggcaagcggga

SEQ ID NO: 181192 - DNA, 20 bp, synthetic construct
  source 1..20: mol_type = other DNA
gaggcaggaaggcaagcggg

SEQ ID NO: 181193 - DNA, 20 bp, synthetic construct
  source 1..20: mol_type = other DNA
agaggcaggaaggcaagcgg

SEQ ID NO: 181194 - DNA, 20 bp, synthetic construct
  source 1..20: mol_type = other DNA
cagaggcaggaaggcaagcg

SEQ ID NO: 181195 - DNA, 20 bp, synthetic construct
  source 1..20: mol_type = other DNA
gcagaggcaggaaggcaagc

SEQ ID NO: 181196 - DNA, 20 bp, synthetic construct
  source 1..20: mol_type = other DNA
tgcagaggcaggaaggcaag

SEQ ID NO: 181197 - DNA, 20 bp, synthetic construct
  source 1..20: mol_type = other DNA
ttgcagaggcaggaaggcaa

SEQ ID NO: 181198 - DNA, 20 bp, synthetic construct
  source 1..20: mol_type = other DNA
gttgcagaggcaggaaggca

SEQ ID NO: 181199 - DNA, 20 bp, synthetic construct
  source 1..20: mol_type = other DNA
ggttgcagaggcaggaaggc

SEQ ID NO: 181200 - DNA, 20 bp, synthetic construct
  source 1..20: mol_type = other DNA
aggttgcagaggcaggaagg

SEQ ID NO: 181201 - DNA, 20 bp, synthetic construct
  source 1..20: mol_type = other DNA
gaggttgcagaggcaggaag

SEQ ID NO: 181202 - DNA, 20 bp, synthetic construct
  source 1..20: mol_type = other DNA
tgaggttgcagaggcaggaa

SEQ ID NO: 181203 - DNA, 20 bp, synthetic construct
  source 1..20: mol_type = other DNA
ctgaggttgcagaggcagga

SEQ ID NO: 181204 - DNA, 20 bp, synthetic construct
  source 1..20: mol_type = other DNA
tctgaggttgcagaggcagg

SEQ ID NO: 181205 - DNA, 20 bp, synthetic construct
  source 1..20: mol_type = other DNA
ctctgaggttgcagaggcag

SEQ ID NO: 181206 - DNA, 20 bp, synthetic construct
  source 1..20: mol_type = other DNA
gctctgaggttgcagaggca

SEQ ID NO: 181207 - DNA, 20 bp, synthetic construct
  source 1..20: mol_type = other DNA
tgctctgaggttgcagaggc

SEQ ID NO: 181208 - DNA, 20 bp, synthetic construct
  source 1..20: mol_type = other DNA
atgctctgaggttgcagagg

SEQ ID NO: 181209 - DNA, 20 bp, synthetic construct
  source 1..20: mol_type = other DNA
gatgctctgaggttgcagag

SEQ ID NO: 181210 - DNA, 20 bp, synthetic construct
  source 1..20: mol_type = other DNA
ggatgctctgaggttgcaga

SEQ ID NO: 181211 - DNA, 20 bp, synthetic construct
  source 1..20: mol_type = other DNA
gggatgctctgaggttgcag

SEQ ID NO: 181212 - DNA, 20 bp, synthetic construct
  source 1..20: mol_type = other DNA
ggggatgctctgaggttgca

SEQ ID NO: 181213 - DNA, 20 bp, synthetic construct
  source 1..20: mol_type = other DNA
gggggatgctctgaggttgc

SEQ ID NO: 181214 - DNA, 20 bp, synthetic construct
  source 1..20: mol_type = other DNA
tgggggatgctctgaggttg

SEQ ID NO: 181215 - DNA, 20 bp, synthetic construct
  source 1..20: mol_type = other DNA
atgggggatgctctgaggtt

SEQ ID NO: 181216 - DNA, 20 bp, synthetic construct
  source 1..20: mol_type = other DNA
gatgggggatgctctgaggt

SEQ ID NO: 181217 - DNA, 20 bp, synthetic construct
  source 1..20: mol_type = other DNA
agatgggggatgctctgagg

SEQ ID NO: 181218 - DNA, 20 bp, synthetic construct
  source 1..20: mol_type = other DNA
cagatgggggatgctctgag

SEQ ID NO: 181219 - DNA, 20 bp, synthetic construct
  source 1..20: mol_type = other DNA
ccagatgggggatgctctga

SEQ ID NO: 181220 - DNA, 20 bp, synthetic construct
  source 1..20: mol_type = other DNA
accagatgggggatgctctg

SEQ ID NO: 181221 - DNA, 20 bp, synthetic construct
  source 1..20: mol_type = other DNA
aaccagatgggggatgctct

SEQ ID NO: 181222 - DNA, 20 bp, synthetic construct
  source 1..20: mol_type = other DNA
gaaccagatgggggatgctc

SEQ ID NO: 181223 - DNA, 20 bp, synthetic construct
  source 1..20: mol_type = other DNA
agaaccagatgggggatgct

SEQ ID NO: 181224 - DNA, 20 bp, synthetic construct
  source 1..20: mol_type = other DNA
tagaaccagatgggggatgc

SEQ ID NO: 181225 - DNA, 20 bp, synthetic construct
  source 1..20: mol_type = other DNA
gtagaaccagatgggggatg

SEQ ID NO: 181226 - DNA, 20 bp, synthetic construct
  source 1..20: mol_type = other DNA
agtagaaccagatgggggat

SEQ ID NO: 181227 - DNA, 20 bp, synthetic construct
  source 1..20: mol_type = other DNA
cagtagaaccagatggggga

SEQ ID NO: 181228 - DNA, 20 bp, synthetic construct
  source 1..20: mol_type = other DNA
gcagtagaaccagatggggg

SEQ ID NO: 181229 - DNA, 20 bp, synthetic construct
  source 1..20: mol_type = other DNA
ggcagtagaaccagatgggg

SEQ ID NO: 181230 - DNA, 20 bp, synthetic construct
  source 1..20: mol_type = other DNA
aggcagtagaaccagatggg

SEQ ID NO: 181231 - DNA, 20 bp, synthetic construct
  source 1..20: mol_type = other DNA
caggcagtagaaccagatgg

SEQ ID NO: 181232 - DNA, 20 bp, synthetic construct
  source 1..20: mol_type = other DNA
acaggcagtagaaccagatg

SEQ ID NO: 181233 - DNA, 20 bp, synthetic construct
  source 1..20: mol_type = other DNA
cacaggcagtagaaccagat

SEQ ID NO: 181234 - DNA, 20 bp, synthetic construct
  source 1..20: mol_type = other DNA
gcacaggcagtagaaccaga

SEQ ID NO: 181235 - DNA, 20 bp, synthetic construct
  source 1..20: mol_type = other DNA
agcacaggcagtagaaccag

SEQ ID NO: 181236 - DNA, 20 bp, synthetic construct
  source 1..20: mol_type = other DNA
tagcacaggcagtagaacca

SEQ ID NO: 181237 - DNA, 20 bp, synthetic construct
  source 1..20: mol_type = other DNA
ctagcacaggcagtagaacc

SEQ ID NO: 181238 - DNA, 20 bp, synthetic construct
  source 1..20: mol_type = other DNA
actagcacaggcagtagaac

SEQ ID NO: 181239 - DNA, 20 bp, synthetic construct
  source 1..20: mol_type = other DNA
gactagcacaggcagtagaa

SEQ ID NO: 181240 - DNA, 20 bp, synthetic construct
  source 1..20: mol_type = other DNA
cgactagcacaggcagtaga

SEQ ID NO: 181241 - DNA, 20 bp, synthetic construct
  source 1..20: mol_type = other DNA
acgactagcacaggcagtag

SEQ ID NO: 181242 - DNA, 20 bp, synthetic construct
  source 1..20: mol_type = other DNA
cacgactagcacaggcagta

SEQ ID NO: 181243 - DNA, 20 bp, synthetic construct
  source 1..20: mol_type = other DNA
gcacgactagcacaggcagt

SEQ ID NO: 181244 - DNA, 20 bp, synthetic construct
  source 1..20: mol_type = other DNA
tgcacgactagcacaggcag

SEQ ID NO: 181245 - DNA, 20 bp, synthetic construct
  source 1..20: mol_type = other DNA
ctgcacgactagcacaggca

SEQ ID NO: 181246 - DNA, 20 bp, synthetic construct
  source 1..20: mol_type = other DNA
cctgcacgactagcacaggc

SEQ ID NO: 181247 - DNA, 20 bp, synthetic construct
  source 1..20: mol_type = other DNA
tcctgcacgactagcacagg

SEQ ID NO: 181248 - DNA, 20 bp, synthetic construct
  source 1..20: mol_type = other DNA
ctcctgcacgactagcacag

SEQ ID NO: 181249 - DNA, 20 bp, synthetic construct
  source 1..20: mol_type = other DNA
gctcctgcacgactagcaca

SEQ ID NO: 181250 - DNA, 20 bp, synthetic construct
  source 1..20: mol_type = other DNA
ggctcctgcacgactagcac

SEQ ID NO: 181251 - DNA, 20 bp, synthetic construct
  source 1..20: mol_type = other DNA
tggctcctgcacgactagca

SEQ ID NO: 181252 - DNA, 20 bp, synthetic construct
  source 1..20: mol_type = other DNA
ttggctcctgcacgactagc

SEQ ID NO: 181253 - DNA, 20 bp, synthetic construct
  source 1..20: mol_type = other DNA
tttggctcctgcacgactag

SEQ ID NO: 181254 - DNA, 20 bp, synthetic construct
  source 1..20: mol_type = other DNA
ttttggctcctgcacgacta

SEQ ID NO: 181255 - DNA, 20 bp, synthetic construct
  source 1..20: mol_type = other DNA
cttttggctcctgcacgact

SEQ ID NO: 181256 - DNA, 20 bp, synthetic construct
  source 1..20: mol_type = other DNA
tcttttggctcctgcacgac

SEQ ID NO: 181257 - DNA, 20 bp, synthetic construct
  source 1..20: mol_type = other DNA
gtcttttggctcctgcacga

SEQ ID NO: 181258 - DNA, 20 bp, synthetic construct
  source 1..20: mol_type = other DNA
tgtcttttggctcctgcacg

SEQ ID NO: 181259 - DNA, 20 bp, synthetic construct
  source 1..20: mol_type = other DNA
gtgtcttttggctcctgcac

SEQ ID NO: 181260 - DNA, 20 bp, synthetic construct
  source 1..20: mol_type = other DNA
cgtgtcttttggctcctgca

SEQ ID NO: 181261 - DNA, 20 bp, synthetic construct
  source 1..20: mol_type = other DNA
acgtgtcttttggctcctgc

SEQ ID NO: 181262 - DNA, 20 bp, synthetic construct
  source 1..20: mol_type = other DNA
gacgtgtcttttggctcctg

SEQ ID NO: 181263 - DNA, 20 bp, synthetic construct
  source 1..20: mol_type = other DNA
agacgtgtcttttggctcct

SEQ ID NO: 181264 - DNA, 20 bp, synthetic construct
  source 1..20: mol_type = other DNA
aagacgtgtcttttggctcc

SEQ ID NO: 181265 - DNA, 20 bp, synthetic construct
  source 1..20: mol_type = other DNA
aaagacgtgtcttttggctc

SEQ ID NO: 181266 - DNA, 20 bp, synthetic construct
  source 1..20: mol_type = other DNA
taaagacgtgtcttttggct

SEQ ID NO: 181267 - DNA, 20 bp, synthetic construct
  source 1..20: mol_type = other DNA
ctaaagacgtgtcttttggc

SEQ ID NO: 181268 - DNA, 20 bp, synthetic construct
  source 1..20: mol_type = other DNA
actaaagacgtgtcttttgg

SEQ ID NO: 181269 - DNA, 20 bp, synthetic construct
  source 1..20: mol_type = other DNA
cactaaagacgtgtcttttg

SEQ ID NO: 181270 - DNA, 20 bp, synthetic construct
  source 1..20: mol_type = other DNA
gcactaaagacgtgtctttt

SEQ ID NO: 181271 - DNA, 20 bp, synthetic construct
  source 1..20: mol_type = other DNA
agcactaaagacgtgtcttt

SEQ ID NO: 181272 - DNA, 20 bp, synthetic construct
  source 1..20: mol_type = other DNA
tagcactaaagacgtgtctt

SEQ ID NO: 181273 - DNA, 20 bp, synthetic construct
  source 1..20: mol_type = other DNA
ttagcactaaagacgtgtct

SEQ ID NO: 181274 - DNA, 20 bp, synthetic construct
  source 1..20: mol_type = other DNA
cttagcactaaagacgtgtc

SEQ ID NO: 181275 - DNA, 20 bp, synthetic construct
  source 1..20: mol_type = other DNA
ccttagcactaaagacgtgt

SEQ ID NO: 181276 - DNA, 20 bp, synthetic construct
  source 1..20: mol_type = other DNA
tccttagcactaaagacgtg

SEQ ID NO: 181277 - DNA, 20 bp, synthetic construct
  source 1..20: mol_type = other DNA
gtccttagcactaaagacgt

SEQ ID NO: 181278 - DNA, 20 bp, synthetic construct
  source 1..20: mol_type = other DNA
agtccttagcactaaagacg

SEQ ID NO: 181279 - DNA, 20 bp, synthetic construct
  source 1..20: mol_type = other DNA
cagtccttagcactaaagac

SEQ ID NO: 181280 - DNA, 20 bp, synthetic construct
  source 1..20: mol_type = other DNA
ccagtccttagcactaaaga

SEQ ID NO: 181281 - DNA, 20 bp, synthetic construct
  source 1..20: mol_type = other DNA
tccagtccttagcactaaag

SEQ ID NO: 181282 - DNA, 20 bp, synthetic construct
  source 1..20: mol_type = other DNA
ctccagtccttagcactaaa

SEQ ID NO: 181283 - DNA, 20 bp, synthetic construct
  source 1..20: mol_type = other DNA
tctccagtccttagcactaa

SEQ ID NO: 181284 - DNA, 20 bp, synthetic construct
  source 1..20: mol_type = other DNA
ttctccagtccttagcacta

SEQ ID NO: 181285 - DNA, 20 bp, synthetic construct
  source 1..20: mol_type = other DNA
cttctccagtccttagcact

SEQ ID NO: 181286 - DNA, 20 bp, synthetic construct
  source 1..20: mol_type = other DNA
gcttctccagtccttagcac

SEQ ID NO: 181287 - DNA, 20 bp, synthetic construct
  source 1..20: mol_type = other DNA
ggcttctccagtccttagca

SEQ ID NO: 181288 - DNA, 20 bp, synthetic construct
  source 1..20: mol_type = other DNA
tggcttctccagtccttagc

SEQ ID NO: 181289 - DNA, 20 bp, synthetic construct
  source 1..20: mol_type = other DNA
atggcttctccagtccttag

SEQ ID NO: 181290 - DNA, 20 bp, synthetic construct
  source 1..20: mol_type = other DNA
catggcttctccagtcctta

SEQ ID NO: 181291 - DNA, 20 bp, synthetic construct
  source 1..20: mol_type = other DNA
gcatggcttctccagtcctt

SEQ ID NO: 181292 - DNA, 20 bp, synthetic construct
  source 1..20: mol_type = other DNA
ggcatggcttctccagtcct

SEQ ID NO: 181293 - DNA, 20 bp, synthetic construct
  source 1..20: mol_type = other DNA
gggcatggcttctccagtcc

SEQ ID NO: 181294 - DNA, 20 bp, synthetic construct
  source 1..20: mol_type = other DNA
agggcatggcttctccagtc

SEQ ID NO: 181295 - DNA, 20 bp, synthetic construct
  source 1..20: mol_type = other DNA
gagggcatggcttctccagt

SEQ ID NO: 181296 - DNA, 20 bp, synthetic construct
  source 1..20: mol_type = other DNA
ggagggcatggcttctccag

SEQ ID NO: 181297 - DNA, 20 bp, synthetic construct
  source 1..20: mol_type = other DNA
tggagggcatggcttctcca

SEQ ID NO: 181298 - DNA, 20 bp, synthetic construct
  source 1..20: mol_type = other DNA
ctggagggcatggcttctcc

SEQ ID NO: 181299 - DNA, 20 bp, synthetic construct
  source 1..20: mol_type = other DNA
gctggagggcatggcttctc

SEQ ID NO: 181300 - DNA, 20 bp, synthetic construct
  source 1..20: mol_type = other DNA
ggctggagggcatggcttct

SEQ ID NO: 181301 - DNA, 20 bp, synthetic construct
  source 1..20: mol_type = other DNA
aggctggagggcatggcttc

SEQ ID NO: 181302 - DNA, 20 bp, synthetic construct
  source 1..20: mol_type = other DNA
gaggctggagggcatggctt

SEQ ID NO: 181303 - DNA, 20 bp, synthetic construct
  source 1..20: mol_type = other DNA
agaggctggagggcatggct

SEQ ID NO: 181304 - DNA, 20 bp, synthetic construct
  source 1..20: mol_type = other DNA
cagaggctggagggcatggc

SEQ ID NO: 181305 - DNA, 20 bp, synthetic construct
  source 1..20: mol_type = other DNA
acagaggctggagggcatgg

SEQ ID NO: 181306 - DNA, 20 bp, synthetic construct
  source 1..20: mol_type = other DNA
cacagaggctggagggcatg

SEQ ID NO: 181307 - DNA, 20 bp, synthetic construct
  source 1..20: mol_type = other DNA
tcacagaggctggagggcat

SEQ ID NO: 181308 - DNA, 20 bp, synthetic construct
  source 1..20: mol_type = other DNA
ttcacagaggctggagggca

SEQ ID NO: 181309 - DNA, 20 bp, synthetic construct
  source 1..20: mol_type = other DNA
attcacagaggctggagggc

SEQ ID NO: 181310 - DNA, 20 bp, synthetic construct
  source 1..20: mol_type = other DNA
cattcacagaggctggaggg

SEQ ID NO: 181311 - DNA, 20 bp, synthetic construct
  source 1..20: mol_type = other DNA
ccattcacagaggctggagg

SEQ ID NO: 181312 - DNA, 20 bp, synthetic construct
  source 1..20: mol_type = other DNA
cccattcacagaggctggag

SEQ ID NO: 181313 - DNA, 20 bp, synthetic construct
  source 1..20: mol_type = other DNA
acccattcacagaggctgga

SEQ ID NO: 181314 - DNA, 20 bp, synthetic construct
  source 1..20: mol_type = other DNA
gacccattcacagaggctgg

SEQ ID NO: 181315 - DNA, 20 bp, synthetic construct
  source 1..20: mol_type = other DNA
tgacccattcacagaggctg

SEQ ID NO: 181316 - DNA, 20 bp, synthetic construct
  source 1..20: mol_type = other DNA
atgacccattcacagaggct

SEQ ID NO: 181317 - DNA, 20 bp, synthetic construct
  source 1..20: mol_type = other DNA
tatgacccattcacagaggc

SEQ ID NO: 181318 - DNA, 20 bp, synthetic construct
  source 1..20: mol_type = other DNA
atatgacccattcacagagg

SEQ ID NO: 181319 - DNA, 20 bp, synthetic construct
  source 1..20: mol_type = other DNA
catatgacccattcacagag

SEQ ID NO: 181320 - DNA, 20 bp, synthetic construct
  source 1..20: mol_type = other DNA
acatatgacccattcacaga

SEQ ID NO: 181321 - DNA, 20 bp, synthetic construct
  source 1..20: mol_type = other DNA
tacatatgacccattcacag

SEQ ID NO: 181322 - DNA, 20 bp, synthetic construct
  source 1..20: mol_type = other DNA
ttacatatgacccattcaca

SEQ ID NO: 181323 - DNA, 20 bp, synthetic construct
  source 1..20: mol_type = other DNA
gttacatatgacccattcac

SEQ ID NO: 181324 - DNA, 20 bp, synthetic construct
  source 1..20: mol_type = other DNA
tgttacatatgacccattca

SEQ ID NO: 181325 - DNA, 20 bp, synthetic construct
  source 1..20: mol_type = other DNA
atgttacatatgacccattc

SEQ ID NO: 181326 - DNA, 20 bp, synthetic construct
  source 1..20: mol_type = other DNA
catgttacatatgacccatt

SEQ ID NO: 181327 - DNA, 20 bp, synthetic construct
  source 1..20: mol_type = other DNA
tcatgttacatatgacccat

SEQ ID NO: 181328 - DNA, 20 bp, synthetic construct
  source 1..20: mol_type = other DNA
ctcatgttacatatgaccca

SEQ ID NO: 181329 - DNA, 20 bp, synthetic construct
  source 1..20: mol_type = other DNA
gctcatgttacatatgaccc

SEQ ID NO: 181330 - DNA, 20 bp, synthetic construct
  source 1..20: mol_type = other DNA
ggctcatgttacatatgacc

SEQ ID NO: 181331 - DNA, 20 bp, synthetic construct
  source 1..20: mol_type = other DNA
aggctcatgttacatatgac

SEQ ID NO: 181332 - DNA, 20 bp, synthetic construct
  source 1..20: mol_type = other DNA
caggctcatgttacatatga

SEQ ID NO: 181333 - DNA, 20 bp, synthetic construct
  source 1..20: mol_type = other DNA
ccaggctcatgttacatatg

SEQ ID NO: 181334 - DNA, 20 bp, synthetic construct
  source 1..20: mol_type = other DNA
tccaggctcatgttacatat

SEQ ID NO: 181335 - DNA, 20 bp, synthetic construct
  source 1..20: mol_type = other DNA
ctccaggctcatgttacata

SEQ ID NO: 181336 - DNA, 20 bp, synthetic construct
  source 1..20: mol_type = other DNA
tctccaggctcatgttacat

SEQ ID NO: 181337 - DNA, 20 bp, synthetic construct
  source 1..20: mol_type = other DNA
ttctccaggctcatgttaca

SEQ ID NO: 181338 - DNA, 20 bp, synthetic construct
  source 1..20: mol_type = other DNA
tttctccaggctcatgttac

SEQ ID NO: 181339 - DNA, 20 bp, synthetic construct
  source 1..20: mol_type = other DNA
atttctccaggctcatgtta

SEQ ID NO: 181340 - DNA, 20 bp, synthetic construct
  source 1..20: mol_type = other DNA
aatttctccaggctcatgtt

SEQ ID NO: 181341 - DNA, 20 bp, synthetic construct
  source 1..20: mol_type = other DNA
taatttctccaggctcatgt

SEQ ID NO: 181342 - DNA, 20 bp, synthetic construct
  source 1..20: mol_type = other DNA
ataatttctccaggctcatg

SEQ ID NO: 181343 - DNA, 20 bp, synthetic construct
  source 1..20: mol_type = other DNA
aataatttctccaggctcat

SEQ ID NO: 181344 - DNA, 20 bp, synthetic construct
  source 1..20: mol_type = other DNA
aaataatttctccaggctca

SEQ ID NO: 181345 - DNA, 20 bp, synthetic construct
  source 1..20: mol_type = other DNA
caaataatttctccaggctc

SEQ ID NO: 181346 - DNA, 20 bp, synthetic construct
  source 1..20: mol_type = other DNA
tcaaataatttctccaggct

SEQ ID NO: 181347 - DNA, 20 bp, synthetic construct
  source 1..20: mol_type = other DNA
ttcaaataatttctccaggc

SEQ ID NO: 181348 - DNA, 20 bp, synthetic construct
  source 1..20: mol_type = other DNA
tttcaaataatttctccagg

SEQ ID NO: 181349 - DNA, 20 bp, synthetic construct
  source 1..20: mol_type = other DNA
gtttcaaataatttctccag

SEQ ID NO: 181350 - DNA, 20 bp, synthetic construct
  source 1..20: mol_type = other DNA
ggtttcaaataatttctcca

SEQ ID NO: 181351 - DNA, 20 bp, synthetic construct
  source 1..20: mol_type = other DNA
tggtttcaaataatttctcc

SEQ ID NO: 181352 - DNA, 20 bp, synthetic construct
  source 1..20: mol_type = other DNA
ttggtttcaaataatttctc

SEQ ID NO: 181353 - DNA, 20 bp, synthetic construct
  source 1..20: mol_type = other DNA
tttggtttcaaataatttct

SEQ ID NO: 181354 - DNA, 20 bp, synthetic construct
  source 1..20: mol_type = other DNA
ctttggtttcaaataatttc

SEQ ID NO: 181355 - DNA, 20 bp, synthetic construct
  source 1..20: mol_type = other DNA
cctttggtttcaaataattt

SEQ ID NO: 181356 - DNA, 20 bp, synthetic construct
  source 1..20: mol_type = other DNA
gcctttggtttcaaataatt

SEQ ID NO: 181357 - DNA, 20 bp, synthetic construct
  source 1..20: mol_type = other DNA
tgcctttggtttcaaataat

SEQ ID NO: 181358 - DNA, 20 bp, synthetic construct
  source 1..20: mol_type = other DNA
ttgcctttggtttcaaataa

SEQ ID NO: 181359 - DNA, 20 bp, synthetic construct
  source 1..20: mol_type = other DNA
cttgcctttggtttcaaata

SEQ ID NO: 181360 - DNA, 20 bp, synthetic construct
  source 1..20: mol_type = other DNA
gcttgcctttggtttcaaat

SEQ ID NO: 181361 - DNA, 20 bp, synthetic construct
  source 1..20: mol_type = other DNA
ggcttgcctttggtttcaaa

SEQ ID NO: 181362 - DNA, 20 bp, synthetic construct
  source 1..20: mol_type = other DNA
aggcttgcctttggtttcaa

SEQ ID NO: 181363 - DNA, 20 bp, synthetic construct
  source 1..20: mol_type = other DNA
gaggcttgcctttggtttca

SEQ ID NO: 181364 - DNA, 20 bp, synthetic construct
  source 1..20: mol_type = other DNA
agaggcttgcctttggtttc

SEQ ID NO: 181365 - DNA, 20 bp, synthetic construct
  source 1..20: mol_type = other DNA
tagaggcttgcctttggttt

SEQ ID NO: 181366 - DNA, 20 bp, synthetic construct
  source 1..20: mol_type = other DNA
ttagaggcttgcctttggtt

SEQ ID NO: 181367 - DNA, 20 bp, synthetic construct
  source 1..20: mol_type = other DNA
tttagaggcttgcctttggt

SEQ ID NO: 181368 - DNA, 20 bp, synthetic construct
  source 1..20: mol_type = other DNA
gtttagaggcttgcctttgg

SEQ ID NO: 181369 - DNA, 20 bp, synthetic construct
  source 1..20: mol_type = other DNA
ggtttagaggcttgcctttg

SEQ ID NO: 181370 - DNA, 20 bp, synthetic construct
  source 1..20: mol_type = other DNA
tggtttagaggcttgccttt

SEQ ID NO: 181371 - DNA, 20 bp, synthetic construct
  source 1..20: mol_type = other DNA
ctggtttagaggcttgcctt

SEQ ID NO: 181372 - DNA, 20 bp, synthetic construct
  source 1..20: mol_type = other DNA
cctggtttagaggcttgcct

SEQ ID NO: 181373 - DNA, 20 bp, synthetic construct
  source 1..20: mol_type = other DNA
gcctggtttagaggcttgcc

SEQ ID NO: 181374 - DNA, 20 bp, synthetic construct
  source 1..20: mol_type = other DNA
agcctggtttagaggcttgc

SEQ ID NO: 181375 - DNA, 20 bp, synthetic construct
  source 1..20: mol_type = other DNA
cagcctggtttagaggcttg

SEQ ID NO: 181376 - DNA, 20 bp, synthetic construct
  source 1..20: mol_type = other DNA
gcagcctggtttagaggctt

SEQ ID NO: 181377 - DNA, 20 bp, synthetic construct
  source 1..20: mol_type = other DNA
agcagcctggtttagaggct

SEQ ID NO: 181378 - DNA, 20 bp, synthetic construct
  source 1..20: mol_type = other DNA
cagcagcctggtttagaggc

SEQ ID NO: 181379 - DNA, 20 bp, synthetic construct
  source 1..20: mol_type = other DNA
gcagcagcctggtttagagg

SEQ ID NO: 181380 - DNA, 20 bp, synthetic construct
  source 1..20: mol_type = other DNA
agcagcagcctggtttagag

SEQ ID NO: 181381 - DNA, 20 bp, synthetic construct
  source 1..20: mol_type = other DNA
aagcagcagcctggtttaga

SEQ ID NO: 181382 - DNA, 20 bp, synthetic construct
  source 1..20: mol_type = other DNA
gaagcagcagcctggtttag

SEQ ID NO: 181383 - DNA, 20 bp, synthetic construct
  source 1..20: mol_type = other DNA
tgaagcagcagcctggttta

SEQ ID NO: 181384 - DNA, 20 bp, synthetic construct
  source 1..20: mol_type = other DNA
atgaagcagcagcctggttt

SEQ ID NO: 181385 - DNA, 20 bp, synthetic construct
  source 1..20: mol_type = other DNA
catgaagcagcagcctggtt

SEQ ID NO: 181386 - DNA, 20 bp, synthetic construct
  source 1..20: mol_type = other DNA
ccatgaagcagcagcctggt

SEQ ID NO: 181387 - DNA, 20 bp, synthetic construct
  source 1..20: mol_type = other DNA
gccatgaagcagcagcctgg

SEQ ID NO: 181388 - DNA, 20 bp, synthetic construct
  source 1..20: mol_type = other DNA
cgccatgaagcagcagcctg

SEQ ID NO: 181389 - DNA, 20 bp, synthetic construct
  source 1..20: mol_type = other DNA
gcgccatgaagcagcagcct

SEQ ID NO: 181390 - DNA, 20 bp, synthetic construct
  source 1..20: mol_type = other DNA
ggcgccatgaagcagcagcc

SEQ ID NO: 181391 - DNA, 20 bp, synthetic construct
  source 1..20: mol_type = other DNA
cggcgccatgaagcagcagc

SEQ ID NO: 181392 - DNA, 20 bp, synthetic construct
  source 1..20: mol_type = other DNA
ccggcgccatgaagcagcag

SEQ ID NO: 181393 - DNA, 20 bp, synthetic construct
  source 1..20: mol_type = other DNA
accggcgccatgaagcagca

SEQ ID NO: 181394 - DNA, 20 bp, synthetic construct
  source 1..20: mol_type = other DNA
caccggcgccatgaagcagc

SEQ ID NO: 181395 - DNA, 20 bp, synthetic construct
  source 1..20: mol_type = other DNA
tcaccggcgccatgaagcag

SEQ ID NO: 181396 - DNA, 20 bp, synthetic construct
  source 1..20: mol_type = other DNA
gtcaccggcgccatgaagca

SEQ ID NO: 181397 - DNA, 20 bp, synthetic construct
  source 1..20: mol_type = other DNA
cgtcaccggcgccatgaagc

SEQ ID NO: 181398 - DNA, 20 bp, synthetic construct
  source 1..20: mol_type = other DNA
ccgtcaccggcgccatgaag

SEQ ID NO: 181399 - DNA, 20 bp, synthetic construct
  source 1..20: mol_type = other DNA
gccgtcaccggcgccatgaa

SEQ ID NO: 181400 - DNA, 20 bp, synthetic construct
  source 1..20: mol_type = other DNA
tgccgtcaccggcgccatga

SEQ ID NO: 181401 - DNA, 20 bp, synthetic construct
  source 1..20: mol_type = other DNA
ctgccgtcaccggcgccatg

SEQ ID NO: 181402 - DNA, 20 bp, synthetic construct
  source 1..20: mol_type = other DNA
tctgccgtcaccggcgccat

SEQ ID NO: 181403 - DNA, 20 bp, synthetic construct
  source 1..20: mol_type = other DNA
ttctgccgtcaccggcgcca

SEQ ID NO: 181404 - DNA, 20 bp, synthetic construct
  source 1..20: mol_type = other DNA
gttctgccgtcaccggcgcc

SEQ ID NO: 181405 - DNA, 20 bp, synthetic construct
  source 1..20: mol_type = other DNA
ggttctgccgtcaccggcgc

SEQ ID NO: 181406 - DNA, 20 bp, synthetic construct
  source 1..20: mol_type = other DNA
tggttctgccgtcaccggcg

SEQ ID NO: 181407 - DNA, 20 bp, synthetic construct
  source 1..20: mol_type = other DNA
ttggttctgccgtcaccggc

SEQ ID NO: 181408 - DNA, 20 bp, synthetic construct
  source 1..20: mol_type = other DNA
tttggttctgccgtcaccgg

SEQ ID NO: 181409 - DNA, 20 bp, synthetic construct
  source 1..20: mol_type = other DNA
atttggttctgccgtcaccg

SEQ ID NO: 181410 - DNA, 20 bp, synthetic construct
  source 1..20: mol_type = other DNA
aatttggttctgccgtcacc

SEQ ID NO: 181411 - DNA, 20 bp, synthetic construct
  source 1..20: mol_type = other DNA
aaatttggttctgccgtcac

SEQ ID NO: 181412 - DNA, 20 bp, synthetic construct
  source 1..20: mol_type = other DNA
taaatttggttctgccgtca

SEQ ID NO: 181413 - DNA, 20 bp, synthetic construct
  source 1..20: mol_type = other DNA
ctaaatttggttctgccgtc

SEQ ID NO: 181414 - DNA, 20 bp, synthetic construct
  source 1..20: mol_type = other DNA
actaaatttggttctgccgt

SEQ ID NO: 181415 - DNA, 20 bp, synthetic construct
  source 1..20: mol_type = other DNA
cactaaatttggttctgccg

SEQ ID NO: 181416 - DNA, 20 bp, synthetic construct
  source 1..20: mol_type = other DNA
gcactaaatttggttctgcc

SEQ ID NO: 181417 - DNA, 20 bp, synthetic construct
  source 1..20: mol_type = other DNA
agcactaaatttggttctgc

SEQ ID NO: 181418 - DNA, 20 bp, synthetic construct
  source 1..20: mol_type = other DNA
cagcactaaatttggttctg

SEQ ID NO: 181419 - DNA, 20 bp, synthetic construct
  source 1..20: mol_type = other DNA
acagcactaaatttggttct

SEQ ID NO: 181420 - DNA, 20 bp, synthetic construct
  source 1..20: mol_type = other DNA
cacagcactaaatttggttc

SEQ ID NO: 181421 - DNA, 20 bp, synthetic construct
  source 1..20: mol_type = other DNA
ccacagcactaaatttggtt

SEQ ID NO: 181422 - DNA, 20 bp, synthetic construct
  source 1..20: mol_type = other DNA
cccacagcactaaatttggt

SEQ ID NO: 181423 - DNA, 20 bp, synthetic construct
  source 1..20: mol_type = other DNA
gcccacagcactaaatttgg

SEQ ID NO: 181424 - DNA, 20 bp, synthetic construct
  source 1..20: mol_type = other DNA
tgcccacagcactaaatttg

SEQ ID NO: 181425 - DNA, 20 bp, synthetic construct
  source 1..20: mol_type = other DNA
ctgcccacagcactaaattt

SEQ ID NO: 181426 - DNA, 20 bp, synthetic construct
  source 1..20: mol_type = other DNA
cctgcccacagcactaaatt

SEQ ID NO: 181427 - DNA, 20 bp, synthetic construct
  source 1..20: mol_type = other DNA
acctgcccacagcactaaat

SEQ ID NO: 181428 - DNA, 20 bp, synthetic construct
  source 1..20: mol_type = other DNA
gacctgcccacagcactaaa

SEQ ID NO: 181429 - DNA, 20 bp, synthetic construct
  source 1..20: mol_type = other DNA
ggacctgcccacagcactaa

SEQ ID NO: 181430 - DNA, 20 bp, synthetic construct
  source 1..20: mol_type = other DNA
tggacctgcccacagcacta

SEQ ID NO: 181431 - DNA, 20 bp, synthetic construct
  source 1..20: mol_type = other DNA
gtggacctgcccacagcact

SEQ ID NO: 181432 - DNA, 20 bp, synthetic construct
  source 1..20: mol_type = other DNA
tgtggacctgcccacagcac

SEQ ID NO: 181433 - DNA, 20 bp, synthetic construct
  source 1..20: mol_type = other DNA
gtgtggacctgcccacagca

SEQ ID NO: 181434 - DNA, 20 bp, synthetic construct
  source 1..20: mol_type = other DNA
agtgtggacctgcccacagc

SEQ ID NO: 181435 - DNA, 20 bp, synthetic construct
  source 1..20: mol_type = other DNA
aagtgtggacctgcccacag

SEQ ID NO: 181436 - DNA, 20 bp, synthetic construct
  source 1..20: mol_type = other DNA
taagtgtggacctgcccaca

SEQ ID NO: 181437 - DNA, 20 bp, synthetic construct
  source 1..20: mol_type = other DNA
ataagtgtggacctgcccac

SEQ ID NO: 181438 - DNA, 20 bp, synthetic construct
  source 1..20: mol_type = other DNA
gataagtgtggacctgccca

SEQ ID NO: 181439 - DNA, 20 bp, synthetic construct
  source 1..20: mol_type = other DNA
tgataagtgtggacctgccc

SEQ ID NO: 181440 - DNA, 20 bp, synthetic construct
  source 1..20: mol_type = other DNA
ttgataagtgtggacctgcc

SEQ ID NO: 181441 - DNA, 20 bp, synthetic construct
  source 1..20: mol_type = other DNA
tttgataagtgtggacctgc

SEQ ID NO: 181442 - DNA, 20 bp, synthetic construct
  source 1..20: mol_type = other DNA
atttgataagtgtggacctg

SEQ ID NO: 181443 - DNA, 20 bp, synthetic construct
  source 1..20: mol_type = other DNA
tatttgataagtgtggacct

SEQ ID NO: 181444 - DNA, 20 bp, synthetic construct
  source 1..20: mol_type = other DNA
ctatttgataagtgtggacc

SEQ ID NO: 181445 - DNA, 20 bp, synthetic construct
  source 1..20: mol_type = other DNA
tctatttgataagtgtggac

SEQ ID NO: 181446 - DNA, 20 bp, synthetic construct
  source 1..20: mol_type = other DNA
ctctatttgataagtgtgga

SEQ ID NO: 181447 - DNA, 20 bp, synthetic construct
  source 1..20: mol_type = other DNA
tctctatttgataagtgtgg

SEQ ID NO: 181448 - DNA, 20 bp, synthetic construct
  source 1..20: mol_type = other DNA
ttctctatttgataagtgtg

SEQ ID NO: 181449 - DNA, 20 bp, synthetic construct
  source 1..20: mol_type = other DNA
cttctctatttgataagtgt

SEQ ID NO: 181450 - DNA, 20 bp, synthetic construct
  source 1..20: mol_type = other DNA
gcttctctatttgataagtg

SEQ ID NO: 181451 - DNA, 20 bp, synthetic construct
  source 1..20: mol_type = other DNA
agcttctctatttgataagt

SEQ ID NO: 181452 - DNA, 20 bp, synthetic construct
  source 1..20: mol_type = other DNA
gagcttctctatttgataag

SEQ ID NO: 181453 - DNA, 20 bp, synthetic construct
  source 1..20: mol_type = other DNA
tgagcttctctatttgataa

SEQ ID NO: 181454 - DNA, 20 bp, synthetic construct
  source 1..20: mol_type = other DNA
atgagcttctctatttgata

SEQ ID NO: 181455 - DNA, 20 bp, synthetic construct
  source 1..20: mol_type = other DNA
aatgagcttctctatttgat

SEQ ID NO: 181456 - DNA, 20 bp, synthetic construct
  source 1..20: mol_type = other DNA
aaatgagcttctctatttga

SEQ ID NO: 181457 - DNA, 20 bp, synthetic construct
  source 1..20: mol_type = other DNA
aaaatgagcttctctatttg

SEQ ID NO: 181458 - DNA, 20 bp, synthetic construct
  source 1..20: mol_type = other DNA
aaaaatgagcttctctattt

SEQ ID NO: 181459 - DNA, 20 bp, synthetic construct
  source 1..20: mol_type = other DNA
gaaaaatgagcttctctatt

SEQ ID NO: 181460 - DNA, 20 bp, synthetic construct
  source 1..20: mol_type = other DNA
agaaaaatgagcttctctat

SEQ ID NO: 181461 - DNA, 20 bp, synthetic construct
  source 1..20: mol_type = other DNA
aagaaaaatgagcttctcta

SEQ ID NO: 181462 - DNA, 20 bp, synthetic construct
  source 1..20: mol_type = other DNA
gaagaaaaatgagcttctct

SEQ ID NO: 181463 - DNA, 20 bp, synthetic construct
  source 1..20: mol_type = other DNA
ggaagaaaaatgagcttctc

SEQ ID NO: 181464 - DNA, 20 bp, synthetic construct
  source 1..20: mol_type = other DNA
cggaagaaaaatgagcttct

SEQ ID NO: 181465 - DNA, 20 bp, synthetic construct
  source 1..20: mol_type = other DNA
ccggaagaaaaatgagcttc

SEQ ID NO: 181466 - DNA, 20 bp, synthetic construct
  source 1..20: mol_type = other DNA
gccggaagaaaaatgagctt

SEQ ID NO: 181467 - DNA, 20 bp, synthetic construct
  source 1..20: mol_type = other DNA
agccggaagaaaaatgagct

SEQ ID NO: 181468 - DNA, 20 bp, synthetic construct
  source 1..20: mol_type = other DNA
gagccggaagaaaaatgagc

SEQ ID NO: 181469 - DNA, 20 bp, synthetic construct
  source 1..20: mol_type = other DNA
tgagccggaagaaaaatgag

SEQ ID NO: 181470 - DNA, 20 bp, synthetic construct
  source 1..20: mol_type = other DNA
gtgagccggaagaaaaatga

SEQ ID NO: 181471 - DNA, 20 bp, synthetic construct
  source 1..20: mol_type = other DNA
tgtgagccggaagaaaaatg

SEQ ID NO: 181472 - DNA, 20 bp, synthetic construct
  source 1..20: mol_type = other DNA
atgtgagccggaagaaaaat

SEQ ID NO: 181473 - DNA, 20 bp, synthetic construct
  source 1..20: mol_type = other DNA
gatgtgagccggaagaaaaa

SEQ ID NO: 181474 - DNA, 20 bp, synthetic construct
  source 1..20: mol_type = other DNA
tgatgtgagccggaagaaaa

SEQ ID NO: 181475 - DNA, 20 bp, synthetic construct
  source 1..20: mol_type = other DNA
ttgatgtgagccggaagaaa

SEQ ID NO: 181476 - DNA, 20 bp, synthetic construct
  source 1..20: mol_type = other DNA
cttgatgtgagccggaagaa

SEQ ID NO: 181477 - DNA, 20 bp, synthetic construct
  source 1..20: mol_type = other DNA
gcttgatgtgagccggaaga

SEQ ID NO: 181478 - DNA, 20 bp, synthetic construct
  source 1..20: mol_type = other DNA
tgcttgatgtgagccggaag

SEQ ID NO: 181479 - DNA, 20 bp, synthetic construct
  source 1..20: mol_type = other DNA
atgcttgatgtgagccggaa

SEQ ID NO: 181480 - DNA, 20 bp, synthetic construct
  source 1..20: mol_type = other DNA
catgcttgatgtgagccgga

SEQ ID NO: 181481 - DNA, 20 bp, synthetic construct
  source 1..20: mol_type = other DNA
tcatgcttgatgtgagccgg

SEQ ID NO: 181482 - DNA, 20 bp, synthetic construct
  source 1..20: mol_type = other DNA
ttcatgcttgatgtgagccg

SEQ ID NO: 181483 - DNA, 20 bp, synthetic construct
  source 1..20: mol_type = other DNA
tttcatgcttgatgtgagcc

SEQ ID NO: 181484 - DNA, 20 bp, synthetic construct
  source 1..20: mol_type = other DNA
ttttcatgcttgatgtgagc

SEQ ID NO: 181485 - DNA, 20 bp, synthetic construct
  source 1..20: mol_type = other DNA
tttttcatgcttgatgtgag

SEQ ID NO: 181486 - DNA, 20 bp, synthetic construct
  source 1..20: mol_type = other DNA
atttttcatgcttgatgtga

SEQ ID NO: 181487 - DNA, 20 bp, synthetic construct
  source 1..20: mol_type = other DNA
catttttcatgcttgatgtg

SEQ ID NO: 181488 - DNA, 20 bp, synthetic construct
  source 1..20: mol_type = other DNA
acatttttcatgcttgatgt

SEQ ID NO: 181489 - DNA, 20 bp, synthetic construct
  source 1..20: mol_type = other DNA
aacatttttcatgcttgatg

SEQ ID NO: 181490 - DNA, 20 bp, synthetic construct
  source 1..20: mol_type = other DNA
gaacatttttcatgcttgat

SEQ ID NO: 181491 - DNA, 20 bp, synthetic construct
  source 1..20: mol_type = other DNA
tgaacatttttcatgcttga

SEQ ID NO: 181492 - DNA, 20 bp, synthetic construct
  source 1..20: mol_type = other DNA
gtgaacatttttcatgcttg

SEQ ID NO: 181493 - DNA, 20 bp, synthetic construct
  source 1..20: mol_type = other DNA
tgtgaacatttttcatgctt

SEQ ID NO: 181494 - DNA, 20 bp, synthetic construct
  source 1..20: mol_type = other DNA
gtgtgaacatttttcatgct

SEQ ID NO: 181495 - DNA, 20 bp, synthetic construct
  source 1..20: mol_type = other DNA
tgtgtgaacatttttcatgc

SEQ ID NO: 181496 - DNA, 20 bp, synthetic construct
  source 1..20: mol_type = other DNA
atgtgtgaacatttttcatg

SEQ ID NO: 181497 - DNA, 20 bp, synthetic construct
  source 1..20: mol_type = other DNA
tatgtgtgaacatttttcat

SEQ ID NO: 181498 - DNA, 20 bp, synthetic construct
  source 1..20: mol_type = other DNA
gtatgtgtgaacatttttca

SEQ ID NO: 181499 - DNA, 20 bp, synthetic construct
  source 1..20: mol_type = other DNA
ggtatgtgtgaacatttttc

SEQ ID NO: 181500 - DNA, 20 bp, synthetic construct
  source 1..20: mol_type = other DNA
gggtatgtgtgaacattttt

SEQ ID NO: 181501 - DNA, 20 bp, synthetic construct
  source 1..20: mol_type = other DNA
ggggtatgtgtgaacatttt

SEQ ID NO: 181502 - DNA, 20 bp, synthetic construct
  source 1..20: mol_type = other DNA
gggggtatgtgtgaacattt

SEQ ID NO: 181503 - DNA, 20 bp, synthetic construct
  source 1..20: mol_type = other DNA
ggggggtatgtgtgaacatt

SEQ ID NO: 181504 - DNA, 20 bp, synthetic construct
  source 1..20: mol_type = other DNA
tggggggtatgtgtgaacat

SEQ ID NO: 181505 - DNA, 20 bp, synthetic construct
  source 1..20: mol_type = other DNA
gtggggggtatgtgtgaaca

SEQ ID NO: 181506 - DNA, 20 bp, synthetic construct
  source 1..20: mol_type = other DNA
tgtggggggtatgtgtgaac

SEQ ID NO: 181507 - DNA, 20 bp, synthetic construct
  source 1..20: mol_type = other DNA
gtgtggggggtatgtgtgaa

SEQ ID NO: 181508 - DNA, 20 bp, synthetic construct
  source 1..20: mol_type = other DNA
tgtgtggggggtatgtgtga

SEQ ID NO: 181509 - DNA, 20 bp, synthetic construct
  source 1..20: mol_type = other DNA
gtgtgtggggggtatgtgtg

SEQ ID NO: 181510 - DNA, 20 bp, synthetic construct
  source 1..20: mol_type = other DNA
tgtgtgtggggggtatgtgt

SEQ ID NO: 181511 - DNA, 20 bp, synthetic construct
  source 1..20: mol_type = other DNA
gtgtgtgtggggggtatgtg

SEQ ID NO: 181512 - DNA, 20 bp, synthetic construct
  source 1..20: mol_type = other DNA
tgtgtgtgtggggggtatgt

SEQ ID NO: 181513 - DNA, 20 bp, synthetic construct
  source 1..20: mol_type = other DNA
atgtgtgtgtggggggtatg

SEQ ID NO: 181514 - DNA, 20 bp, synthetic construct
  source 1..20: mol_type = other DNA
catgtgtgtgtggggggtat

SEQ ID NO: 181515 - DNA, 20 bp, synthetic construct
  source 1..20: mol_type = other DNA
gcatgtgtgtgtggggggta

SEQ ID NO: 181516 - DNA, 20 bp, synthetic construct
  source 1..20: mol_type = other DNA
agcatgtgtgtgtggggggt

SEQ ID NO: 181517 - DNA, 20 bp, synthetic construct
  source 1..20: mol_type = other DNA
aagcatgtgtgtgtgggggg

SEQ ID NO: 181518 - DNA, 20 bp, synthetic construct
  source 1..20: mol_type = other DNA
aaagcatgtgtgtgtggggg

SEQ ID NO: 181519 - DNA, 20 bp, synthetic construct
  source 1..20: mol_type = other DNA
gaaagcatgtgtgtgtgggg

SEQ ID NO: 181520 - DNA, 20 bp, synthetic construct
  source 1..20: mol_type = other DNA
ggaaagcatgtgtgtgtggg

SEQ ID NO: 181521 - DNA, 20 bp, synthetic construct
  source 1..20: mol_type = other DNA
cggaaagcatgtgtgtgtgg

SEQ ID NO: 181522 - DNA, 20 bp, synthetic construct
  source 1..20: mol_type = other DNA
ccggaaagcatgtgtgtgtg

SEQ ID NO: 181523 - DNA, 20 bp, synthetic construct
  source 1..20: mol_type = other DNA
tccggaaagcatgtgtgtgt

SEQ ID NO: 181524 - DNA, 20 bp, synthetic construct
  source 1..20: mol_type = other DNA
ctccggaaagcatgtgtgtg

SEQ ID NO: 181525 - DNA, 20 bp, synthetic construct
  source 1..20: mol_type = other DNA
cctccggaaagcatgtgtgt

SEQ ID NO: 181526 - DNA, 20 bp, synthetic construct
  source 1..20: mol_type = other DNA
ccctccggaaagcatgtgtg

SEQ ID NO: 181527 - DNA, 20 bp, synthetic construct
  source 1..20: mol_type = other DNA
cccctccggaaagcatgtgt

SEQ ID NO: 181528 - DNA, 20 bp, synthetic construct
  source 1..20: mol_type = other DNA
acccctccggaaagcatgtg

SEQ ID NO: 181529 - DNA, 20 bp, synthetic construct
  source 1..20: mol_type = other DNA
gacccctccggaaagcatgt

SEQ ID NO: 181530 - DNA, 20 bp, synthetic construct
  source 1..20: mol_type = other DNA
ggacccctccggaaagcatg

SEQ ID NO: 181531 - DNA, 20 bp, synthetic construct
  source 1..20: mol_type = other DNA
tggacccctccggaaagcat

SEQ ID NO: 181532 - DNA, 20 bp, synthetic construct
  source 1..20: mol_type = other DNA
atggacccctccggaaagca

SEQ ID NO: 181533 - DNA, 20 bp, synthetic construct
  source 1..20: mol_type = other DNA
catggacccctccggaaagc

SEQ ID NO: 181534 - DNA, 20 bp, synthetic construct
  source 1..20: mol_type = other DNA
acatggacccctccggaaag

SEQ ID NO: 181535 - DNA, 20 bp, synthetic construct
  source 1..20: mol_type = other DNA
cacatggacccctccggaaa

SEQ ID NO: 181536 - DNA, 20 bp, synthetic construct
  source 1..20: mol_type = other DNA
ccacatggacccctccggaa

SEQ ID NO: 181537 - DNA, 20 bp, synthetic construct
  source 1..20: mol_type = other DNA
gccacatggacccctccgga

SEQ ID NO: 181538 - DNA, 20 bp, synthetic construct
  source 1..20: mol_type = other DNA
agccacatggacccctccgg

SEQ ID NO: 181539 - DNA, 20 bp, synthetic construct
  source 1..20: mol_type = other DNA
tagccacatggacccctccg

SEQ ID NO: 181540 - DNA, 20 bp, synthetic construct
  source 1..20: mol_type = other DNA
ctagccacatggacccctcc

SEQ ID NO: 181541 - DNA, 20 bp, synthetic construct
  source 1..20: mol_type = other DNA
tctagccacatggacccctc

SEQ ID NO: 181542 - DNA, 20 bp, synthetic construct
  source 1..20: mol_type = other DNA
ctctagccacatggacccct

SEQ ID NO: 181543 - DNA, 20 bp, synthetic construct
  source 1..20: mol_type = other DNA
cctctagccacatggacccc

SEQ ID NO: 181544 - DNA, 20 bp, synthetic construct
  source 1..20: mol_type = other DNA
gcctctagccacatggaccc

SEQ ID NO: 181545 - DNA, 20 bp, synthetic construct
  source 1..20: mol_type = other DNA
agcctctagccacatggacc

SEQ ID NO: 181546 - DNA, 20 bp, synthetic construct
  source 1..20: mol_type = other DNA
cagcctctagccacatggac

SEQ ID NO: 181547 - DNA, 20 bp, synthetic construct
  source 1..20: mol_type = other DNA
ccagcctctagccacatgga

SEQ ID NO: 181548 - DNA, 20 bp, synthetic construct
  source 1..20: mol_type = other DNA
tccagcctctagccacatgg

SEQ ID NO: 181549 - DNA, 20 bp, synthetic construct
  source 1..20: mol_type = other DNA
ttccagcctctagccacatg

SEQ ID NO: 181550 - DNA, 20 bp, synthetic construct
  source 1..20: mol_type = other DNA
cttccagcctctagccacat

SEQ ID NO: 181551 - DNA, 20 bp, synthetic construct
  source 1..20: mol_type = other DNA
tcttccagcctctagccaca

SEQ ID NO: 181552 - DNA, 20 bp, synthetic construct
  source 1..20: mol_type = other DNA
atcttccagcctctagccac

SEQ ID NO: 181553 - DNA, 20 bp, synthetic construct
  source 1..20: mol_type = other DNA
catcttccagcctctagcca

SEQ ID NO: 181554 - DNA, 20 bp, synthetic construct
  source 1..20: mol_type = other DNA
acatcttccagcctctagcc

SEQ ID NO: 181555 - DNA, 20 bp, synthetic construct
  source 1..20: mol_type = other DNA
cacatcttccagcctctagc

SEQ ID NO: 181556 - DNA, 20 bp, synthetic construct
  source 1..20: mol_type = other DNA
ccacatcttccagcctctag

SEQ ID NO: 181557 - DNA, 20 bp, synthetic construct
  source 1..20: mol_type = other DNA
tccacatcttccagcctcta

SEQ ID NO: 181558 - DNA, 20 bp, synthetic construct
  source 1..20: mol_type = other DNA
atccacatcttccagcctct

SEQ ID NO: 181559 - DNA, 20 bp, synthetic construct
  source 1..20: mol_type = other DNA
catccacatcttccagcctc

SEQ ID NO: 181560 - DNA, 20 bp, synthetic construct
  source 1..20: mol_type = other DNA
tcatccacatcttccagcct

SEQ ID NO: 181561 - DNA, 20 bp, synthetic construct
  source 1..20: mol_type = other DNA
ctcatccacatcttccagcc

SEQ ID NO: 181562 - DNA, 20 bp, synthetic construct
  source 1..20: mol_type = other DNA
tctcatccacatcttccagc

SEQ ID NO: 181563 - DNA, 20 bp, synthetic construct
  source 1..20: mol_type = other DNA
ctctcatccacatcttccag

SEQ ID NO: 181564 - DNA, 20 bp, synthetic construct
  source 1..20: mol_type = other DNA
cctctcatccacatcttcca

SEQ ID NO: 181565 - DNA, 20 bp, synthetic construct
  source 1..20: mol_type = other DNA
tcctctcatccacatcttcc

SEQ ID NO: 181566 - DNA, 20 bp, synthetic construct
  source 1..20: mol_type = other DNA
ctcctctcatccacatcttc

SEQ ID NO: 181567 - DNA, 20 bp, synthetic construct
  source 1..20: mol_type = other DNA
gctcctctcatccacatctt

SEQ ID NO: 181568 - DNA, 20 bp, synthetic construct
  source 1..20: mol_type = other DNA
ggctcctctcatccacatct

SEQ ID NO: 181569 - DNA, 20 bp, synthetic construct
  source 1..20: mol_type = other DNA
aggctcctctcatccacatc

SEQ ID NO: 181570 - DNA, 20 bp, synthetic construct
  source 1..20: mol_type = other DNA
caggctcctctcatccacat

SEQ ID NO: 181571 - DNA, 20 bp, synthetic construct
  source 1..20: mol_type = other DNA
ccaggctcctctcatccaca

SEQ ID NO: 181572 - DNA, 20 bp, synthetic construct
  source 1..20: mol_type = other DNA
gccaggctcctctcatccac

SEQ ID NO: 181573 - DNA, 20 bp, synthetic construct
  source 1..20: mol_type = other DNA
tgccaggctcctctcatcca

SEQ ID NO: 181574 - DNA, 20 bp, synthetic construct
  source 1..20: mol_type = other DNA
ctgccaggctcctctcatcc

SEQ ID NO: 181575 - DNA, 20 bp, synthetic construct
  source 1..20: mol_type = other DNA
cctgccaggctcctctcatc

SEQ ID NO: 181576 - DNA, 20 bp, synthetic construct
  source 1..20: mol_type = other DNA
acctgccaggctcctctcat

SEQ ID NO: 181577 - DNA, 20 bp, synthetic construct
  source 1..20: mol_type = other DNA
tacctgccaggctcctctca

SEQ ID NO: 181578 - DNA, 20 bp, synthetic construct
  source 1..20: mol_type = other DNA
ttacctgccaggctcctctc

SEQ ID NO: 181579 - DNA, 20 bp, synthetic construct
  source 1..20: mol_type = other DNA
cttacctgccaggctcctct

SEQ ID NO: 181580 - DNA, 20 bp, synthetic construct
  source 1..20: mol_type = other DNA
gcttacctgccaggctcctc

SEQ ID NO: 181581 - DNA, 20 bp, synthetic construct
  source 1..20: mol_type = other DNA
ggcttacctgccaggctcct

SEQ ID NO: 181582 - DNA, 20 bp, synthetic construct
  source 1..20: mol_type = other DNA
gggcttacctgccaggctcc

SEQ ID NO: 181583 - DNA, 20 bp, synthetic construct
  source 1..20: mol_type = other DNA
tgggcttacctgccaggctc

SEQ ID NO: 181584 - DNA, 20 bp, synthetic construct
  source 1..20: mol_type = other DNA
ctgggcttacctgccaggct

SEQ ID NO: 181585 - DNA, 20 bp, synthetic construct
  source 1..20: mol_type = other DNA
cctgggcttacctgccaggc

SEQ ID NO: 181586 - DNA, 20 bp, synthetic construct
  source 1..20: mol_type = other DNA
ccctgggcttacctgccagg

SEQ ID NO: 181587 - DNA, 20 bp, synthetic construct
  source 1..20: mol_type = other DNA
tccctgggcttacctgccag

SEQ ID NO: 181588 - DNA, 20 bp, synthetic construct
  source 1..20: mol_type = other DNA
ttccctgggcttacctgcca

SEQ ID NO: 181589 - DNA, 20 bp, synthetic construct
  source 1..20: mol_type = other DNA
cttccctgggcttacctgcc

SEQ ID NO: 181590 - DNA, 20 bp, synthetic construct
  source 1..20: mol_type = other DNA
tcttccctgggcttacctgc

SEQ ID NO: 181591 - DNA, 20 bp, synthetic construct
  source 1..20: mol_type = other DNA
atcttccctgggcttacctg

SEQ ID NO: 181592 - DNA, 20 bp, synthetic construct
  source 1..20: mol_type = other DNA
catcttccctgggcttacct

SEQ ID NO: 181593 - DNA, 20 bp, synthetic construct
  source 1..20: mol_type = other DNA
tcatcttccctgggcttacc

SEQ ID NO: 181594 - DNA, 20 bp, synthetic construct
  source 1..20: mol_type = other DNA
gtcatcttccctgggcttac

SEQ ID NO: 181595 - DNA, 20 bp, synthetic construct
  source 1..20: mol_type = other DNA
tgtcatcttccctgggctta

SEQ ID NO: 181596 - DNA, 20 bp, synthetic construct
  source 1..20: mol_type = other DNA
atgtcatcttccctgggctt

SEQ ID NO: 181597 - DNA, 20 bp, synthetic construct
  source 1..20: mol_type = other DNA
aatgtcatcttccctgggct

SEQ ID NO: 181598 - DNA, 20 bp, synthetic construct
  source 1..20: mol_type = other DNA
gaatgtcatcttccctgggc

SEQ ID NO: 181599 - DNA, 20 bp, synthetic construct
  source 1..20: mol_type = other DNA
tgaatgtcatcttccctggg

SEQ ID NO: 181600 - DNA, 20 bp, synthetic construct
  source 1..20: mol_type = other DNA
ctgaatgtcatcttccctgg

SEQ ID NO: 181601 - DNA, 20 bp, synthetic construct
  source 1..20: mol_type = other DNA
gctgaatgtcatcttccctg

SEQ ID NO: 181602 - DNA, 20 bp, synthetic construct
  source 1..20: mol_type = other DNA
agctgaatgtcatcttccct

SEQ ID NO: 181603 - DNA, 20 bp, synthetic construct
  source 1..20: mol_type = other DNA
aagctgaatgtcatcttccc

SEQ ID NO: 181604 - DNA, 20 bp, synthetic construct
  source 1..20: mol_type = other DNA
gaagctgaatgtcatcttcc

SEQ ID NO: 181605 - DNA, 20 bp, synthetic construct
  source 1..20: mol_type = other DNA
ggaagctgaatgtcatcttc

SEQ ID NO: 181606 - DNA, 20 bp, synthetic construct
  source 1..20: mol_type = other DNA
gggaagctgaatgtcatctt

SEQ ID NO: 181607 - DNA, 20 bp, synthetic construct
  source 1..20: mol_type = other DNA
tgggaagctgaatgtcatct

SEQ ID NO: 181608 - DNA, 20 bp, synthetic construct
  source 1..20: mol_type = other DNA
ctgggaagctgaatgtcatc

SEQ ID NO: 181609 - DNA, 20 bp, synthetic construct
  source 1..20: mol_type = other DNA
tctgggaagctgaatgtcat

SEQ ID NO: 181610 - DNA, 20 bp, synthetic construct
  source 1..20: mol_type = other DNA
gtctgggaagctgaatgtca

SEQ ID NO: 181611 - DNA, 20 bp, synthetic construct
  source 1..20: mol_type = other DNA
tgtctgggaagctgaatgtc

SEQ ID NO: 181612 - DNA, 20 bp, synthetic construct
  source 1..20: mol_type = other DNA
ctgtctgggaagctgaatgt

SEQ ID NO: 181613 - DNA, 20 bp, synthetic construct
  source 1..20: mol_type = other DNA
gctgtctgggaagctgaatg

SEQ ID NO: 181614 - DNA, 20 bp, synthetic construct
  source 1..20: mol_type = other DNA
tgctgtctgggaagctgaat

SEQ ID NO: 181615 - DNA, 20 bp, synthetic construct
  source 1..20: mol_type = other DNA
atgctgtctgggaagctgaa

SEQ ID NO: 181616 - DNA, 20 bp, synthetic construct
  source 1..20: mol_type = other DNA
gatgctgtctgggaagctga

SEQ ID NO: 181617 - DNA, 20 bp, synthetic construct
  source 1..20: mol_type = other DNA
agatgctgtctgggaagctg

SEQ ID NO: 181618 - DNA, 20 bp, synthetic construct
  source 1..20: mol_type = other DNA
tagatgctgtctgggaagct

SEQ ID NO: 181619 - DNA, 20 bp, synthetic construct
  source 1..20: mol_type = other DNA
gtagatgctgtctgggaagc

SEQ ID NO: 181620 - DNA, 20 bp, synthetic construct
  source 1..20: mol_type = other DNA
tgtagatgctgtctgggaag

SEQ ID NO: 181621 - DNA, 20 bp, synthetic construct
  source 1..20: mol_type = other DNA
ctgtagatgctgtctgggaa

SEQ ID NO: 181622 - DNA, 20 bp, synthetic construct
  source 1..20: mol_type = other DNA
cctgtagatgctgtctggga

SEQ ID NO: 181623 - DNA, 20 bp, synthetic construct
  source 1..20: mol_type = other DNA
ccctgtagatgctgtctggg

SEQ ID NO: 181624 - DNA, 20 bp, synthetic construct
  source 1..20: mol_type = other DNA
tccctgtagatgctgtctgg

SEQ ID NO: 181625 - DNA, 20 bp, synthetic construct
  source 1..20: mol_type = other DNA
ctccctgtagatgctgtctg

SEQ ID NO: 181626 - DNA, 20 bp, synthetic construct
  source 1..20: mol_type = other DNA
tctccctgtagatgctgtct

SEQ ID NO: 181627 - DNA, 20 bp, synthetic construct
  source 1..20: mol_type = other DNA
ttctccctgtagatgctgtc

SEQ ID NO: 181628 - DNA, 20 bp, synthetic construct
  source 1..20: mol_type = other DNA
tttctccctgtagatgctgt

SEQ ID NO: 181629 - DNA, 20 bp, synthetic construct
  source 1..20: mol_type = other DNA
atttctccctgtagatgctg

SEQ ID NO: 181630 - DNA, 20 bp, synthetic construct
  source 1..20: mol_type = other DNA
aatttctccctgtagatgct

SEQ ID NO: 181631 - DNA, 20 bp, synthetic construct
  source 1..20: mol_type = other DNA
aaatttctccctgtagatgc

SEQ ID NO: 181632 - DNA, 20 bp, synthetic construct
  source 1..20: mol_type = other DNA
taaatttctccctgtagatg

SEQ ID NO: 181633 - DNA, 20 bp, synthetic construct
  source 1..20: mol_type = other DNA
ttaaatttctccctgtagat

SEQ ID NO: 181634 - DNA, 20 bp, synthetic construct
  source 1..20: mol_type = other DNA
attaaatttctccctgtaga

SEQ ID NO: 181635 - DNA, 20 bp, synthetic construct
  source 1..20: mol_type = other DNA
aattaaatttctccctgtag

SEQ ID NO: 181636 - DNA, 20 bp, synthetic construct
  source 1..20: mol_type = other DNA
taattaaatttctccctgta

SEQ ID NO: 181637 - DNA, 20 bp, synthetic construct
  source 1..20: mol_type = other DNA
ttaattaaatttctccctgt

SEQ ID NO: 181638 - DNA, 20 bp, synthetic construct
  source 1..20: mol_type = other DNA
tttaattaaatttctccctg

SEQ ID NO: 181639 - DNA, 20 bp, synthetic construct
  source 1..20: mol_type = other DNA
ttttaattaaatttctccct

SEQ ID NO: 181640 - DNA, 20 bp, synthetic construct
  source 1..20: mol_type = other DNA
cttttaattaaatttctccc

SEQ ID NO: 181641 - DNA, 20 bp, synthetic construct
  source 1..20: mol_type = other DNA
acttttaattaaatttctcc

SEQ ID NO: 181642 - DNA, 20 bp, synthetic construct
  source 1..20: mol_type = other DNA
cacttttaattaaatttctc

SEQ ID NO: 181643 - DNA, 20 bp, synthetic construct
  source 1..20: mol_type = other DNA
ccacttttaattaaatttct

SEQ ID NO: 181644 - DNA, 20 bp, synthetic construct
  source 1..20: mol_type = other DNA
cccacttttaattaaatttc

SEQ ID NO: 181645 - DNA, 20 bp, synthetic construct
  source 1..20: mol_type = other DNA
ccccacttttaattaaattt

SEQ ID NO: 181646 - DNA, 20 bp, synthetic construct
  source 1..20: mol_type = other DNA
gccccacttttaattaaatt

SEQ ID NO: 181647 - DNA, 20 bp, synthetic construct
  source 1..20: mol_type = other DNA
cgccccacttttaattaaat

SEQ ID NO: 181648 - DNA, 20 bp, synthetic construct
  source 1..20: mol_type = other DNA
ccgccccacttttaattaaa

SEQ ID NO: 181649 - DNA, 20 bp, synthetic construct
  source 1..20: mol_type = other DNA
accgccccacttttaattaa

SEQ ID NO: 181650 - DNA, 20 bp, synthetic construct
  source 1..20: mol_type = other DNA
aaccgccccacttttaatta

SEQ ID NO: 181651 - DNA, 20 bp, synthetic construct
  source 1..20: mol_type = other DNA
aaaccgccccacttttaatt

SEQ ID NO: 181652 - DNA, 20 bp, synthetic construct
  source 1..20: mol_type = other DNA
gaaaccgccccacttttaat

SEQ ID NO: 181653 - DNA, 20 bp, synthetic construct
  source 1..20: mol_type = other DNA
ggaaaccgccccacttttaa

SEQ ID NO: 181654 - DNA, 20 bp, synthetic construct
  source 1..20: mol_type = other DNA
gggaaaccgccccactttta

SEQ ID NO: 181655 - DNA, 20 bp, synthetic construct
  source 1..20: mol_type = other DNA
agggaaaccgccccactttt

SEQ ID NO: 181656 - DNA, 20 bp, synthetic construct
  source 1..20: mol_type = other DNA
cagggaaaccgccccacttt

SEQ ID NO: 181657 - DNA, 20 bp, synthetic construct
  source 1..20: mol_type = other DNA
tcagggaaaccgccccactt

SEQ ID NO: 181658 - DNA, 20 bp, synthetic construct
  source 1..20: mol_type = other DNA
ctcagggaaaccgccccact

SEQ ID NO: 181659 - DNA, 20 bp, synthetic construct
  source 1..20: mol_type = other DNA
gctcagggaaaccgccccac

SEQ ID NO: 181660 - DNA, 20 bp, synthetic construct
  source 1..20: mol_type = other DNA
tgctcagggaaaccgcccca

SEQ ID NO: 181661 - DNA, 20 bp, synthetic construct
  source 1..20: mol_type = other DNA
ttgctcagggaaaccgcccc

SEQ ID NO: 181662 - DNA, 20 bp, synthetic construct
  source 1..20: mol_type = other DNA
cttgctcagggaaaccgccc

SEQ ID NO: 181663 - DNA, 20 bp, synthetic construct
  source 1..20: mol_type = other DNA
ccttgctcagggaaaccgcc

SEQ ID NO: 181664 - DNA, 20 bp, synthetic construct
  source 1..20: mol_type = other DNA
gccttgctcagggaaaccgc

SEQ ID NO: 181665 - DNA, 20 bp, synthetic construct
  source 1..20: mol_type = other DNA
tgccttgctcagggaaaccg

SEQ ID NO: 181666 - DNA, 20 bp, synthetic construct
  source 1..20: mol_type = other DNA
ctgccttgctcagggaaacc

SEQ ID NO: 181667 - DNA, 20 bp, synthetic construct
  source 1..20: mol_type = other DNA
tctgccttgctcagggaaac

SEQ ID NO: 181668 - DNA, 20 bp, synthetic construct
  source 1..20: mol_type = other DNA
gtctgccttgctcagggaaa

SEQ ID NO: 181669 - DNA, 20 bp, synthetic construct
  source 1..20: mol_type = other DNA
tgtctgccttgctcagggaa

SEQ ID NO: 181670 - DNA, 20 bp, synthetic construct
  source 1..20: mol_type = other DNA
ttgtctgccttgctcaggga

SEQ ID NO: 181671 - DNA, 20 bp, synthetic construct
  source 1..20: mol_type = other DNA
tttgtctgccttgctcaggg

SEQ ID NO: 181672 - DNA, 20 bp, synthetic construct
  source 1..20: mol_type = other DNA
ctttgtctgccttgctcagg

SEQ ID NO: 181673 - DNA, 20 bp, synthetic construct
  source 1..20: mol_type = other DNA
actttgtctgccttgctcag

SEQ ID NO: 181674 - DNA, 20 bp, synthetic construct
  source 1..20: mol_type = other DNA
gactttgtctgccttgctca

SEQ ID NO: 181675 - DNA, 20 bp, synthetic construct
  source 1..20: mol_type = other DNA
tgactttgtctgccttgctc

SEQ ID NO: 181676 - DNA, 20 bp, synthetic construct
  source 1..20: mol_type = other DNA
ctgactttgtctgccttgct

SEQ ID NO: 181677 - DNA, 20 bp, synthetic construct
  source 1..20: mol_type = other DNA
gctgactttgtctgccttgc

SEQ ID NO: 181678 - DNA, 20 bp, synthetic construct
  source 1..20: mol_type = other DNA
ggctgactttgtctgccttg

SEQ ID NO: 181679 - DNA, 20 bp, synthetic construct
  source 1..20: mol_type = other DNA
gggctgactttgtctgcctt

SEQ ID NO: 181680 - DNA, 20 bp, synthetic construct
  source 1..20: mol_type = other DNA
agggctgactttgtctgcct

SEQ ID NO: 181681 - DNA, 20 bp, synthetic construct
  source 1..20: mol_type = other DNA
gagggctgactttgtctgcc

SEQ ID NO: 181682 - DNA, 20 bp, synthetic construct
  source 1..20: mol_type = other DNA
agagggctgactttgtctgc

SEQ ID NO: 181683 - DNA, 20 bp, synthetic construct
  source 1..20: mol_type = other DNA
tagagggctgactttgtctg

SEQ ID NO: 181684 - DNA, 20 bp, synthetic construct
  source 1..20: mol_type = other DNA
gtagagggctgactttgtct

SEQ ID NO: 181685 - DNA, 20 bp, synthetic construct
  source 1..20: mol_type = other DNA
agtagagggctgactttgtc

SEQ ID NO: 181686 - DNA, 20 bp, synthetic construct
  source 1..20: mol_type = other DNA
cagtagagggctgactttgt

SEQ ID NO: 181687 - DNA, 20 bp, synthetic construct
  source 1..20: mol_type = other DNA
acagtagagggctgactttg

SEQ ID NO: 181688 - DNA, 20 bp, synthetic construct
  source 1..20: mol_type = other DNA
aacagtagagggctgacttt

SEQ ID NO: 181689 - DNA, 20 bp, synthetic construct
  source 1..20: mol_type = other DNA
taacagtagagggctgactt

SEQ ID NO: 181690 - DNA, 20 bp, synthetic construct
  source 1..20: mol_type = other DNA
ttaacagtagagggctgact

SEQ ID NO: 181691 - DNA, 20 bp, synthetic construct
  source 1..20: mol_type = other DNA
cttaacagtagagggctgac

SEQ ID NO: 181692 - DNA, 20 bp, synthetic construct
  source 1..20: mol_type = other DNA
tcttaacagtagagggctga

SEQ ID NO: 181693 - DNA, 20 bp, synthetic construct
  source 1..20: mol_type = other DNA
ttcttaacagtagagggctg

SEQ ID NO: 181694 - DNA, 20 bp, synthetic construct
  source 1..20: mol_type = other DNA
tttcttaacagtagagggct

SEQ ID NO: 181695 - DNA, 20 bp, synthetic construct
  source 1..20: mol_type = other DNA
ttttcttaacagtagagggc

SEQ ID NO: 181696 - DNA, 20 bp, synthetic construct
  source 1..20: mol_type = other DNA
tttttcttaacagtagaggg

SEQ ID NO: 181697 - DNA, 20 bp, synthetic construct
  source 1..20: mol_type = other DNA
ctttttcttaacagtagagg

SEQ ID NO: 181698 - DNA, 20 bp, synthetic construct
  source 1..20: mol_type = other DNA
cctttttcttaacagtagag

SEQ ID NO: 181699 - DNA, 20 bp, synthetic construct
  source 1..20: mol_type = other DNA
ccctttttcttaacagtaga

SEQ ID NO: 181700 - DNA, 20 bp, synthetic construct
  source 1..20: mol_type = other DNA
accctttttcttaacagtag

SEQ ID NO: 181701 - DNA, 20 bp, synthetic construct
  source 1..20: mol_type = other DNA
gaccctttttcttaacagta

SEQ ID NO: 181702 - DNA, 20 bp, synthetic construct
  source 1..20: mol_type = other DNA
tgaccctttttcttaacagt

SEQ ID NO: 181703 - DNA, 20 bp, synthetic construct
  source 1..20: mol_type = other DNA
gtgaccctttttcttaacag

SEQ ID NO: 181704 - DNA, 20 bp, synthetic construct
  source 1..20: mol_type = other DNA
tgtgaccctttttcttaaca

SEQ ID NO: 181705 - DNA, 20 bp, synthetic construct
  source 1..20: mol_type = other DNA
ctgtgaccctttttcttaac

SEQ ID NO: 181706 - DNA, 20 bp, synthetic construct
  source 1..20: mol_type = other DNA
actgtgaccctttttcttaa

SEQ ID NO: 181707 - DNA, 20 bp, synthetic construct
  source 1..20: mol_type = other DNA
cactgtgaccctttttctta

SEQ ID NO: 181708 - DNA, 20 bp, synthetic construct
  source 1..20: mol_type = other DNA
tcactgtgaccctttttctt

SEQ ID NO: 181709 - DNA, 20 bp, synthetic construct
  source 1..20: mol_type = other DNA
ctcactgtgaccctttttct

SEQ ID NO: 181710 - DNA, 20 bp, synthetic construct
  source 1..20: mol_type = other DNA
tctcactgtgaccctttttc

SEQ ID NO: 181711 - DNA, 20 bp, synthetic construct
  source 1..20: mol_type = other DNA
ctctcactgtgacccttttt

SEQ ID NO: 181712 - DNA, 20 bp, synthetic construct
  source 1..20: mol_type = other DNA
cctctcactgtgaccctttt

SEQ ID NO: 181713 - DNA, 20 bp, synthetic construct
  source 1..20: mol_type = other DNA
ccctctcactgtgacccttt

SEQ ID NO: 181714 - DNA, 20 bp, synthetic construct
  source 1..20: mol_type = other DNA
cccctctcactgtgaccctt

SEQ ID NO: 181715 - DNA, 20 bp, synthetic construct
  source 1..20: mol_type = other DNA
tcccctctcactgtgaccct

SEQ ID NO: 181716 - DNA, 20 bp, synthetic construct
  source 1..20: mol_type = other DNA
ctcccctctcactgtgaccc

SEQ ID NO: 181717 - DNA, 20 bp, synthetic construct
  source 1..20: mol_type = other DNA
cctcccctctcactgtgacc

SEQ ID NO: 181718 - DNA, 20 bp, synthetic construct
  source 1..20: mol_type = other DNA
acctcccctctcactgtgac

SEQ ID NO: 181719 - DNA, 20 bp, synthetic construct
  source 1..20: mol_type = other DNA
cacctcccctctcactgtga

SEQ ID NO: 181720 - DNA, 20 bp, synthetic construct
  source 1..20: mol_type = other DNA
tcacctcccctctcactgtg

SEQ ID NO: 181721 - DNA, 20 bp, synthetic construct
  source 1..20: mol_type = other DNA
ctcacctcccctctcactgt

SEQ ID NO: 181722 - DNA, 20 bp, synthetic construct
  source 1..20: mol_type = other DNA
cctcacctcccctctcactg

SEQ ID NO: 181723 - DNA, 20 bp, synthetic construct
  source 1..20: mol_type = other DNA
tcctcacctcccctctcact

SEQ ID NO: 181724 - DNA, 20 bp, synthetic construct
  source 1..20: mol_type = other DNA
ctcctcacctcccctctcac

SEQ ID NO: 181725 - DNA, 20 bp, synthetic construct
  source 1..20: mol_type = other DNA
tctcctcacctcccctctca

SEQ ID NO: 181726 - DNA, 20 bp, synthetic construct
  source 1..20: mol_type = other DNA
gtctcctcacctcccctctc

SEQ ID NO: 181727 - DNA, 20 bp, synthetic construct
  source 1..20: mol_type = other DNA
agtctcctcacctcccctct

SEQ ID NO: 181728 - DNA, 20 bp, synthetic construct
  source 1..20: mol_type = other DNA
cagtctcctcacctcccctc

SEQ ID NO: 181729 - DNA, 20 bp, synthetic construct
  source 1..20: mol_type = other DNA
tcagtctcctcacctcccct

SEQ ID NO: 181730 - DNA, 20 bp, synthetic construct
  source 1..20: mol_type = other DNA
ctcagtctcctcacctcccc

SEQ ID NO: 181731 - DNA, 20 bp, synthetic construct
  source 1..20: mol_type = other DNA
actcagtctcctcacctccc

SEQ ID NO: 181732 - DNA, 20 bp, synthetic construct
  source 1..20: mol_type = other DNA
gactcagtctcctcacctcc

SEQ ID NO: 181733 - DNA, 20 bp, synthetic construct
  source 1..20: mol_type = other DNA
agactcagtctcctcacctc

SEQ ID NO: 181734 - DNA, 20 bp, synthetic construct
  source 1..20: mol_type = other DNA
cagactcagtctcctcacct

SEQ ID NO: 181735 - DNA, 20 bp, synthetic construct
  source 1..20: mol_type = other DNA
acagactcagtctcctcacc

SEQ ID NO: 181736 - DNA, 20 bp, synthetic construct
  source 1..20: mol_type = other DNA
tacagactcagtctcctcac

SEQ ID NO: 181737 - DNA, 20 bp, synthetic construct
  source 1..20: mol_type = other DNA
atacagactcagtctcctca

SEQ ID NO: 181738 - DNA, 20 bp, synthetic construct
  source 1..20: mol_type = other DNA
aatacagactcagtctcctc

SEQ ID NO: 181739 - DNA, 20 bp, synthetic construct
  source 1..20: mol_type = other DNA
aaatacagactcagtctcct

SEQ ID NO: 181740 - DNA, 20 bp, synthetic construct
  source 1..20: mol_type = other DNA
aaaatacagactcagtctcc

SEQ ID NO: 181741 - DNA, 20 bp, synthetic construct
  source 1..20: mol_type = other DNA
gaaaatacagactcagtctc

SEQ ID NO: 181742 - DNA, 20 bp, synthetic construct
  source 1..20: mol_type = other DNA
agaaaatacagactcagtct

SEQ ID NO: 181743 - DNA, 20 bp, synthetic construct
  source 1..20: mol_type = other DNA
tagaaaatacagactcagtc

SEQ ID NO: 181744 - DNA, 20 bp, synthetic construct
  source 1..20: mol_type = other DNA
ctagaaaatacagactcagt

SEQ ID NO: 181745 - DNA, 20 bp, synthetic construct
  source 1..20: mol_type = other DNA
actagaaaatacagactcag

SEQ ID NO: 181746 - DNA, 20 bp, synthetic construct
  source 1..20: mol_type = other DNA
gactagaaaatacagactca

SEQ ID NO: 181747 - DNA, 20 bp, synthetic construct
  source 1..20: mol_type = other DNA
agactagaaaatacagactc

SEQ ID NO: 181748 - DNA, 20 bp, synthetic construct
  source 1..20: mol_type = other DNA
cagactagaaaatacagact

SEQ ID NO: 181749 - DNA, 20 bp, synthetic construct
  source 1..20: mol_type = other DNA
acagactagaaaatacagac

SEQ ID NO: 181750 - DNA, 20 bp, synthetic construct
  source 1..20: mol_type = other DNA
aacagactagaaaatacaga

SEQ ID NO: 181751 - DNA, 20 bp, synthetic construct
  source 1..20: mol_type = other DNA
caacagactagaaaatacag

SEQ ID NO: 181752 - DNA, 20 bp, synthetic construct
  source 1..20: mol_type = other DNA
ccaacagactagaaaataca

SEQ ID NO: 181753 - DNA, 20 bp, synthetic construct
  source 1..20: mol_type = other DNA
cccaacagactagaaaatac

SEQ ID NO: 181754 - DNA, 20 bp, synthetic construct
  source 1..20: mol_type = other DNA
gcccaacagactagaaaata

SEQ ID NO: 181755 - DNA, 20 bp, synthetic construct
  source 1..20: mol_type = other DNA
agcccaacagactagaaaat

SEQ ID NO: 181756 - DNA, 20 bp, synthetic construct
  source 1..20: mol_type = other DNA
tagcccaacagactagaaaa

SEQ ID NO: 181757 - DNA, 20 bp, synthetic construct
  source 1..20: mol_type = other DNA
gtagcccaacagactagaaa

SEQ ID NO: 181758 - DNA, 20 bp, synthetic construct
  source 1..20: mol_type = other DNA
tgtagcccaacagactagaa

SEQ ID NO: 181759 - DNA, 20 bp, synthetic construct
  source 1..20: mol_type = other DNA
gtgtagcccaacagactaga

SEQ ID NO: 181760 - DNA, 20 bp, synthetic construct
  source 1..20: mol_type = other DNA
agtgtagcccaacagactag

SEQ ID NO: 181761 - DNA, 20 bp, synthetic construct
  source 1..20: mol_type = other DNA
tagtgtagcccaacagacta

SEQ ID NO: 181762 - DNA, 20 bp, synthetic construct
  source 1..20: mol_type = other DNA
gtagtgtagcccaacagact

SEQ ID NO: 181763 - DNA, 20 bp, synthetic construct
  source 1..20: mol_type = other DNA
ggtagtgtagcccaacagac

SEQ ID NO: 181764 - DNA, 20 bp, synthetic construct
  source 1..20: mol_type = other DNA
aggtagtgtagcccaacaga

SEQ ID NO: 181765 - DNA, 20 bp, synthetic construct
  source 1..20: mol_type = other DNA
caggtagtgtagcccaacag

SEQ ID NO: 181766 - DNA, 20 bp, synthetic construct
  source 1..20: mol_type = other DNA
tcaggtagtgtagcccaaca

SEQ ID NO: 181767 - DNA, 20 bp, synthetic construct
  source 1..20: mol_type = other DNA
atcaggtagtgtagcccaac

SEQ ID NO: 181768 - DNA, 20 bp, synthetic construct
  source 1..20: mol_type = other DNA
gatcaggtagtgtagcccaa

SEQ ID NO: 181769 - DNA, 20 bp, synthetic construct
  source 1..20: mol_type = other DNA
ggatcaggtagtgtagccca

SEQ ID NO: 181770 - DNA, 20 bp, synthetic construct
  source 1..20: mol_type = other DNA
gggatcaggtagtgtagccc

SEQ ID NO: 181771 - DNA, 20 bp, synthetic construct
  source 1..20: mol_type = other DNA
ggggatcaggtagtgtagcc

SEQ ID NO: 181772 - DNA, 20 bp, synthetic construct
  source 1..20: mol_type = other DNA
gggggatcaggtagtgtagc

SEQ ID NO: 181773 - DNA, 20 bp, synthetic construct
  source 1..20: mol_type = other DNA
agggggatcaggtagtgtag

SEQ ID NO: 181774 - DNA, 20 bp, synthetic construct
  source 1..20: mol_type = other DNA
aagggggatcaggtagtgta

SEQ ID NO: 181775 - DNA, 20 bp, synthetic construct
  source 1..20: mol_type = other DNA
gaagggggatcaggtagtgt

SEQ ID NO: 181776 - DNA, 20 bp, synthetic construct
  source 1..20: mol_type = other DNA
ggaagggggatcaggtagtg

SEQ ID NO: 181777 - DNA, 20 bp, synthetic construct
  source 1..20: mol_type = other DNA
aggaagggggatcaggtagt

SEQ ID NO: 181778 - DNA, 20 bp, synthetic construct
  source 1..20: mol_type = other DNA
gaggaagggggatcaggtag

SEQ ID NO: 181779 - DNA, 20 bp, synthetic construct
  source 1..20: mol_type = other DNA
tgaggaagggggatcaggta

SEQ ID NO: 181780 - DNA, 20 bp, synthetic construct
  source 1..20: mol_type = other DNA
ttgaggaagggggatcaggt

SEQ ID NO: 181781 - DNA, 20 bp, synthetic construct
  source 1..20: mol_type = other DNA
tttgaggaagggggatcagg

SEQ ID NO: 181782 - DNA, 20 bp, synthetic construct
  source 1..20: mol_type = other DNA
ttttgaggaagggggatcag

SEQ ID NO: 181783 - DNA, 20 bp, synthetic construct
  source 1..20: mol_type = other DNA
tttttgaggaagggggatca

SEQ ID NO: 181784 - DNA, 20 bp, synthetic construct
  source 1..20: mol_type = other DNA
atttttgaggaagggggatc

SEQ ID NO: 181785 - DNA, 20 bp, synthetic construct
  source 1..20: mol_type = other DNA
gatttttgaggaagggggat

SEQ ID NO: 181786 - DNA, 20 bp, synthetic construct
  source 1..20: mol_type = other DNA
ggatttttgaggaaggggga

SEQ ID NO: 181787 - DNA, 20 bp, synthetic construct
  source 1..20: mol_type = other DNA
tggatttttgaggaaggggg

SEQ ID NO: 181788 - DNA, 20 bp, synthetic construct
  source 1..20: mol_type = other DNA
gtggatttttgaggaagggg

SEQ ID NO: 181789 - DNA, 20 bp, synthetic construct
  source 1..20: mol_type = other DNA
agtggatttttgaggaaggg

SEQ ID NO: 181790 - DNA, 20 bp, synthetic construct
  source 1..20: mol_type = other DNA
aagtggatttttgaggaagg

SEQ ID NO: 181791 - DNA, 20 bp, synthetic construct
  source 1..20: mol_type = other DNA
aaagtggatttttgaggaag

SEQ ID NO: 181792 - DNA, 20 bp, synthetic construct
  source 1..20: mol_type = other DNA
taaagtggatttttgaggaa

SEQ ID NO: 181793 - DNA, 20 bp, synthetic construct
  source 1..20: mol_type = other DNA
gtaaagtggatttttgagga

SEQ ID NO: 181794 - DNA, 20 bp, synthetic construct
  source 1..20: mol_type = other DNA
agtaaagtggatttttgagg

SEQ ID NO: 181795 - DNA, 20 bp, synthetic construct
  source 1..20: mol_type = other DNA
aagtaaagtggatttttgag

SEQ ID NO: 181796 - DNA, 20 bp, synthetic construct
  source 1..20: mol_type = other DNA
aaagtaaagtggatttttga

SEQ ID NO: 181797 - DNA, 20 bp, synthetic construct
  source 1..20: mol_type = other DNA
gaaagtaaagtggatttttg

SEQ ID NO: 181798 - DNA, 20 bp, synthetic construct
  source 1..20: mol_type = other DNA
ggaaagtaaagtggattttt

SEQ ID NO: 181799 - DNA, 20 bp, synthetic construct
  source 1..20: mol_type = other DNA
gggaaagtaaagtggatttt

SEQ ID NO: 181800 - DNA, 20 bp, synthetic construct
  source 1..20: mol_type = other DNA
ggggaaagtaaagtggattt

SEQ ID NO: 181801 - DNA, 20 bp, synthetic construct
  source 1..20: mol_type = other DNA
tggggaaagtaaagtggatt

SEQ ID NO: 181802 - DNA, 20 bp, synthetic construct
  source 1..20: mol_type = other DNA
atggggaaagtaaagtggat

SEQ ID NO: 181803 - DNA, 20 bp, synthetic construct
  source 1..20: mol_type = other DNA
catggggaaagtaaagtgga

SEQ ID NO: 181804 - DNA, 20 bp, synthetic construct
  source 1..20: mol_type = other DNA
acatggggaaagtaaagtgg

SEQ ID NO: 181805 - DNA, 20 bp, synthetic construct
  source 1..20: mol_type = other DNA
gacatggggaaagtaaagtg

SEQ ID NO: 181806 - DNA, 20 bp, synthetic construct
  source 1..20: mol_type = other DNA
agacatggggaaagtaaagt

SEQ ID NO: 181807 - DNA, 20 bp, synthetic construct
  source 1..20: mol_type = other DNA
tagacatggggaaagtaaag

SEQ ID NO: 181808 - DNA, 20 bp, synthetic construct
  source 1..20: mol_type = other DNA
gtagacatggggaaagtaaa

SEQ ID NO: 181809 - DNA, 20 bp, synthetic construct
  source 1..20: mol_type = other DNA
tgtagacatggggaaagtaa

SEQ ID NO: 181810 - DNA, 20 bp, synthetic construct
  source 1..20: mol_type = other DNA
gtgtagacatggggaaagta

SEQ ID NO: 181811 - DNA, 20 bp, synthetic construct
  source 1..20: mol_type = other DNA
ggtgtagacatggggaaagt

SEQ ID NO: 181812 - DNA, 20 bp, synthetic construct
  source 1..20: mol_type = other DNA
tggtgtagacatggggaaag

SEQ ID NO: 181813 - DNA, 20 bp, synthetic construct
  source 1..20: mol_type = other DNA
ttggtgtagacatggggaaa

SEQ ID NO: 181814 - DNA, 20 bp, synthetic construct
  source 1..20: mol_type = other DNA
attggtgtagacatggggaa

SEQ ID NO: 181815 - DNA, 20 bp, synthetic construct
  source 1..20: mol_type = other DNA
cattggtgtagacatgggga

SEQ ID NO: 181816 - DNA, 20 bp, synthetic construct
  source 1..20: mol_type = other DNA
acattggtgtagacatgggg

SEQ ID NO: 181817 - DNA, 20 bp, synthetic construct
  source 1..20: mol_type = other DNA
cacattggtgtagacatggg

SEQ ID NO: 181818 - DNA, 20 bp, synthetic construct
  source 1..20: mol_type = other DNA
ccacattggtgtagacatgg

SEQ ID NO: 181819 - DNA, 20 bp, synthetic construct
  source 1..20: mol_type = other DNA
accacattggtgtagacatg

SEQ ID NO: 181820 - DNA, 20 bp, synthetic construct
  source 1..20: mol_type = other DNA
aaccacattggtgtagacat

SEQ ID NO: 181821 - DNA, 20 bp, synthetic construct
  source 1..20: mol_type = other DNA
gaaccacattggtgtagaca

SEQ ID NO: 181822 - DNA, 20 bp, synthetic construct
  source 1..20: mol_type = other DNA
tgaaccacattggtgtagac

SEQ ID NO: 181823 - DNA, 20 bp, synthetic construct
  source 1..20: mol_type = other DNA
gtgaaccacattggtgtaga

SEQ ID NO: 181824 - DNA, 20 bp, synthetic construct
  source 1..20: mol_type = other DNA
tgtgaaccacattggtgtag

SEQ ID NO: 181825 - DNA, 20 bp, synthetic construct
  source 1..20: mol_type = other DNA
gtgtgaaccacattggtgta

SEQ ID NO: 181826 - DNA, 20 bp, synthetic construct
  source 1..20: mol_type = other DNA
agtgtgaaccacattggtgt

SEQ ID NO: 181827 - DNA, 20 bp, synthetic construct
  source 1..20: mol_type = other DNA
gagtgtgaaccacattggtg

SEQ ID NO: 181828 - DNA, 20 bp, synthetic construct
  source 1..20: mol_type = other DNA
agagtgtgaaccacattggt

SEQ ID NO: 181829 - DNA, 20 bp, synthetic construct
  source 1..20: mol_type = other DNA
cagagtgtgaaccacattgg

SEQ ID NO: 181830 - DNA, 20 bp, synthetic construct
  source 1..20: mol_type = other DNA
ccagagtgtgaaccacattg

SEQ ID NO: 181831 - DNA, 20 bp, synthetic construct
  source 1..20: mol_type = other DNA
cccagagtgtgaaccacatt

SEQ ID NO: 181832 - DNA, 20 bp, synthetic construct
  source 1..20: mol_type = other DNA
tcccagagtgtgaaccacat

SEQ ID NO: 181833 - DNA, 20 bp, synthetic construct
  source 1..20: mol_type = other DNA
gtcccagagtgtgaaccaca

SEQ ID NO: 181834 - DNA, 20 bp, synthetic construct
  source 1..20: mol_type = other DNA
ggtcccagagtgtgaaccac

SEQ ID NO: 181835 - DNA, 20 bp, synthetic construct
  source 1..20: mol_type = other DNA
tggtcccagagtgtgaacca

SEQ ID NO: 181836 - DNA, 20 bp, synthetic construct
  source 1..20: mol_type = other DNA
ctggtcccagagtgtgaacc

SEQ ID NO: 181837 - DNA, 20 bp, synthetic construct
  source 1..20: mol_type = other DNA
cctggtcccagagtgtgaac

SEQ ID NO: 181838 - DNA, 20 bp, synthetic construct
  source 1..20: mol_type = other DNA
tcctggtcccagagtgtgaa

SEQ ID NO: 181839 - DNA, 20 bp, synthetic construct
  source 1..20: mol_type = other DNA
ttcctggtcccagagtgtga

SEQ ID NO: 181840 - DNA, 20 bp, synthetic construct
  source 1..20: mol_type = other DNA
tttcctggtcccagagtgtg

SEQ ID NO: 181841 - DNA, 20 bp, synthetic construct
  source 1..20: mol_type = other DNA
ttttcctggtcccagagtgt

SEQ ID NO: 181842 - DNA, 20 bp, synthetic construct
  source 1..20: mol_type = other DNA
cttttcctggtcccagagtg

SEQ ID NO: 181843 - DNA, 20 bp, synthetic construct
  source 1..20: mol_type = other DNA
ccttttcctggtcccagagt

SEQ ID NO: 181844 - DNA, 20 bp, synthetic construct
  source 1..20: mol_type = other DNA
cccttttcctggtcccagag

SEQ ID NO: 181845 - DNA, 20 bp, synthetic construct
  source 1..20: mol_type = other DNA
ccccttttcctggtcccaga

SEQ ID NO: 181846 - DNA, 20 bp, synthetic construct
  source 1..20: mol_type = other DNA
cccccttttcctggtcccag

SEQ ID NO: 181847 - DNA, 20 bp, synthetic construct
  source 1..20: mol_type = other DNA
tcccccttttcctggtccca

SEQ ID NO: 181848 - DNA, 20 bp, synthetic construct
  source 1..20: mol_type = other DNA
ctcccccttttcctggtccc

SEQ ID NO: 181849 - DNA, 20 bp, synthetic construct
  source 1..20: mol_type = other DNA
actcccccttttcctggtcc

SEQ ID NO: 181850 - DNA, 20 bp, synthetic construct
  source 1..20: mol_type = other DNA
cactcccccttttcctggtc

SEQ ID NO: 181851 - DNA, 20 bp, synthetic construct
  source 1..20: mol_type = other DNA
tcactcccccttttcctggt

SEQ ID NO: 181852 - DNA, 20 bp, synthetic construct
  source 1..20: mol_type = other DNA
atcactcccccttttcctgg

SEQ ID NO: 181853 - DNA, 20 bp, synthetic construct
  source 1..20: mol_type = other DNA
catcactcccccttttcctg

SEQ ID NO: 181854 - DNA, 20 bp, synthetic construct
  source 1..20: mol_type = other DNA
ccatcactcccccttttcct

SEQ ID NO: 181855 - DNA, 20 bp, synthetic construct
  source 1..20: mol_type = other DNA
cccatcactcccccttttcc

SEQ ID NO: 181856 - DNA, 20 bp, synthetic construct
  source 1..20: mol_type = other DNA
ccccatcactcccccttttc

SEQ ID NO: 181857 - DNA, 20 bp, synthetic construct
  source 1..20: mol_type = other DNA
tccccatcactccccctttt

SEQ ID NO: 181858 - DNA, 20 bp, synthetic construct
  source 1..20: mol_type = other DNA
ttccccatcactcccccttt

SEQ ID NO: 181859 - DNA, 20 bp, synthetic construct
  source 1..20: mol_type = other DNA
gttccccatcactccccctt

SEQ ID NO: 181860 - DNA, 20 bp, synthetic construct
  source 1..20: mol_type = other DNA
tgttccccatcactccccct

SEQ ID NO: 181861 - DNA, 20 bp, synthetic construct
  source 1..20: mol_type = other DNA
ctgttccccatcactccccc

SEQ ID NO: 181862 - DNA, 20 bp, synthetic construct
  source 1..20: mol_type = other DNA
tctgttccccatcactcccc

SEQ ID NO: 181863 - DNA, 20 bp, synthetic construct
  source 1..20: mol_type = other DNA
ctctgttccccatcactccc

SEQ ID NO: 181864 - DNA, 20 bp, synthetic construct
  source 1..20: mol_type = other DNA
tctctgttccccatcactcc

SEQ ID NO: 181865 - DNA, 20 bp, synthetic construct
  source 1..20: mol_type = other DNA
ttctctgttccccatcactc

SEQ ID NO: 181866 - DNA, 20 bp, synthetic construct
  source 1..20: mol_type = other DNA
cttctctgttccccatcact

SEQ ID NO: 181867 - DNA, 20 bp, synthetic construct
  source 1..20: mol_type = other DNA
ccttctctgttccccatcac

SEQ ID NO: 181868 - DNA, 20 bp, synthetic construct
  source 1..20: mol_type = other DNA
cccttctctgttccccatca

SEQ ID NO: 181869 - DNA, 20 bp, synthetic construct
  source 1..20: mol_type = other DNA
tcccttctctgttccccatc

SEQ ID NO: 181870 - DNA, 20 bp, synthetic construct
  source 1..20: mol_type = other DNA
ctcccttctctgttccccat

SEQ ID NO: 181871 - DNA, 20 bp, synthetic construct
  source 1..20: mol_type = other DNA
cctcccttctctgttcccca

SEQ ID NO: 181872 - DNA, 20 bp, synthetic construct
  source 1..20: mol_type = other DNA
tcctcccttctctgttcccc

SEQ ID NO: 181873 - DNA, 20 bp, synthetic construct
  source 1..20: mol_type = other DNA
ctcctcccttctctgttccc

SEQ ID NO: 181874 - DNA, 20 bp, synthetic construct
  source 1..20: mol_type = other DNA
gctcctcccttctctgttcc

SEQ ID NO: 181875 - DNA, 20 bp, synthetic construct
  source 1..20: mol_type = other DNA
agctcctcccttctctgttc

SEQ ID NO: 181876 - DNA, 20 bp, synthetic construct
  source 1..20: mol_type = other DNA
gagctcctcccttctctgtt

SEQ ID NO: 181877 - DNA, 20 bp, synthetic construct
  source 1..20: mol_type = other DNA
tgagctcctcccttctctgt

SEQ ID NO: 181878 - DNA, 20 bp, synthetic construct
  source 1..20: mol_type = other DNA
gtgagctcctcccttctctg

SEQ ID NO: 181879 - DNA, 20 bp, synthetic construct
  source 1..20: mol_type = other DNA
tgtgagctcctcccttctct

SEQ ID NO: 181880 - DNA, 20 bp, synthetic construct
  source 1..20: mol_type = other DNA
gtgtgagctcctcccttctc

SEQ ID NO: 181881 - DNA, 20 bp, synthetic construct
  source 1..20: mol_type = other DNA
tgtgtgagctcctcccttct

SEQ ID NO: 181882 - DNA, 20 bp, synthetic construct
  source 1..20: mol_type = other DNA
ctgtgtgagctcctcccttc

SEQ ID NO: 181883 - DNA, 20 bp, synthetic construct
  source 1..20: mol_type = other DNA
gctgtgtgagctcctccctt

SEQ ID NO: 181884 - DNA, 20 bp, synthetic construct
  source 1..20: mol_type = other DNA
agctgtgtgagctcctccct

SEQ ID NO: 181885 - DNA, 20 bp, synthetic construct
  source 1..20: mol_type = other DNA
cagctgtgtgagctcctccc

SEQ ID NO: 181886 - DNA, 20 bp, synthetic construct
  source 1..20: mol_type = other DNA
tcagctgtgtgagctcctcc

SEQ ID NO: 181887 - DNA, 20 bp, synthetic construct
  source 1..20: mol_type = other DNA
ctcagctgtgtgagctcctc

SEQ ID NO: 181888 - DNA, 20 bp, synthetic construct
  source 1..20: mol_type = other DNA
cctcagctgtgtgagctcct

SEQ ID NO: 181889 - DNA, 20 bp, synthetic construct
  source 1..20: mol_type = other DNA
gcctcagctgtgtgagctcc

SEQ ID NO: 181890 - DNA, 20 bp, synthetic construct
  source 1..20: mol_type = other DNA
agcctcagctgtgtgagctc

SEQ ID NO: 181891 - DNA, 20 bp, synthetic construct
  source 1..20: mol_type = other DNA
cagcctcagctgtgtgagct

SEQ ID NO: 181892 - DNA, 20 bp, synthetic construct
  source 1..20: mol_type = other DNA
ccagcctcagctgtgtgagc

SEQ ID NO: 181893 - DNA, 20 bp, synthetic construct
  source 1..20: mol_type = other DNA
cccagcctcagctgtgtgag

SEQ ID NO: 181894 - DNA, 20 bp, synthetic construct
  source 1..20: mol_type = other DNA
ccccagcctcagctgtgtga

SEQ ID NO: 181895 - DNA, 20 bp, synthetic construct
  source 1..20: mol_type = other DNA
accccagcctcagctgtgtg

SEQ ID NO: 181896 - DNA, 20 bp, synthetic construct
  source 1..20: mol_type = other DNA
aaccccagcctcagctgtgt

SEQ ID NO: 181897 - DNA, 20 bp, synthetic construct
  source 1..20: mol_type = other DNA
taaccccagcctcagctgtg

SEQ ID NO: 181898 - DNA, 20 bp, synthetic construct
  source 1..20: mol_type = other DNA
ataaccccagcctcagctgt

SEQ ID NO: 181899 - DNA, 20 bp, synthetic construct
  source 1..20: mol_type = other DNA
cataaccccagcctcagctg

SEQ ID NO: 181900 - DNA, 20 bp, synthetic construct
  source 1..20: mol_type = other DNA
gcataaccccagcctcagct

SEQ ID NO: 181901 - DNA, 20 bp, synthetic construct
  source 1..20: mol_type = other DNA
tgcataaccccagcctcagc

SEQ ID NO: 181902 - DNA, 20 bp, synthetic construct
  source 1..20: mol_type = other DNA
atgcataaccccagcctcag

SEQ ID NO: 181903 - DNA, 20 bp, synthetic construct
  source 1..20: mol_type = other DNA
tatgcataaccccagcctca

SEQ ID NO: 181904 - DNA, 20 bp, synthetic construct
  source 1..20: mol_type = other DNA
atatgcataaccccagcctc

SEQ ID NO: 181905 - DNA, 20 bp, synthetic construct
  source 1..20: mol_type = other DNA
gatatgcataaccccagcct

SEQ ID NO: 181906 - DNA, 20 bp, synthetic construct
  source 1..20: mol_type = other DNA
cgatatgcataaccccagcc

SEQ ID NO: 181907 - DNA, 20 bp, synthetic construct
  source 1..20: mol_type = other DNA
tcgatatgcataaccccagc

SEQ ID NO: 181908 - DNA, 20 bp, synthetic construct
  source 1..20: mol_type = other DNA
ttcgatatgcataaccccag

SEQ ID NO: 181909 - DNA, 20 bp, synthetic construct
  source 1..20: mol_type = other DNA
attcgatatgcataacccca

SEQ ID NO: 181910 - DNA, 20 bp, synthetic construct
  source 1..20: mol_type = other DNA
aattcgatatgcataacccc

SEQ ID NO: 181911 - DNA, 20 bp, synthetic construct
  source 1..20: mol_type = other DNA
taattcgatatgcataaccc

SEQ ID NO: 181912 - DNA, 20 bp, synthetic construct
  source 1..20: mol_type = other DNA
gtaattcgatatgcataacc

SEQ ID NO: 181913 - DNA, 20 bp, synthetic construct
  source 1..20: mol_type = other DNA
agtaattcgatatgcataac

SEQ ID NO: 181914 - DNA, 20 bp, synthetic construct
  source 1..20: mol_type = other DNA
aagtaattcgatatgcataa

SEQ ID NO: 181915 - DNA, 20 bp, synthetic construct
  source 1..20: mol_type = other DNA
taagtaattcgatatgcata

SEQ ID NO: 181916 - DNA, 20 bp, synthetic construct
  source 1..20: mol_type = other DNA
ctaagtaattcgatatgcat

SEQ ID NO: 181917 - DNA, 20 bp, synthetic construct
  source 1..20: mol_type = other DNA
tctaagtaattcgatatgca

SEQ ID NO: 181918 - DNA, 20 bp, synthetic construct
  source 1..20: mol_type = other DNA
ttctaagtaattcgatatgc

SEQ ID NO: 181919 - DNA, 20 bp, synthetic construct
  source 1..20: mol_type = other DNA
attctaagtaattcgatatg

SEQ ID NO: 181920 - DNA, 20 bp, synthetic construct
  source 1..20: mol_type = other DNA
aattctaagtaattcgatat

SEQ ID NO: 181921 - DNA, 20 bp, synthetic construct
  source 1..20: mol_type = other DNA
aaattctaagtaattcgata

SEQ ID NO: 181922 - DNA, 20 bp, synthetic construct
  source 1..20: mol_type = other DNA
caaattctaagtaattcgat

SEQ ID NO: 181923 - DNA, 20 bp, synthetic construct
  source 1..20: mol_type = other DNA
gcaaattctaagtaattcga

SEQ ID NO: 181924 - DNA, 20 bp, synthetic construct
  source 1..20: mol_type = other DNA
tgcaaattctaagtaattcg

SEQ ID NO: 181925 - DNA, 20 bp, synthetic construct
  source 1..20: mol_type = other DNA
ttgcaaattctaagtaattc

SEQ ID NO: 181926 - DNA, 20 bp, synthetic construct
  source 1..20: mol_type = other DNA
gttgcaaattctaagtaatt

SEQ ID NO: 181927 - DNA, 20 bp, synthetic construct
  source 1..20: mol_type = other DNA
ggttgcaaattctaagtaat

SEQ ID NO: 181928 - DNA, 20 bp, synthetic construct
  source 1..20: mol_type = other DNA
aggttgcaaattctaagtaa

SEQ ID NO: 181929 - DNA, 20 bp, synthetic construct
  source 1..20: mol_type = other DNA
gaggttgcaaattctaagta

SEQ ID NO: 181930 - DNA, 20 bp, synthetic construct
  source 1..20: mol_type = other DNA
tgaggttgcaaattctaagt

SEQ ID NO: 181931 - DNA, 20 bp, synthetic construct
  source 1..20: mol_type = other DNA
gtgaggttgcaaattctaag

SEQ ID NO: 181932 - DNA, 20 bp, synthetic construct
  source 1..20: mol_type = other DNA
tgtgaggttgcaaattctaa

SEQ ID NO: 181933 - DNA, 20 bp, synthetic construct
  source 1..20: mol_type = other DNA
ctgtgaggttgcaaattcta
